United States Patent Application Publication US 2011/0183924 A1 - sequence listing, part 73

SEQ ID NO: 261592 - DNA, 4731 bp, Homo sapiens
  misc_feature (3311)..(3311): n is a, c, g, or t
  misc_feature (3361)..(3361): n is a, c, g, or t
  misc_feature (4003)..(4003): n is a, c, g, or t
  misc_feature (4085)..(4085): n is a, c, g, or t
attggagatgctcgggggcaggctgccgcgttgtgtcctgcttttctgcggccagaccaagccgtctggagctgctggtcaggttttcttgctgacctcacctgaccacagtggcctgggtggactctacagggaaatgttgttttctccctgggagcagtagcagcagtcctggctcccctggactgagaactcctcatcagccccaggaagcccggaccccctttcagggatctggaaccggtgtgcctgtggccccaggtctgctcccaggcgtgggctgaagtcctgacttctgtcgctgggggcaaggagtgggagagcccagctgctgcctgggctttggcagacagcaggctgatggtgctggcttccccgagactgcttctcctgcctgctgtctgatttccctgcatggtgcccgcagctgagctgctacgggtcttctcccctgtctgcctcccggagctaggactgcagaggggcctatcatggtgcttgcaggccccctggctgtctcgctgttgctgcccagcctcacactgctggtgtcccacctctccagctcccaggatgtctccagtgagcccagcagtgagcagcagctgtgcgcccttagcaagcaccccaccgtggcctttgaagacctgcagccgtgggtctctaacttcacctaccctggagcccgggatttctcccagctggctttggacccctccgggaaccagctcatcgtgggagccaggaactacctcttcagactcagccttgccaatgtctctcttcttcaggccacagagtgggcctccagtgaggacacgcgccgctcctgccaaagcaaagggaagactgaggaggagtgtcagaactacgtgcgagtcctgatcgtcgccggccggaaggtgttcatgtgtggaaccaatgccttttcccccatgtgcaccagcagacaggtggggaacctcagccggactactgagaagatcaatggtgtggcccgctgcccctatgacccacgccacaactccacagctgtcatctcctcccagggggagctctatgcagccacggtcatcgacttctcaggtcgggaccctgccatctaccgcagcctgggcagtgggccaccgcttcgcactgcccaatataactccaagtggcttaatgagccaaacttcgtggcagcctatgatattgggctgtttgcatacttcttcctgcgggagaacgcagtggagcacgactgtggacgcaccgtgtactctcgcgtggcccgcgtgtgcaagaatgacgtggggggccgattcctgctggaggacacatggaccacattcatgaaggcccggctcaactgctcccgcccgggcgaggtccccttctactataacgagctgcagagtgccttccacttgccagagcaggacctcatctatggagttttcacaaccaacgtaaacagcatcgcggcttctgctgtctgcgccttcaacctcagtgctatctcccaggctttcaatggcccatttcgctaccaggagaaccccagggctgcctggctccccatagccaaccccatccccaatttccagtgtggcaccctgcctgagaccggtcccaacgagaacctgacggagcgcagcctgcaggacgcgcagcgcctcttcctgatgagcgaggccgtgcagccggtgacacccgagccctgtgtcacccaggacagcgtgcgcttctcacacctcgtggtggacctggtgcaggctaaagacacgctctaccatgtactctacattggcaccgagtcgggcaccatcctgaaggcgctgtccacggcgagccgcagcctccacggctgctacctggaggagctgcacgtgctgccccccgggcgccgcgagcccctgcgcagcctgcgcatcctgcacagcgcccgcgcgctcttcgtggggctgagagacggcgtcctgcgggtcccactggagaggtgcgccgcctaccgcagccagggggcatgcctgggggcccgggacccgtactgtggctgggacgggaagcagcaacgttgcagcacactcgaggacagctccaacatgagcctctggacccagaacatcaccgcctgtcctgtgcggaatgtgacacgggatgggggcttcggcccatggtcaccatggcaaccatgtgagcacttggatggggacaactcaggctcttgcctgtgtcgagctcgatcctgtgattcccctcgaccccgctgtgggggccttgactgcctggggccagccatccacatcgccaactgctccaggaatggggcgtggaccccgtggtcatcgtgggcgctgtgcagcacgtcctgtggcatcggcttccaggtccgccagcgaagttgcagcaaccctgctccccgccacgggggccgcatctgcgtgggcaagagccgggaggaacggttctgtaatgagaacacgccttgcccggtgcccatcttctgggcttcctggggctcctggagcaagtgcagcagcaactgtggagggggcatgcagtcgcggcgtcgggcctgcgagaacggcaactcctgcctgggctgcggcgtggagttcaagacgtgcaaccccgagggctgccccgaagtgcggcgcaacaccccctggacgccgtggctgcccgtgaacgtgacgcagggcggggcacggcaggagcagcggttccgcttcacctgccgcgcgccccttgcagacccgcacggcctgcagttcggcaggagaaggaccgagacgaggacctgtcccgcggacggctccggctcctgcgacaccgacgccctggtggaggtcctcctgcgcagcgggagcacctccccgcacacggtgagcgggggctgggccgcctggggcccgtggtcgtcctgctcccgggactgcgagctgggcttccgcgtccgcaagagaacgtgcactaacccggagccccgcaacgggggcctgccctgcgtgggcgatgctgccgagtaccaggactgcaacccccaggcttgcccagttcggggtgcttggtcctgctggacctcatggtctccatgctcagcttcctgtggtgggggtcactatcaacgcacccgttcctgcaccagccccgcaccctccccaggtgaggacatctgtctcgggctgcacacggaggaggcactatgtgccacacaggcctgcccagaaggctggtcgccctggtctgagtggagtaagtgcactgacgacggagcccagagccgaagccggcactgtgaggagctcctcccagggtccagcgcntgtgctggaaacagcagccagagccgcccctgcccctacagcgagattcncgtcatcctgccagcctccagcatggaggaggccaccgactgtgcagggttcaatctcatccacttggtggccacgggcatctcctgcttcttgggctctgggctcctgaccctagcagtgtacctgtcttgccagcactgccagcgtcagtcccaggagtccacactggtccatcctgccacccccaaccatttgcactacaagggcggaggcaccccgaagaatgaaaagtacacacccatggaattcaagaccctgaacaagaataacttgatccctgatgacagagccaacttctacccattgcagcagaccaatgtgtacacgactacttactacccaagccccctgaacaaacacagcttccggcccgaggcctcacctggacaacggtgcttccccaacagctgataccgccgtcctggggacttgggcttcttgccttcataaggcacagagcagatggagatgggacagtggagccagtttggttttctccctctgcactaggccaagaacttgctgccttgcctgtggggggtcccatccggcttcagagagctctggctggcattgaccatgggggaaagggctggtttcaggctgacatatggccgcaggtccagttcagcccaggtctntcatggttatcttccaacccactgtcacgctgacactatgctgccatgcctgggctgtggacctactgggcatttgaggaantggagaatggagatggcaagagggcaggcttttaagtttgggttggagacaacttcctgtggcccccacaagctgagtctggccttctccagctggccccaaaaaaggcctttgctacatcctgattatctctgaaagtaatcaatcaagtggctccagtagctctggattttctgccagggctgggccattgtggtgctgccccagtatgacatgggaccaaggccagcgcaggttatccacctctgcctggaagtctatactctacccagggcatccctctggtcagaggcagtgagtactgggaactggaggctgacctgtgcttagaagtcctttaatctgggctggtacaggcctcagccttgccctcaatgcacgaaaggtggcccaggagagaggatcaatgccataggaggcagaagtctggcctctgtgcctctatggagactatcttccagttgctgctcaacagagttgttggctgagacctgcttgggagtctctgctggcccttcatctgttcaggaacacacacacacacacactcacacacgcacacacaatcacaatttgctacagcaacaaaaaagacattgggctgtggcattattaattaaagatgatatccagtcaaaaaaaaact

SEQ ID NO: 261593 - DNA, 4703 bp, Homo sapiens
  misc_feature (3283)..(3283): n is a, c, g, or t
  misc_feature (3333)..(3333): n is a, c, g, or t
  misc_feature (3975)..(3975): n is a, c, g, or t
  misc_feature (4057)..(4057): n is a, c, g, or t
gcggccgccccattcccagaccggccgccagcccatctggttagctcccgccgctccgcgccgcccgggagtcgggagccgcggggaaccgggcacctgcacccgcctctgggagccagcttgggtccgggttgcactgggccctgccagggctgtggtcggcgcatctgggctgcagcggcgatggggacccgggacccaggcctggagaaggagacggacgagtgaggctgagggacggagggacagagtgagtggttccagctggtgcctggcctgtgtctcttggatgccctgtggcttcagtccgtctcctgttgcccaccacctcgtccctgggccgcctgataccccagcccaacagctaaggtgtggatggacagtagggggctggcttctctcactggtcaggggtcttctcccctgtctgcctcccggagctaggactgcagaggggcctatcatggtgcttgcaggccccctggctgtctcgctgttgctgcccagcctcacactgctggtgtcccacctctccagctcccaggatgtctccagtgagcccagcagtgagcagcagctgtgcgcccttagcaagcaccccaccgtggcctttgaagacctgcagccgtgggtctctaacttcacctaccctggagcccgggatttctcccagctggctttggacccctccgggaaccagctcatcgtgggagccaggaactacctcttcagactcagccttgccaatgtctctcttcttcaggccacagagtgggcctccagtgaggacacgcgccgctcctgccaaagcaaagggaagactgaggaggagtgtcagaactacgtgcgagtcctgatcgtcgccggccggaaggtgttcatgtgtggaaccaatgccttttcccccatgtgcaccagcagacaggtggggaacctcagccggactactgagaagatcaatggtgtggcccgctgcccctatgacccacgccacaactccacagctgtcatctcctcccagggggagctctatgcagccacggtcatcgacttctcaggtcgggaccctgccatctaccgcagcctgggcagtgggccaccgcttcgcactgcccaatataactccaagtggcttaatgagccaaacttcgtggcagcctatgatattgggctgtttgcatacttcttcctgcgggagaacgcagtggagcacgactgtggacgcaccgtgtactctcgcgtggcccgcgtgtgcaagaatgacgtggggggccgattcctgctggaggacacatggaccacattcatgaaggcccggctcaactgctcccgcccgggcgaggtccccttctactataacgagctgcagagtgccttccacttgccagagcaggacctcatctatggagttttcacaaccaacgtaaacagcatcgcggcttctgctgtctgcgccttcaacctcagtgctatctcccaggctttcaatggcccatttcgctaccaggagaaccccagggctgcctggctccccatagccaaccccatccccaatttccagtgtggcaccctgcctgagaccggtcccaacgagaacctgacggagcgcagcctgcaggacgcgcagcgcctcttcctgatgagcgaggccgtgcagccggtgacacccgagccctgtgtcacccaggacagcgtgcgcttctcacacctcgtggtggacctggtgcaggctaaagacacgctctaccatgtactctacattggcaccgagtcgggcaccatcctgaaggcgctgtccacggcgagccgcagcctccacggctgctacctggaggagctgcacgtgctgccccccgggcgccgcgagcccctgcgcagcctgcgcatcctgcacagcgcccgcgcgctcttcgtggggctgagagacggcgtcctgcgggtcccactggagaggtgcgccgcctaccgcagccagggggcatgcctgggggcccgggacccgtactgtggctgggacgggaagcagcaacgttgcagcacactcgaggacagctccaacatgagcctctggacccagaacatcaccgcctgtcctgtgcggaatgtgacacgggatgggggcttcggcccatggtcaccatggcaaccatgtgagcacttggatggggacaactcaggctcttgcctgtgtcgagctcgatcctgtgattcccctcgaccccgctgtgggggccttgactgcctggggccagccatccacatcgccaactgctccaggaatggggcgtggaccccgtggtcatcgtgggcgctgtgcagcacgtcctgtggcatcggcttccaggtccgccagcgaagttgcagcaaccctgctccccgccacgggggccgcatctgcgtgggcaagagccgggaggaacggttctgtaatgagaacacgccttgcccggtgcccatcttctgggcttcctggggctcctggagcaagtgcagcagcaactgtggagggggcatgcagtcgcggcgtcgggcctgcgagaacggcaactcctgcctgggctgcggcgtggagttcaagacgtgcaaccccgagggctgccccgaagtgcggcgcaacaccccctggacgccgtggctgcccgtgaacgtgacgcagggcggggcacggcaggagcagcggttccgcttcacctgccgcgcgccccttgcagacccgcacggcctgcagttcggcaggagaaggaccgagacgaggacctgtcccgcggacggctccggctcctgcgacaccgacgccctggtggaggtcctcctgcgcagcgggagcacctccccgcacacggtgagcgggggctgggccgcctggggcccgtggtcgtcctgctcccgggactgcgagctgggcttccgcgtccgcaagagaacgtgcactaacccggagccccgcaacgggggcctgccctgcgtgggcgatgctgccgagtaccaggactgcaacccccaggcttgcccagttcggggtgcttggtcctgctggacctcatggtctccatgctcagcttcctgtggtgggggtcactatcaacgcacccgttcctgcaccagccccgcaccctccccaggtgaggacatctgtctcgggctgcacacggaggaggcactatgtgccacacaggcctgcccagaaggctggtcgccctggtctgagtggagtaagtgcactgacgacggagcccagagccgaagccggcactgtgaggagctcctcccagggtccagcgcntgtgctggaaacagcagccagagccgcccctgcccctacagcgagattcncgtcatcctgccagcctccagcatggaggaggccaccgactgtgcagggttcaatctcatccacttggtggccacgggcatctcctgcttcttgggctctgggctcctgaccctagcagtgtacctgtcttgccagcactgccagcgtcagtcccaggagtccacactggtccatcctgccacccccaaccatttgcactacaagggcggaggcaccccgaagaatgaaaagtacacacccatggaattcaagaccctgaacaagaataacttgatccctgatgacagagccaacttctacccattgcagcagaccaatgtgtacacgactacttactacccaagccccctgaacaaacacagcttccggcccgaggcctcacctggacaacggtgcttccccaacagctgataccgccgtcctggggacttgggcttcttgccttcataaggcacagagcagatggagatgggacagtggagccagtttggttttctccctctgcactaggccaagaacttgctgccttgcctgtggggggtcccatccggcttcagagagctctggctggcattgaccatgggggaaagggctggtttcaggctgacatatggccgcaggtccagttcagcccaggtctntcatggttatcttccaacccactgtcacgctgacactatgctgccatgcctgggctgtggacctactgggcatttgaggaantggagaatggagatggcaagagggcaggcttttaagtttgggttggagacaacttcctgtggcccccacaagctgagtctggccttctccagctggccccaaaaaaggcctttgctacatcctgattatctctgaaagtaatcaatcaagtggctccagtagctctggattttctgccagggctgggccattgtggtgctgccccagtatgacatgggaccaaggccagcgcaggttatccacctctgcctggaagtctatactctacccagggcatccctctggtcagaggcagtgagtactgggaactggaggctgacctgtgcttagaagtcctttaatctgggctggtacaggcctcagccttgccctcaatgcacgaaaggtggcccaggagagaggatcaatgccataggaggcagaagtctggcctctgtgcctctatggagactatcttccagttgctgctcaacagagttgttggctgagacctgcttgggagtctctgctggcccttcatctgttcaggaacacacacacacacacactcacacacgcacacacaatcacaatttgctacagcaacaaaaaagacattgggctgtggcattattaattaaagatgatatccagtcaaaaaaaaact

SEQ ID NO: 261594 - DNA, 4405 bp, Homo sapiens
  misc_feature (2985)..(2985): n is a, c, g, or t
  misc_feature (3035)..(3035): n is a, c, g, or t
  misc_feature (3677)..(3677): n is a, c, g, or t
  misc_feature (3759)..(3759): n is a, c, g, or t
gcggccgccccattcccagaccggccgccagcccatctggttagctcccgccgctccgcgccgcccgggagtcgggagccgcggggaaccgggcacctgcacccgcctctgggaggtcttctcccctgtctgcctcccggagctaggactgcagaggggcctatcatggtgcttgcaggccccctggctgtctcgctgttgctgcccagcctcacactgctggtgtcccacctctccagctcccaggatgtctccagtgagcccagcagtgagcagcagctgtgcgcccttagcaagcaccccaccgtggcctttgaagacctgcagccgtgggtctctaacttcacctaccctggagcccgggatttctcccagctggctttggacccctccgggaaccagctcatcgtgggagccaggaactacctcttcagactcagccttgccaatgtctctcttcttcaggccacagagtgggcctccagtgaggacacgcgccgctcctgccaaagcaaagggaagactgaggaggagtgtcagaactacgtgcgagtcctgatcgtcgccggccggaaggtgttcatgtgtggaaccaatgccttttcccccatgtgcaccagcagacaggtggggaacctcagccggactactgagaagatcaatggtgtggcccgctgcccctatgacccacgccacaactccacagctgtcatctcctcccagggggagctctatgcagccacggtcatcgacttctcaggtcgggaccctgccatctaccgcagcctgggcagtgggccaccgcttcgcactgcccaatataactccaagtggcttaatgagccaaacttcgtggcagcctatgatattgggctgtttgcatacttcttcctgcgggagaacgcagtggagcacgactgtggacgcaccgtgtactctcgcgtggcccgcgtgtgcaagaatgacgtggggggccgattcctgctggaggacacatggaccacattcatgaaggcccggctcaactgctcccgcccgggcgaggtccccttctactataacgagctgcagagtgccttccacttgccagagcaggacctcatctatggagttttcacaaccaacgtaaacagcatcgcggcttctgctgtctgcgccttcaacctcagtgctatctcccaggctttcaatggcccatttcgctaccaggagaaccccagggctgcctggctccccatagccaaccccatccccaatttccagtgtggcaccctgcctgagaccggtcccaacgagaacctgacggagcgcagcctgcaggacgcgcagcgcctcttcctgatgagcgaggccgtgcagccggtgacacccgagccctgtgtcacccaggacagcgtgcgcttctcacacctcgtggtggacctggtgcaggctaaagacacgctctaccatgtactctacattggcaccgagtcgggcaccatcctgaaggcgctgtccacggcgagccgcagcctccacggctgctacctggaggagctgcacgtgctgccccccgggcgccgcgagcccctgcgcagcctgcgcatcctgcacagcgcccgcgcgctcttcgtggggctgagagacggcgtcctgcgggtcccactggagaggtgcgccgcctaccgcagccagggggcatgcctgggggcccgggacccgtactgtggctgggacgggaagcagcaacgttgcagcacactcgaggacagctccaacatgagcctctggacccagaacatcaccgcctgtcctgtgcggaatgtgacacgggatgggggcttcggcccatggtcaccatggcaaccatgtgagcacttggatggggacaactcaggctcttgcctgtgtcgagctcgatcctgtgattcccctcgaccccgctgtgggggccttgactgcctggggccagccatccacatcgccaactgctccaggaatggggcgtggaccccgtggtcatcgtgggcgctgtgcagcacgtcctgtggcatcggcttccaggtccgccagcgaagttgcagcaaccctgctccccgccacgggggccgcatctgcgtgggcaagagccgggaggaacggttctgtaatgagaacacgccttgcccggtgcccatcttctgggcttcctggggctcctggagcaagtgcagcagcaactgtggagggggcatgcagtcgcggcgtcgggcctgcgagaacggcaactcctgcctgggctgcggcgtggagttcaagacgtgcaaccccgagggctgccccgaagtgcggcgcaacaccccctggacgccgtggctgcccgtgaacgtgacgcagggcggggcacggcaggagcagcggttccgcttcacctgccgcgcgccccttgcagacccgcacggcctgcagttcggcaggagaaggaccgagacgaggacctgtcccgcggacggctccggctcctgcgacaccgacgccctggtggaggtcctcctgcgcagcgggagcacctccccgcacacggtgagcgggggctgggccgcctggggcccgtggtcgtcctgctcccgggactgcgagctgggcttccgcgtccgcaagagaacgtgcactaacccggagccccgcaacgggggcctgccctgcgtgggcgatgctgccgagtaccaggactgcaacccccaggcttgcccagttcggggtgcttggtcctgctggacctcatggtctccatgctcagcttcctgtggtgggggtcactatcaacgcacccgttcctgcaccagccccgcaccctccccaggtgaggacatctgtctcgggctgcacacggaggaggcactatgtgccacacaggcctgcccagaaggctggtcgccctggtctgagtggagtaagtgcactgacgacggagcccagagccgaagccggcactgtgaggagctcctcccagggtccagcgcntgtgctggaaacagcagccagagccgcccctgcccctacagcgagattcncgtcatcctgccagcctccagcatggaggaggccaccgactgtgcagggttcaatctcatccacttggtggccacgggcatctcctgcttcttgggctctgggctcctgaccctagcagtgtacctgtcttgccagcactgccagcgtcagtcccaggagtccacactggtccatcctgccacccccaaccatttgcactacaagggcggaggcaccccgaagaatgaaaagtacacacccatggaattcaagaccctgaacaagaataacttgatccctgatgacagagccaacttctacccattgcagcagaccaatgtgtacacgactacttactacccaagccccctgaacaaacacagcttccggcccgaggcctcacctggacaacggtgcttccccaacagctgataccgccgtcctggggacttgggcttcttgccttcataaggcacagagcagatggagatgggacagtggagccagtttggttttctccctctgcactaggccaagaacttgctgccttgcctgtggggggtcccatccggcttcagagagctctggctggcattgaccatgggggaaagggctggtttcaggctgacatatggccgcaggtccagttcagcccaggtctntcatggttatcttccaacccactgtcacgctgacactatgctgccatgcctgggctgtggacctactgggcatttgaggaantggagaatggagatggcaagagggcaggcttttaagtttgggttggagacaacttcctgtggcccccacaagctgagtctggccttctccagctggccccaaaaaaggcctttgctacatcctgattatctctgaaagtaatcaatcaagtggctccagtagctctggattttctgccagggctgggccattgtggtgctgccccagtatgacatgggaccaaggccagcgcaggttatccacctctgcctggaagtctatactctacccagggcatccctctggtcagaggcagtgagtactgggaactggaggctgacctgtgcttagaagtcctttaatctgggctggtacaggcctcagccttgccctcaatgcacgaaaggtggcccaggagagaggatcaatgccataggaggcagaagtctggcctctgtgcctctatggagactatcttccagttgctgctcaacagagttgttggctgagacctgcttgggagtctctgctggcccttcatctgttcaggaacacacacacacacacactcacacacgcacacacaatcacaatttgctacagcaacaaaaaagacattgggctgtggcattattaattaaagatgatatccagtcaaaaaaaaact

SEQ ID NO: 261595 - DNA, 3938 bp, Homo sapiens
  misc_feature (3147)..(3147): n is a, c, g, or t
  misc_feature (3197)..(3197): n is a, c, g, or t
gcggccgccccattcccagaccggccgccagcccatctggttagctcccgccgctccgcgccgcccgggagtcgggagccgcggggaaccgggcacctgcacccgcctctgggagtgagtggttccagctggtgcctggcctgtgtctcttggatgccctgtggcttcagtccgtctcctgttgcccaccacctcgtccctgggccgcctgataccccagcccaacagctaaggtgtggatggacagtagggggctggcttctctcactggtcaggggtcttctcccctgtctgcctcccggagctaggactgcagaggggcctatcatggtgcttgcaggccccctggctgtctcgctgttgctgcccagcctcacactgctggtgtcccacctctccagctcccaggatgtctccagtgagcccagcagtgagcagcagctgtgcgcccttagcaagcaccccaccgtggcctttgaagacctgcagccgtgggtctctaacttcacctaccctggagcccgggatttctcccagctggctttggacccctccgggaaccagctcatcgtgggagccaggaactacctcttcagactcagccttgccaatgtctctcttcttcaggccacagagtgggcctccagtgaggacacgcgccgctcctgccaaagcaaagggaagactgaggaggagtgtcagaactacgtgcgagtcctgatcgtcgccggccggaaggtgttcatgtgtggaaccaatgccttttcccccatgtgcaccagcagacaggtggggaacctcagccggactactgagaagatcaatggtgtggcccgctgcccctatgacccacgccacaactccacagctgtcatctcctcccagggggagctctatgcagccacggtcatcgacttctcaggtcgggaccctgccatctaccgcagcctgggcagtgggccaccgcttcgcactgcccaatataactccaagtggcttaatgagccaaacttcgtggcagcctatgatattgggctgtttgcatacttcttcctgcgggagaacgcagtggagcacgactgtggacgcaccgtgtactctcgcgtggcccgcgtgtgcaagaatgacgtggggggccgattcctgctggaggacacatggaccacattcatgaaggcccggctcaactgctcccgcccgggcgaggtccccttctactataacgagctgcagagtgccttccacttgccagagcaggacctcatctatggagttttcacaaccaacgtaaacagcatcgcggcttctgctgtctgcgccttcaacctcagtgctatctcccaggctttcaatggcccatttcgctaccaggagaaccccagggctgcctggctccccatagccaaccccatccccaatttccagtgtggcaccctgcctgagaccggtcccaacgagaacctgacggagcgcagcctgcaggacgcgcagcgcctcttcctgatgagcgaggccgtgcagccggtgacacccgagccctgtgtcacccaggacagcgtgcgcttctcacacctcgtggtggacctggtgcaggctaaagacacgctctaccatgtactctacattggcaccgagtcgggcaccatcctgaaggcgctgtccacggcgagccgcagcctccacggctgctacctggaggagctgcacgtgctgccccccgggcgccgcgagcccctgcgcagcctgcgcatcctgcacagcgcccgcgcgctcttcgtggggctgagagacggcgtcctgcgggtcccactggagaggtgcgccgcctaccgcagccagggggcatgcctgggggcccgggacccgtactgtggctgggacgggaagcagcaacgttgcagcacactcgaggacagctccaacatgagcctctggacccagaacatcaccgcctgtcctgtgcggaatgtgacacgggatgggggcttcggcccatggtcaccatggcaaccatgtgagcacttggatggggacaactcaggctcttgcctgtgtcgagctcgatcctgtgattcccctcgaccccgctgtgggggccttgactgcctggggccagccatccacatcgccaactgctccaggaatggggcgtggaccccgtggtcatcgtgggcgctgtgcagcacgtcctgtggcatcggcttccaggtccgccagcgaagttgcagcaaccctgctccccgccacgggggccgcatctgcgtgggcaagagccgggaggaacggttctgtaatgagaacacgccttgcccggtgcccatcttctgggcttcctggggctcctggagcaagtgcagcagcaactgtggagggggcatgcagtcgcggcgtcgggcctgcgagaacggcaactcctgcctgggctgcggcgtggagttcaagacgtgcaaccccgagggctgccccgaagtgcggcgcaacaccccctggacgccgtggctgcccgtgaacgtgacgcagggcggggcacggcaggagcagcggttccgcttcacctgccgcgcgccccttgcagacccgcacggcctgcagttcggcaggagaaggaccgagacgaggacctgtcccgcggacggctccggctcctgcgacaccgacgccctggtggaggtcctcctgcgcagcgggagcacctccccgcacacggtgagcgggggctgggccgcctggggcccgtggtcgtcctgctcccgggactgcgagctgggcttccgcgtccgcaagagaacgtgcactaacccggagccccgcaacgggggcctgccctgcgtgggcgatgctgccgagtaccaggactgcaacccccaggcttgcccagttcggggtgcttggtcctgctggacctcatggtctccatgctcagcttcctgtggtgggggtcactatcaacgcacccgttcctgcaccagccccgcaccctccccaggtgaggacatctgtctcgggctgcacacggaggaggcactatgtgccacacaggcctgcccagaaggctggtcgccctggtctgagtggagtaagtgcactgacgacggagcccagagccgaagccggcactgtgaggagctcctcccagggtccagcgcntgtgctggaaacagcagccagagccgcccctgcccctacagcgagattcncgtcatcctgccagcctccagcatggaggaggccaccgactgtgcagggttcaatctcatccacttggtggccacgggcatctcctgcttcttgggctctgggctcctgaccctagcagtgtacctgtcttgccagcactgccagcgtcagtcccaggagtccacactggtccatcctgccacccccaaccatttgcactacaagggcggaggcaccccgaagaatgaaaagtacacacccatggaattcaagaccctgaacaagaataacttgatccctgatgacagagccaacttctacccattgcagcagaccaatgccagcgcaggttatccacctctgcctggaagtctatactctacccagggcatccctctggtcagaggcagtgagtactgggaactggaggctgacctgtgcttagaagtcctttaatctgggctggtacaggcctcagccttgccctcaatgcacgaaaggtggcccaggagagaggatcaatgccataggaggcagaagtctggcctctgtgcctctatggagactatcttccagttgctgctcaacagagttgttggctgagacctgcttgggagtctctgctggcccttcatctgttcaggaacacacacacacacacactcacacacgcacacacaatcacaatttgctacagcaacaaaaaagacattgggctgtggcattattaattaaagatgatatccagtcaaaaaaaaact

SEQ ID NO: 261596 - DNA, 514 bp, Homo sapiens
cagtcctaatgctttatagttaaatgtcatatgcagatatgttcaggctctaacatataaagttcctaacttgacaggaaactactgaagattgtgtacagcttaaaaaaaaaaatagggtaactatagtcttgatttttatgtataaattctatcattctatattttaccatcagacatatttctactcctttctttgaagtatgcgaagtatctccaactgcagcatgcaactcattcatttgtaatcaagacgatagtttgaaacacccaattgtaatcagagcaacagttgacttccttttgatagcggagttgaaaatcattgcaattaataaaatggggctattagaaatggaaaacgaataggatctagaatgtaacttcatcatataaatgatgagtgtctttgttatcaacacgttattaagaatgggcaagatgtccttatatactagaagcttttgtaaagtcatgtgtctattgataataaagattttcggaactgaaattc

SEQ ID NO: 261597 - DNA, 724 bp, Homo sapiens
gatcagctttcaggcacccattattgaatctctctgttcccagagagctctttctggattctcagttctattccactgataaatttattcctgcattagtattgcctcttaaatactataatttggaatcaagtttaaatatcaggtattgcagattctcatgattttaagaatgttttggctattcacatttattcatatatattttgaaatgatttaatcaaggtctgggaacaaaaaggtccagttgtgattatattgaatttatagattaaataaagggaggataaccatcttcacaattttgaatcttcctatccaagaaaaagaagtgtgtgttattctgaagccctcttcttaaaaaggttctatttcttgttatttatttagatatacttttatttctgttttaactttctaagtgattactgttaatcattttcatatatggttttctatagtcaaataatcttattgagtatttttttccctatcatttcaggttttgagtttgccatcatgtcattaactgcaaatagttgatctccttataattttatgcctctttttgttagccttggcttatctcaataaccattatttctacacattgctgagttacagggataagagttggtgtccttgttcttttttctttcctgggaattgttctagtactgagatttcctctttggcttgaagtaagtattatattaaggaataa

SEQ ID NO: 261598 - DNA, 462 bp, Homo sapiens
  misc_feature (459)..(459): n is a, c, g, or t
gcaatgagcagagattgcaccattgtactccagcctgggtgacagagtgagactctgtctccaaaaatttattaaaaaaaaaaaaatcattacaatatattgtgaactttattactctcccaaataagggttttagtatactgtttgcggaatgtagttcaggcttttaattttcccaaatctataccttgggtgaaagtggtttttgagagaaactgaacacgcttagccagtagctggtctttgtacctaaaacagcagagaagagagtttggttgttctgggccttttccagcagcagaccctgagtgtttttttgttattgttgttggggggcagggacagagtctggctttgttgcccaggctggagcagaggttgcaatgagcagagattgcaccattgtactccagcctgggtgacagagtgagactctgtctccaaaaatttattaaaaanaaa

SEQ ID NO: 261599 - DNA, 523 bp, Homo sapiens
ttgtatctctctgctgtgttcaaagaaattgcatttagtgtataattgatttcatgatattactagaatggtcatttttacatttgttaatatatatgttacatgtgtagacaattaaatcattaactcctaacacagtaagctaaacttctcaattgagtaattcagtgatacatttaacatatgtggtctttggctacaatgcttatacaaaagatatagtaaggaaactgtgttataaaggacatgaatttgaaaaggacaagaaaaatttatttagagcactgactttcacacttgttttacctcaatccgtagtaagatatatttttcctaaggttaaaaagtatattattttaaatatgtattttacagtgtagcccaaccctcacatgtgtatgtaatgtgtatatgtttatatacatgtatattcacatgtcaatatatgtctatatattacatattatatttgatatatatttaaacatttgtttaatatatgtaattaaacaaaaatgttcac

SEQ ID NO: 261600 - DNA, 102 bp, Homo sapiens
ggggtaccattggtctaatgaggggtgccattggtctaaaaagtaaaagcaaactgtttctatttgtcattacatattaatatggaggggaaaaaagcattt

SEQ ID NO: 261601 - DNA, 302 bp, Homo sapiens
aagcactcccactttttcaaattagcatactgacgtgatgaagtgaaagtctgaacaagggcaggaagatgtggaggagaggggccaggaggggacagccatccctgggcactggaccgaggaccctgtgcagacagggaggtctccatctgggggcgggcagaaggagcagctcagctggtattcatgtgtgttttaattagcagacacaagtggttttgcttttactgaggtgtctgtgggctctcagagtacttactgtgcagtgaacttagacagaatgccaaactggatctctgaca

SEQ ID NO: 261602 - DNA, 204 bp, Homo sapiens
acaaagcatttatcaacagtggtttcagaaaagctgacttcctttcttccagtaattgatatggcagtgctattaattttatttgtttgtttgttaaatgcagcctgttctactgaatggtttgtgttgttttatttctggaatctcaaccttatctgttcccccagataactgctattctggtagctattaagatctttttat

SEQ ID NO: 261603 - DNA, 367 bp, Homo sapiens
gtactgttgtaattgaagaggcagtgttatattgttactgttatcctttttgttgggggaagaggaaatatttggatgactgattccctgtagaaccatcaagaggaggtgaagtgagcaaaggccaagtaatttatggactggtcataaattattttttgccattggctatttgtcaccattggctgttaccaaagggtatttatcaccttggctacccaattcgttgagaactctatagatacctagaagtctaccctgcatcttactactttgagatgaccacttaagattcttaagttttttctgttattcacccccatgtttccctccctccctccattcccccctccgtccgttccccctt

SEQ ID NO: 261604 - DNA, 157 bp, Homo sapiens
tgcattctcaacatgatgtgttagcaaataagcaaaaactaactgcagtgggttcacaagttagtttaattaaaatgatctttcaatattttaataatttggggactttaggaggttgaggaatgagagaacttcaccttctgtatattaactggtc

SEQ ID NO: 261605 - DNA, 343 bp, Homo sapiens
cattttacaatcccaccagcaatacatgagagatctattttttctgcattcttgctagtatttggtatcgttgctattaaaaattccttaactcttctaatagatgtatgctgatatttcatcagggtcttaatttgcattgcttaatgactaatgacattgaacatcttctcatgtgcttatttgccttctgtatagcttgtttagtgaaatgcctcttcacgtcttttgattattttctgattggatgatttgtgttttttagaagttgaatgttaaaagatctataaatcctaaatatgagtcaattgtcagatacattgtttgcggatagtttctccca

SEQ ID NO: 261606 - DNA, 519 bp, Homo sapiens
ctcttaacaatctacactgaggggagacctcagattgtgataataccatggtcacacagtactcattggggctatttattccctagatataccaacttcattgagtagtatgaatcttttaactacaagagtttgaagctcagttattcacattattaaacaaatgagccttgctttttaatagagcatgtgtgtttagctatagaagacagtgaaataaagagatacaaaagaacacacttttgaaaggtcaggaaactagataatagttcctgacataaaatttcttagagtagcaaagaagagatttggtcacaaaattggaaaaagtgccaaatttctatttgtaaccatttatttttatagcaactagtgacttgcttagatcattcgtctacataatgatagtactagatcccaacattatatttattattactacatttgtttatagtcttggtaggaatcagatgaaatggctgtgtcagaatatgaaaataaatttgattctagatcaaa

SEQ ID NO: 261607 - DNA, 472 bp, Homo sapiens
gagccactgacactgaccatccccatccccaatctaacttcttatctttaattttggcttccttctgcttcctattcccttatttttttcccatcctgcagacagctcatcaaatgtgcctttaaaacagtgccttaaaacagtttaaaactactcattcccaactggagtagctgaacagtagtcacctccacccagtcctcagaatgggcactgaccccaatgcactcacctccagcatggagtgtgttcaagtgcatgatgagagagtattgacaaggcataaaccaaggattgtgggtgctgtgtacatatgtaatatatatttaagatttaagctaattatattgcatcaaaccattctgattcagatttaggaacaaaattcacaaggctaaattccttttctaaacataaggatttcattgcacttcacagacttgcattctttttcttccaatagaactgaaaa

SEQ ID NO: 261608 - DNA, 539 bp, Homo sapiens
tgatttcacacaaggcaagagcaactgagaacagggagcctgactagatgaagtaagaaccgtcgtgaggcccaggagcaagaaaaaaaggcctggagttgtagaacatgctagaacatgaatgacagtctctgcggaattaagaagcattctccactctattccatggcctcttgctgacctaactcctagtcttccttcacatctcaccttaggataccacttcctaaggaaagcttaacagactcaagtttgacttattacctttctctgtgccctgacaattcctgataccctctccagagcagggttatcacaccacattgtaatatttaatattgacatccctactggactgcaagcctaatagaacttgggccataccgctcaagtttacaattgcatgctttttgcttagcactgtgtctagcacacaggaaatgcttaatatgtatgcgttgtttatgttatccatgccttaatgtttgggatgctccagatggcttaataaagtgtttaactatctttacaacctcaac

SEQ ID NO: 261609 - DNA, 257 bp, Homo sapiens
ttgaaggtcttcagagcttttaaaacgcttaataattataccctttgcctccacaagatggagtaagtaaatagtaaatgttaacttaaaattgcagtttactttttatattaaatgtctttgcctgaaaatctgcaccattgataattgtttatatattagaacttacaaacaactatgaaaattcacacagcttccctctgtgtcagaaagatgatttttctcattttaaacgggaaatacacacttctggttaa

SEQ ID NO: 261610 - DNA, 761 bp, Homo sapiens
  misc_feature (362)..(362): n is a, c, g, or t
aaaagctaagagtgctgatctcatcacagacatagccagctcttcagttcagaccacctggaaaccctccccatgtcttttcagaacaatgtcctaagaaccataggggaagtggccataaaaaccatctttcctttgcagactggggtggggactctggccaatgccattctgttcttccataatatctttcccatcttgactgagcatcaaatgaggcccacacacaagattctcacccacatggccgtggcaaactccttggttcttctttccactggaatcccccacacaatggtgtcttttgtcctatggaaacccttgtccagtcttgagtgtaaactcgtgtttacaggtcttanagtcctgacctggtgatccgcccgcgtggacctcccaaggtgctggaattacaggcgtgagccaccactcctggcctatgccagcattctttaaagttgggccgtttgttgatttcttcctgcaggttaagcaccgcaatgggcagtcaattgcagtgtatataagactcagaatccgtctttgcccttcaaggatttttcacgtatcataaacaacagttacagatgaaatgtttttgcaaagtgctttcataattttcattttgtttgtaatttcataattttcattttgttaatgttgcaatggagaagttaagaggcaaattattaattaaaaatgggcctctaataagttggaacaatgcaactttaaaccaattaataaaaaatgtcatggaa

SEQ ID NO: 261611 - DNA, 760 bp, Homo sapiens
ctcatcctgtcgtatgatacacactttcaacttgactgatcactgctcacactggccttgatcacctggctgagacagtgtttgttaggtttctccaacgtgaagttactctttttcctcctttgctatactgagttcttggtaggatgtcattatgtgaagcccacagtttagaagtggggagtgatgctctgcttcctggagtgtctgatctccttttgaaatgatttttcatgctgaacacagagtaattaaagtaagaaaaatacggatattgaatgactagttgcaagaagtccattatgacatctgacatgaaaaattatctatctacctgtctattaaacgattatatctgtgtatacaaacattaaatactaagctatgcagtatcgtctttactgaaggtaaaggtcattagattatatgccatgcagtgaactgagaaatatctcatttttcagacctaaatcccatcatttcttcagaataccaactctttatagaatgttgttttgggagaagtttatattggtgaaagtttactttgacatatctatgggataagacgactttctccacttcatagattttgaattcaggataagactttctctaccaatgagcaaaaatggaccaaaatatggggtaacacgaggaaatcaaatctgagacggtccacaactgatgcctttccttcaccatacttaggtaaatgctgtggcacgagttgttcacattaaacacaacgaagcaaatc

SEQ ID NO: 261612 - DNA, 315 bp, Homo sapiens
ttttaaatgtgtgcattattttataatcttttaagaaggccagggatggttctcttcagttttggaaggttaaaaatcgtctccttttaaagatactattcattaaacacactctcttggtttagagtattcattatacctagtaatcaaaatatatatagcacagtagaggctgtctgtgtacatgtcgtagaaacccaaataagtctccagaatgattttatgaataatctgccttcagttttaaaataaacttaaaaaaaaacttaaaacttggcatcatcctgggtggtactgtggttttcttcttctacc

SEQ ID NO: 261613 - DNA, 287 bp, Homo sapiens
caggatttttatctatttctgtaaaatatgccaatgaaatattgataagggttacattcattctgtaggtagctttgggtagtatggatattttaacaatattatttcttgcaactcatgaacacaggatgccttttcagttatttgtatgaatttcctgttgtacaagatgagtcagttctagaaatcatctctacaacatagtacatataattaacaatatgactttgtgcactttgaagtatgttgaagatagatctcatatctcatgttaaatattctcacca

SEQ ID NO: 261614 - DNA, 618 bp, Homo sapiens
cttcaaagaagagagggtttgaagagtggagaccatctctttctccccatcggaatctccattctatgaagggtatacacaagcctagggccatttgcaattgaaaatacgaacaagcaggccttgaccccagtatcaaggatacgttcatctaaatgttttctgccccttcctaaccctagaatcactttgttcctgataatggagaggacatggagcaaatgtagatgtgtgggagataaagaagtaggattaggtgtgactctcctgctagtccagggttgcagctctgttcctgatcctcccttggtgagaccgtaaccctgtgggttcaaggacgctgcctcagttaccactcctgccccaggagcgtggcataacacacgcttgttaaacactgatcagtgggctcagcaggtgcagtggaaatccacctggttgtcagagctccgtggctaacacctcacctctggactttcggctatttctttctctgtagtgttatctaataaaccttccagttaatttacgatccacatgaaaagggcctgtgatatgcaaggtgctcatttaacatgtgttaaatgggtcagcactggctgagccatgttcgtgtat

SEQ ID NO: 261615 - DNA, 686 bp, Homo sapiens
tatttcttttctttattaaaggctttacttttacaaatgaatacaaacaaaactataaaaccaacaaaatttaaattaatatgatttgctgaatgacatccaaacccacaatgtgaactgcatactgactgccaaggcaatgcttcttttgaggcccaagatttaaaaaacaaaaataaaagcatggaataacatggactagtgaaggagaaaatgaacactgattgatagtcacaataacagtgcacacttctagaagtcttttcatgaagaagtcttctcatgaagaagtctaaattttctcagcaatggtagaagaaatatcacaaaatccaggcacaaagctcacagcaaagcccctttggctcttgactttagattaggtatgattctagtcatcacaaggtaggtaagaatctggtaaacaacatggctgagttgctaagaggaaagcacactaacaagggagataatatgtgaagtggatacaactcaggaaagcttgtcaatctaaactatagccttatgcatagcaataggttccaaggacataaatatgttacagcagagtacaactagcatggtactgaaatgagtgtgcctagaatcctcttctgaaaagttaacggaatggccagtgttttttgaaagcattccatcaaaattaaaatacattaaaaaaaata

SEQ ID NO: 261616 - DNA, 667 bp, Homo sapiens
aaacaggaaggaggaaagcagcagctgcgtcagtggttgttgggagggccaaaggagcccacggctttgaaagctctttgtaaacaaagtactttatgcttttaactttttgtttactttcagtcagtcaaatgaagtgataattttttttttgtttactcttgagagactctaaagcaatgattctcaccctgcagcgtgcttaaaaattaccaggctggtcgggtgcattggctcacacctataatctcggcactttgggaggctgagcaggcggatcacctgaggtcaggagtttgagaccagcctgaccaacacggtgaaaccctgtctctactaaaaatacaaaaattggccgggtgtggtggtgcgcgcttgtaatcccagctactcgggagactgaggcaggagaatcgcttgaactcaggaggcagaggttgcagtgagctgaggccgcgccactgcactccagcctgggcaacaagagcgagactctgtctcgaaaaaaaaaatcaccaggctggcttacaaaggatggtgttttcactgcccttccactccaatccttcgcccacgccatctccaaccccacaccccttaaccagatcactggcctcccgccccccgcctccgcccactcctcgccccacctcccgccccgcttccc

SEQ ID NO: 261617 - DNA, 953 bp, Homo sapiens
aaaaaaaaaaaaagataaaactacaagataccatgatgatgaatgtcaggttttgtggttgggaccaaccatgagacaaagcttacgaaaaggtttaccctggcttagtccgcattaacagaaatatggtatctggagcatccagatccaaacctgctctaatctacgtgtctaaaggataagttggttcctagatgccttgccttaaagagtggggtgcttccccttgagcaaaaaagactatggagtgggccaggtgcggtggctcacgcctgtaatcccaacactttgggatgccaaggtgggtggattgcttgaggtcaggagttcaagaccagcctggccaacatggtgaaaccccatctctactaaaaatacaaaaattagccgggcatagtggtgtgtgcctgtaatcccagctacttgggaggctgaggcaggagaatcgcctgaacccgggaggcagaggggttgcggtgagccgagatcgcaccactgcactccagcctgggtgacagagccagactccatcgtaaaaaaaaaaaaaaaaaagctggagtgtaagaatgaactctctcttcaaaaatatgaagagcttttacacatgaaagagatgagatgttctgttgagacttaatggagcaaactaagaccccgagtagaagtcacaggaagcccaaagccccctcggcacaaggataaatatgtccgaagactgtctgaggagatggtaagttccccgactggggcacatgaggcaatcacagctaacgttttgaggatacctgttctatgcaagctgttttattgaatggattacaaaaagtatgttaagtaatgcacaccctaggaaggcgttccttgtaaaatgggcccatgtttcaggtgaggaaactgaagctcagagcgggagacagcttgctcaagcagaggccaaggcctttacgtcatgg

SEQ ID NO: 261618 - DNA, 1828 bp, Homo sapiens
aaaaaaaaaaaaagataaaactacaagataccatgatgatgaatgtcaggttttgtggttgggaccaaccatgagacaaagcttacgaaaaggtttaccctggcttagtccgcattaacagaaatatggtatctggagcatccagatccaaacctgctctaatctacgtgtctaaaggataagttggttcctagatgccttgccttaaagagtggggtgcttccccttgagcaaaaaagactatggagtgggccaggtgcggctggtctcgaactcctgccctcaggtgatccacccgccttggtctcccaaagtgctggggttacaggtgtgaggcactgcacccggccaaaaaaaaaatggtttttaattaaaaaaaaaaaagatacaggctgggcatggtggttgacgcctgtagtcccagctacttgggaggctgaggcaggagaatcacttgaacccaggagccagaggttgcagtgagccgagatcgcgccactgcactccagcctgggcaaaaagagcgaaactccatctcaaaaagaaaaaaagttaaattctctccatcatcatgaagttgaatatattttttctatccacaggcaaatctgagtagcctccaagaggcacacaagcagaggatgggctgtgttgccctgactgccagccccaggcacagaggaccaggcctggtcatcctcacagactctgaccctggctcttcccactcctcttccactccaggacatcctacttaacccctcctgacatgagtttcttgtgctttagtctacaggttaggaaagaggggaagtgataaacaagctctccaacctgttgagggattaggggttcgtctaaggctccccagggcctggctctgacaaagcgtctgcaactaatgatgcttcttgagctctggagacaggatttatgcatctaataaagtctgtaactccaggcttaggggccgggggcaggaggctgagagcatgaagtcctgggggcgccatgggaggagatcccaggtggctcctaatgagccctgcatttccatttgcctgctctagattcccctaaggctactgtgaggctgggggtgggggaacagcaggtataagaggttggggtggctgtaggagggtaggtggcagcatggattctaggcaggctgctgcactgctggtgctgctgctgttaatagacgggggctgtgctgaagggccaggaggccagcaggaagaccagctctccgcggtgagtgtgtgtcccatccccatatcaccattgcctctacttcggttgagacttgtgctctaggttctgatactttctctggctgccaaggttgtcattaggtcctcacatctgaggaaatggttccgcagcctcctaccacttgcccctggaagccagtcccttccccttgtgacttacgtgtccagggtatttgcccatcttccttccctgatacccccttggcacaggaggaagacagcgaacccctcccaccacaggatgcccagacctctgggtcactgttgcactacctgctccaggcaatggagagacctggccggagccaagccttcctgtttcagccccagaggtttggcagaaatacccagggatcctggaggaatgaatggctgagtccccgggctggagaggggctgaattcccagttctggagcctggctgcccctcaacgctttgggaagaagtgacatgtcatcccttgatatgtctgcatgcaaggtccacacccaaaagtgtcaatgtttgccccccaaataaaattgtctggcttctgaaaaaatgtgtgtct

SEQ ID NO: 261619 - DNA, 1804 bp, Homo sapiens
gattctaggctactctatatgagagccagggccaggcagaggctgtggagaccagagtcggggtcagaatgatagtccagccccacagtagcctgctcctgtccttctgggactccctggagactggaccctagcacctccactcagcctcctgagtagctgggattacaggtgcctaccaccacgcccagctaattttcgtatttttagtagacagggtttcaccatgttggccaggctggtctcgaactcctgccctcaggtgatccacccgccttggtctcccaaagtgctggggttacaggtgtgaggcactgcacccggccaaaaaaaaaatggtttttaattaaaaaaaaaaaagatacaggctgggcatggtggttgacgcctgtagtcccagctacttgggaggctgaggcaggagaatcacttgaacccaggagccagaggttgcagtgagccgagatcgcgccactgcactccagcctgggcaaaaagagcgaaactccatctcaaaaagaaaaaaagttaaattctctccatcatcatgaagttgaatatattttttctatccacaggcaaatctgagtagcctccaagaggcacacaagcagaggatgggctgtgttgccctgactgccagccccaggcacagaggaccaggcctggtcatcctcacagactctgaccctggctcttcccactcctcttccactccaggacatcctacttaacccctcctgacatgagtttcttgtgctttagtctacaggttaggaaagaggggaagtgataaacaagctctccaacctgttgagggattaggggttcgtctaaggctccccagggcctggctctgacaaagcgtctgcaactaatgatgcttcttgagctctggagacaggatttatgcatctaataaagtctgtaactccaggcttaggggccgggggcaggaggctgagagcatgaagtcctgggggcgccatgggaggagatcccaggtggctcctaatgagccctgcatttccatttgcctgctctagattcccctaaggctactgtgaggctgggggtgggggaacagcaggtataagaggttggggtggctgtaggagggtaggtggcagcatggattctaggcaggctgctgcactgctggtgctgctgctgttaatagacgggggctgtgctgaagggccaggaggccagcaggaagaccagctctccgcggtgagtgtgtgtcccatccccatatcaccattgcctctacttcggttgagacttgtgctctaggttctgatactttctctggctgccaaggttgtcattaggtcctcacatctgaggaaatggttccgcagcctcctaccacttgcccctggaagccagtcccttccccttgtgacttacgtgtccagggtatttgcccatcttccttccctgatacccccttggcacaggaggaagacagcgaacccctcccaccacaggatgcccagacctctgggtcactgttgcactacctgctccaggcaatggagagacctggccggagccaagccttcctgtttcagccccagaggtttggcagaaatacccagggatcctggaggaatgaatggctgagtccccgggctggagaggggctgaattcccagttctggagcctggctgcccctcaacgctttgggaagaagtgacatgtcatcccttgatatgtctgcatgcaaggtccacacccaaaagtgtcaatgtttgccccccaaataaaattgtctggcttctgaaaaaatgtgtgtct

SEQ ID NO: 261620 - DNA, 1598 bp, Homo sapiens
aaaaaaaaaaaaagataaaactacaagataccatgatgatgaatgtcaggttttgtggttgggaccaaccatgagacaaagcttacgaaaaggtttaccctggcttagtccgcattaacagaaatatggtatctggagcatccagatccaaacctgctctaatctacgtgtctaaaggataagttggttcctagatgccttgccttaaagagtggggtgcttccccttgagcaaaaaagactatggagtgggccaggtgcggctggtctcgaactcctgccctcaggtgatccacccgccttggtctcccaaagtgctggggttacaggtgtgaggcactgcacccggccaaaaaaaaaatggtttttaattaaaaaaaaaaaagatacaggctgggcatggtggttgacgcctgtagtcccagctacttgggaggctgaggcaggagaatcacttgaacccaggagccagaggttgcagtgagccgagatcgcgccactgcactccagcctgggcaaaaagagcgaaactccatctcaaaaagaaaaaaagttaaattctctccatcatcatgaagttgaatatattttttctatccacaggcaaatctgagtagcctccaagaggcacacaagcagaggatgggctgtgttgccctgactgccagccccaggcacagaggaccaggcctggtcatcctcacagactctgaccctggctcttcccactcctcttccactccaggacatcctacttaacccctcctgacatgagtttcttgtgctttagtctacaggttaggaaagaggggaagtgataaacaagctctccaacctgttgagggattaggggttcgtctaaggctccccagggcctggctctgacaaagcgtctgcaactaatgatgcttcttgagctctggagacaggatttatgcatctaataaagtctgtaactccaggcttaggggccgggggcaggaggctgagagcatgaagtcctgggggcgccatgggaggagatcccaggtggctcctaatgagccctgcatttccatttgcctgctctagattcccctaaggctactgtgaggctgggggtgggggaacagcaggtataagaggttggggtggctgtaggagggtaggtggcagcatggattctaggcaggctgctgcactgctggtgctgctgctgttaatagacgggggctgtgctgaagggccaggaggccagcaggaagaccagctctccgcggaggaagacagcgaacccctcccaccacaggatgcccagacctctgggtcactgttgcactacctgctccaggcaatggagagacctggccggagccaagccttcctgtttcagccccagaggtttggcagaaatacccagggatcctggaggaatgaatggctgagtccccgggctggagaggggctgaattcccagttctggagcctggctgcccctcaacgctttgggaagaagtgacatgtcatcccttgatatgtctgcatgcaaggtccacacccaaaagtgtcaatgtttgccccccaaataaaattgtctggcttctgaaaaaatgtgtgtct

SEQ ID NO: 261621 - DNA, 231 bp, Homo sapiens
ggacctgaggacaaatctttcctaaggtttggcagaaatacccagggatcctggaggaatgaatggctgagtccccgggctggagaggggctgaattcccagttctggagcctggctgcccctcaacgctttgggaagaagtgacatgtcatcccttgatatgtctgcatgcaaggtccacacccaaaagtgtcaatgtttgccccccaaataaaattgtctggcttctga

SEQ ID NO: 261622 - DNA, 541 bp, Homo sapiens
ccactgcaatgaaacaaatatgaaacctcacatggacattttactcttcagctgttttcatattttgctcacattttgcaaggaacccagagatccaaaagaaatatccttaactctttcccggccaagccctatgatcaaacacatgggaaataatctatggattacaataatcaaacagttctagagaatttctaaatatctgcaggaagaaaatctgtgtgcttttcaagtaaactgcagcaatcaggaaagaagagaaaaaccccttgcacaatcatgtatttaaaaaaaaaatctttctactctgcagatactgtttcctgaaatttaccaagaacactgccttgaagagataaaaaaaatacatccatagaattcagttctacccccaaaagagctgcactgcacacatttttagaaacataaatctcagcaaatacagttgcattttattgacaacattaaaaataatcacaacaaagaaatagcctttcctattccatttcaacttcattaccatgctctactagcctctact

SEQ ID NO: 261623 - DNA, 451 bp, Homo sapiens
tctatttgagttaccatatgcctttggctgtttatttctttcaagtatgagaaagcttacgtattcaattatttcaggttcaccactcacctcctcaggaagttcctggaaggagtcattaaccccaccacagcctttcccgtgctcccagttccaccactggaggcctgcatgtcaacggcagggatacatagagtgtagactgcaggctcacgatgggcagggatgcagtatctggtttcccacactccgcaaaagcacacaccatcctgtaaaccactgcaatcgataaagctgccttaacgagctcaggataccaaaacaaagatctctctgcagataacacctcatgagaagtatctgcaataaccccaagtcaacatttaggtttgtgtacaaaattaccagaaagcagaaagtaggacagaacgtagaaaagggcaaacaaaac

SEQ ID NO: 261624 - DNA, 522 bp, Homo sapiens
gagaaggcaggcagaagtgaccgtggagaacagtatctgagccagaaggcaggaggtcagcgggggagtcttgagtgggaaactcaagggtagcctgactgtccttgtcacaggtttagctgggcactgttagttcccccctttgtcagtttgtgggaatctgggcatcagggatctgtttcagcccttcacatttgtatttgggtgtgctcagcttaaaacgatagcagcctgcaggagctcagccctgcctccatttatggagggaagagaaactaaggaatgctccttggggtggtgttggggagcagctacatgggaaaatgaagggtgcagcaccagtaaaaaggtgctcccaggactccctcccaccagcactcggaccaaggaagaagcatttaatttcagccagattcctagatggttgcttttatttgttttcatctgaatttgtgccaaggattcaacttttcctgcttattttattaaaaactttatacacagcattaataaatagatata

SEQ ID NO: 261625 - DNA, 140 bp, Homo sapiens
tgctcctccatgtccagtctcttgacaagcagctgaaatgttctttttagtttttttattttttctttgagaaagagtcctgctctatcacaccactgcactccatcctgaatgacgaagcagtacccagcctcaaaaaa

SEQ ID NO: 261626 - DNA, 884 bp, Homo sapiens
tctcttcactgggtctgtactccatagctattttaccactttctgaaataaagttagcaaggatgaattcagaatctttttcattccaaaacttcctgcatataatggtagcaacccacaatgagacattcttttagtttctaaaagcaggaaataagcattttcctgaaagtttcctcatctcttcatcatacacttcgatttttgtttttcttttttcttttagacagggtctcactctgtcacccaggctggagtacagtggcactatcatagctcactgtagcctggaattcctgggctcaagtcatcctcctgcttcagcctccagagtagcaggcactatatcactgtgcccatctaattctcttttttagagacatggtcccgctttgttttccaggctggtctcgaactcctggcttgaagtgatccttctgtcttggcctcccgaaatgctgagatttcaagcgtgagtcatcatgtctggtctcacagctcagtttttaacatatgtatgaaatatcaactgtgtttggttcaaaggactttatgatcttacagataggaactaaggaataataacataagaaataaaaaatgtggaaataaaaacgttcaatcataatatgattaaaaggtaaggcaccaggtggggggtcgaagtaagttcaaatccaaaatagagaccactgggctagtagacacttcacattagaagcatggctaggtgtctactccctgagaaccaaaattccaccagatacaatgaacaaagctttagagagagaaaacatttgaacattttacgggcagaaaatggcccacatactctatagacaatacaatttccttcaaggcaaactagaactataaggcttttg

SEQ ID NO: 261627 - DNA, 803 bp, Homo sapiens
aatatatccggcctatccccaatatgcgcgatgtacttggggagaaagtaacctctttccttttattcacctacataggttcgtgagccacacatctccccacaccaagctcctccatacaagacctcggactgcatcacgtaaatgctttttcaggggcaaaatctagagaatctgaaatgagctatcagcttcccagtttgcacaattcatcaagaaattatgcggggtcactggcacaaatgatgaggcatctcctggaagcttaacttcttatccatcccatctcttggacagatgatgccagttaattactttgaatgctggtctcgaactcctggcttgaagtgatccttctgtcttggcctcccgaaatgctgagatttcaagcgtgagtcatcatgtctggtctcacagctcagtttttaacatatgtatgaaatatcaactgtgtttggttcaaaggactttatgatcttacagataggaactaaggaataataacataagaaataaaaaatgtggaaataaaaacgttcaatcataatatgattaaaaggtaaggcaccaggtggggggtcgaagtaagttcaaatccaaaatagagaccactgggctagtagacacttcacattagaagcatggctaggtgtctactccctgagaaccaaaattccaccagatacaatgaacaaagctttagagagagaaaacatttgaacattttacgggcagaaaatggcccacatactctatagacaatacaatttccttcaaggcaaactagaactataaggcttttg

SEQ ID NO: 261628 - DNA, 502 bp, Homo sapiens
taggttaataacttgctaaagtcacatggcaagtaagtgtggagccgggatttgaacccagtcatcctggctcggggtccatggccctggctggccctggatgccgctggggggccctctgtagggctgacttgccctcctcagaagccccttccttagcttacggccacatagccctctggtagtcctcatcaccagctctgctcttaatttggccattttccgccttaggattggagtgaatcatccttcaaagacagagccacgttctgcactgtgttaagcatagtccgtggctcacagttcatgcgtgagccacacacacatgcacactttgttgggaagaagagcaacaataaattgcttatttagaaatgggcgaggccaggtgcagtggctcacatctgcagtcccagcactaaggaaggcagatgtgggaggatagcttgagcccaggagttcaagacctgcctgggcaacatagcaagtcccagttctccac

SEQ ID NO: 261629 - DNA, 273 bp, Homo sapiens
gccagcactgaatgcattttcaacttacgacatttgtgtcttatgatgggtttatcagaatggaaccctgtaaaccaaggagtgatttattttcttttatacctaagaccgggattctaatgaaataagggaggagcgggcaccctctggtgacactgccagacccaggaactgtgtggactcctgtgagggcctttcctcagcagcaccaaagaggataatggcaatcaccaaaaactacctgcagaccctccctgctgtgctgcaaatctt

SEQ ID NO: 261630 - DNA, 377 bp, Homo sapiens
ccagtaacaagcaccagatataggaaatggccctcagagatgcacattgatgctgcaggaaccaaagctcccagagctggagagagacagctgagcccagccaccatatcttccaccagacgcggattgcttaggatggcagctagatgacctggagatggcaaggcattctgaggctggaagggtgtgcagggaccagatcatgcagcacctccgttgcagtctgcagaggtttgacaatggaaagcctgatggcaatggggagccatggaagagtttcgagaaggggagagacaaggttaaatctggggctagtgtgggaggattcaggaatgaagggattagaggttggggtgagagagtccaggcaagaaacg

SEQ ID NO: 261631 - DNA, 303 bp, Homo sapiens
aactttattttgattcaacaggttggaaaccctctttttgtagaatctacaaagggacaatttcagagcccactgatgcttatagtgaaaaaccaaatatcccacaataaaaactagaaacaggctatctgtgaaaaagctttgcatatcatctcacagaattgaacatcggttttgattcagcagattggaaatattctttttgtagaatctacaaggggaaattttggagaaaattgagacctacagcatgaaatcaaatattctgcaataaaaactagagaaaatccatccataaaaatg

SEQ ID NO: 261632 - DNA, 4828 bp, Homo sapiens
ctcgggttgacaacggctaagcagccgcggcagctgctcttctggctggcaccgtcacccctgcccgaccccaggccccgcgtgtgtcccggacggagcagtccctcctgggctcgcctcctgcccgctcgctctgtgtcagcgcccgaacccaaaggggtggacgcggcctccagaagccgaggccaaaagagcatgtgagtggcttcaagcaacaggattccctcagtatgtgcagctttttgaagaaggttcgtttcccctggatattggctctgtgaagaaaaaccacggttttctggacgaggactctttgggggccctgtgtaggaggctgatgaccttgaataattgtgcctcgatgaaactggaggttcattttcaaagcaagcagaatgaagactcagaagaggaagagcagtgtaccatcagtagccactgggccttccagcaggaaagtaagtgctggtctcctatggggtcctctgatctgttggccccaccgagccctggcctgccagcgacctcaagctgtgagagcgtcctcaccgagcttagtgccacctctctgccagtcatcaccgtgagcctaccacccgagccagcagacttgcccttgccaggccgtgcccccagctcgagtgaccggcccctcctcagccccacccagggccaggagggtccccaggacaaagccaagaagcgccatcgtaaccgtagcttcctcaagcaccttgaatctctgaggcggaaggaaaagagtggcagccagcaagcagagcccaagcatagtccagccacctcagagaaggtctccaaagcctcatctttccgcagttgtcgtggcttcctctcagctggattttacagggccaagaactgggccgccacctcagccggtggcagtggtgccaatactcggaaggcctgggaggcctggcctgtggcctcgttccggcatcctcagtggacacaccggggtgattgcctggtgcacgttcctggggaccacaaaccaggcacattccctcgctccctgtccattgagagcctgtgtcctgaggatggacaccgcctggcagactggcagccaggtaggcggtggggctgtgaggggcgccggggctcctgtggctcaacgggcagccatgccagcacgtatgacaacttgcctgagctgtacccagctgagcctgtaatggttggggctgaggctgaagatgaagatgatgaggagagtgggggcagctatgctcacctagacgacatcctccagcacgtgtgggggctacagcaacgagtagagctgtggtctcgggccatgtacccagacctggggcctggagatgaggaagaggaggaggccacttcatcagtagaaatagccacagttgaggtcaaatgccaagctgaggctctcagccagatggaggttccggcccatggagagtccccagcctgggcccaggctgaagtccagccagcagtcctggctccggctcaggctccagctgaggctgaaccagtggcacaggaagaggctgaggccccggccccagccccggccccggccccagcccaggacagtgagcaggaggcacattcaggcggggaacccacctttgcctctagcctgtctgtggaagaaggacactccatttctgacactgtggcctcctccagcgaacttgacagtagtgggaactccatgaatgaggctgaggctgcggggtccctggctggactccaggcatcaatgccccgtgaacggcgcgattcaggtgttggggcctcacttaccagaccctgcaggaagctccgttggcatagcttccagaactcccatcgtcccagcctcaactcagagtcgctggagatcaaccggcagtttgcaggccagatcaacctcctgcacaagggctcactgctgcggcttaccgcgttcatggagaagtacactgtgccccacaagcagggctgggtctggtcaatgcccaagttcatgaggaggaacaagaccccagattaccggggacagcacgtatttggggtgccacccctcatccacgtgcagcgcacgggccagccactgccacagagcattcagcaagccatgcgctacttgcgcagccagtgcctggaccaagtaggcatcttccgcaagtctggggtcaagtccaggatccagaacctgcgtcaaatgaatgagacctcgcctgacaatgtctgctacgagggccagtcagcctacgacgtggctgacctgctaaagcagtatttccgggacctgcctgagcccatcttcaccagcaagctcaccaccactttcctccagatctaccagctcctccccaaggatcagtggttggcagcagcacaagccgccaccttgctgctccccgatgagaaccgagaggtgctacagaccctgctctacttcttaagtgacattgcctctgccgaggaaaaccagatgacagcaggcaacctggcagtgtgcctggcgccctccatcttccacctcaatgtctctaagaaggatagcccctctcccaggatcaagagcaaacgcagcctcattggcaggccaggccctagggacctgagtgacaacatggcagccacccagggcctgtcgcacatgatcagtgactgcaagaaacttttccaggtgccccaggacatggtgctgcagctgtgcagctcctacagcgcagctgagctcagccctcccggcccagccctggctgagctgcgtcaggcccaagctgcaggggtaagcctgagcctctacatggaagagaatatccaggacctgctgcgtgatgctgctgagcgcttcaagggctggatgagcgtgccagggccccagcacacggagctggcttgcaggaaggcaccggatgggcaccccctgcggctatggaaggcatccacagaggtggcagcccccccagctgtggtgctgcatcgtgttctccgggagcgggccctctgggatgaggatctgctgcgggcccaggtgctggaagccctgatgccgggtgtggagctgtaccactatgtcaccgacagcatggcaccccatccctgccgcgactttgtggtgcttcggatgtggcgctctgacctgcctcgtgggggttgcctgcttgtctcccagtccctggatccggaacaacctgtgccagagtcgggtgtgcgagccctcatgctcacatcccagtacctcatggagccttgcggcttgggccgctctcggctcacacacatctgccgggctgacctcaggggccgttctcctgactggtacaacaaagtctttggacacctgtgtgccatggaagtggcaaagatccgggactccttccccaccctgcaggcagcgggccctgagacaaagctgtgagccttgggctggtcccagggtggcaccacccaggccccctgggcaccaagggagcgagggggaataagagcagggcagccccctgggtgccgctgtcaggagcagagccaggcccaggtggctccagctgcctgtcctgtcccctttcctaaagctcctctgcacatagaggggagaaaaagagaatttaggcaactccactcccccttcacccccaaccctgtattctactctcccgaaaagagaagagaatcgcatgagtagcaagactgctgccaccagccacctgcttgtgaggccgccacttggcatgaagcctccacagctccccgcctgcaggggcaaagaggtcgacagcaatgtgtgatcccagctctctgccagactgagagggcaagccgtcttgtttgctgcaaggatgcttttgaggttggacaggaggttctggtcctgcctttggggccaacgctggctctgaagtgtctttttcagaggaattggactggagtgaatgggcacaggggtggagcgcagggcagccccagtcaccacgagctgtttcatttgtgtaaatacgatgctgaattttatgaggctgagttaagagtgggcactgacgggcccctaatatgtgacatgacgatttggcatagatagggatgtgagagtggagtaccttcctttctcaagtctcgagatgccagtgaaaccagtattccctgacttgggtttcacactttatcgaccaccccatggggtcctgtgtagcctttggccacgcactgacactgcccaggccaagcaaaagcagagtgtggttaagagacaagggtctatgtcatcatcccttttgcttatggtagtgggctaacataacagcccctttctcaagcagagacctggcccctgggccagccagatggaagggcctatcttagccagctggagcttaagccaaacctgttctgtcccactggccagccatctttgctcacatggaaattcaaatgccattcaaaggccactggtgctttatttttctatctgctgagtaaactgaaatgagatgggtcccaaccaccactgtaattttcaagcctattttatttgtacctgtaaatactgtacagctaatatatatatatatatatatatatatatgtgtgtgtgtgtgtgtgtgtatgtgtgtttatagagatacacacacatatatatgtgtgtatatatatacacatacatatatatacacacacgcatttgcacagacacacacatatatcaattctcatgagtgtattataatctctggtgggggcaagtgtctggaaggcctgaggggcacttcagatgagaatggagaggtagggagccaggtgcagcaggatccctcaaatcaataaagcattaccagagatgcac

SEQ ID NO: 261633 - DNA, 391 bp, Homo sapiens
caccatcttcctgcacctccaagcactgtgcccatcatggtagggcctgagaggcctctgagaatgtgtgccccgtcatctctttatgctgtctaacagactgaaaagcagacatccagaaaagagagagagagggcagggagcatgggagcactgtctcagtctggccagcgctagcagaggagctctgcagcctaccctattaagcctcaggccctgcagtttgaggcctggacttagggctggagtcagagttctccagccctgacagctgcccccatccccactcctgtggctcacaggcaccggatgggcaccccctgcggctatggaaggcatccacagaggtggcagcccccccagctgtggtgctgcatcgtgttctccggga

SEQ ID NO: 261634 - DNA, 439 bp, Homo sapiens
acccattccctgctttccctcagggctggccttacgctcagcctcccctgtgaggtcctgggagcagctcagtcttcccttagggctgcaggggggcagtgccacccctgggcttgtgtttccctgctgggaatcctaaggaagggggaagcattatctttttcagaagctccagaaaatgtctcctcaagactcaatggctctatttgatttctcacccatccattaacttgctgctcttctggtgggtgtggatgtgcagttgggtttcagcctatgaagacctggcctggagctggggatgggttcggtcccactcaaaccacagatctgggaatggtggttccctggagcaaagtctgggtgctgtcaacaccaggagggggcatccgtggtgtcaagaagacccagaactgtctacttaatgtgccaaaggagg

SEQ ID NO: 261635 - DNA, 243 bp, Homo sapiens
ggggagtggctgtaaatagagatgaagcttcactggctcacctgctgctcacctcctgctcacctcttgctcacctcctgctgtgtggtctgtttcctaacagtccatggactggtacctgggtgggttccacagacagttgaggggttggggacccttgttctataccactgtaggatgactatagttatcaattatttatagtttcagatagccagaagaagggtattggatgtttgtaat

SEQ ID NO: 261636 - DNA, 479 bp, Homo sapiens
ttctttgatttagtgttgtttgaaaagcaaatagatgttaaagtttgtaatccagagagcagttttgtcttaaaatccattcactgctccatgcagtagagagaacaaaatttgattaaaataaaacaaagctttctagaatatgtttttttaaaaaacaggaaatttgtaggatttgttaagaatgttagaaattggccgggcatggtggctcatgcctgtaatcccagcactttgggaggtcagtgcaggcggatcatttgaggtcaggagttccagaccagcctggccaacatggtgaaactccgtctctactaaaaataaaaaaattagccgggctggtggtgggtgcctttaatcccagctatttgggaggatgaggcaggagaaccgcttgaacccgggaggtggagatggcagtgagccaagatcgctccactgcactccagcctggacaatagagtgagactcagtctcaa

SEQ ID NO: 261637 - DNA, 381 bp, Homo sapiens
cacgagggcgatcagccttctcaagacacctgaccaggcctgtatctagacaaacccttaatataatcatcgtcagtagatgaggaaggtcttcctttacaagttcccaccacacttccttctttttgtccctagttcttctgttttgttgctaccatcaccagccattgcccatgaaacaaacatcttcttgcagtaggcttgggcctgtgctagtaaattacaggacaacactcgttaggtgtgtggccttgcgcccctttctggtggttctggcctaccatggtggcagctcctcttcaaggacaagagtagacagaatatcagaaatgtgtctgtgtttctcaggacagtcattggtgcttagcactagtatgatga

SEQ ID NO: 261638 - DNA, 457 bp, Homo sapiens
cttagccctgctggaatgaaagactccagctgccgtctagatgtcactcacagtgacagaggagaaaactggggtccagcgtgctaaggaagttttccaaggtcacataaccagtcggtggtgagatttaggctagtgtgatttacaaagtcttcttgggtgggagtactcagggttcttcaaagcacaggttctagagtcagacagcatagattcaaatgctggccctgtcacttactagccatgtgaccttggacacattatacctttctgtcgttcagtttcttcctcaccaaaataagaaaaagtacatgatcacatattgtcgtaagaataaatgagttaatacatctcaataacaagttcacaatcccttattcacaattctgaaatctaaaaactctgaagaccaaaagttttctcataagttttagtaaattatttggtggcaaaatct

SEQ ID NO: 261639 - DNA, 427 bp, Homo sapiens
ttacatcgtagttctgtaacccagaataagtgcaaaatctcatctctagaaaacacccaaggagggttctaattaactctagggtggtagcggcggaggaggggcagggagggaaggtgtttcactgggggctgtcaaagttattttagtttgctctaaattgcgtcggcatgcccggaagctctttaataattgtagctaccatttactgaatgcttcactaggtgccaggcataatgttcaggcgtttgagggaattctcatttcatcttcattaggacacgctgcaaaaatggaggctttgagaggtgaaatgactggctcaaggtcacacagtgagatagtaagtggttagggagatcaggatctgactccgggctgagtggttcttcctgcttggtccacgccctgttgagatgtttatttg

SEQ ID NO: 261640 - DNA, 427 bp, Homo sapiens
gtactgtaattcatgaattctcacataaaggacaaataaaaataggatcatgaatattgctcagactttgaatttttatactgtaatctaagaatactctgaaggacacaaatcaaattggtagggccaggaaataaaataatttctaaattctactaacagtaaaaaacacaaatataaatcttattaaggcagaaaataaaaaacaagagattttcaccatttagtttcatcgtttaaatatcatatttattatcatacactgcaaactccccaaactgctttgatattttcccttaaaaataagagagaaaacatgaaggcatctgattttgtgataatagaaaatttcttgataatatgtttttgtggctataagtgccaatgaatatatcaagttctaaataatatgcaatgttttaaatac

SEQ ID NO: 261641 - DNA, 460 bp, Homo sapiens
ctctagatccccttggcccccttccctcaattcccacgcatctcctggcagagccccagtcctgccctactgggtccaatcacttctctcccatgcctccctctgcctgccagccaggatagaaagagcctgttgctcaggtcgagtgatgctcctgagccgacagccacttgttggtgccctaactctggtctgtgctgtaactctatccctgatgctgcctccggtgacccttggtccttccctaccctaagctgcacacacaggagactgaaagagacaagggaggagggcttagccctgtcaactcaaggtgtccacacacccagctctgcagggtccttggaggtcaaaacaaggtggagacaagggacaggcctgagaggctgggggctgtgcagttgggcccatctggtgttcctgaggttctggggagaggaagccccagttgtgctggtag

SEQ ID NO: 261642 - DNA, 480 bp, Homo sapiens
aatgtaacatcacagctctgaggttccctttccatccccagtttctctgatagagcagaggactctgaaaggaggccagtttttttattctaaccatgggaaatttgaaataattgttgacttcttttgcttattttttttggtccctaaaatatttgattggtcaagataaatcatctttgttttatttttcatttctgataattatcagaataataactggataagtcccagtgaaagccccaactgaaagaatttgtagtcatgttgtcacattttatatttaaaagtgtttctctagagttaaggaatgaattttttttttcccagatgtggatgcaagttacaataaattcttggcccttttgaaccattagggattaatcattttgggttaaccattttctagatggtgagaatttattcttataataaccacaaaacttcaactactttattttatttttattattattattt

SEQ ID NO: 261643 - DNA, 294 bp, Homo sapiens
ggaaacaccaaaagaaggccactttggctccaacgcctactctgccaccaatcacagggctgatcttaggctgaacacttaacctttctaggcttcaggttaacttaaataaaaactatactactactttctagacaagatcttcacatggaccaaatgaagaagagaaaaaattaaagacaaaaaccaaacatcatttggaaaaaatctcaaaggagcaaaaaaaacatatatccaaagtagtcttcctacaaccaatttccttctctaatacattccttctacgacaaacaa

SEQ ID NO: 261644 - DNA, 748 bp, Homo sapiens
gcacagcacctccagtcactaatggttgtaagagacttcggggacactaatcttaatgcgccatttcctataggtcttgttagttcctaaaaccatctgtaagaagttattgtatttggctttcttcagccatattttttaagcacgacatttaattagtgcttgttaagatgtttcaagtgctttggccacttctctcacccctgctgtttcttcatggtcagcatattttctggaaatgttgttttcgggaaagggcatcagatgcgtctgtgtctggagaattgctctgtgtatccatgtgaagcaagtctctgagagcaactggagggactgtcaggctggctgtggggcctccgtgttcacagcagctactttgaaaggcctccagttttgacgttctcatggaaaaagcagagacctcaaaatgggtttggaaccgacaacaataggagggtacactggagccctggagaagaatgtcacataagtgaaatgtatttgaaatatttaatctaggaacctttggattaacttcattaaaaagagtttgcttgaaagggcataatttttgctcgaagagaccttatgaaaactgcaaaatggttgatggtactgaaatatccacccatgctcactaaaggaataaataggttgaatataattccattatttttgcaactgtttaataccataaaattcattaaaatttcaaactgctttacaaaataagacatttttttctaag

SEQ ID NO: 261645 - DNA, 711 bp, Homo sapiens
agcagcatagaaaatgagccccccatccccctgccccatggcccaccacacaggttaacagatgttaacattttgcattggcgccttgtttatggctgtcttggagatagccccgtgtcgcctccagctgcctctttgtggtaactgcccaagagtcgttattgattatatgcatgcacccaatattcattattcgacctgttccagctcttggatatttagcaaattactgattttctgcttatataattgtggtggaggtaataccccattttgtataaattttgcccgggtgggtgggcttcgaggcaaaggagaacgaggctcggctttggattaggttcacactcctgctccgccacacttctagttgtgtgatctggagtaagggaaggccctcactttccccatctgtaaaatgaactggctatagtaatccctccgtctcatagctgctgagaggaatagaaaactaaagtatagacgcttcactgggcttagttcccagtttccctggctagggaggtctccgcggggacaccaaactctcaagcccagcctagcagctagagcgcccagcgcctgcacttttgctttaaactacaacctgttccccgcctctcttcctccgccgccacgctgggggcgtggcggttaaatgtctctgtgacgtcagcgcgagcagggccaatctccttgcccggcagacgt

SEQ ID NO: 261646 - DNA, 273 bp, Homo sapiens
tttttttttttgagatggagtctccctctgtcacccaggctggagtgcagtggtgctatctcggctcactgcaacttctatctcccagcatttcaccatgttggccaggctggtctcaaactcttgacctctggtgatctgcccgcctcagcatcccaaagtgctgggattacaggtgtgagccaccgcgcctggctatccatccttttgattatcgccattctagtgggtgtcaagtggcatttcattttggttttaattttcatttccctg

SEQ ID NO: 261647 - DNA, 480 bp, Homo sapiens
tctagcctggcgacaaagcgagactccgtctaaaacaaaaacaaaaacaaaaaaacaataacaaaaaagcacagaactgtagtgaagaagaaagatggcggacgcacataactgcatattaccaaaagatttttttgtttcttttctttttcctttttgcaagagaaccgggattaaaatctaagctttctaagtctctggatctgtaccctctccaccagctgacagtctgctaataacaatatgcactctcaaggatcaagataagcactgcaatatattcattcacaaaataatgaaatgtaagaaacctatatatgaaaaacattttcatgtctcactctcttgcttttactctgtcactattcctttttaattttttatttatttttatttattttatatctctattaaaggcttacccttaaattgtatttggaaaataaataaaaggaaaaatcacatattctcattatacta

SEQ ID NO: 261648 - DNA, 215 bp, Homo sapiens
atctttatctcaatcattattaaataaatatctgagtgtactatgccgctgatggtaactggttgttgaaaacaactatgttttaggtatattaaagtattattgtattctaaatagggagaactttatatttcctaaggaaatttattagacaaataaggttctagaaaatatgacttgattttaaaaatggcctttatcatgagagatcgcag

SEQ ID NO: 261649 - DNA, 331 bp, Homo sapiens
aatgatcaataaaaaaaaaaataataaaataaaaaataaaaaataaaaaaaagaaaattaactttggtaccaggtacaaaccagtctgggagcagatcagcaaagaaactcttgaaataaacggttaagataaaaggagtaacaaaggtgtaataccaacgcatcggcagtggcgctgaccttagaaggcttccgacagtcaatcacaatacttcaggacctatcagaggtaggatctaagcctcccagagtccccgcacgcccttgtcagcttccctgctcctctcctgatgcttcctgggatcacttccgaaataaattacttgcactt

SEQ ID NO: 261650 - DNA, 210 bp, Homo sapiens
agaataattgagaagtggtatcaataggatctggtgattgattggatttgagaactgaactgaggaagaagggggaaggtgttaagatgatttccaaggttctggcttaagagttcagtgtgtaatttcaatgtgtgtaatttcttgagataaggaactctgggaacaaggcagatttgggtagagtgtggcagcatgtgaaggtaagtt

SEQ ID NO: 261651 - DNA, 161 bp, Homo sapiens
ggcatgccagaatgcagcacagcctcagctaacctaccagggtgcttttgccagtaaccactgccatagcactttctttggaggcccccccaccccaccctactggaatgagtaggaagcgctctggtgggaggctgtcagcaaaagcactccagtcgacg

SEQ ID NO: 261652 - DNA, 310 bp, Homo sapiens
aagcaccagctttgctgaggaacatggaagggggaaaacaccgactgtgataaacaccagcaggatgactggagtccgctggaacctggaatggagttttctgacagcaaaggattacaggagcgtaacagaaattatggagatttccccgctaggcataaggatgcgatcactgtaggcacctgtgggcccaagcaggttacccaccaatatccctttaaacaccaaattatggactattaggccactgcttcaaggcttctacaaatgtgaaaccttgacaaattcccaaataaaagccataaaacca

SEQ ID NO: 261653 - DNA, 431 bp, Homo sapiens
tgtaattaggaatgtgctggttatgctgctttcaacatgaaaccttagttttcataggaagcagaaagcctatatcaatctgttagcacttgtttacatacctaaccctacttggagagcacagagttttctagctatttagcaatggttaaaagatgtttctggttatatttttcatctattttgaggggctaaaggcctggttatttaatgttgttttaacctgtggacttagttcattctcttcttcagcttttctaggaacatatcgtgagtatttccatgcattactcgccttcaggtgtcatgttcttgttcctctgaagtgttcaatgttgactaggattaatggatcctattctgtaatctgctaggctgaaaattgatgtcttgcaaattccatgccatcaaatacattttaacatggaacc

SEQ ID NO: 261654 - DNA, 423 bp, Homo sapiens
ctactttggcctcgcaaagtgctaggtttacaggcatgagccatcatgccagaccacaaagacattttttattaggccagtggatgttcggatcatctttaaacaacattgaaagttgaattgctgacagtaatatggggatagcattccagggagagaaaatactatgtttggtggagaatagatgaatttggattggggaacagaagatatttttgatgggtaggatggggtcatttcataaaggacatgaatttttagttgagacatttgggcttgatcttatagaccttaaggagccatttttggggtgtggggaaccatttttgacccttaagctacctaagtatttattaatttggtttgatgataatattgtgtattcttagttgcaggcttttgcatagagagtataacttgact

SEQ ID NO: 261655 - DNA, 721 bp, Homo sapiens
ctcttggcaaatagatcccactctctgagggttgtgttggggctcagaaaatactaccccgaagtatgacactttggcatgctgaatactttgaactaaaagagattggaaggcctcagaagcagcctcggaagcagtctctccctctgatctcctgcccttctgtctcctgcccatctttcgtcccagaagtgagtcacagaaaccagaattcttccccagcgcacttaacttggactcaccacctatcaagtgctcgacagccacgtgtgcagtggttcctacgtggagcagcatacatccagagatgcaaatattaatgaggacagtgctagtaacagagttgctgagcaatctatgtccccttgtaagaaccagtgccccaggggaagaaacagaactccacaaggtagcagtgtgggtgtagtacccgcatgtgcccatgttatgggaatgtagatggggagtgaccaccgccaacagaagtgtggccatcttgcccgagatgcctgaggacctcctatttttagatgctgctgcccaaggcctgtatttcatgctatggcttttgtcatttgaattatcagtagctgtctcggagctattacgcttcactgggccctggaggatattgtcttatacagtccactgggttttggatatgcagtctgtgcctttcattgccttcctggaaaataataactaaactcttcctcaccag

SEQ ID NO: 261656 - DNA, 636 bp, Homo sapiens
gagaggattcctacatggagtgggagactgaaataataacctcaaagatgccttccaatcagaagatttggtgattctttctgagttatcaaactgccttcctttgaccttgctcacatgtagaaatccaagtcaggcgcacttaacttggactcaccacctatcaagtgctcgacagccacgtgtgcagtggttcctacgtggagcagcatacatccagagatgcaaatattaatgaggacagtgctagtaacagagttgctgagcaatctatgtccccttgtaagaaccagtgccccaggggaagaaacagaactccacaaggtagcagtgtgggtgtagtacccgcatgtgcccatgttatgggaatgtagatggggagtgaccaccgccaacagaagtgtggccatcttgcccgagatgcctgaggacctcctatttttagatgctgctgcccaaggcctgtatttcatgctatggcttttgtcatttgaattatcagtagctgtctcggagctattacgcttcactgggccctggaggatattgtcttatacagtccactgggttttggatatgcagtctgtgcctttcattgccttcctggaaaataataactaaactcttcctcaccag

SEQ ID NO: 261657 - DNA, 471 bp, Homo sapiens
gagaggattcctacatggagtgggagactgaaataataacctcaaagatgccttccaatcagaagatttggtgattctttctgagttatcaaactgccttcctttgaccttgctcacatgtagaaatccaagtcaggcatggcctcatgactcaatcctgggggacatgagataaaggtttatgggaaaagtttgataacaaaaaaatagatgtgcaaagagatacttcttttacttcctctggaatagagtcatgtgaagaggtctttacacatagactctaactatgacatcaatcctgaaactgggagaggacaaacctgagataaaagccttgttggagatgcttcagcagaaagatggaaagatcctgagtgtttgatgacatccttgagttgcaggattaagcaaccctgaacctgcccatgctgggcttcatgtaatgtgaagtaataaatattacttcaagac

SEQ ID NO: 261658 - DNA, 181 bp, Homo sapiens
gtttgtcggcttatggaataaggatttcttgtttaggcaaggctggatccaagagttaacaagactttgccaccaggcttagctttcctctttgtgactttttcacagacaagttctccacaaagatgactgccaaagatagaaacttacatactatttttgtccagttaggcttctattt

SEQ ID NO: 261659 - DNA, 530 bp, Homo sapiens
ataatcatatctaagatctatatctggtataactattcttgttttatatttattatactggaacagctcgtgtccttggtctcttgcctcggcgcctgggtggcttgccgcccacaaacctctgtctttacctcccaccatatacaaaatactaactctaagtggaccataggcctaaacataaaagctaaaactaaaacttctagaaagaaataaaatatttgtatccttgcactaaagaaatatttcttagatagaacacaatgcaaatgaaaaatataaaagtttattttttattcttttaattttttttttttttctgagacaaagtctcgtccttgcactccagcctgggcaaaagagtgagaccccgtctccaaaaaaaaaagacatgtttaagaaaatgaaaatagcccaggcacagtggcttataacctgtaatcccaacagttacggaggccaaggcagtgggattgcttgagcccaggagttcaagaccagcctaggcaacacggagacctcatctctac

SEQ ID NO: 261660 - DNA, 517 bp, Homo sapiens
atacctgcactcttgtggttattgcagcactattcacaatagcaaagatacagaatcaacctgtgtgtccatcagtggataaaatggataaagaaaatgtggtacatatacacagtagaatactatttagccattaaaaaaatgaaatcatgtcatttgtggcaacgtagatggaactggaggtcattatcttaactgagataaggcaggcacaaaaagacaaatatctattgcatgttcttacatatgagagctagaaaatttgttcacatggaagtagagagtggaaaaatagataacagagactgagaagggtgactgtgagggcaggagaggaggaagagaagtgggtgagaggttacagacatacagttggaataaatgtaatgttagcagagtagcataactatagttaaaaatgtattgcatctgggtaatggacaccctaaaaccctgtcttgatccctcactatgcattatgtaatgaaatttcatatgtacccccataaatttgaac

SEQ ID NO: 261661 - DNA, 371 bp, Homo sapiens
tttttttttttttagatggagtctcgctctgtctcccagactggagtgcactggcgcaatttcccaaagttgtgggattacaggcatgagccaccatgctgggtgcaatgtccttttttaagaggcaattttgctctaagagaggtagaagagtgatatgggagtagtgagattggagagtatataaatgccagggcaaaaaaaacagagctttctacattattttcctttcaaacttggagaaccaagacatgcatgtttctatgatgtttgagatttttcagtaaagtagggtaaatgaataaagaaagagagaaacagaataaatataatatggaatcatgtcttttcaaaaggtaagtgagatagga

SEQ ID NO: 261662 - DNA, 654 bp, Homo sapiens
gaactacagatttcattattgtataaataaccaaagataaggagttcctgatgtctaggtgttctactagattgcatggtaaaaaccagagctgtgtttaattatcaattactgcgtggtagaaaaagggaaaatgaagatgaacttttaaaaggggagtagattagggaggggtaaaatgtctcacatttgtttcttagattgctgatcttgtctccagagtccctgttattagcactgcccttctctgtccctcccctggagcctaccctaagtgacaattagtctcatagcatctgagaatctctgaaatctgctttcatggaagcaaatgaaacaagggtgcattcctgtcctggtgcgacagaatcctcttggattccatggcacagagttactctggagcagagataatctgcatcaccacactaaagtgctagaatatgagaccagcctccaagtacttccatccggctgaagaaagaaaatgggaaatgggttttactgcttctctaaacatcaggtccctctacttctctctagtggtgaatgaaaggatcatcaatgttggcagatatttggccagcccaacagcaacatcaggtggttattaggagttggtgaataaaatcctccttctgttaaaagtgttaa

SEQ ID NO: 261663 - DNA, 409 bp, Homo sapiens
gaattccttgggtctaagaaagagggttttagtatcttttccttaagctcttttatccaatttaaagagttatttaatccattcagaggtttccatggtcaggccttgatttgataatctgtagtaagtaaacacaaatttgataatttgtgtttgaatctgcctttgacttcaagtgaatttcctaattttattttttgccatatgtggttaataataagcaataagtctctgccacatgaattgcacaatttggggacaatctctattattcccttttattcttacttacaaatcaaacaattctcttttcagctgatttcttttcttgtaattcctccataaatgcagccaatggcaactaacacatgcttctaaatgttgtcatccaacctctttccctagaact

SEQ ID NO: 261664 - DNA, 467 bp, Homo sapiens
tttaaaaattctctatggtcatataggaaagaaaaatgacctcatgcttgcaaccacaaattcaaaatgctctggaatctgtaagacgaactgcattttaattagaaaagagaaagagcaatgaagacttttattggatatttttgcaaaccctcccttgccttgccttcaggccaaaatgtgacaagtgccctaaatctgataacaaacacacacttctgaagtcattgttagctttcctaaaaagaaaaaaagagtcacattagttttctgttaccaataagagttcaagaatgcagtcttaaaataaagcacatgacaacacaaggagtatcctccatcacacttcaaaaagtaaaaatggagctctcaacccattttcctctctgcttagaaactttttttgttatgtcaggtcctcagaaccttgagccaggcaatattaaaaagccttgtggtttattcct

SEQ ID NO: 261665 - DNA, 668 bp, Homo sapiens
gccggatctgccgctccttctcctgctcctgcaggcgctggatggcagctgcctctgcacctccaggtactcctgcttcttctgccgcattatctcccgaggcaggtatatttatcaacaaagaggactcattattgtatagcactgaatctggacaagagacccccaaactgggcacgctggcagagggctcccttcagctccaccttcaagaccaggcagacagagtgggctcgacggcatccaggcaaaggcagaaagcagagatggagcagagaagacaaaaacaactggaatcgcttgaacaaatggaacacccagatatgagcttggaaatccactacaaagctgagctagaaaaagagaggagggagcaaagaagagctcgactggcccatctgaagtcctcctccacgagagcccaggaaagggagagaggatctgagctcagcaccacttccccatcgggcaccagcctcgccgacgacgaccggcacagtcagatgatccgagaccagcagcagcagatcttacagcaaaacaggttgcacaagcagtttcttgaagaagcccggaaatgcttgcgggagtttcagaacatatgctaaatgcgagaggcccacccggggtaaatacatcactgataatggtgctgccagcactggtaa

SEQ ID NO: 261666 - DNA, 491 bp, Homo sapiens
catttgaaacaaatagagccagaggtatagctaagcataagaggggaatgaggagaagctctgaggatggttggaaacattggaagaggagtcggcagctggcccagctctttgagcgaagctgctgagaagggacagaagatagtgagaagaaccttggatatagcaagaagtaccttaccttcctaaagccatactcagttctcacaaagatctaggggccatttactggccacatttgtcttctttgagcctgattgtcagagaatttggacttgtagagtgggccagaagggatttaatggcagcatcaggaagcactttggcaggtgtgaagattataaggacctcttgagtgcaatgcccagggaaactgtgtcacttttctcagaagttcctgaaggcttttcaggaatattctgattttaagtgacagaaactcaactcatatcaacttagcttgtaacaatgaataaaataagaatccatga

SEQ ID NO: 261667 - DNA, 261 bp, Homo sapiens
aatcctttctttcttagaatcaaaacatggtagaactggaagatgccttggaaatgagatactccagccactttcttttccatctttttgaaagggaatgtagtgcagtgcctaacagctgggctctggcatctataccttccgggttcgaatcctagccctgtccccagggacccagaggaggctacttaagccctgtatgcctctctctactcatctgcatgagaataaaaattgtattatgttggtgaaaaaaaaaaa

SEQ ID NO: 261668 - DNA, 1022 bp, Homo sapiens
cttgaactcctggcctcaagcaatctgcctgcctcgggttcccaacgtgctgggattacaggcgtgagccactgtctggcccatttatttatttatttattttgagacagggagaatcacttgaacccaggaggtggatgttgcagtgagccgagattgtgccactgcactgcagcctgggcaacagagtgagactccatctcaaaaataaataaataaataaaataaaataaaataaaacataaaaggtaggattattttattttgaaatacatacttcacttatcaggaaagatgtttcctgaggagcccatgacagtcatagttttcttactctttattggctggtggtaaatatgggaatgccgtcaacaaatgtataatgcctaataaaggcggacttttttctcaggaagtagtgttaaatttttttttcctttctttggaattaaaatagttactgaaggggaaaaatgtggatttcaaagagggattctgcaagataattttgtgtgttttttttttaaacatcagttttaatgcccttcagtaacttggttcattaaaaaaaaaaaaaaaaaggctgaagtaaaaagagacagggtctcaacactgtttcttcaatgtttgaagaagttgccaaagtagagagatttgagtataggtgagatcgaaagaggaaatgtttgggactaaaggaatttcaaacttgtaaagggcctaaccacgcctttcttgacatcatctctctggcatgtgttattataatttaactcctcataggatcaacaaccatttcctttggaaaaaaagaaaagggactgtgtttaacttaggataatttgccttctccaacgtacttttcatacatttctatttcttctcaatgttaatatattgaagactgatggggagtaggaggtgatgaaagtaaggctgactggtgggtactgccagatcctcattctttgagaagcttgttacctgagattgtcatgagtgtttactcaggagagagaagt

SEQ ID NO: 261669 - DNA, 969 bp, Homo sapiens
cttgaactcctggcctcaagcaatctgcctgcctcgggttcccaacgtgctgggattacaggcgtgagccactgtctggcccatttatttatttatttattttgagacagggagaatcacttgaacccaggaggtggatgttgcagtgagccgagattgtgccactgcactgcagcctgggcaacagagtgagactccatctcaaaaataaataaataaataaaataaaataaaataaaacataaaaggtaggattattttattttgaaatacatacttcacttatcaggaaagatgtttcctgaggagcccatgacagtcatagttttcttactctttattggctggtggtaaatatgggaatgccgtcaacaaatgtataatgcctaataaaggcggacttttttctcaggaagtagtgttaaatttttttttcctttctttggaattaaaatagttactgaaggggattaaacatcagttttaatgcccttcagtaacttggttcattaaaaaaaaaaaaaaaaaggctgaagtaaaaagagacagggtctcaacactgtttcttcaatgtttgaagaagttgccaaagtagagagatttgagtataggtgagatcgaaagaggaaatgtttgggactaaaggaatttcaaacttgtaaagggcctaaccacgcctttcttgacatcatctctctggcatgtgttattataatttaactcctcataggatcaacaaccatttcctttggaaaaaaagaaaagggactgtgtttaacttaggataatttgccttctccaacgtacttttcatacatttctatttcttctcaatgttaatatattgaagactgatggggagtaggaggtgatgaaagtaaggctgactggtgggtactgccagatcctcattctttgagaagcttgttacctgagattgtcatgagtgtttactcaggagagagaagt

SEQ ID NO: 261670 - DNA, 2009 bp, Homo sapiens
cgggcgtgcagacaaaatacatggatgtggtcaaggagcgaatccgtttagctcgacagattgagaaatctgagtatcggaacttccaggcttgcctgcacaactcttgggattgagcaggcagcagctgccctggagattgagctggaagaagacatgtataagggaggaaaagctgaccagcaagaagaacgtcggagacaaagcagatgaaggttctgaaggaggagctgcgccacctgctgtccagccactgtttacggagagccagaaaaccaagtatccactcagtctggcaagccgccccttgcttgtgtctgccccaagtaagagcgagtctgctttgagctgtctctccaagcagaagaagaagaagacaaagaagccgaagagccacagccggaacagccacagccaagtacaagtgcaaattaactggtcaagtgtgtcagtgactgcacattggtttctgttctctggctatttgcaaaacctctcccacccttgagtttcactccaccaccaaccccaggtaaaaaagtctccctctcttccactcacacccatagcgggagagacctcatgcagatttgcattgttttggagtaagaattcaatgcagcagcttaatttttctgtattgcagtgtttataggcttcttgtgtgttaaacttgatttcataaattaaaaacaatggtcagaaaaaaaaaaaaaaccggaaccggcggcaccagctcggagagaaatcgatgttgtagtgaccttcagtaaaagagcggtttttcatagaggtgccgttttagactacctatttaagaggcacgaaaaacaaatacatctaataggttaagtaaaaaaccatctatttcggacaataaaagttattttctacacacgttggtcttcattttactcgttaacagtatcatacatccttctaagcttatctttttgacgtgaaagtgtagtagtatgtctccacctggcagctatgtagttaatatttttgtctgttgtaatgttatcaagtaccgaacattttcctaatgaaatagtggaaaagacaacctttttctccatttctatttggatttttagatcacgtacataacaaggaatcgaataaataatgaagtgttttataaagagtatccgtcttggagggagattccagttgggaggttccataggcagttcttaccaagaagatgtcgattccattctccaacacccactaccgaattccacaaggatttgggaatcttcttgaagggctgacacgcgagattctgagagagcaaccggacaatataccagcttttgcagcagcctattttgagagccttctagagaaaagagagaaaaccaactttgatccagcagaatgggggagtaaggtagaagaccgcttctataacaatcatgcattcgaggagcaagaaccacctgagaaaagtgatcctaaacaagaagagtctcagatatctgggaaggaggaagagacatcagtcaccatcttagactcttctgaggaagataaggaaaaagaagaggttgctgctgtcaaaatccaagctgccttccggggacacatagccagagaggaggcaaagaaaatgaaaacaaatagtcttcaaaatgaggaaaaagaggaaaacaagtgaggacactggttttacctccaggaaacatgaaaaataatccaaatccatcaaccttcttattaatgtcatttcttcctgaggaaggaagatttgatgttgtgaaataacattcgttactgttgtgaaaatctgtcatgagcatttgtttaataagcataccattgaaacatgccacttgaagatttctctgagatcatgagtttgtttacacttgtctcaagcctatctatagagacccttggatttagaattatagaactaaagtatctgagattacagagatctcagaggttatgtgttctaactattatcaaatgaataaatcctctctatcacatccccc

SEQ ID NO: 261671 - DNA, 898 bp, Homo sapiens
taaagaaaaaacggttacccagcaactagaaaaacaaccggaaccggcggcaccagctcggagagaaaggaggttccataggcagttcttaccaagaagatgtcgattccattctccaacacccactaccgaattccacaaggatttgggaatcttcttgaagggctgacacgcgagattctgagagagcaaccggacaatataccagcttttgcagcagcctattttgagagccttctagagaaaagagagaaaaccaactttgatccagcagaatgggggagtaaggtagaagaccgcttctataacaatcatgcattcgaggagcaagaaccacctgagaaaagtgatcctaaacaagaagagtctcagatatctgggaaggaggaagagacatcagtcaccatcttagactcttctgaggaagataaggaaaaagaagaggttgctgctgtcaaaatccaagctgccttccggggacacatagccagagaggaggcaaagaaaatgaaaacaaatagtcttcaaaatgaggaaaaagaggaaaacaagtgaggacactggttttacctccaggaaacatgaaaaataatccaaatccatcaaccttcttattaatgtcatttcttcctgaggaaggaagatttgatgttgtgaaataacattcgttactgttgtgaaaatctgtcatgagcatttgtttaataagcataccattgaaacatgccacttgaagatttctctgagatcatgagtttgtttacacttgtctcaagcctatctatagagacccttggatttagaattatagaactaaagtatctgagattacagagatctcagaggttatgtgttctaactattatcaaatgaataaatcctctctatcacatccccc

SEQ ID NO: 261672 - DNA, 1528 bp, Homo sapiens
taaagaaaaaacggttacccagcaactagaaaaacaaccggaaccggcggcaccagctcggagagaaaggaggttccataggcagttcttaccaagaagatgtcgattccattctccaacacccactaccgaattccacaaggatttgggaatcttcttgaagggctgacacgcgagattctgagagagcaaccggacaatataccagcttttgcagcagcctattttgagagccttctagagaaaagagagaaaaccaactttgatccagcagaatgggggagtaaggtagaagaccgcttctataacaatcatgcattcgaggagcaagaaccacctgagaaaagtgatcctaaacaagaagagtctcagatatctgggaaggaggaagagacatcagtcaccatcttagactcttctgaggaagataaggaaaaagaagaggttgctgctgtcaaaatccaagctgccttccggggacacatagccagagaggaggcaaagaaaatgaaaacaaatagtcttcaaaatgaggaaaaagaggaaaacaagtgaggacactggttttacctccaggaaacatgaaaaataatccaaatccatcaaccttcttattaatgtcatttcttcctgaggaaggaagatttgatgttgtgaaataacattcgttactgttgtgaaaatctgtcatgagcatttgtttaataagcataccattgaaacatgccacttgaagatttctctgagatcatgagtttgtttacacttgtctcaagcctatctatagagacccttggatttagaattatagaactaaagtatctgagattacagagatctcagaggttatgtgttctaactattatcaaatgaataaatcctctctatcacatcccccaaaaatgttctttagctcctgtttcactcctagtggtaaagaatttcactgctttttaaggatagtctatttaattttggaatttttagaaagataagctgggacaaaaatctgcctccttcagcctggccaacatggtgaaaccccatgtctactaaaagtacaaaaattggccaggcgtggtgcgcacacctgtaatcccagctactcgggaggctgaggcaggagaatcgcttgaacctgggaagtggaggctgcagtaagccgagatcgcaccactgcactccagcctgggcgacagagcaagactctgtctcaaaaacaaaacaaaacaaaaaaaagcctctgcctccttgtaagtttaacccactggttttcatttatcatacatgtattcaatcatttattgaaaatgtattgagtactattcatgtgctgggaattagtagtgaatacttgttcttacactcatacaacttacaatgctttattgttttgctctccagaaccacacagaacaagactaataacatcatattgtaaaaagcaaaagctatcatatcatgctgccttcttcagttaaaacttcccaagtttttaaatatacaatggtaatgcctgtttaacaaa

SEQ ID NO: 261673 - DNA, 1512 bp, Homo sapiens
ccggctggtacgcccccgggttatgggatggcggcaccagctcggagagaaaggaggttccataggcagttcttaccaagaagatgtcgattccattctccaacacccactaccgaattccacaaggatttgggaatcttcttgaagggctgacacgcgagattctgagagagcaaccggacaatataccagcttttgcagcagcctattttgagagccttctagagaaaagagagaaaaccaactttgatccagcagaatgggggagtaaggtagaagaccgcttctataacaatcatgcattcgaggagcaagaaccacctgagaaaagtgatcctaaacaagaagagtctcagatatctgggaaggaggaagagacatcagtcaccatcttagactcttctgaggaagataaggaaaaagaagaggttgctgctgtcaaaatccaagctgccttccggggacacatagccagagaggaggcaaagaaaatgaaaacaaatagtcttcaaaatgaggaaaaagaggaaaacaagtgaggacactggttttacctccaggaaacatgaaaaataatccaaatccatcaaccttcttattaatgtcatttcttcctgaggaaggaagatttgatgttgtgaaataacattcgttactgttgtgaaaatctgtcatgagcatttgtttaataagcataccattgaaacatgccacttgaagatttctctgagatcatgagtttgtttacacttgtctcaagcctatctatagagacccttggatttagaattatagaactaaagtatctgagattacagagatctcagaggttatgtgttctaactattatcaaatgaataaatcctctctatcacatcccccaaaaatgttctttagctcctgtttcactcctagtggtaaagaatttcactgctttttaaggatagtctatttaattttggaatttttagaaagataagctgggacaaaaatctgcctccttcagcctggccaacatggtgaaaccccatgtctactaaaagtacaaaaattggccaggcgtggtgcgcacacctgtaatcccagctactcgggaggctgaggcaggagaatcgcttgaacctgggaagtggaggctgcagtaagccgagatcgcaccactgcactccagcctgggcgacagagcaagactctgtctcaaaaacaaaacaaaacaaaaaaaagcctctgcctccttgtaagtttaacccactggttttcatttatcatacatgtattcaatcatttattgaaaatgtattgagtactattcatgtgctgggaattagtagtgaatacttgttcttacactcatacaacttacaatgctttattgttttgctctccagaaccacacagaacaagactaataacatcatattgtaaaaagcaaaagctatcatatcatgctgccttcttcagttaaaacttcccaagtttttaaatatacaatggtaatgcctgtttaacaaa

SEQ ID NO: 261674 - DNA, 432 bp, Homo sapiens
tagggaacgttagcagagtgactataaaactggatcagcctggcagtcaaggttaccaacaagaagcaagacaacattccagccagaaatccactggtcttaaaaactcctcagctgggacagacaaccacaaaagttgtgtgagaagataatccaaaagttgtttgaaatgacaactgtttccttagtaggagaacacctttcaaacaccagatttgaatttagaatacttcagaggaatcaacacatagtaacattatttcatggttaaggtgtttagatacaattttccatgggtctttcatatttctgcatgtcttgtgagcagagggtgtttttctgaacagctttggaagacagagatggtgcccttcaagaacaaagggcaggttggtttgctctctgatataataaagataacgtctccctcca

SEQ ID NO: 261675 - DNA, 390 bp, Homo sapiens
gagacagcagctgagacggcagcggcagcttctcagggccggagccagttcttggaggagactctgcacagggcatggatcactgtggtgcccttttcctgtgcctgtgccttctgactttgcagaatgcaacaacagagacatgggaagaactcctgagctacatggagaatatgcaggtgtccaggggccggagctcagttttttcctctcgtcaactccaccagctggagcagatgctactgaacaccagcttcccaggctacaacctgaccttgcagacacccaccatccagtctctggccttcaagctgagctgtgacttctctggcctctcgctgaccagtgccactctgaagcgggtgccccaggtcagaggctgcgggttgg

SEQ ID NO: 261676 - DNA, 1757 bp, Homo sapiens
gagacagcagctgagacggcagcggcagcttctcaggtcagcctcctccgggcctctccccactctcctctgcccagttctctgtccttatccacaggcccctcagtgggcactggccatacccatgtccaggtgggcacagacctggtgatatcctggtgagcaagctggggacccaccctccttccctttctggttggcagctccacatctggggcaatgtagagatctgtgcttttggaaggaggggcaatttaaattaagaagtggttaggcatgggtctcgaatcttagcttccccgcgaggtctgggacaagtgaagagaggtttcttttctggacctcagtttctcatctgtaaaatggggtgagtctgggaacctgcaccttggatggctgtcaggggctcagtagaggacctggcacacagtttgtgcttggcaatctggagcaggtgcagctcctttcagagtgacctggattggatcctggggacagcatgtctcagggccggagccagttcttggaggagactctgcacagggcatggatcactgtggtgcccttttcctgtgcctgtgccttctgactttgcagaatgcaacaacagagacatgggaagaactcctgagctacatggagaatatgcaggtgtccaggggccggagctcagttttttcctctcgtcaactccaccagctggagcagatgctactgaacaccagcttcccaggctacaacctgaccttgcagacacccaccatccagtctctggccttcaagctgagctgtgacttctctggcctctcgctgaccagtgccactctgaagcgggtgccccaggcaggaggtcagcatgcccggggtcagcacgccatgcagttccccgccgagctgacccgggacgcctgcaagacccgccccagggagctgcggctcatctgtatctacttctccaacacccactttttcaaggatgaaaacaactcatctctgctgaataactacgtcctgggggcccagctgagtcatgggcacgtgaacaacctcagggatcctgtgaacatcagcttctggcacaaccaaagcctggtactgctgggggcgcccccgtttccactgcacccctgcccctctgtgactctcctgttgaacactggtttgactagacccaaacctgtggaaccatcttggaaatccatcacactttgaaaattcctgctcaagaaataagagagagagaagtttttactcatgcatttgtcagaattctttcagttgcaagtaagaaaagaccacttcaagccagcttgagcacagagggaactgattggcacacatccatgaaatgtctagaggtgatccaccagcttcagacatagctggatccagggatggatctgatgcccttgtggctcagtctctctccgtctcagcaatggtctcctgtcttggctgtccattctgtggcatgatggatgctggagagccagacttcctttccctcttcccatcaggctcttcccccgactccccacccacaacctgccccagtgcagatcagggtctcaggatcttaaaggttcagctgggtcacacatgtccatccctgcacctgtcactgtgcccagggggatggaatgtgtggattggccaggcctgggtcacacggcccagggactggggtgaaggagtgagctcctagggtaagtgcagatgctgatcctggaacagagacagggctgcttgttgggggt

SEQ ID NO: 261677 - DNA, 703 bp, Homo sapiens
aacaaattatcattatgttaatactttactttgaaaggtgtcattattttcaagacgtatcatttaactgatctactttatctagttacccacacctatgacttccataagtgaaatgtctttatcagtgaaaacaaaactagcctggataaatggagtaggattgaagacctaaacaaaaagccattcttgagctgcccaggttgtgtcctgcccacagtggcccccaagatcacctgagtgggaggtgaaatccagcctgctcttcccttcaccaagttgctcaccttgacacgggctgcatcagcctggaggacaggctgcctctcccaagtggttctgccataatggctgaaattttgtaatcattactgggtgaagcagaatgcaatttttcacctttgtagtgggcgtataatttataacaataaaaagagaaaatgatggcagataaaatagagagtatagcagaagctagaagtcatacagctcttaattgttaaagccaagaccctcagtggagggtctgtcaaaggcacctcagtactaatagccactggcggccttgtgctaaactcccctttacttgttcactaccttcataggtttaagggcatcaaatactgctcctttttcattgcttcacccagttcatgagtgacatggtatcagactgtgcttgagtcagacatgatgctagttg

SEQ ID NO: 261678 - DNA, 485 bp, Homo sapiens
gctcggttttcgagtagagtctgcctgtgggtgagattgctcggctctgtacggcgcttagcatctttctgactgcaatgcttgtgtatttcttaatcgtagctatcatttgagtttttaactatgtacaaggtattgtgctaagcgctttacagtccttcataattctcatagcagccccatggggaaagtactattattattcccacttttacagatgacgcccagagaagacaggtaatgtgtccgaagtcacgcagcaggaaactaggagccagagtcaacctaggaaaactgcatttagaacaggaggtctaaccactgtgctctacacgcgggtggttttcacttcgtgaagttttggggaatgggggtagtgcttgggttataatcttgcagttgggatcaggccctttagggcatattccggctccagacccgccgctcagcttctctggctcccgggcatgggaatctggactcgg

SEQ ID NO: 261679 - DNA, 1398 bp, Homo sapiens
tgagtctttatccctttgtaggtctttacttcttaacttagggattctcaaccttctctaaacataatcacttagggagcttttaaaacccaaagttaggatgcacccaaagccagttaaatcagaatccctggggatgcaacccaggcggcagcatttaaaaaatacccaagtgattccaacctacagacaaggatgagaaaactctcctaaactcttgtataatgacatcggcatgaaaatgaactcacctgaaactgaccttcccaggacattaagtcactagttggctgcttatggcacttgccagtgtccagcagtttcctggctgctcctggaggttgccagacacccggttcccccattctcaatgttggaggcccacagtctctgcacttaggggaccagctgtaacctccccacctgaccagatgaaccgcggggaaacaaagcgagaagctcccacctacaggatgcaaggacccaagctgggatttgtgagagtctcagcagaggctgtgaggaactccacagaaaatgaggcaggaaagcaaaagttccttgttagggcttggaggaggagagggttgtcaagcatgttttctttattattcccacacataagggagctggctttaagagctttctgtgacaaacctgaggagaaaaagccctgagacttagaaggcatttaagaatacagctcaagggggaaatcggtggagactgtatctgcggtggttttctccacctgtagccagaggctctctcatagggttctgtggctttccttggggtgccttttaaaggcatcccagtccagcccaggactgactggattccaggagatctcagaggctggtctgacaccaaagaaggctgtaaagagaagagaccatttggatgactgttttcatggaaagtgagccccagggaggctggcctgagattacacagctgattatgggcctcagcctgactcttaaaacaatgcttgtgtatttcttaatcgtagctatcatttgagtttttaactatgtacaaggtattgtgctaagcgctttacagtccttcataattctcatagcagccccatggggaaagtactattattattcccacttttacagatgacgcccagagaagacaggtaatgtgtccgaagtcacgcagcaggaaactaggagccagagtcaacctaggaaaactgcatttagaacaggaggtctaaccactgtgctctacacgcgggtggttttcacttcgtgaagttttggggaatgggggtagtgcttgggttataatcttgcagttgggatcaggccctttagggcatattccggctccagacccgccgctcagcttctctggctcccgggcatgggaatctggactcgg

SEQ ID NO: 261680 - DNA, 308 bp, Homo sapiens
atccaaaggatctcacagcgtggttccaatgaagattctgctggtgttctaagagtagtatgtgatggaagagctgcctcatcacgtagcagatgaaagcacagtggcctccgcaaggtccagcccactgcatcagtgccagactcacacggagtacagatgcaatagctggagccacagaagccatattgtgaccatcaggcaccttgaacttgctggcctcgtgctaaggctcttagcgcagaagagtccggatatttcctgattactctgacacaagagaaaaataaaacctcaattcacttaaa

SEQ ID NO: 261681 - DNA, 443 bp, Homo sapiens
  misc_feature (7)..(7): n is a, c, g, or t
  misc_feature (262)..(262): n is a, c, g, or t
  misc_feature (279)..(279): n is a, c, g, or t
  misc_feature (426)..(426): n is a, c, g, or t
gaacgcncgacaacgataagaaactttttttttttttctttctttctttctttctttctttttctttctttctttctttctttctcgctctcgctctctccctccctcgctcgttttctctctctctcgctcttgccctctcgctctctccctcgctcgttttctctctctctctctctctctctctctgtctctcgctctcgccctctctctctctctgtctctctctctctctctctctctctctctctctctctctctnctcttctctcagccttntagatcttttccccgcccccgccccgttttttttttccctttttgggggagttaaacccacggaggatatttaaaccccccttttttattttttaaaacaccccttttttgcccccgggggggctccccccccaaaaaaaagaagcnccccccccccccccgta

SEQ ID NO: 261682 - DNA, 402 bp, Homo sapiens
  misc_feature (7)..(7): n is a, c, g, or t
  misc_feature (243)..(243): n is a, c, g, or t
  misc_feature (255)..(256): n is a, c, g, or t
  misc_feature (283)..(283): n is a, c, g, or t
gaacgcncgacaacgataagaaactttttttttttttctttctttctttctttctttctttttctttctttctttctttctttctcgctctcgctctctccctccctcgctcgttttctctctctctcgctcttgccctctcgctctctccctcgctcgttttctctctctctctctctctctctctctgtctctcgctctcgccctctctctctctctgtctctctctcgcagccccgtatnaagtagtaaagnntttaaaggggggggcccccgggggggnccccccccccgggccccctttttccccctttttaaaaaggagaaaaaaaaggggggggggggaaaaaaatttttttcccccccccccccaaaaaaaaaaaaggggggggcccccccttt

SEQ ID NO: 261683 - DNA, 318 bp, Homo sapiens
aagtggctctgggtgtccatgggcctcaagactgggcctggggagtgtgggtgggggaatgggagagacactgcaacctataacagtgctaaagagcttcccggagtggttgtactaatttacactatttgctggagtattttaaagctaattccagacatgaaatcatttgccttgggagtgttttttgtttgtttgttttgttgtgttttttgagacagagtcttgctctgtcacccaggctgcagtgcagagacacagtgagctgaggtcgtgccactgcactccagcctgggtaacagagcgagactctgtctg

SEQ ID NO: 261684 - DNA, 451 bp, Homo sapiens
ttgctatgtaaggtaccatattcacaggtctcggggcttaggatgtggatgttttccaagggtattattctgtctgtcacagtccttcaggtaagctcctgtggcacctctttgaaatcaagaggactttcctgcccctgttcctctctagcccatcaccgtgtttcatttccctcattccgcttcacagcctttgatgtcccctcgttcctgaattttttccacctgtctctccctatggaatggaagccccgtgcgggcaggggccttacctgtctagtttttcactgctcctggacctggcttcactactttgaatgtttcctgggcagtgaacaaactttgtgtgagactccctctcattttttccacattggcccagccctcagttacaaatgccagaacaacttctgtttctaggaaattcaattagaaggcatacctatgactt

SEQ ID NO: 261685 - DNA, 485 bp, Homo sapiens
tggtggcaggtgcctgtgatcccagctacttgggaggctgaggcaggagaattgcttgaacctgggaggcagaggatgcaatgagccaagaccacgccgctgcactccagcctggggaacagagcgagactgtgtgtcaaaaaacaaacaaacaaacaaacattttaaaagaaagaaagaaaaaagggaaaggagagcatcagagtctaagaccacacagaaaccctctctttactgcagtgctgaagccctcgtggcagccatgccctgctcacttttgggatacccatggactcagggcacgtcctaaggtgacacctgtcaccagccctatgcctgcctctgtccaccttcgcctctgctggagaccattctcagacacccctgagatgcccagaggggacctgcaacctcttcccaccccacctcccacaaggggtccctgggaaaactgggggtaacattccccccaccctcacccctac

SEQ ID NO: 261686 - DNA, 226 bp, Homo sapiens
gttggaatattaataatgatcagtttggattttttcatgccgatctgatgacacccagagcagcaactggaaggaagacaatccttggcccagtagaagatgggcagccccatcgagggctaaccaacggacagtttgcaggtttacttactaggttattaatgtcacagccaagacagaaatgagtgatttccccacacaattgtttgtgaaccgcaaggattct

SEQ ID NO: 261687 - DNA, 714 bp, Homo sapiens
gggaagactggagatacagagaggaacaaatctccatcctagctttggctacttgtacattctcacgtggtcaagcaggatctccagtgaatactggagcacacccagatgctgcaagaaactttgaagtgatttggggcatacacacaggccagatcaggaggttatgcccaaaatcagatggaaaaacctccctgtggtttgcaccctgccctcctatcctctgcaggacattcagagtaggtgcttaattaatacgttttgtatgtacactgccttccaagcttctgctcctcctctgattccaaagaggttttgagtttcttattcctcacaaagttcctggcttcaacctggcagatgcaaacgtctgtcatctctctctgtctcagatgccttggtacagaaatagagccaaatcacaaaagccctggccaggctaggtgtcacaaatatgtaatgtccttatcctgattatgttcagtttaaaaatttggggtctttcttctctagatttttctaactatatagtttctttactgaaaatgagagatacctataacaagatgtgtgcacagaaagaataggatatatgtgtagtctagaaaccctcccttaaaaatggacaaccagcagccctcagggctgttttgactatggagtaaccatttttttattcctttacttttttaataaacttgctttccctttgca

SEQ ID NO: 261688 - DNA, 663 bp, Homo sapiens
ttcacatgtattaagtcttttattcattataataaccttcaaagtggatgttacccttggttgagaaaactgaagcacagaaagtttaactaacttaactttgtcttaggactagtaagtgccagagggaaattcaaacccaggcagtccacatcagagtccaagctcttaaacactgtctatacgccctctctaaggtgtgctaaaacattctgtctggcagaacctcactggagaatattagtctctctgagtagctttagcttatccccagtataagatagggaaagagaaattcagacagggaacacatttctatgctgacttctatagtaatgaattttttgataagaaagtatttcctcaaaacccttcacctcttttaatagaggcattaccgttttgaaaacatccaaactggtgtgctttgttctctgaatatgccttagaattatctttcttgcttatcttaccggcttcctgatttttaatatgacttctcccactcttgaaaaaaaattctactttgtacttatgtagtgcttgcatttcaaagtactccttattatcactctgccgtagatttgctatcagagaaatgagggtaatgggaagtatatataggtgtatgtgtctgtgttgtgtttatactttatgctcttt

SEQ ID NO: 261689 - DNA, 501 bp, Homo sapiens
agcctaggtgtgcgacctgctggcaggatacctgggccatctcgtgcagccactggctccttcctcgctctcttggtgctccctgttcaacagaggcttttccaggcagggtgcaaacagccagagcttaatgagcttttaagattagagatgctattcgcctggggttgctgtgcagccgagactgagggtgactcatgccgaatatatactgcctagacagtgacaattcgcagcatctctcactactaaactacaaaatgttgttcccttgctctccctcaccctgggccatctgtttgtctctattactggttacacagtactgtcaggggacttctgccccctcctacatggctcacttcagggctgccactccacacattacaaacctacacatctaagacccggaaccagcccttctgttcagcagcaacatgtccacccccagctccaagctggggagcgaattaaagtgattaacaaatggtaaatggtgct

SEQ ID NO: 261690 - DNA, 260 bp, Homo sapiens
cctaaaatatcgaagatgcaattaaaaatcatttgtcacatcaaaacccaggaaattctcaacttgaatgagaaaagctaatcagaagatcatgaccctaattagatgacaaagatgttagaattatttggcaaggattctaaagcaaccatcataaaaatgcttaagaaccaagtaggaacattcttgaaacaaatgaaggaagtgggatgtctcagcaaagaaatagaagacctgaaaaagaatcaacttgaaatttt

SEQ ID NO: 261691 - DNA, 926 bp, Homo sapiens
gctgtatttcattaagctatagtgcaataaaataaaggaagaaaatgtaagagacaaagttttgccttatagtgattatccggtctccagtcttgtcattctatttatctgtatccaccctcccctaaccaactaaatgtaaacttgaagacagggatgttttatccggtttactgatgaaactagaaccgtgcatagcacatagcaagttaccagaaaatttttgttggatctttcccctaccttcctttgaaacttcttgatctctttctgctgttgatattactactctttattgagaaatgaaatcttgatgctacttttaggttctcaattatttttgcctcccattctttacatccagtaaatgaattaacttggtgagttaacttagaccagtatctggcacatattagaccctctatatattagctgtatcagcactgtcatcatgattattatcatcatcactaccatcaccttttatttagctttggcagtctctgtgtctgccttctgttccatccacttcctctctgagtgatcacttctcacccaaaattttgcatttggcttcttaaaagtctacctgtatacatatctgtgtctctctcttatcttttgtcttcagtattccttttctgctccggtgtaacttttacagtttcgcttttttttttttttttttttttttaaagacggagtctcactccattgccaggctggagggccatggcgcaatctcggctcacgcctgtaatcccagcactttgggaggctgaggcgggcggatcacctgaggtcaggagttcgagaccagcctcaacatgggaaaccccgtctctactaaaaatacaaaattagccgggcatagtggtgcatgcttgtaatctcagctactcggaggctgaggcaggagaattgct

SEQ ID NO: 261692 - DNA, 1160 bp, Homo sapiens
  misc_feature (2)..(2): n is a, c, g, or t
  misc_feature (4)..(4): n is a, c, g, or t
  misc_feature (6)..(6): n is a, c, g, or t
  misc_feature (8)..(9): n is a, c, g, or t
angncntnnacccacgcgtccgggattttttagcttgcaaaaaaaatgagcaccaaacctgatatgattcaaaagtgtttgtggcttgagatccttatgggtatattcattgctggcaccctatccctggactgtaacttactgaacgttcacctgagaagagtcacctggcaaaatctgagacatctgagtagtatgagcaattcatttcctgtagaatgtctacgagaaaacatagcttttgagttgccccaagagtttctgcaatacacccaacctatgaagagggacatcaagaaggccttctatgaaatgtccctacaggccttcaacatcttcagccaacacaccttcaaatattggaaagagagacacctcaaacaaatccaaataggacttgatcagcaagcagagtacctgaaccaatgcttggaggaagacgagaatgaaaatgaagacatgaaagaaatgaaagagaatgagatgaaaccctcagaagccagggtcccccagctgagcagcctggaactgaggagatatttccacaggatagacaatttcctgaaagaaaagaaatacagtgactgtgcctgggagattgtccgagtggaaatcagaagatgtttgtattacttttacaaatttacagctctattcaggaggaaataagaatcatctaccttcaagcaagaattaacagagattgtggctacgcaaatgcaccaaaaaagggtgaaatatatctgaaatgtacctggttctgcccttggaagccacttcctgctcatgccactaacagcatgctgccaaactgttcagattcaagattattccaagcgcagggcccaaatgttatagccaaagaaagtcttatgataaaagtgaggcaaatttcagccaagaagttagaagagatgtttaaaagaacaagaacaaattgtggatcatggtatatgcaggctatcagcagaaggatcagacaataaaatgagttagtgcaaaccatttagtaaaaataactatcagcagagttgttccagattaaaaatagtactacaagcttgtaaaggagttaggacatgcaagctactgagcataaaatatatacttgctatttttcatgactttctctaataaagtctttgactgttctctctaat

SEQ ID NO: 261693 - DNA, 747 bp, Homo sapiens
  misc_feature (1)..(1): n is a, c, g, or t
  misc_feature (17)..(17): n is a, c, g, or t
  misc_feature (29)..(29): n is a, c, g, or t
nctccgaaggttgaggntatagaaccagnggatccttttggctgcaggaattcggctcgaggctaatgcttgagactgagcaatttataaaagaaagaggtttaattgactcacagtttctcatgactggggagtccttaggaaacttaaaattatggtggaagccaatggggaagcaggcaccttcttcagatggcagcaggaaagagaaaaagaaggggaaactgccatttataaaaccatcagatctcaagaaaattcactcactatcatgaaaacagcatgggggaaactgccccatgatccaatcacctctcactaggtccttccctcaatacctaaggattacaatttggattacaattcaagatgagatttggttggggacacagagccaaaccatatgattccactgctggcccctctcaaatctcatgtcctcacatttcaaaacacaattatgccttcccaacagtctaccaaattcttaactcattccagcattaactcaaaagtccaagtccaaagtttcatatcagacaagttccttctgcctatgagcctgtaaaataaaaaataagttagttacatccaagatacaatggtggtacggacattagttacatccaagatataatggtgatatggacatcgagtgaatgttcccattttaaataggagaaattagccaaatataaggggctacaggccccaggcaagtccaaaacccagctgggaagtcataaa

SEQ ID NO: 261694 - DNA, 974 bp, Homo sapiens
gcgtgtgcaaaaccacaggatttattgtgcatgcatagttcagaatacaggaacgtgtatgggagtgagggccggtcccatcgagtggggcctgtaccctgcaagtgaggcccatataccctgaatggtgtcttgctcacaggtggtgcctgggcccccctatttgatactgagacccatatactgtgaatgaggccagtatcccgagtaagtcctggtcctacgctgcaaggccagtgccctttgatttaggcctatataatcctgaattccacctggcccctggaagggggaattgtaacccccagtgatgccggtaccctctggaaggaggcctctatcccctgaatgaggtcgggtatccttgagtgatttctggccctctgtggtttcggccttgttttttgctggttaatgaaagtggtgcttccaggccccaagtccttgtcatcgggacctttaagaaaagcgtctcaggccacagcgacgcagaccccagctcaaggctgcaccgttgccatggagacggttgggcgggggacaggggagggtgtgcggctccctctgcgcaggcgcacgcgcgagcagccgcgtcgcagcggaactgctgagattcaggcccagggtgcgcgctcagacgcggcgcgagcgccaggcaagctgcggctgctacctcccacgcctctccaggtgcactcggcgccgcccccctgcacctggctgcggtgccgagtcactcaggcctgtgtcagggagagagggagggagctgtcctggaaagcagacactgacagtgaggggtggctggactggtccagatgaaggctgatttggagtcaaatctctggttttctggggcgtttgaaaccataccccagaggcatcaactggctacctcaggggaactggccctgcaggctccatttgaaacccccttgatttgaaaatattgacgcctctgttcgcatctcatc

SEQ ID NO: 261695 - DNA, 234 bp, Homo sapiens
ctttccacgtgccactcccctctcttccggatcattgcagctctccccaccagccttatcaatgtggggctccaaccctacaggtcagtgattcagtcccaggttggagccactgccacgagccttttctgcacagacgggaatgtttcctctgccttgtgagcgcagggctatcgggcactggaaatatgcctgatgtgatgaggtactggagattacatttgaaaattaatt

SEQ ID NO: 261696 - DNA, 92 bp, Homo sapiens
taccaaatatatttctcataaacaggcttatatgtttatctaacattaatatagtaaggaacgaaggtgatgtaatgcttcagaaccaagag

SEQ ID NO: 261697 - DNA, 414 bp, Homo sapiens
ggattacaggcatgagccatcgagcctggcccaaagattgttttttgttttgttttgttttttgagatggagtctcgctgtgtcacccaggctggagtggcacgatcttggctcactgcagcctccgcctcccaggttcaagtgattctcttgcctcagcctcccgggtagctggcattacaggcaggccctactgcgcctggctagtttttgtattagagacgaagtttcaccgtgtttgtcaggctggactcaaactcctgacctcaagtgatcctgagcctcagcctcctaaagtccttcgattacaggcatgagccaccacgcccggcccaaagattggttttattgcatttgttaaactgtgggataggtacttgggtatttcattattgttcttttttttttttaagt

SEQ ID NO: 261698 - DNA, 471 bp, Homo sapiens
agtggagacttgcaagatccataggggtatttcctgtggctttctcttcaccttgtagcaaatctctagcaacctggacagtagattcaaatttttctctttatcaattaacatggaataaaaagaccaagaataggaacctttggtgccaaaaatcaaaagggaggaaaatatgttttatttgatttaaagataaagtcctattgctttaaaataagtcagaagaaataaaagttgaggttctcatagaaaccaactcctcctccttgctcagacgtagcatttgtgcctgttagatgctgtctgcacagtgccactgtgttacataaaagcttgagccatgtaggagctttcttgtcattcagaacactgcagctctagcttttgacctcagatactttgttttctgtgaatttgttaatgaaggtatgaggttgttgttttggtatggataataaagagaaacccagg

SEQ ID NO: 261699 - DNA, 423 bp, Homo sapiens
cagaaggcagttggaacacagggagctcattcattgcaacaaaagttgaacacctactatgtgctcattacaagaggaacttcaatgaagaagggagaggtctgccttcctgggcctggggtctggtgggggagattgtcagtgataaacctaaggtgcactgtgactggggacatgacatactaaagtggtggcatttcacatgcgtccggaaaaacaggtagaattctgagaggggacaccagaggaggtggatattccaggtagaggaaaaaactcagttggtttctccctaatagaggaaaggtctttccgataacatgagctgtccctagacaaggtgggttgtcttgtgaaggagtgagttttggtggcatttacataaagaatagaagaccacatgttaaagggactgccattctg

SEQ ID NO: 261700 - DNA, 542 bp, Homo sapiens
ctcagtccaatgagctgccattgaatcaggtacacattcctcctcaaatttgctgtgactatgctgtagggggtggtcacacaatgtgcatgagctctttcccacctttagagccatgagaacaattttactgaaaaggagctatcgatgggcacacactggatttcatactttgagtacatctcccacccaccacctttaggatcaagggttagatccatctctcctcagagaaaacaaagttttttgtttgttttaatttgatttgattttaggttccaggatacatgtacaggacatgcagctttgttacataggtaaacgtgtgccatggtggtttgctgcatccatcaacccatcacctaggtattaagtccctcatgcattagctgtttgtcctgatgctctccctgtgtccatgtgtactcattgttcagctcccacttatgagtgagaacatgcagtgaaaaacaaagtttaaaaaaagaaaaaagatatagagatgttaaactagttgggccagcttggaaacaaatctagaa

SEQ ID NO: 261701 - DNA, 580 bp, Homo sapiens
ctcagtccaatgagctgccattgaatcaggtacacattcctcctcaaatttgctgtgactatgctgtagggggtggtcacacaatgtgcatgagctctttcccacctttagagccatgagaacaattttactgaaaaggagctatcgatgggcacacactggatttcatactttgagtacatctcccacccaccacctttaggatcaagggttagatccatctctcctcagagaaaacaaagttttttgtttgttttaatttgatttgattttaggttccaggatacatgtacaggacatgcagctttgttacataggtaaacgtgtgccatggtggtttgctgcatccatcaacccatcacctaggtattaagtccctcatgcattagctgtttgtcctgatgctctccctgccccaccaacaagccccggtgtgttgttcccctccctgtgtccatgtgtactcattgttcagctcccacttatgagtgagaacatgcagtgaaaaacaaagtttaaaaaaagaaaaaagatatagagatgttaaactagttgggccagcttggaaacaaatctagaa

SEQ ID NO: 261702 - DNA, 930 bp, Homo sapiens
ctgcattatctcttgacattcttcccattatacctctggatcttagcacagatagttatcatttctctgtcatgggtttgcaaagcctgttatcctattgagatcacaatcacttattaaatcgttcacagattgactccctcagtaagtgatactaactttactccagaatagacctaatatttatatacccttgatctccctgcttctacttctcttgtcctcatagtctgattttcacacagcagccagagggatcctttcaaaacaggtcagttaatttttttgttaatggccagatatggtttttattgtaaccactcaactctgccattgtaatgcaaaaacagccatagaccatatgtaaatgaacaggtatggcacttataataaaacttaatatataaaaacagagccaggtacagtggctcacgcctgtaatctcagcactttgggaggctgaggcaggtgaatcacctgaggtcaggaattcaagaccagcctcgccaacatggcaaaaccccgtctctataaaaataaaaaataaaaaaaattataaatacaaaaatacaaaaattagctggacgtgatggtgcacacctgtaatcccagctacttgggaggctgaggcaggagagtcactttaacttgggaggtagaggttgcagtgagccaaaattgcgccactacactccagcctgggtgacagattgagactctgtctcaaacaaaaccaaaatcaggcagtgggctgtatttgcctatgggctatagtctgctaccacctttttaaaacacaaattagataccaccccctcttaaaattctcagggactccctattgctcttaaagtaaaacccagacttcttactctggccttcaaggtcctacatgacatacattctgccaacctctgacttccactcagt

SEQ ID NO: 261703 - DNA, 2070 bp, Homo sapiens
  misc_feature (286)..(286): n is a, c, g, or t
  misc_feature (304)..(304): n is a, c, g, or t
  misc_feature (398)..(398): n is a, c, g, or t
  misc_feature (425)..(425): n is a, c, g, or t
  misc_feature (528)..(528): n is a, c, g, or t
  misc_feature (540)..(540): n is a, c, g, or t
  misc_feature (675)..(675): n is a, c, g, or t
  misc_feature (684)..(684): n is a, c, g, or t
  misc_feature (688)..(688): n is a, c, g, or t
  misc_feature (816)..(816): n is a, c, g, or t
  misc_feature (1029)..(1029): n is a, c, g, or t
  misc_feature (1055)..(1055): n is a, c, g, or t
  misc_feature (1080)..(1080): n is a, c, g, or t
  misc_feature (1151)..(1151): n is a, c, g, or t
  misc_feature (1375)..(1376): n is a, c, g, or t
  misc_feature (1384)..(1384): n is a, c, g, or t
  misc_feature (1417)..(1417): n is a, c, g, or t
  misc_feature (1646)..(1646): n is a, c, g, or t
  misc_feature (1766)..(1766): n is a, c, g, or t
  misc_feature (1846)..(1846): n is a, c, g, or t
  misc_feature (1961)..(1961): n is a, c, g, or t
ggcaggaaagaagagtcacatcacgtaggtgatgggcctagagatatttcacaatgccttctgtaattagaacccagaaaaaagagttatatcatttgggttaaaggtcttgtgatatgtcacaatcccaactaagggcaggacccaggcagaaaaggagagtcacttcctttgatgattggtccagagatacattacaatttcccctgaggacagctctcatgcagaagaggaactgaatatactgcatggctcaggtatctgcagatttatggctaaaagaccnggaccccctggaagccgngaaatgggactgttgacattcagagacatagctatagaattctctctggaggaatggcaatgcctggattgtgctcagcggaatttatataganatgtgatgttagagaactacagaaacntggtctccctgggtattgctgtctctaagccagacttgatcacctgtctggagcaaaataaagagtcccagaatataaagagaaatgagatggtagccaaacncccagttacgcnttcccatttcacccaagaccttcagccagagcagggcatcaaagattcactccaaaaagtaataccaagaacatatggaaaatgtggacatgagaaattacaatttaaaaaatgctgtaaaagtgtgggtgaatntgaggtgcncaangaggttatagtgaagttaaccaatgtttgtcaactacccaaaacaaaatatttcagactcataaatatgtcaaagtctttggtaaattttcaaattccaatagagataaaacaagatatactggaaanaaacatttcaaatgtaacaaatatggcaaatcattttgcatgctttcacacctaaatcaacatcaggtaattcatactagggagaagtcctacaaatgcaaagaatgtggcaaatcctttaactgctcctcaaaccatactacacataaaataattcatactggagagaaaccatatagatgtgaggaatgtggcaaagcctttagctggtcngcaaaccttactagacataagagaantcatactggagagaaaccctacacntgtgaagaatgtggccaagcctttaggcgctcctcagcacttactaaccacaagagaattcatactggagngagaccctacaaatgtgaagaatgtggcaaagcctttagcgtatcctcaaccctcactgaccacaagagaattcatactggagagaaaccctgcaggtgtgaggaatgtggcaaagcctttagctggtcctcaaaccttactagacataagagaattcatactagagaaaaccctatgcctgtgaagaatgtggccaagcctttagcttatcctcgaaccttannagacatangagaattcatactggagagaaaccctacacatntgaagaatgtggccaagactttaggcgctcctcagcacttactatccacaagagaattcatactggagagagaccctacaaatgtgaagagtgtggcaaagtctttagcttatcctcaaccctcactgaccacaagagaattcatactggagagagaccctacaaatgtgaagaatgtggcaaagcctttagcttatcctcaaccctcactgaccacaagagaattcanactggagagagaccctacacatgtgaagaatgtggcaaagcctttaattgctcctcaacccttatgcaacataagagaattcatactggagagaaaccctacaaatgtgaagaatgtgancaagcttttaagtggcattcaagtcttgctaaacataagataattcacactggagagaaaccctacaaatgtgaataatntggcaaagtccaccctcaggccttataatacataaaataatttacactggaaaaaaacactacaaatgtagagaatgtggccaagcctttaaccagttccaaaccttaattgaangtaagagaattcatattggacagaaattttataaatgtaaaaaaatgtaacaaagcctttaaccaaccctcaaaccttaataaacctaagagaatttattttaaaaaaa

SEQ ID NO: 261704 - DNA, 673 bp, Homo sapiens
cagcagagaatatgaagactatatagcaaaatagaggtcaaggaagtaggaggagaattaagacaagtgaatgagtttcaagaaagggtatatagtctaaaagtagtctgagaacaagaaacagccctctccatctccagtttccgcatctccagtttctggcaaccactctcttccttagctccctaaagcctaggaatgctaatggagcacattttatgctggttctacacacgtctttatgatagcacccctacaccctgtccacacctttgtaaatattctctttatcaaattatcccagtttgagtatatcattgattcctgctggaacccatataatgaagttatattttaccctatggtgagtatggggagacacataggaattgtaagaaagagagatactgatcagatttgcttttcagaaagattattggtgatgattcgaagaatagattagagaggtgtaatactggaagcaaggagaagaagaagtaggaaacttgcacaaggaccaaagaagatacaggcttaaaatgggctgggaggagtagagagggatttaaattttagtgatgttaaaaaaaaagaattctagcactcagtcactgagtgttagggttgatgaaggaagaattgagaatgtctcctaagcttatgacttgagtga

SEQ ID NO: 261705 - DNA, 415 bp, Homo sapiens
ccacaggcagctgtttcaacaggacccctctgcaagactccttcaaccacatgacgccttcactgctgtctgcccagacaacttcattgtgtccaccagaagtcagtatgacgcaacttcccagatcacactgtgaaagctgccgaggagctgagactttgcctgtcctcccttcaagacagtgcacgccatagtgcctgctgggtcctcgcatctgcccctgcaatccatccctcctcctgaccaccatggcccatcctctgtattatccttgtggcatgagcccacaccgctgggacgtgagatctgttgaatacatttatctttgtgtgtatagccccatttaggcgctgtggggcaggaactaaatgaggtatcttttggcatctcaaaataaaacccaacaccttggata

SEQ ID NO: 261706 - DNA, 360 bp, Homo sapiens
gcaatcacacttccatccccacagctcctctgtccacaggcactgtagtctgtgccctcatgtcttctgggagacatagtgggaaggtaacccccacaccagtgacactatggggaaagagacactgtgggactttgccctgatttctcaggggccttttctcttttccgtttgggttacatgtagacttccctactgtccacctgaccactctcgtgctgcccaaaaccatagcttaagtcaccacctaggcctttcttggtgtaactattgaaaggtgagccttatctgttcaatctctatagagattcatccaaaatctggacctacaagaataaaaaaacaagattttcctgaata

SEQ ID NO: 261707 - DNA, 443 bp, Homo sapiens
ttataactgatagcctgcaagaaaggttcagatgtgccttctaagtcatcatatagggagggtcagtagatgcttcctcagatgtctgcatggcctgcttcctcctttcctttagctctttgttcaaatgtcaccttgttaaaggttttctcagaggactatgaaaatggctttctggcttgcctgtcccttacccctcacattccacatcccatttctgctctatttttctttgcagcacttatccccaactcatataatatctacttttcccatttatttgtgtattatatcttgcacagaaacgcacgcatgtacatacacaaacacttgattgtaagttccatgagagcaaaatttttcttttgtctactattgtgtcccagtggctagaaaaatatctggtacatactaagcactcaataaatatttgtacagcacat

SEQ ID NO: 261708 - DNA, 510 bp, Homo sapiens
caaggcaagcctagttaagtaaatatcacacaaatagacgtgacgggactcagttccaggtggctgtagtgccagagcttgtgatctttctagcacccacactgactctcacaaaggaagtgagggcggcttgctcctcagccagggaggaagccagattgcctgtattaaagcatgtggttttgtgaggtgcttggatggtgcttggttagatcagagcttccaacctcagcactgtggacatttgggctgggatcattctgctatcggtggcgctgccttgtccattgcagatgttgagcagcatccctggtctctacccattagatgccagtggcacccccctgcccttcaagtcatgaaaatatgaaacgactgcagaccctggtggagaacagggctagattgatgagactcttgaaagctcttaaatggagtaaacattgcattatgtcagaaatgtagagttctttgcagatttgaagcagttaagcactgttcagaaaggtg

SEQ ID NO: 261709 - DNA, 190 bp, Homo sapiens
cttaaaaataatacaaaaaaattaaaataattttattgttttgttttgaatattttagatgataaagttaaattcactaagagatactaatgaaatttaaaatagataacaattcatttgaaatgacaggaattctcttaaaattaaaacaaaattccagaagcatttttttcaaagcattcctggttat

SEQ ID NO: 261710 - DNA, 495 bp, Homo sapiens
ttggtgctgcagcaagtcaggggcgttcacggtggcctttggctaacagccttgacagcacctctgggctgctgggaagtagccggtcacctcacctagaagagggtgaaggctggagcaacagaactgctttgggactaggtggagtttggaatccctctccacagtggctcagggcctctgtgctccagcggggtttgctgtcatcatgggaatgtagaggagaaaaaccagtatcagctcgagttcagcactgcggcagggtagggacagtggttttatttttatttgagatggagcctcactctgtcactcaggctggagtgcagtggtgcaatctcagctgactgcaacctccacctcccaggtccaagcaattttcatgcctcagcctccttagtagctgggactatagacgtgcaccaccatgcccggctagtggtttgtatttttagtagagaccagcctgggcaacttatgaagaccctgttgcca

SEQ ID NO: 261711 - DNA, 395 bp, Homo sapiens
cacagccatccagataccctagaccagtggttctcaacatgcaatgactgtgctccaccaggggatatttcgctatgcctggagatgcatttagctgtcacagctaggaggcagggtatgactggcacccagtgggtaaagaccagggttgctgctaaacatcctacaatgcacaggaaagctccctattcacaaataattatctagcccaaaatgtcaagaattccactgctgaacaactctgccttaaagccttagctgcatcagcagctcacaggagactcacaggcacgcctactcccgcacgccatcttagacctactgaattagaattctctgaagtggggcctggggttggtgttttaacacactctccgtgtgaatcttatacacac

SEQ ID NO: 261712 - DNA, 422 bp, Homo sapiens
agcacatagagaaagagaggaggggtgtcagctgcctgccatagctgatggcaagaaaacatcatttataccaggaattggaacagagttagtttctctgtattgagttacccatttttcaagccatatgttagtaagtgaaggattttcagcttttcagcctaagatcccaggttagagaacaatgattcccaagcacaatcgaaaactacacacaatacttacccttctcttaaaattcaatagttttagtccccactttatgtttcataatgaagtgaaacagaggcactatgcatgtcttaaaatgtatacaaactggtatcaactttataaaatatattcctgtgtaataacatttcataaatcttgggtaaattttatctctaaaaatgtaaagtttgggacttacacatggtgtt

SEQ ID NO: 261713 - DNA, 665 bp, Homo sapiens
aattgcagctatctttgcaatttgtcacacatatcacgaaggaatggggaacatggacactgacagcaggacggtagccttctctgtagccactcacatgacaaaatattggccttacagttcccattctgggaaaatgaagaacccagatggttagtaatgattgtagtgattagaacaatggttttggggcatagtccacagtaggaaaaatgcaaaacactacattgatttgtggggccagagagagaagggtgccctgatgaggcagaagctcccagagagagaatggctgtaatgtaaggccagacaagtagcccacagatagataacagaaattcctagttaccagccaaccacagcaagcaatggaatgagttctgtgccttcaggtatggcagggaaccagcagagagcctgagtcatcaagcctaaatgaagctctgtggataagagtgacagccatcttgaagcctcttggatggattcaccgctagggacacagagacttcccctgcccttgtcaccccaacacttcagcaccaagtaagtcaccccaccaacataaacatagtaacaagtatggaaggtaagggagaagagatatcctgaggttatatttttgaaatcccaggagaatataagctcaaaaagaaaaaaaagaa

SEQ ID NO: 261714 - DNA, 383 bp, Homo sapiens
cccggccgcgcgatacggctgcgagagacgacgaagggcccctcacaagagcaatctccttacgcctgctggtgagtgctcccaagcacctggctactagcccagaggaaagtgggtcacttcacagatcttccatttcataaaaataaccatcagaattctgacataaggcatgttttaagggaatgtgtgagttatagcagatacctttcatgtaacattttaaaatattcaattgtaataattcaattcaaaaaaatatttcaggtcaggcacagaggctcttgcctaaaatcccattgctttgggaggcctaggcaggaggatggtttggggccaggagttcgaaatgagcctgggcaacacagcaagaccccatctcc

SEQ ID NO: 261715 - DNA, 232 bp, Homo sapiens
ggctccatctctgcctctgccctaaaaaagcctcggctgggggcagaacacatcctgcccgcacacattaactcaggcttgccttcgtgccttgctgccctagtgttgggacaccctcatctgctccaccaggccaaagcctgcccactccacaggaacccctccccaccccctggcacccaggagcacccattcaggcactggctcactcctcccatctcctgaattgccc

SEQ ID NO: 261716 - DNA, 407 bp, Homo sapiens
gaggtcatttctggaatcaagaaactgacagtctggtggaggaacagacagtttagtatatcataggttaagtctccctagtgagcaggttctgagtaatttggaagtagaggaatggtacctaacaaactggcacaggggcagcacctgcctggcatcggatgggcctctctctagcctttccatggtggccatttttaatggatcacagcacccttgtcacggggcctgaaaggagtgcagatgcaggtccttctccacacagtgctccagcaaccactacctcgtcccccggagttagccctagaagaaattggttttctatttctgatctcccactcagtctcctaagagagcaagtctatgatggaaacttgggagagatggagaagaggggcatgtaagga

SEQ ID NO: 261717 - DNA, 248 bp, Homo sapiens
gaagagcccatgcagcaggcagacttctaaagtgacccccaatggcccacatccttgtacaatacttaccccttgagtgtaggagcaataggaagggtatctcttctgtaactagatcagttatacatcaaaggtgaaaagattttgaaaatgtaattaagggccctaattaattgactttgaggtagtctaagagagattatcctgagtgagtctgatataatcaggcgagccatttaaaacaggtg

SEQ ID NO: 261718 - DNA, 464 bp, Homo sapiens
tccttcaagttcctgtactgcagagggctaacctggtactacctaaactaataattgtgaatcaccctctcacaaaataattgttttcctgaaacaatgaaagtctgaaccttaaagtttgagaacagcagcaataaaaattgtaattaagtttaaccagtgccagctagtatactatacgctgaatgtttacgccccaccctcagttccataggttgaaaccttatccccaggatgatggtatcaaggtagggccttttggaagcaattaggccatgagagcagagccctcttgaatgagatcagtgcccttgtagaagagaccccaagcagctcccttgtcccttctaccatgtgaggttacagcaagaacaccgcagtctgtgaacctggaagagggccctcaccagatcccaaatctgccagtgccttcatcttggaaatctcagtctccaaaactggga

SEQ ID NO: 261719 - DNA, 771 bp, Homo sapiens
accctcctccccaccacccagcctcctgcaccagagtcatttcaagcttctggtttttattctattgggaatgagatttctttcatttccttgtttaggccctgaaggataagttttcctcttattttcttgtgcccttagccatatatttaatagggaagaaggtaagttcctctcttgtttcataattttctatgtagataacaactaaagggaacacagagcataaaagttttgaggttgtatttatttcaatatggaagtcttgttttccagatctgcagcgtccaagagaaccttctgaatgatgggaatgttttctactctgtccagtgtggcagacccttgccacatgtagctattgagcatttgaaatgtggctgatatgtctgataaactaattcttaaatattatttaattgtaattaatttaattaaaatggtcagatacaattagtggttattgtatttgacaacacagttctaagtggtaatattctttgtcccctaggtgggtttatgtactggtaaaccagtgttgtcttgaaaatctgatatttttgaggatgtaaatatatttgaggattaaatatttgagatgtgacttcagaatatatgtcaccacaggctgggcatggtggctcacacctgtaatctcagccctttgggaagctgaggcaggagggtcacctgaggccaggagttggagaccagcctgggcaacacagcaagactctgtctctctgtttaaaaaaaaaaattagcctgaca

SEQ ID NO: 261720 - DNA, 528 bp, Homo sapiens
acacacacgctttcacaatatgactttgctgccaattccatcaaaaggttcaatctgtttctccatgtccctagatcaaagctggtttgacaacttcctctaaccaacagtcaggtgaagacaaaacatggatttctgaacctagattgccaaagatcaagactaccacaaggagaaatatcttcctgccacaggcatatgagaggataagaaactctccctatcaaggcctcacagacaaaccagttaacagacatcaccaactgtcagacataggagcaaggccatcttagacgacccaattacaatcaggcctgcaggtgactgcagaagcatgagacacaccaagagaaatcagtgaagaactctcgctgagttccactcaaacccctaacccaaagaattgtaataaatggttgttgttttaagccattaagtataagggttgtttcttaattagctttttttttttttttttttgagatgaagtctcgctttgttgcccaagcggtgtgcattggcgtgatc

SEQ ID NO: 261721 - DNA, 663 bp, Homo sapiens
ctccctgttggtggtggtggtgacggagcggtaggagggaggctagcagcgagagcttctcctgccgggctggaagacagaaagaagaggcaccgccgcgtgctggaggctggagccggagcttgcgcctccgcggctcgcctcgctgcggttggtggtgaaatcagagaccgcagctcggccacagtggtagaaatgtggtagggtagatcaaagctggtttgacaacttcctctaaccaacagtcaggtgaagacaaaacatggatttctgaacctagattgccaaagatcaagactaccacaaggagaaatatcttcctgccacaggcatatgagaggataagaaactctccctatcaaggcctcacagacaaaccagttaacagacatcaccaactgtcagacataggagcaaggccatcttagacgacccaattacaatcaggcctgcaggtgactgcagaagcatgagacacaccaagagaaatcagtgaagaactctcgctgagttccactcaaacccctaacccaaagaattgtaataaatggttgttgttttaagccattaagtataagggttgtttcttaattagctttttttttttttttttttgagatgaagtctcgctttgttgcccaagcggtgtgcattggcgtgatc

SEQ ID NO: 261722 - DNA, 461 bp, Homo sapiens
ctccctgttggtggtggtggtgacggagcggtaggagggaggctagcagcgagagcttctcctgccgggctggaagacagaaagaagaggcaccgccgcgtgctggaggctggagccggagcttgcgcctccgcggctcgcctcgctgcggttggtggtgaaatcagagaccgcagctcggccacagtggtagaaatgtggtagggtaggtttctctggctttgcctgcgcaactgctcccagccaggctggaggaggaggaggagtcacctgtggtatgctggagcctgtagatggcgtggctctgcagcttgcctcatgagtcatgtgaagatgcctgctctggctctgccttccatcatcatgagtaaaagctccctgaggcctccccagaagcagaagcctctatgcctcctttatagcctgcagaactgtgagacaattaaacctcttttctttat

SEQ ID NO: 261723 - DNA, 387 bp, Homo sapiens
ctccctgttggtggtggtggtgacggagcggtaggagggaggctagcagcgagagcttctcctgccgggctggaagacagaaagaagaggcaccgccgcgtgctggaggctggagccggagcttgcgcctccgcggctcgcctcgctgcggttggtggtgaaatcagagaccgcagctcggccacagtggtagaaatgtggtagggtaggtttctctggctttgcctgcgcaactgctcccagccaggctggaggaggaggaggagtcacctgtggtatgctggagcctgtagatggcgtggctctgcagcttgcctcatgaggtttagaaaaagtttgtcatctcagctactgacatttgaactctacctgcctgtactgaagaaa

SEQ ID NO: 261724 - DNA, 488 bp, Homo sapiens
agttctaatcaatagtttaataggtagtaaaatacagagtacaaataatgtgtagaaatccagatactgcgatgcccctactttgtgttcatgataggaatttgttttttgcagaaaatttaaaaatacatgtgttcaacaaaccaatttaatcaaaatgcaacaactgatgatttagggaatgataaacatatgtagtattgggaaaataagtcagatgcttatttgcagctgttttctgaggtttccattacatctaatggaataataatctattgtatctaacggaataataatctattccattgacatgaaattttatgtctactttcctcctcattctatcatttttccttcttaaatgtaaaacttcaataggttataaataactagcatccagtaaaagtccacccacaaaaacattcatttttgtagcctaagaatattgtttggaaaatggtttctaactgaaggaaaaagctaccaga

SEQ ID NO: 261725 - DNA, 638 bp, Homo sapiens
gactgggaagatggaaattaaacattgagaactcaggtattctgacaagttttttgagtgagcatcatctggacaactaggtcttcatcatgggaagatctagattatcagagagccttgatcattgaagaaacaacaaatgataagtgtggctgttatgcaaagagagaagcaggaaggaccaggtgtgttcagggaggccagcatgggtgtgacctcaacagaggatgcagcaagaaggattcattttggaagcagatagcagtcctcaccagaaaatccaatctgatggcatcttgatcttgacttcctaccctccagaactctgaaaaagctgtagatcatgggatttaataaaggaactatgacagtgtaaaatagagactccatcatatcttggtcatcagcccgttgggatgcagagcccacatacatgaaggcgaggggcccatagtataaagatacagtgaagggacctgatctaggatggccaatgaaacacgctgatcctacattcggaatatggagagaaagagaaaggttttggtttcaaaagcagcctgtgtactctttatatctaaaataaaagttgaaatgcaaaacattttaagaagcatattaaaagtttatgaaggcaa

SEQ ID NO: 261726 - DNA, 288 bp, Homo sapiens
caaccaaaaagaataggaaaaaaatatagcccaaatgtagaaaaaaagcatactatagtgatatgtcccaagaaccatacaaatattgttatgcttctagattctgcgatgtatgcagtagttagccaggatttgcagtcttggtgatttgatcacaaaatacagacatcgacaacaataacatgaaccctactactaggattagttactactagggttagtgcctactaacatgtagccactactacaaggacatcaaccaaaaagaataggaaaaaaatatagccc

SEQ ID NO: 261727 - DNA, 478 bp, Homo sapiens
acgtttaaagcagaacttctttgttctgtggcataggttgtacactgtaaaacataggttgtaccaggttgaggaaacaaaagtctttctctaatttgtccaccagtagtatgcatctttttctccactagccaggggctatggaggccctgaatagaacagaagagcagctagcaagggcggaaggaagagagagaagggaagcacagcgtgggatagactgggaggccatgaggactgttaagggctctaggttttgttccaaaagataaggcaagccactggagagttttgagcagaagaatgttacaatccaattcacatttgtaaaagagccctctggctgctggggagactagctggtagatatggacacacacctgccatcccccaccctcattctctttggagttaacccccttctacacctgccctctactttctgtaacatataggcaccccctgctccacactctat

SEQ ID NO: 261728 - DNA, 636 bp, Homo sapiens
ctaaggagcagatagaataaaaattttacctgagactgcacagttagggagtgcgacagcttggatttatgttcagtacatcatgctccagagcctgggaaactgtcaaggctctgttgttaggtgaaagaagcaactacacaagcatgcatattttaggagctcattaaaagtaatacttcacaggttaatacatttacacaaaaaactggacctggtgacaaataggtggattgcaaccttggtaagatcatgttcattgcaatcctggcgacagaagccacagtgcagggggaagtgaagaattttaacaggaaatgtagaaaactctctttggtagtttaactttgaagggaaagagatggagattctggctgaatggggagattttaaaaaataatcaatttcttgaaacttgagaaggttttaaaatgaagatacttaggggttttgctaaatgagaagattttagctgttcttgccatgcacaaaaaaatgggtaactatgtggtattatgaatatatttattttcttcactatatagtaactaatactttactttctgtatgtatcttagaacatcatattgcatatcttaaatatagacaataaatgtatttttaaaagttaaaaaa

SEQ ID NO: 261729 - DNA, 416 bp, Homo sapiens
aatcaggatcccaaaaacatattggcactcccatgtttatttcatttcagcactattaataatagccaagatggaaaaactacctgctcattgactgtttaatggattaaaaatgtgatagacacataatgatatactattcagccttaaaacggaaagagacctagcaatatatttcaacatggtcgaatcttgaggacattaagctaagtgaaaatagccagggacagaaagacaaaaactgcattgttccacttacatggggtatctaaaatagtcaaattcacagaatcaaaaagtagcacaatagtgcttgccaagggcttggggcaaaggaaatggggagttgagttacttatctaaaggcataaagtttcagttaagtaagataattaagctctaataatctgatgtac

SEQ ID NO: 261730 - DNA, 501 bp, Homo sapiens
taaagatatgacatgaaagattaatagattcttcccttctactaaaagtaaaagatttagaacaaatcacaattaaggccagttggcagtagtcaattgggatagtttcttcatgacaggatctatattttttctatgaatcaggtatttgctgacagtgatttgaataattactctaggaatggggagagagaatggtctcggaagtataagaaaattgccggagaatgctggtgttccatttaaagactagaaaaataaattcatagaggcactgttctgcagaggcataggctttcctcaagtatggagaaggaaattgtgtgattagtccagagttgggacatgaagccccagagtagaataggtcattctgtcaacactgaaacccaagtggaacttccatggaaagtaatactataagccagcaagaaagtttttagtatataaggggcaaagaaaggaataatagaaatagatataagaatttaatgcaaattg

SEQ ID NO: 261731 - DNA, 488 bp, Homo sapiens
ctagtcctatgcattccaatccaacgttttacagactcaagtctagccaggatggatttgttaggatggcctcttttttgccaggatgggctgaggattataaagtgtggttaagagtttcaaggtcaaacctagtacttcctatgaaaataaaagatagcagtacattacgttgtcaagttaatacagtatgatggagcatctccagactgcagatcctggacgactgtaaaagtctaacagatttagggaaactgtacctcagggagcacattagacagcactcatcaatggatcaaaactgtcttggaggctcccttcccagggagcagcagaacccctgaaaatgatggctttcccttcaacaacctggagataaattgtacttcatgtattacatgtacattcatgtacgaatggggtgcttagtgcgagtggaaaatgcaccttattttaccccaaatgaaaaagtatatccttttcatttt

SEQ ID NO: 261732 - DNA, 472 bp, Homo sapiens
tggcaaggcggatcctttaactgtaccattgttgctagttcacttctggtcagaggctgtgagttttcctccaggtattggcgtctggtgtctctgtgtccacacatgcattcttgtccaaggacgctagcagatgcttgactctgtctctctgtaaacacatacacagttcacatatttttagaataaagtctttcttcaatgcatccttttccttatccttaacgagagtgtgtctcatgaagggtctcactggatctttttcttccctttatttccaatgctaattaaaccaaaatcttctgaaatagccttcatttcacactgtcagcccactggtatggaatcggttgcatattaacaactgtctagacaggttagagaagggaatctgttgatttagtcagcctgcccaaggcagcccttgtttgtgactaactgttaagcagtgttagaagggaagaaagttggc

SEQ ID NO: 261733 - DNA, 416 bp, Homo sapiens
ccacagctggcccgcatgctggggaggaggcgcacaggcttctcccaccccttccctgcacctctgataaaccctcagggaaatcaccctgtgatcccttcaggctaacagaagaaaatctatatgaaaaagagaaggcagaaagctgaagtgataatgtttagaatccttagaagctggaattcccatctaaagacaaggcgatttaaaggtgtagacagtgattgggcttcagtgctgaacaaagacatctaaaactcaggactgataagacaaaatggacagaaaactccatgaagatgcaataaggagacctagctcaaaacattttttggactctggagctctgaaaaggggtattttctgccaagttatctatcctcagacaaaagtaaatgttttgacattcctgcagg

SEQ ID NO: 261734 - DNA, 673 bp, Homo sapiens
ggaaactaagagaacatgtggaatgtgatggatggcagcagtttgaggggcttcttgggaatctctcttctcgctgaacccctgatcctgtaatgggtggaagtagaacaatgacaaaccactcctttgatgcctagctacagatcactaaaggattatttaggactttgactatcagcaggctgctgaggtctagacaagaacctgctcatgggcaccattaaatgagtcattttattaaataaaacaaagcccatgtaaaaattaaggacatgtgttatttgtgttagctcccgagacctaaagttataatgcattttgataggaaagtaatattttgcaatccaagataactgtttacctcttttgtgtgactcagcagtggataaaatgatactacacaaactaaacaaaccaacaaaaaaagccagtaacaacaacaaacaactgtaaccactgcagaatttcagtttagtacctgaagaagattttatacttccagaattagactattctctttcttaagctataaatgacacacagactgggcctaagctatatttatgtacacttaggcctaataattaatggctttctttatttgggttccattctaccacatcatatatcgcatcttcactcctccatcattaccttcatatctgaccagtct

SEQ ID NO: 261735 - DNA, 449 bp, Homo sapiens
tctcagcccatccactcctgcccactctacccactcccaccacactacctttagaccttgtcttgaaagtctaaagttggcagacggtgggcccaaagtggcccgtaggtgtattttgtttagctcacatggggctttttaaaagaagtccttccccctcctgcctcctccgcctctttctggaatcaggaatctggtttcgtggcttttgaaatatcagaagatctgacaacatgggctcactttccagcctggcattacaagcccctttaagagcacataaatttaccatagtccccgctaatccctgtttctcacggttagttaccttctgggtctgtgcagacatttgtgatcccctccccctcattatcccaccttccaacctggaaggccctccccgctctcttctcatagccaaaattcaagccctcttcaaccaagataag

SEQ ID NO: 261736 - DNA, 346 bp, Homo sapiens
gtcaggtcttcctctgcaagccaggcagtgtcaccacccagaagtccagggtgcctctttaggtccagagcagcagctgtggagtttcctgctttgtgccttgccatgttcaccaacatcactcaatataaattggggaaaatttcttaattactgctgggtctctctgcattgtggccatgttctgaagtccaggagagatgggctgatggccttgggatgcataaagtgacgccggccccatcagctcaggctgggggagaaaacagaggctcaggaatattctagagagcctaagcaagggcctcataggagctttggaatcccagtgtggattctgggattg

SEQ ID NO: 261737 - DNA, 555 bp, Homo sapiens
acattttgattgctcagttatataaaagcggtgttatagactcctttattctccacaaaatgttgtcttatatgtaaagtgccaaaagttgtgtttaatttcctaagaaagtcattgctttgtaaacatttgcataatacttagtgttttttgtaattttaaaaaattagcttaaccaaaagagttgcaaaattaaaacttacttgagtaggtatctttcagacaaagctgcatggcttcatgtacaatagtccccagatcacctcgcactgtagtttgctcaagaaggagcctacagatggcaggtaggagaaggtaaactggaaattaacaggtctgtctgtaagagcatgccactggaaacacccatccaatttgggacccctggaagacagcatgtgtctaatgggaggcctgtcctagtacaactcctttactcttttcaccttcatcttgaccttctcagataccatctttatgtaaaatgttgatgttgtggagtttttgcagtaatttaatttttataaatattgtattaaaatatatttatcttga

SEQ ID NO: 261738 - DNA, 1993 bp, Homo sapiens
  misc_feature (820)..(820): n is a, c, g, or t
  misc_feature (867)..(867): n is a, c, g, or t
  misc_feature (870)..(870): n is a, c, g, or t
tgaaatggagtcttgctctgtcatccagactggagtacagtggcactatctcggctcactgtaacctccgcctcctgggttcaagcaattctcctgccccagcctcccaagtagttgtgattacaggtgtgtgccaccatgcccggctaatttttgtatttctttagtagagatggggtttcaccacgttggccaggctgctctcaaactcctgacctcaggtgatccacccacctcagcctcccaaagtgctgggattatagagtggaaccgccacacctggccggtttggtaattttagaaaaaggtttggctttgaaaaagtcaagataacaggagaaacagcttctgccagaaaagaggcagtaggttcccaaactacattaagaaagttcccaaactatattaagttgttggagaaagagtatctgcctgaacaagtttttaatgcagacaaaagtgccctattctggaagaaaaaggtcacaaagatctaaggaagaaaagtgaatactaggacttaaggcaggaggagatcgtctaactttactgttttgcgcaaatgcagttgggtttatgatcagaactgccattacctataaagctgctaacccgagtcttgaagggaaaaagataaacaccagctgccagtcttttggttgtacaacaggaacgcttaaacaatatgaaccctttttcgtgatcggttacattaatgctttgtccctgaaatcagaaagtatcttgctagtaagggactgccttttaaagttgttgggttttttttttttttttgagatggagtttcactcttttcgcntaggctggagtgcagtggcgcactctccactcactgcaacctcctcntcntgggttctagcgattctcctgcctcagcctccctagtagctgggattacaggcgtactccaccatgcccaactaatttctttgtatctttagtagagacggggtttcgccctgttggccaagctggtcccaaactcctgatcgcaggtgatccgtccacctcagcctcccaaagtgctgggattacaggcacgagccacagctcctggcctaaagttgttttgatattggacaatgcccctggccacccagaacctcatgagttcagcactgaaggcgtcgaagtgataaatgcttgctcccagagaagcatctctaattcagcctctaggtcaggggtcgtaaagacctttcaggctcattacacatggtactctttggaaaagattgtcagtgctatggaagagaaccccaatagagggaacatcatatcattgaagataccattattgtttagaaaaagatgtgaaagctctcaagcctgaaacaacaaatttttgcaggagaaaactccagatgttgtgtgacttcacaggatggaaatcatgatagagattgtggatatggcaagaaaggttgggggttaaggatttcaagatagggatcttggagatattcaggagctaatagacaccaaaccagaagaattaacagaagatgacttgatggagatgactgcttccaaaccactgccagacagtgaggaagaagacatagaaaaagagaaaaagcgtgcaagaaaacagattgacactagacagtctgacagaaggggtctgattattcaagactgcttttcacttcgtttgcaacgtggaccgtttggtgatatgagaactgaaactaaagcaaatggtggaagaaggattggtaccatatggaaacaatttagagaacaaaaaagcagaaaagtcagaaattacattgtatttccataaagttacaccaagtatgcctgcctctccagcctccccttttaccttctccacctctgctaaccctgagacagcaagaccaacccctcttctacctattcaatgtaaagacaaggatgaagacttttatgatgatcgactttcacttaatgaatagtaaatatattttctcttccttgtgattttctg

SEQ ID NO: 261739 - DNA, 260 bp, Homo sapiens
atggaagttaagaaaaactggagagaaaagatttttttccttgctcagcttttttatgtctaagcattagcacttactactacttatgcctcagagacagaatgggcatcatctctgcaaaacaaaataaaacaaaacaggctcggtatggtggtgcatgtttatagtcccagctacttgggaggctgaggcaggaagatcacctgagcccaggagttcaaggccagtatggagaatgtggtgagcccccgtctctcaaa

SEQ ID NO: 261740 - DNA, 473 bp, Homo sapiens
gagcggactcttcggttctccgtggaaaatcaaccagacccaaaacagaggtcccgggtttggggataccacgccgcgcgcctgagcatccgggctccatttctccaggcgacatctgcgggaagggagacctaaaggccaaggctggggacgagagatcatccaccaaggccggggtttccgagtgaggcgcccacttcgcatcccacagtaccgccagaaacccatcggacccacaaagatcaaaatcttcggtaacacaccaaactggcgacgctgtggggaagcaagcactctcccaagtggctggcgcgcagtgagggcgcaggaaagaaaaagaaaaaaaagaaaaggcagagcggggtggctcacacctgtaatcccaacagtttaggagaccaaggagggagaagccctagcggccaggagttccagatcagcctgggcaacataacgagaccctcgtctctgca

SEQ ID NO: 261741 - DNA, 683 bp, Homo sapiens
ctcagttgaattatgtttttataaagcactatatttagagtcattgaaataaccaccataagcattaaagatagaaattgtttctgtagagaagtctttaggggagaggtgcagtggggctagggaatactgcctttcattgtatatctctcattaccgtttcatttttaatcatctgcatatatcactgcatttaaatacatttttgaatttttgtaaaaaaatttaaaaatatttgagaaaataaattgacttaagtaggcagactatttctggggattttgtagtagttcatgggagaaataatggtttttctctacagtcagtagacagccaaatgatcagttcaaacaaagtaggtgggaggacagtaatgaaaggggagaaagaataggaacaggatttttatggagcaaagggctttgatgtagccacaggttgataaataaattaaattcaaggtattgtcctacttgtgtctaacaatgatttgaggaaaagatgtgtggtctttctcagggccttaatttcagcccaaggaatagaaagctgttcaggggaagtcctcgtctgacccataccctacccctggtgcacacacttacccagctaaggagtaggacatgacagacacagctggagagtgtgcaacctcaccagagagttcttagaaaggacaagtt

SEQ ID NO: 261742 - DNA, 448 bp, Homo sapiens
aaaaaaaagtgggggagggagcacagttaagtttctcgggggtcttctgtaccataataacaaaatgtggcctgtgcaccatcttcagattttgagaagaacaaagcaactgtaaaagacatctttaaaactatttgggaaatttgaacatgtgttaggaatcaggagatattaagggatagctggtaattctgttaggcataataataggttagtggttatgttttaaaagatggaacatactaaagtgtttacaggttaaatgacatgaaaaatgggacttgctttaaaatactgcagcaaaccaagaaaacaaaaaggtggaagtagatgaaacaaaatggtaaaatgttgaaaaatgtcaaagctggatgatgggggtaccttttattgttttctctacttttttgtgtttgaaaattttcataataaaatctgtttgttttct

SEQ ID NO: 261743 - DNA, 349 bp, Homo sapiens
tccgaatttcaagggtctcgctgtgtcacccagcctggagtacagtggcatgatctgggttcactgcaacctctgcctccctggctcagaccatcctcccgcctcggcctcccaaagcgttgggattacaggcgtgagcctcgcacccggcattatttctgaaagcgaatctgaatccccagagctctggcgcctttggtcttctcacagttgttttggaattcacgcatcctcactctctgccggagccacccctcaccacacacaagacggggtttgttgtttttctcgctgcgatgccaaactataaaaccagcgtggcagggtgcctccctcagtcatctgcaaa

SEQ ID NO: 261744 - DNA, 468 bp, Homo sapiens
cttgaaacaagtttgtctcagaagaactcagatactctaactatcctgggctggaactttgtggctccaaacggtgtccagcccatacttggcactcccctgggtgtttttttttttaacggttctggccttttggatatggcacaactgctgccacctgcaaggctgccctggtgataactcccttggcccagcatgtggtgttcaggcagccacttttcccaaattgttgaatactctgcccacctcctataatgagatgctgaacagatttgagctgaagaggcagttaaacttcacacattgaatttgtaataagtcccacccgcaatcatcttaaaagcatttgtaccgatgtaattgctgtcatttcaaaaccttgaaaagacttcctccctatcctccccctgtacccctaccctgacaattcctattctttttcgtaaaggaactgtggaaatcgaggct

SEQ ID NO: 261745 - DNA, 963 bp, Homo sapiens
agggggctgaggcaggagaatcacttgaacccgggaggcggaggttacagtgagccgagattacaccactgcactccagcctggcgacacagtgagactccgtttcaaaaaaaaaacaaaaaaaaccagcaaatatgccatcactgaccaacaataaaaacaggaaaagtgtcactcaacccatttatgccagaggttgcaattttttaaatttttgcatgagtaaaaacatcagaccttggcgatgaccttgagcagtatgatgtaaaaactcccacatgcttagcgttctaataatggaacactaggcataagtgggttactgttgtcctacagcaaagattaaatttgaatttctggtcatgaaattaaaacaggggtaccacttcaaacccatcagattggcaaaaatcaaagtctggtactatctagtgttggtaaatgtgaggaacaggaactctgcacactgctgggcgagtaaattgatgcaaccacactggagaaccctttgccagcatctagcaagatggaagatgaacacacctcatgacccagaaacaaactctcccacatgtgccctgcagaaactcttctaagtatctgggagacacaggatatttattgtagcatgggataatagtgaacacgaaataacataactgtccctcagtagataaacacactgggcacttaacacaaatggactagaactggatgtagcaacagaaataaatctcacaaccgtgagtgaaaaaggatccatgtagtgtaactgaagtcatataaactttaataacattgtttatacactgatgcagagttttaaaagtacaaaaaggcctggaggtgactcatgccttgtaatcccagcatttggaaggcctaagtgggaggaggcaaggggatcacttgaaaccaggagtttcagagcagtcctggcaacagtgagaccctgtctctaca

SEQ ID NO: 261746 - DNA, 778 bp, Homo sapiens
caggagtggggtcagcaggaggaactctacagctatgggagaacctgcgttcacctcttttccaagcctgcctgttctggggaagctcaaaaggaacatgatgccctgggctttacagaagaaacgagaaatccacatggccaaggcccatcggagacgagctgcgaggtctgctctccccatgagactcaccagctgcatcttccggaggccggtgacaaggatcaggtctcatcctgacaaccaggtcagacgcagaaaaggggacgagcacctggagaagccgcagcaactctgcgcctaccggagactgcaggccctgcagccctgcagcagccaaggagaaggttcaagtccactgcatttggagagcgtcttaagtatccttgcaccggggacggccagtgaatctctggacagagctggtgctgagcgtgtgcgcagcccgcttgagcccacccctgggcggtttccagctgtggcaggggggccaaccccaggaatgggttgtcagctcccaccgcccctctctggccaattggtgactcctgcagatatccggagacaggccaggagggtgaagaaagccagggagagactggccaaggccttgcaggcagacaggctggccaggcaggcagaaatgctgacatgtagatgaagcgcagtcctgggctttcggtccctttcttttaatgcccatcctcattcctactctgaattgtcacacttttcccttccccaccagttctttaataaaagtatttgaaaggcaaca

SEQ ID NO: 261747 - DNA, 372 bp, Homo sapiens
agacaagatcgaaaccttggtatgtgcttccaaagcctgcgtgcttaccactttgcaggtgcctctttgaaattgcttcccctcccactaactggctcaccaggcaaccagggggcaaatcaaataatggctgtcagtttgtgctggacttcaccatgtaatgaggcatttggggaatgcaaattctgttctacgagtggagcacaaatgtgaacattatagcattagactcgaggcttcctcctgagactgggataataccttgcagtgctttctctgctggaattccagaggttaagcctctgaaaaagacatgatcagaaggagtggcaaactcaggagtaagaggttcatacgcccagtcatgggaaa

SEQ ID NO: 261748 - DNA, 387 bp, Homo sapiens
tttaatggaatataaaaattacatttacacagtaagtttaactctaaacactttttcccccagtatgttgatattggtttataaaaaggatgttgaagagaatttcaccagttgtataatgtaacatgatgctacttctgattaagataaattaaggccaggcacggtggctcacacctgtaatctcagcactttgggaggtcgaggcaggtggatcacctgaggtcaggaattcgagaccagcctggccagcatggtgaaaccccatctctaccaaaaatacaaaaaagtaaccgggcgtggtggcaggtgcctgtaatcccagctactcaggaggctggggcagaagactcacttgaacccaggaggcagaggttgcagtgaacc

SEQ ID NO: 261749 - DNA, 503 bp, Homo sapiens
ctgttttctttgtcttaatgttaaccagcaccaagaatcagaaagggcaagatagctacctgcagactaaactattgtcaacaagtgatgttttgctgttttcctgggaagaagcatggaagttctgtctatgaaaatccgtatcatctgtgctggctgtaattccatgcagttacggccaaaggcgtgcaacctgcactcaccccatgagcctgccagagagccgaggctgtaactcccccaccccatgagtcatcacggcacggcttcattgcattttctgattacagttagtttaatgtgcatctgacctgtgaaatcattgacagcagtggaggaccgccattattcacaatttgtccatcgtcattttgttcccaagaactgtcatcagccgtatctacatgaaggtgtgctggtgttgtcatagaggacattattcccaaactcagtctgctttcagaagcagtaatttcctgccattttggcccattacttgtaaa

SEQ ID NO: 261750 - DNA, 648 bp, Homo sapiens
gacgagcattttggcttggtgaccagaaggggtttgcttcctggggggactgaaagaagcccagcatggctggagtttggaggtgagcaaagcagtgagcagctctgatgaggatagacaagccaggcctgatcacatggggccttgtaggccatgttaaagaatttgagtgtctccacatgtactgtttgcaaactcatggcctcccctttgatgctctgttctaggtgatcgctgcaatcattatctgtcaaacacacctgtgcctatgcataatgttagcttggtgctttagtgcacgctcatattccttctggctggaatggaaatagtattaacttgaattggaatgtgtgctcagagacctgcaagcaatatagtcctgggcaagtttggagccctactgggcctcatatcttgtgaaattatgaagagatgaaacaggatatttccctgacctttttgcaggcaggaacgggagtgcatggatgccagcaggggtgaattccatgaattccacccctcatgggaggagaagtgcaggtgaaaaggtgcaggagctggggcaagcacctttgggcaccatcaagagcaaactccatactggctgttacagtgccctattagcttttctgtctgtggatggct

SEQ ID NO: 261751 - DNA, 406 bp, Homo sapiens
tcagctaaaaactgaaggctgcactgttggcttccctacttttgaggttttgggactcggactggcttccttgctcctcatcttgcagatggcctattgtgggacttcaccttatgatcgtgtgagtcaatactccttaataaactccccttcatatatatatctatcctattagttctgcccctctagggaaccctgactaatacactactctttgctaaacggttcctcctccttaggtgctgttctggtctgagcctcttcccctgactgtcctttaggatgttatccttgaccctctttttcacacttacgtcagagcttccaaactgctggactgaatgtggctcagagacatactttgttagacctgtgtagtgatttaaaataaaaaaaaaaagatgtg

SEQ ID NO: 261752 - DNA, 410 bp, Homo sapiens
aaaggacgttaaattataaaacccagctctgaattttaaatgccacagacgtgagggtataacaccttattaggttgccagatttagcaaataaaattacagtatgcccagttaaatctgaatttgagataaacaacaaataattttttttagtataagtatgcctcatgccatatctagcaaccttaaccttagaaaaccatgcttgattatgtaatattccagctgactggttaatttttaggaggcaggtttgctttttattccctgggttttcatcttttcccattcctgcatgtctcctcagcatatgagatttttttgaatgaatggaaagatcttctgtgaagaagaccattcagttcataaatgaattattttaaagccctgaacccctctgcaaaaaaaaa

SEQ ID NO: 261753 - DNA, 520 bp, Homo sapiens
ctcaaagtaaaagtgctatgttgtgcgtagctctagccattttgttgtaagaattctatattactgatacctaaaaaaggcattttggtcttagagaaaattgtgttgtatgctgactttggagatggtagaattgcaagtgtgtgttcatgccttccagatagaaatttagtggtgaacaatcaagggggtttcacactgtgtaccagctagttatttaaacatcaaattctccttaacttctaattttagtaccagtgtcttcctagaggagaatattttacccaaacagaaacaatagttcagttagacttaaattttatattgtatattatatatacaatactgtaattatactgactaaagacaatactattaattgtatcttataattagtagttgtattttcattattaaatatcttttttttttttttttgaagtcagggtcttgccttatctagtcaggctggagtgcatgcagcgcagtcacggcatactgcagcctcagagacctcctg

SEQ ID NO: 261754 - DNA, 468 bp, Homo sapiens
atagaattctgttctcttttttaggaattaacatttgtatcctttccatggaatactcgttaagaatacatcaaacgcatgcggtacaaatgaatacttcgaggacagcctgatgattacatgacacctggagatttccatggggacctgtgtggcttgccgttccagttctgtcctctccggggcttgggaaggttccacccagctggaccccgcccacgggcccacctggtgccatgcatggagaggtgaacacggctcccaaggccaagcatgacagaactgggcagaaagagactcggaccatttttcaggagcgatgaccatctgcggacaaggccaaccagccttcctgtcctaagagtcccatttgtccaataaaactacttaaataaaagcaccacccctctccatggccccccgccagaaactacaggaagggatggttcccttaccaaaaaatttcca

SEQ ID NO: 261755 - DNA, 258 bp, Homo sapiens
tcattggtgcttttagcaaggttataaatacctaacgtttgtgccttatgtgataaatagaataaagacattttaaaaatagaattttatggccttgagattatttaatatgtaattcaaatattttaattgaatatttgaatatttctgtaggtattcctttctttcacttactagtcaaagacagcatttccatcacctagcagaaaggaaatggatcttccaacctgggtaacatggcgaaaccccatctctaca

SEQ ID NO: 261756 - DNA, 285 bp, Homo sapiens
gcccccttaaataaagtaattagtttaggcagttgtaatcaatggataaaactcttagatggaaattgatgatgaactttattatggaatcatcagacaatctcaacctggacctgtaaataatcttagccccactaaaagtgggataaacagacatgtgtgagttgatgtaccttaccatttatgaactactgttttaaaaaatgtgaagttaatcaagcttctagaagaaatttttgttccaagggacaactcacacggtgtctgcaataagtcaaagacatg

SEQ ID NO: 261757 - DNA, 429 bp, Homo sapiens
tccattttgcagaagagaaaacagattctcagagagctaaatgccaggcttgaatccaaattagtctggcaccaagatcggagcatttaaccactatactgcctcccagtcccgttcaatggggaacaaacacttctacagtctcaatatcttcacaaaattctcctaccactccagtcttaagtgaggataggccgtccccctgcagcgccagatctgcacactgacctttactgcactctttctactctcttgtctcccactcccactgggagcccagacactggcttcagaagctctcctcctcctcctctattgaccatcctcttcatcctctcactctctactggctgcttcctacccacgaattgtgggaaatatgctaaaatatctccaatttttaaagtacaacaaaattccccctgaaaa

SEQ ID NO: 261758 - DNA, 343 bp, Homo sapiens
attataaacatgtaaactattttaaacaagcatctcacctttaataatacatccttttaataagagaattcaagattatgtactctttaaggaaaagtgttttattcatctttgaaccatcatactgcatagtacatagctgcttaataaaatatctattagaaaaattgatgaatgcatggaactgtttcattcataccccttacatttttgttgagtgcctactgaaatgaaagaagtcagtctaatttggtgactaaaaagttactggtatcttaaagaaaataccttaagtaggttggggcaggaatggactagggaaatccaagaactagttactcat

SEQ ID NO: 261759 - DNA, 1169 bp, Homo sapiens
ctaatttttgtatttttagtaaggatggggtttcactatgttggccaggctggtctcgaactcctgacctcagttgatccacccacctcggcctcccaaagtgtggggattacaggcgtcagccaccgcacccggcccttttctgtaaatctaaaactattttaaaacaaagcatttatttaaaacttttttaaaatggtgcttttccgttttctttagtctggaacctttaccagaaggttcattacagtgtccataacatggtaggtgtggaataacaagtatttgaaagaggaaagaaagaatgagagagggaaggaaggaggactagagaagagaggaaggaaagaaggaagggcaagagggagggagaaagatattaagggacaaaatacgaaagtaaatagaaccagtcaggtgtggtggctcacacctgtaatcccttcactgagaggcctaggcaggtggattgcttgagcccaggaattggagaccagcctaagcaacatgatgcgaccccatctctactaaaaatacaaaaaattagctgggcatggtgtcgtgtgcttgtagtccccactgcttgggaggctgacgtgggaggatcacctgagcccaggaagtagaggccgcagtgagctgtgattggagcactgcactccaaccttggtgacagaatgagaccctgcctcaaaaagaaaaaagtaagtagaaccattcatcaactgataaatggataactgtagtatctctatgcaatggattcaatgggatattgggccataaaaagaaattaagtagtaatacattctataacatggaagagcttggagacattatgctaagttaaagtaagtccaccaaagagaccacatattgcatggttccatttatatgaaatgtccatatgcagatatgaaatgtccaaaggcaaatccatagaatagcaaatagatgagtgattaccatcttatctgttggggactgaggaggagaaacaggagcagctgctcacggtcatagggtttctttttggggcaatgaaaatgtcccagaattagacagaagtgatggttgcacaaccttgtgaatatattaaaagcactgaattgtacactttaaaatggtgaattttatggcatgtaaattacataataaagtttaaaata

SEQ ID NO: 261760 - DNA, 88 bp, Homo sapiens
actccagagacagatgtgactgtgcccctgcacccagcagagggcccagatagagtggggtgcaataaacatttggtgaataaataaa

SEQ ID NO: 261761 - DNA, 394 bp, Homo sapiens
  misc_feature (343)..(343): n is a, c, g, or t
ttttgtatttttttgtagagatggggtctcactatgttacccaggctgatctcgagctcctgggctcaagtgatcctcccacttcagcctctcaaagtgctgggataataggtgtgaccattttttttttatatacgcacatgtagccaataaaggcctacaggaaatgccaccatttttttcagggagtggaggccaccttcccaccagggacacctaggtctgccctgccctgccccgccctgccccgccctgcactgacaagtatgactttttttttttttttttgagatggagtctgtcgccagactggagtgcagaggttgcggtgagccccgagatntgcctttgcactccagcctgggcaacaagagcaaaaagctctgtcacaaga

SEQ ID NO: 261762 - DNA, 232 bp, Homo sapiens
tcaacctagtaacaggcaagcagggaggaaaaataaataaataaataaataaataaataaacaaataaataaaataacaaagttacagaacacaaagaaaggctgactaaatagtccacattatagaagatcttaaagatatgacagcaacatatggtctggaatttttatcttaaaggacattattgaaatagttggtgaaatctcaataaagtctatagattttataata

SEQ ID NO: 261763 - DNA, 492 bp, Homo sapiens
tttttgagaagtttgtctctgtcctgggctccttacccattgaccatttgctgtccacctactgggcggatgttctggcctgagtcaaccctctgtcccactctgtcacccaggttggaatgcaatagtgtgatctcgactcactgcaacctccacttcctaggttcaagcaattctcctgcttcagcctcctgagtagctgggaccacaggcacacgccaccacgcccagctaatttttgtatttttaatagagacggggtttcatcatgttgtttaggctggtcttgaactcctgacctcaggtgatccacccgcctccaactcccaaagtgctgggattataggtgtgagccaccacgcccagctgacctcagtcttataaccacaaggaattgaatttggcaaagcccagcactgctatcaccctgattttggccttctgaaaccataggcagtgaactgaggtgagccatgccagacttctgaccta

SEQ ID NO: 261764 - DNA, 323 bp, Homo sapiens
ccttgcttctatgagatcagtttctggagtgtgcccagaaccagggtgacatcaagctctgtgagggtttcaatgaggtgctgaaacagtgccgacttgcaaacggattggcctaatcaagaagttcaacctggagagatggaaaatcagctctcataactaagttaatttagtataaaaatagaattgatagtgagggtataaagtgtaaccatgagttaaacctctcctgtcattcctagcttccttgcttcagaattgaaatggaaggggggtgtcctactctgtagaatctgtgacagggcaaatgtttgtgtggcctc

SEQ ID NO: 261765 - DNA, 387 bp, Homo sapiens
gaggtcctcagagggaaccaaccccccggcaccttgatcctggcctttatgcctccagaactctgagaaaatacattctgttttttaagccacccagtgtgtggtaccttgtatggcagtcctagcaaacgaatacagcccttacgcaaaacgtacagctaatatcacacttaacagtgagaccaaagactttcctccctaagatcaaaacaaggcaaggatgtcttttgtcaccggtcccactaaacattgtactattgaatgcgcaatttgtgcaataagttaagaaaaagacattaaaggcatccacactgaaaagaaagaagtaaaactatcttcatttgcagatgacataattctactgtagaaaatccgaaggaatgtgta

SEQ ID NO: 261766 - DNA, 410 bp, Homo sapiens
tccttactgttggtgccatggggagctcagcattggtgtctgcttataacagaatatattgtggggcattctacgttgaattcctcagtgaggggaattgtcactgatgaggagaattctatgtcgttaacctcttccataaccaaaattcctaccaccatgctatgttccacttcagtccattgatctcctgttaagtggatattatgtgactggtaaaaaagtagtcatgtataaaccgcctgattttggaaaacctcctctgcagtgaatattctctggtgaatatttacatgagaaataaatatattcacaagctaagcccattttgagagatctgcctacatggccctactttagtcttgctagtcttaatgttccaaacatatttttctctgactaaatgaaaa

SEQ ID NO: 261767 - DNA, 639 bp, Homo sapiens
gagtcggagtcttgcactgttgcccaggctggagtgaagtggcaaggtctctgctcactgcaagctctgcctcccgggttcacaccattctcctgcctcagcctccagagtaactgggactacaggcgcccaccaccatgcctggctaatgtttttgtatttttagtagagacggggtttcacagtgttagccaggatggtctcgatttcctgacctcgtgatctgcctcggcctcggcctcccaaagtgctgggattacaggcgtgagcccctgcacctggcctaaaagtactcattttttattcatcaataattagtaatctgactcgtttcaaaaatttgtttattattgacaacctctttgaagatccatttcacaaactcaacagagtgccacgattaagagctagggatcccccaaactacctcaagcatctaaaaaattgccattttttaaaggcttaaattgtagtagtaaagggggaaaaaacccataaatcatctaaaaaattgccatttttaaaggcttaaattgtgtgtgtgtacacacacacacacacacacacacacacacacacacatcattgacctttcttaagacttcagagggtggaacttccggatgtgaccacagagag

SEQ ID NO: 261768 - DNA, 298 bp, Homo sapiens
ggtctgagcggaaatgatctgtaataaacaccatgtagagtggctctgatggccccagacggcaccaggagggcagtgcagggctggatgcgaagcccgtgcaccccccccccatgattaatattggtgagcctggagtgaaggacagaggcaaagaacggacttccagttgaatcggtattatgttaaattcaggatgttcaactcatgatgtgagctccaaggcatttgctcccaacactagacgacgcttaactagatgggctcattggggtgggcgtgggagagcagcagacat

SEQ ID NO: 261769 - DNA, 218 bp, Homo sapiens
caccattgcactctagcctgcgtaacgagcaaaactctgtcacacacacacacaaaataataacaataataataataaaacattgccgggcacagtggctcatgcctgtaatcccagcactttgggaggctgaggctggtggatcgcgaggtcaggagttcaagaccagcctggccaaggtggtgaaaccccatctctactaaaaatacaaaaattag

SEQ ID NO: 261770 - DNA, 477 bp, Homo sapiens
  misc_feature (416)..(416): n is a, c, g, or t
  misc_feature (426)..(426): n is a, c, g, or t
gatggaatatctagaagccttggcttaaatatagaacaaatgatattgagctacttaatcttactatcactgtaccaggttccataaagatgatgccttggtcagctcaggctgctgtaacaaacaaaggcacgtttcttataaacaatagaaacttgtttttcacagtctggaagctgaaactctgggatccaggtggcagctagttggttgttagtgaggctctcttctgggtttgcagatggctaacttctcaccatagcctcacatggttgaggatggctggagaactctctagggtctctctctctcttgctctctgtctctctttttttaaaagcagcatctcgctttgtcacccaggctagaatgcaatggtatgatctcagctcactgcaacctgggaggcggaggtngcagtgagcngagtacttaccactgcactccagcctgggtgacatgagggagacttggtct

SEQ ID NO: 261771 - DNA, 496 bp, Homo sapiens
tcccagggatctagagacccacatatacaacagctttaggtgtacagcagatttattggctaacattaccacttctgctttgaaaattactcaacagggaaataaagcacaaaggttttgaagaagttttattaatttctaggaataacattaaggtttcagttttcaaacatttttgcaacctatgctaccatgtattttggttataatatatgttattttgagagtagttgtacaccgggtgcagtggcttacgcctgtaatcccagcgctttgggaggccaaggcaggcggatcacctgaggtcaggagttcgagaccagcctggtcaacatggtgaaaccctgtctctactataaatacaaaaattagccaggcgtgttggcacatgcctgtagtcccagctacttgggaggctgaggcaggagaatcacttgaacccaggaggcagaggttgcagtgagctgagatcgcaccattgcactccagcctgggc

SEQ ID NO: 261772 - DNA, 286 bp, Homo sapiens
ggaatgagtgtgggttatggtgttagctccatgtgagcttccatctctgttacttgttaactggatatccttgggaaaatttcttactccctggaactttagcatattcttttaagaatgttgaggggatgtatgagatagtacacgcaaagcgtgtttgacacattagtttctaggtcaaaggtcagcaaactatgacccgtgggtcaaatatggtccgtcactggtttctttatgaccagtgagctaagaatggtttttatctttttaaatgattgaaaaaaat

SEQ ID NO: 261773 - DNA, 416 bp, Homo sapiens
ccaagcagtgacttgattcatgaacactcactggatgctgactctgtttctcttctgagtgctggggtagaggagaggagaggtggagcacagttcttgcttttatgagcttatgttctaggaagttcaagtatttttttcaggtagtatgaaatagcaggaagaggaagcaggctggtctggaactcctgacctcaggtgatccgcccaccttggcctcccaaagagctgggattgcaggcgtgagccaccgtgtctggccatacacatccctgctgaagcccgcattacccttcccctatgctatagaagccctgggtcgggggggtgggggtgatggcacagggatccaccatcttatcttggtgccatccctgacttgccttctgttcataaacgcctattaaatgtttctt

SEQ ID NO: 261774 - DNA, 400 bp, Homo sapiens
gattatagtgctgctatgagcattcttacatatgtcttttgatgaacttaaggccacctttggtatatacttaagagtggaattgatggatcataagttcagctttagtaggtactgccaaatagttttccaaagtgtttcactcttaccagcagtgaaggagagttccagatgttcaacatccttgccagcactagacacagtcttttcatttcagctctgtggtaggtgtgtagcgggtgacatctgtggtttgatccttagtctttttctgtaaaataatttgggtcccttctagttttgacagtcattgtttataaaattataaaactcctcatggtatagtacatagtagaagcaggaaaataccaattgcccattagttatctgataacagaag

SEQ ID NO: 261775 - DNA, 618 bp, Homo sapiens
caccattttacagttccaccaacagcacacgagggtttaacttcttcacatccccaccagcacttgttatattctgaattgtgttgttgttttatagtagccgtccaaatgggtgtaaggtgatagacagctcattgtggttttaatttgcatttctctggcgtgagccaccatgcctggccttacacagtgtatcttaaggtgtggagacctaggattaatttctcatacttgtcttaggacagcagcattgaaatgaaattcaaaatgttacaattagaaaaatataattctcaaacctgtgtatcttagagtattttcaatggaaattgaaacccgtttttcactatcatttgtgttgtggctctttatggtctctaggaagaaccactattcctcaaaccttctattttttagattacttcttcaactttctatgtcagattaaaaattaagaaagcgtttactgaaagattgagcccttcatttttgcaaaacctctgccaatgtggtgataactgtcaataaactgcttattccagaagcagatctaagaagcgaggtacaagccacaatttactgccccgtttagcccaataaacagagaaccttgtcttc

SEQ ID NO: 261776 - DNA, 497 bp, Homo sapiens
gtttatctactacattaatgtagctgcagctacattaatcagaatgaataaacggaatttaaagttgagttccaaaagcaaattgcaaaagagtgcatatggaaggatttcatcatatgaagtttacaaacagtattttactacaatattaaatagcattttatttacagaaacatacatatatggtaaactataaagaaaatggtgatacaaaatgcaggatagtgtttacttggggagtggccaaaggtacaatgagagagataggaccaaggaggacagacagaggcctttgaggctagtgggtcttggtcccgttcttaaactataggaattcattttaatgttacattttgtgtttatattttgtcataaattttttgtgcatattcaatatgtaaccacaaaatacaaaaaaactctctaaacagttgacaagggagtttattaagcaaatagaggtaccaattacaaaccatcagggttagaaaaaaaat

SEQ ID NO: 261777 - DNA, 326 bp, Homo sapiens
gcctttgccaactaaagctcaggagtaaagtggccatcactgaggccattctatgtatgtatgtatgtatgtatttagagatggagtcttgctctgtcacccgggctgaagcacaatggtgcagtcttggcttactgcaacctctgcctcccaggttcaagcaattctcctgcctcagcctcccaagtagctggatgtggtggtgggcgcctgtaatcccagctactgtcaaggctgaggcaggagaattgcctgaacccaggaagtggaggttgcagtgagccgaaatcgcaccattgcactccagcctgggtgtcaagagcaag

SEQ ID NO: 261778 - DNA, 183 bp, Homo sapiens
atctccacatgttcatctttagtctacagaatgatgattgacttttttctgtttatttaatatcctctgatcatgcagaactcattcattagttcaaaaaagatttttgtaaattgttttacattttccatgtgtacagtctgcaagaaagaagtgttatttcctccctttctatatgttgtt

SEQ ID NO: 261779 - DNA, 516 bp, Homo sapiens
cattggtggacacctaactgaattgcaagctacttataaacttacaggaaaatatggagttagctctgagcacatagcaggaggaaagtggccttcataagtatccctcataaggaatctccctaaatagaaattaaacataaaggagagagaaaacttactttcttgactcaaagtcagctgtcaatgactaggctgccaaaggaagtcattgcattatgaggacacctagctgtgaagcttagtattgcatgcctgctctattagcgcagccaaatagggaagaggaaaggagttaatttctaagttctcaggagagtttaggagatctggatggttgggttaacagtggaaagatctaggaaagtgtcctaaagaaagaaaagaaaattattgactccagttcccatcatgagggtatgtataatacatgcatacacaagtgcacatcaacgtagaagcatctcactgatgatatgccatcatcctgacaattttaagtccctttgtaaaaaa

SEQ ID NO: 261780 - DNA, 332 bp, Homo sapiens
cggtcctgtccttgggggcccagcataggtcagtgtcagatgggaccagcttagtccttcaactggatgcccggcctgggccagtcgctttcctccctaagccttggtttccccgtcaataaaggggaggatggcactctctcaggcaggctaggacagggagtgaggcccagagggggtaggcaaagtcccaactgcatggcctctgtgggatgggcagggcccctctgtgctgtgttgacattttcagtggcataagttttccctttggaggttatgcgtctttgtgacttactagaaacgataaacaaataaaacccttctagccaaaa

SEQ ID NO: 261781 - DNA, 817 bp, Homo sapiens
  misc_feature (34)..(34): n is a, c, g, or t
tgatatatatcgctcattatgggaattgcccttnagcccaggatcggcacgaggacagacttcctcccccgtgcttgccttcagagggctcacaatctagtgagcttgatttctgtgagtgcagagcagaagctgaggtggaaacagagaagtaaaaaatggacacaccagaggcagaagagtgacagcctcccagctgtttggggcagttgagtatggtggggaaatagctcaagctgtctttgcagcccctgaagacatcactgtaccctattgaaccatctcagggtgatgctattgttacgctgatccctgcaacgcttgcctgtgccccagcccaggatcctggcagctgcagagaaaatggcagtaacactacctcaaaccaggaccacgccctcagagcctgcaccctgggccacctgggagtcagagaccttcacctgggctatggggttctgggttgaggctggggttcccggcctagggaagggcttccgggttgaggccgggggtcctggcctagggaaggagatgcccctgtgtgctgggttacaaggtcatggccctgggaacacacttccttttctttctgggtcatttctgcctctgcagtgaaggatgccacagggtacaccctctctgctgtcatgactcaggacaggagttcctggtcacagctgagtcttcggatgaggtgaggggtagcatgctcctgtgctctgttgcctaaggcagggcagcctacaacccacgttagaaacagcgtcagcactaagggctaaaataaaactactttcaacatttaaaggggtca

SEQ ID NO: 261782 - DNA, 471 bp, Homo sapiens
tatttttatgtagttggtccatctgaaatgtaacaaatgcatcaagataagagtatatttatttgctagcagtgaagtgtttttaagtaaacggttggggagagttatgtaactgacactgttggcaaatgtaaggattgaaaacctttggtaataaaggttcatgtgggctgaatacagtggctcaggcctgtaatccaagcactttaggaggctgaggtgggaggatcacctgagcccaggagtttgagaccaacctgggcaacacagtgagacctcatctctacagataataaaaaaaaaaattggttggctgtggtggtgtgtgcctgtgattccaggtactcaagaggctgcagtgggaggatcgctcgagcccaggaaatcaagtctgcagtgagctgggatcacactactgtactccaaccttccagcctaggcaagagagtgagaccctgtctaaaaaaaaaa

SEQ ID NO: 261783 - DNA, 416 bp, Homo sapiens
gggagtccaggttcttggcatcttgaacaaagaattggacagaacgcacaaagcaaggaaagaatgaagcaacaaaaacagagatttatttaaaatgaaagtatgcttcacaggtgggagtgggttgagcataggggctcaagagccctgttacaggattttctggggtttaaataccctctagaggtttccattggttacttggtgtatcccctatgtaaatgaagaggatgaagtaaagttacagtcatttaaatggagaggatatttcctgtcatagctaaagtgtttccatttaatttagttctaggaagtcagcatgaattggccttatgttccctgcctccacactctattctcctgcctccgtctcacactctagtttgagggaaattacgataaagttactccctgtg

SEQ ID NO: 261784 - DNA, 378 bp, Homo sapiens
aactgcctaaattctagagtttggggcaggaatgtatacataagtctggaacatcttgccacaccagacacaaggatcatctgttagcgatgacaacagaaggatcatctcagaaggactcaggagccaaactaaatacactctccctgccaaaggaaatacattacagcccagtgcttcctacaggaactgaaaaaccagatggcctggatttgaattccagcttccacctcctacaggctctgtgagcttggcaagctccttaacctccctgtgcctcagtttcctcggctgtaagatggggacaatggtacctacctcacacaaatttttgagaattgatttggtgtaaataaagtacttataacaataaaaaaa

SEQ ID NO: 261785 - DNA, 407 bp, Homo sapiens
ccacctctgaaaaattattttacagcagcagttctccaagtgaggtccctggaccagcaacaatcagcattatccagaaaatgtgaattctcaggccctacccagatctgtggaagcagaaactcttggggtagagcttaacaatctgtgggttaagaagtcctctgggtaattcaaatgcatggaaatacattacagcccagtgcttcctacaggaactgaaaaaccagatggcctggatttgaattccagcttccacctcctacaggctctgtgagcttggcaagctccttaacctccctgtgcctcagtttcctcggctgtaagatggggacaatggtacctacctcacacaaatttttgagaattgatttggtgtaaataaagtacttataacaataaaaaaa

SEQ ID NO: 261786 - DNA, 446 bp, Homo sapiens
ctgcttaaattgttgaaaagctgggaaaaacctaaatgtacaacagtgggggattactgaactaattaaattatgtgcataaaattgcaaacattcttatatatttactgtatacataatgtttaaaatatggaaaaacaaggagtgttctatgtgcccagcaacagagagttcattgaaaaaaaaaaatccaaaatgtgtgtagtacattcatataatgcagcataccagcatggcacatgtatacatatgtaacaaacctgcacattgtgcacatgtaccctagaacttaaagtatgattaaaaaaaaaaaaaaagaaaaccacgaggccactaaattgcccctggcctgttatatgtgatgttgtcaacttgtctttgttgatatgaagctctgttcataatatactaaatgaaattaacaaattaaaaattagtatacacac

SEQ ID NO: 261787 - DNA, 317 bp, Homo sapiens
gagttgaaaatgatagatttcatagcattgtttttattgaagatgagtattagattatgtgggtaaggtgttgctttccaacctcatggtataattaaaccaatctcctttccagctcccctctactttgggggttctataatctttcttttgagatttgttgagattgatcttggaagatggaagagaactattctatctgggccaagaagatgactttataatgactgtattatatttacacaactttctttagtgttaacaaggacattgactacttggccaacattcaattaaaagatgtttaaaagcaagcc

SEQ ID NO: 261788 - DNA, 463 bp, Homo sapiens
agttgagctctagtgggatgggtggtgctgactggggcagggtatgagataactttctgtgatgctggtcatgttatatatcttgatctggatggtggttccaatgtgtaggcaaaagcaaaaattcattgagctgtacacttaagatttgtatgctctattatatgctatacctcaataaagtgaagtatagcaatacctccatagaaaatattttttaaaaagaggaaaaagaaaatgttcaattgacccaaaatatcgaaacatgggctttagaaatctagatttgaatctgattctaccattcactgactgtatcaacttgagaaagttacccaacctctctgagcctcattcctctcatccgaatatggagataataatatctacctaataggtttactctgaggagtaaattaaataagcacgtagctcaatgtttgtcacattgttgttaaacaaa

SEQ ID NO: 261789 - DNA, 255 bp, Homo sapiens
tcacctctcccccttctgcaccaaatcatgcccacctcccttctgaactgctggaaaccaaaatcttcctgaaagcaccccaagctaacttatggggttaggatcaccacacccaggattccctcagtcctcctatctttagacttcttttctttttgaggacacgattctccaaagttaacttctataaagcaaatcctatttctcactgacccatattttaccaaacagctggcactgcttttttcacagctg

SEQ ID NO: 261790 - DNA, 425 bp, Homo sapiens
tatattctaccaggtagcgaatgtatgagcatgttagagaagtaaaaaatttaaaaaacaaaattaaacatctagaataaaaagaaaaaatatctgatatgaaaaataccccatatggaattaacaacagtatacacattgcagaagtgtgcttgtagtgacagcaatagaaatgacccaaaataaagcatacaaagaggagaaaaataaaaatagataacactgtagtaaattaacagtgcatcagtgaactatgagacaactttcaatggcttaatgtatgtttacagtaattggagaccccaaaggacagaaatgatgaggtggcctagtctttgagaaataatggccaaaattgttctaatttgctgaaatatataaacgtacggacccaaggagcttaacaatccaaatctcaataacaa

SEQ ID NO: 261791 - DNA, 310 bp, Homo sapiens
ctgccaagaattccgtgtgacgatggctctcagtggacattctccattgtggatggcttcagtagtaaatccaggtggctgcctgtggatatctcatctcatgctgtgactccagccatgccttgcccctcaccagctctgacaccagcagaaggaggagatatggcataagcctggacaacagatgcttctctaagatgtggactcttgaatgagaaacacaaggatagaaggaatggttgaaacatactttaaatggatgagtggtatgctcttgaattatatctcaataaagctgttttttttaaaa

SEQ ID NO: 261792 - DNA, 404 bp, Homo sapiens
ctggctctcctagcgcctttcctggaggctgctctcaggtccttcccacatgcaatgcatgcctcttttgcactgagtctttctaatgcttcgagtctctctgatttcctcctctactagtcagagaaaattctctgcttttaaaagacccatatgtagtaaatccaggtggctgcctgtggatatctcatctcatgctgtgactccagccatgccttgcccctcaccagctctgacaccagcagaaggaggagatatggcataagcctggacaacagatgcttctctaagatgtggactcttgaatgagaaacacaaggatagaaggaatggttgaaacatactttaaatggatgagtggtatgctcttgaattatatctcaataaagctgttttttttaaaa

SEQ ID NO: 261793 - DNA, 678 bp, Homo sapiens
gttggctgggtgtggtggctcacacctgtaatcccagtactttgggaggccgaggcgggtggatcaccaaggtcaggagttgaagaccagtctggccaacatggtgaaaccctgtctctactaaaaatacaaaaattagccgggtgttgtggtgcacacctgtggtcccagctactcaggaggcggaggcaggacactcgcttgaactcaggagatggaggtgcagtgagccaagatcgcgcaactgcactctggtctggatgacagagcaagactccatctaaaaaaaaaaaaaaaaaaaaaaagaattttgtctttcacactggctggcagcactgatccctgacgtcctgcacatctgacaaaaatgattgtctcgcgtgctgatctgagtcctatctggtgctcacctaccctctggtcatctgttagccactcatctccttgtttgttggttggttttcagagcagactaagatactaaattcaggacactgttgttagaccacattaaaaatgcaggcggcagtgcagaacatggctggctcatgtcaggccgacttctcagtgtaaccagagaaggaaaacatggacagggcccgtgttaatggaagcagacgccagattgcatggcaggctctggctcctgtttctcctgttccctgccgccctccagcc

SEQ ID NO: 261794 - DNA, 602 bp, Homo sapiens
gacacagaaaggtctgtggccagctccctgaaggcagcagagtcctgaatccagatgcaattctaactcacaggagtcatggtaacaagaacaagaactcttatgaaaactcttcatggccaaagacttgtcacgcgtttcctcatcttatcatcccaagaagcctggaattctcccattttacaggtgaggagagggtattcagaatggctaagggactcaccccccttaaggaggagcatgcactctcatcaaagaatgtcccaaagttgaacagaaggtcagagtcaaaagcttgtgctcctcctactgcagcctgtggaggtctttttccctagtcaagacatcggaatgtggggtacaagggagaggaaatggacttggcatgctctctgtctattccttgagaaaggttatacacacatatgcacgtgcacacacatgcacacacacacattcacatgctcgctcgctctcttttcttatatcaaactttgcaggcttcaaaatcattcccaaatctttctgattttttttaaatttttaaatttttttgagacagggtctccctctgttgcccaggcttgagtgaagtggtgtga

SEQ ID NO: 261795 - DNA, 814 bp, Homo sapiens
aagagcagctgtctgcacagtgggaggtaactggacggtcagctagggctaggcacaggcctcatttatcagtgtgaggggtcagacttgaccctgtggtcaggagagtgccatcatagatttatagatacggcttgtgctgtcatctctgggacccccaaagtgaggacccagtgagttggagctgagtgtctgttaggtatagaggtaagatactacacaaaggaaactcagttttgtgaaaaacgtgtaaatatgtttttcaaacatgttcttaagactttttaatctttctatgttcttgttgtctggttatttcccatgaatgttagggatcagatcactgctgtgtaaataatagtccacccaaggtattcatatgcatttcttgacatggcctaaggcaagagtcctgccttccattgtcccctaatttatatttgcttctttctggagagttttaaatgaatttcaagggcttgatgcctttaaaatcagtggatcaggccctgtgttgcgagatttcttaatgggccacagttgtctctgtgattctcatttccagtttatagcactactgtccacctaaacatacactaaccatgtggatcttaatgatgttttaagaaaaaaggttttgacatacatgccagacttccacttaagatgaaactgggcaactaggaaatggtatgccgtacatatgaagcactgtttattgaatattggtggcaaattttgttttgttgctaggaccagattcttggagtgtgtagtaggaataaataagaccaaacacaatcttgcttcactg

SEQ ID NO: 261796 - DNA, 469 bp, Homo sapiens
tcaggtgggtgaaaaatacactgatttgcagagaaatggtgccagcctggactgtgaaaacagagacgagaaaaaccacactcggcaatatttgagcacgtattaaatcctggatggcacattgcatttttatggatgtcattcctaagagattcacagtcaggggaagatggtacataacaactcaggggcatgtcagatgcacctctgtagctgcgtgtccagatgccatggagtgagatgcctggttttgctcatagagttagaacattatcagaaaatacatgtatttgagttaaattttagagagtgagtagaaattcatcgggtctacaaggaggcaaagagctttcctggatgaaattcctccttggcgttcacctaaaacttactaatttcttacagaacatggatacctatgtaacctgcatgttctgcacatgtaccccaggacttaaagtattaaaca

SEQ ID NO: 261797 - DNA, 462 bp, Homo sapiens
gttgcagtgagccgaaatcgcgccactggactctagcctgggtgacagagcgagaccctgtctcaaaagaaaaataaataaaaataaagtatatggaggatgtgtgtgagttatatgcaaataccatagcattgtatataagggacttgtgcattgtggattttgatattcaaggaggggtcctggaaccagtcccccacagatattgagggatgactatactctgaaccaataccttttgtttttctgaggtcttaataagatgtttcacagtcatatgtttgccttcatctttagaccacattttcttggcagtgctctggagcttatccttgctcaaaagcctttttttttttttttttggtagagatgtctcattgtgttaaccaggctgaggtgggaggattgcttgaggcagtttgagaccagcctggtcaatataacgagaccccatccctttga

SEQ ID NO: 261798 - DNA, 409 bp, Homo sapiens
gaaggaatagtctttatatgggcattcagctgtgaaagggcccggtgtgtacagaacagtaagaaattgaacggttggggtataggggtgaatggtggagagaagaaaacagtgagactggagatttagaaagtccactatttaggccgggcgcggtggctcacgcctgtaatcccagcactttgggaggccaaggcaggcggataacgaggtcaggaaatcgagaccatcctggctaacacggtgaaaccccgtctctactaaaaatacaaaaaatgagccgggcgtggtggcgggcacctgtagtcccagctactcgggaggctgaggcaggagaatggcatgaaccgagatcacaccactgcactccagcctgggcgacagtgcgagactccgtcttaaaaaaaaa

SEQ ID NO: 261799 - DNA, 521 bp, Homo sapiens
attcataaaagaaaatattaataaattggacttcattaaaatataaaattttgtttcaaaaaactattaagaaaattaattggcccggggaggtggttcacatctgaaatccctgcactttcggaagctgaggtgggaggatctcttgaccctgggaggcagaggttgcagtgagccaagatcacaccaccgcactagagcctgggtgacagagtgagaccctgtctcaaaaaaaaaaaaaaaaaaaattaattgaaaaatcacagactgggagaaaatattttcaaaccataataagtatctgatagaggacttgtatctagactatgtaaagaattcttaaaactcaaaaataaggcagacaacttaaaaatggacaaaatgtttgaatagatatttcagcaaagatatacaaattgcttagcatatgaagagatgtgtactatcactagtcattaggaaaatacaagttaaaagcaaaattagataccattttggacccactaaaatgactataataa

SEQ ID NO: 261800 - DNA, 557 bp, Homo sapiens
caggttttaattgaacatctgcatatatttttctctgattaaatttgagtttgatttgccacaacaggcagacatggatccactcgggatctgcttgaaagaaccaatattgtaatgttgactcccaggctgcacaaacgcagaggccccattgaaacaaacttctggccattcgaatatgtcctagactgctctcaactggagacttattttagtcttaagtggaatttcttttttgatctaattcctggtgttcagaaaatcattacttgtccaacctactaccgtacatcactgataaatccgcaatttctggagcgcttttcagcacgatgccttcatttctgctgcctaagaatttcagaagagcaaagagttgagccctggctggctcacatgtagagacattcacagatagggttggctgagggtggaaattggacccagcaccttctggtttcatgtgctcaatgttcctgttaagaagttgggtccacccgtggccctcagtgggatgtgtatgttatgtttattaagagaggtcgcacgttcccact

SEQ ID NO: 261801 - DNA, 794 bp, Homo sapiens
agcggagttgaaggatttgagacaggatcactaatagtttttgtgaagcactggcatagttgagcaagtcagcttttagtgaaatgtgaaaatttaagcaaaccccagctaccaaaactgaactgtgaagggaaagctaaaggagagatagacgcgaaagtgtgctgctatgagatggccacttctatggttccacagttgtggtttcatccggttgagggcttatggctgctcagtctgcagtgtggaaaatgaaccagatgcaaatctgagtacaataaaggtaaactggatgtatttaactgttttgtatctatacatgaatgtatctgcccacatccaccttctgatattaatgcagctgttgcattttcgttttccaaatctcatgccaatttctcttgttgttaatcctaatctgggaccatacaagactcgggattctaggatacatagtttcattttagctcagtttccacctaaccaaattgacctggaaacatccagcacatatataagaatgcttcattaaataagtagtcactgtttaccttggtatgatattgcaggtacttctcagtgcaaatcagagctttctatgagctatacctgacctttcatatgccaatcaatatttctctttccaaattctaaacggtatctcagaatctattgattgcgtttttatttttctggagagctccagtttgtagaattctagtctcctactacaaagtaggttgcattctttatgcactgtgtctgctgagtgtatcttttgtttcttaaattct

SEQ ID NO: 261802 - DNA, 412 bp, Homo sapiens
ggcatagtttatggtggacatttcatattgaaaataaggagattaagtaaatttgtatttacttctgctcccagaatgctggcaactgggattaggacaggagattagaagattagaagagtcttgtctggagaatctgactctccccaagaagaaagaacttagagatgcagatatcagaggcttctcagtaaagggctcaggcagtcacactacagtgagatttgttatcagggggtttcacccaaggatttggagcttcacatcatgttttagttctcgtaattaaatatgaatggaaaatagaattgccagacatctgaggatcctcaaagcctctatagggtacagtcccaaacaaagaaagcaacccacatgaaacatacttttcagggaaagcataacttcgaaa

SEQ ID NO: 261803 - DNA, 250 bp, Homo sapiens
aattccctaggtccatgtcaatgttgtaatacagcctattttgcagtccacagaaatgatagcgctgccttgagaggcatatggccaaggggtcacagtgcagagccccagctctatggcaggagagcctcacccacctccctgcctccacatcctcaccatggaaataggagcactgttggtacctacctcgtgagggcggttctggaattactcaaacacatcatctaagatgctttgtacagggcct

SEQ ID NO: 261804 - DNA, 613 bp, Homo sapiens
gtgcatatgcgcgcatgcagtgcagggtctgcatacctaaagcagatgaaattctgcagaatggctgcctcactagacaaagtcaagaagacagaccgaggagagagaggttgatgtgtctccactaccaagagataggcttctctaagccagcgagacatcccatccaacaatatgaaactggccacatttccttgagatgtcaacgttgaaagtgtagctgcatctttattcttcactgttatgaagttgggtgcaacacagcttgagtggaatacaaaaacaccgcttggaaacacatgatctggatttgaatcgcagctgtatcattcacctgctatagactttgagcaagacctctctgaggttatttcttcacagtaggtagagacaagacttacttcaaaggttcttaaagttgaacctgagtcaatgaatgcaaaagtgttcacatttaaactgtaattttaaagcacaatacaagtaaatagcattaatatcattagagagattaacttagcactgtgcgtcacatgattcatcacgggccatctgtgagatatcaaatagagaggtgaagcctgcagtaataaaaaatactgccatagctata

SEQ ID NO: 261805 - DNA, 326 bp, Homo sapiens
tcaggggaagaaggcgtcctgttctcgcctctacggacatcagagcttgctgcgctgacctccagtgagacccatgtccttagccatggtcacaggtttagtccagcagtctggccctagctcctgcctaccactcccaccctaggaggccagtgttaggcggggaagccctggtctctgacctctccgctctaaaatcatatccagccctgatggccacacccaggttaggaggcaccagtaatatcgctgtagagggcccaatgtttgcattttgtactttgccgtccttaactcttgatacaataaaaactattttttcatct

SEQ ID NO: 261806 - DNA, 145 bp, Homo sapiens
aggcaggagcctcctgggaggtaggaagcagcagccttgtgggagcagaccctccagaccctcaaagaccaccccaggcatgtggcttcagcacccatgcccagcatccacttccggcctggggccccgaaacatagggattcct

SEQ ID NO: 261807 - DNA, 577 bp, Homo sapiens
tagccaggtgtggtggcatgtgtctgtaatcccagctacacaggaggctaaggtgggaggatcacttgagcccaggaggtcaaggcttcagtgagctgtgatcgcaccactgcactccagtgtgggtgacagagggagaccctgtctcaaaaaagaaaaaaaaaagagaaagagaaaaaaacatcagaggattaaagaaaaccctggttaattaagtcactgaatataattaaataagcataatttgtagttaggaacacagagtttaagctgtccatcatggcacccttatagtaccaggtacttgggaggctgagacaggaggatggtttgagcccaggagttgaggactatagttcaccatgatcacacctgtaaatagctactgcactctagcctgggcaacatagcgagaccgcatcaatataaataaataaattttttttaaaaaaccacagagtttaaagtcagacagatttatggatttggaatctcagctttatacttcctggctatgtgaatttaggcaggtcacttaagatctctgagccttactttcagcaattcccttataaag

SEQ ID NO: 261808 - DNA, 596 bp, Homo sapiens
tagccaggtgtggtggcatgtgtctgtaatcccagctacacaggaggctaaggtgggaggatcacttgagcccaggaggtcaaggcttcagtgagctgtgatcgcaccactgcactccagtgtgggtgacagagggagaccctgtctcaaaaaagaaaaaaaaaagagaaagagaaaaaaacatcagaggattaaagaaaaccctggttaattaagtcactgaatataattaaataagcataatttgtagttaggaacacagagtttaagctgtccatcatggcacccttatagtaccaggtacttgggaggctgagacaggaggatggtttgagcccaggattttgagaccagcctgtccaacatggtgaatccctgtctttacaaaaaaaaaaaaaatacaaaaattaaccaggtgtggtggcgcatgcctatagtcccagctactggggagggaggctcaggtgggaggatcacctgagcctaggaggcaaaggttgcagtgagctgagatagcaccactgccttccagcctgggcaacagatcaagaccctgtctctaaataaataaataaataaataaataaatgagagga

SEQ ID NO: 261809 - DNA, 853 bp, Homo sapiens
cagagatggaagacattgatatgtggtagatcattttgtgttgttacggtgtttaacaatgtttatcagtgcctactatcttccaggcatagtggtgaccaagccaaaatcattaataagtgatgatacaaaacattaataagtgatgataccaatcatattttgagaagcagtgattcttttttgacagttttgttattggaattatccttattttggtaatggtttttcatggtgccttctaccttggcattcaaatggagtacgtatagtgacataaaacagattgttttgttcagggtggacaaagcaattaaggcgtttcctttgcagtcagaatagctgggttactttcagctgccgtgtcattttggggagattattctatttaagcctcagtgtcatcacttgtaaaacaggaattaaaaagagtacttacaattttttgattgataagagaattaaatgagctaatatctctagtgactggtacatggtaaacactctgtcagtttttattgtatatcattcaattactgtgtttttacaagtttgcttataaagcctcaaaaggtggtttatctgagtaaattacaactgtggaacttcagagttggaagacacatgatagatcattgtgtactgttatggtatttaaaccatgctctggggagccccgatttaaactgttggagaaactcctgcattgctttgagctgttttgcctaccaggattccatgtgcaattttattagttctaaagatgagaaactgaaaagggcagtgatttgtccaatatcatatggcaggagtcagtggcagagccaaggtattatagttatctgcttttcta

SEQ ID NO: 261810 - DNA, 733 bp, Homo sapiens
tttgcatcttaagtctgaaaattggttgaggttccacaattccttattgtgctaatgcaggtatggcgtcggttcaccagactgtttgtgaatcaagtaggacattaatggagtgcaatggactgaatgtttacattccgccaaattcatttgttgaaaccctaacccccaaggtgatggctttaggagatgaggtctttgggaagtgattaggtcatgagggccaagccctcatgaatgggaatagtggccttataaaagagacttcagagagattcttgcctcttccaccacgtgaggacatggccagaatgtgctgtctatgaggaagtggacctcaccagacaccagatctgctggtaccttgatcttgcacttccaaggcttaacaaatgtgaaaaataaatttctgttgtttgtaagctacccagtatatagtattttgctatagcagcctgaatgactaaggcatatgataattacctgtttcagttctagggataccatgatcaactattaagtggaatgttaaagatctctatctggctgtgtgcagtggctcatgcctgtaatcccagtactttgggaggcccaggtgggaggactgcttgaagccagggattcaagatcggcctgggcaacaaagtgaggccctgtctctacaaaacaaacaacaaaaattagccaggtatggtggtacacacctgtggtcccagctaccttcctcatcttt

SEQ ID NO: 261811 - DNA, 479 bp, Homo sapiens
  misc_feature (136)..(136): n is a, c, g, or t
gtgtgtgtgtgtttttgtttttagagacagggtctcactctgttgcctagcacatccatggcacactgcagcttccagctccttgggtcaagcaatcctcccacctcagcctcccaggtagctggcactagaggtncacaccaccatatttggctgaattattattattattgttaggtattattagtagtagtagatatggggtcttgctttgttgcccaggttggtctcaaactcctggcctcaagtgactgtcgtgccctgccctcctccccaaccccttaccagctgtgtgacttttcagtgcctacctaacctctctgggcccccatcttcttctctgcaaacatcaaaatactgacctcctactgttgtgagaattcaatgaattgatacacagaaaacactgggaacagtgtctgatgtgtagtgatagtcaacaaatttagttgaatgatctttattattgcaagactttt

SEQ ID NO: 261812 - DNA, 403 bp, Homo sapiens
agtagggagtgctgattggtcaggttggagatggaatcatagaggagtcaagtgagttttcttgcttgttgtcttctgttcctggatgggatcatagaattggtggaaccagattaccagtctgggtggagtcagttgatccatggagtgcagggtctgcaaaatatctcaagcattgatcttaggttttccaatagttatattttccccaggagcaattttgggaggttaagaatcttgcagctggaggctgtgtggtcactaaaccacaatttctaatcttgtagctaatttgttagtcctataaaggcagaccggtccccagacaagaagggtttttttttttttttttttggaaaagggctattatcaattttgtttcagagttaaactataaactaaa

SEQ ID NO: 261813 - DNA, 409 bp, Homo sapiens
catcccccctacctcccagtggccttaagtgctttccagagggtctcccacaaagccttgaggtctccaggcatggatggagcagaggtggtggatgggaaagaatgaggggatgaggctaagggaaccctgtgtcgaggggggtgaatatgggatacccccctgcaatccccagcttaagcagtttcttccatacatactcccgattcaggaatttgcaatacttgccatctcttttgggaagggcatttcaaggatggggaggaaaatgtttgggcatgctgagggcatcagggaagagatgacggctattcctagggacaagaatatctgcatggaggcaactaaaactgcacatgatgaggctaagcatatgtcatctatatcaaagaaagaaggtgctgaagca

SEQ ID NO: 261814 - DNA, 821 bp, Homo sapiens
ttggttggatagctgaaggtggaatttctgggtcctatgatagttttttgtttgactttttgagaaaatgccaaacagtttttcaaactatatgcctagcctaactttgaactgatctaatttagtcaatttcttgcaaattgtttgctatcttcatagttatttgggctatgaaagtagtggttctgagatctgatcaattttgcatttgattattagaaaattatatattgttttcaatttatatgtgatcttaaaacaccgctcattttcccccatatacagttctttattgtattttgtaaattgggcttttcgatgaagaaattcatatcgaggaatgtttaaagaaagccaaattaagtttaaaatgccaatgcatgctgattattgtcaaagtagtaaagaaaactccaactccacaactcataaacccctcaaatagcagaatttaaatatattatttgttaaatagaaatcctttattttataattgcaaaatggccctataaattgttatttcaatgtgcattttaaataaaagcgttcgggcaaaaatgcgctgttctcattcactagagcctcacatgcaaagataagttatctaagtgaagcgtctggaaattatcgttcagacttgggtcctgcctggggaaggtggtgactatgtgccctcccttgatggtgtactccgacttcagttaaagatagatctgttgcacaaacaaaaatgtttcatgaaatgctctgaaagtatctttaggggcatgtgtgacgttagtgaaaatgaatcatctttttagcattcagtcgttctattt

SEQ ID NO: 261815 - DNA, 314 bp, Homo sapiens
cggcacgaggcaaaataaaatctgtacaccaaacccctgtgacatgcaatttccctgtatttcaaatttgcacttggacccctgaacctaaaataaaagttaaagaaaaggtccttggtgatataaaaaaatccagatgcccaggtccatcccagaccaatcaaagtaaaacttccaggagtaggacccaactaccagtatattaacaagctctctaggtgatcccaatgtgtagccaaagtgggagatcctgttagtaaatgtttagtgtgattgatttccctggcggagagtgttaggttagaagaaaagga

SEQ ID NO: 261816 - DNA, 472 bp, Homo sapiens
actctgactggttctgacaaataggctgtaacaagaagggaatgatgggtgatgctttcattctgggtcgatgaaaacctcatggaccatttccagtctctctcccctggatggagagtacttccaatggtgcagacacttcaccttgcaaagggcggttggcctgatgcatctcctgcatcagaagtgaactgccaatggaaaacaaaaatgactttagtgtattcatcagtgagatgttggggttctttgttacctgaaacaaagcacagcctgtctgatcctgttcaacttatagacagaccaatagactccaagagtgcccagaaagagatctacccatgtatgaacaattgatttttcaacaaaaagtgaaactgcaaagtagtggagaaaggacagccttggtccaactgaatattcatttgagagaaaaaagtagaacttgtctctactgcatgccatacacaga

SEQ ID NO: 261817 - DNA, 369 bp, Homo sapiens
ggttggattgggtgagctctgattggttggatcaggtgagctctgattggttggttcaggtgagcccagaaagtatcccaggtgcaagggtgcggttttggggggactctgtgtttgtatgacctatagacagcaaacggccgctgggctctattttagccactcaggatccaccttgaaggactggctctttcagcttcaccactgttcccaggagtggccgtctctcatccggcgatacctggtcttacactgggctgagaatcgcattcacgcttattcttatactttacggtctaaaatgctttgctgttagctcttaggtttaaatcccagtcctacttattaaacatggaatttgagtaagta

SEQ ID NO: 261818 - DNA, 527 bp, Homo sapiens
ctcctgcccggtgagcttcaatttggtggggatggctggggcagaaggagcctgtgatgggaggggttgctggggttctggggcccggagaccagagggaagaagagaggccctttacacatgtgaatgcagaccccacgtgcctccttctccaggtgatgtggctcagacctcagacaaccctgtgaagatagtgccactagccccaatttgtagacaagaaaactgaggagcagaaattaacctgcctgaggccgcataaataatatgcagttggctgggctgggctggcaagcactggcctgtggaactttaaaactaaagctcgtgctgagttggattacacgtttgaatgttctattttctttcttttcttttgttttaaccagaagactgccttgttcctctttctcattctctttccttccctctttccatcctccatttccaaacccaggaacaaaccatgggaggcagagcaaggggcatggttcccattttcaggattgtaaagcaaggctcatcga

SEQ ID NO: 261819 - DNA, 522 bp, Homo sapiens
atatacttgcatatgcacaggcacaaagatacctgcaaaactgttcattacagcatcgtttaataacagggaaaaactgaaaccagctaagtggctaccaccaggcaacagttaaatgtagtatgaagcaattacataagatgttatgcagtcatttaaaaggtagatttctgtaaggggatgtggactgtcttgcaagatgtattgttaaatgaaaaaggcaatgtgaaaaatggtgtagatagtattctagtatgtctgtaaaaacagaaatattctttatataaattttcttcataaccacatataaattgctctattggctgttcctggaattaaaatattaaaaaattataaatagtggttgcctctggggaggtgttgtggggctgcacatgtaaacagggaatatttgcctctcatcatcgattgatttttattattcaacttatttgttttaaacacagcatttctttgtctattataattttagatatccaataaaaaataaatattataaat

SEQ ID NO: 261820 - DNA, 690 bp, Homo sapiens
agggggtggatagaattttgtgtggaggatttagatcctaggaaaagaggtaaatgaaggttgcctgggatgagccctctgcctcccagtttgccctgggacactccctatcacgtgcaggcccgagctgttcccaaaaggcgttaatgagagtgcctggcaggtgtttatacatctagaccctaaacatacttaaggatgtcttttggccatttctgtggtcattgccattcttaaaagagttgctttaaataagttaaatgtctgttctgcacccacatcctagaatagttaagttgcaattagcacctgcaggtgcatctcatttgtacacattttcttaactgaatcataaaaacacagcatcagaaaataatgatctgttcttcaggcctcagtaactaacattaaggccctgaaaaaaaaagcatattagaaatagcttttatgagaaagcttagataaggaagcatcctcaaagtaaaaactagatacctgagaaaactggactggttcaagataatatggaaggaaaagtcagctaaatgctcttgactggagcatctggtgggatgttgcatttgagttcacaaaaatcccagacttcagcactgtacaattcatccatgtaaccaaaacccacttgtaaccctaaagctattgaagtttaaaaaaagaaattaaaaacta

SEQ ID NO: 261821 - DNA, 354 bp, Homo sapiens
aatttccttgttttatccagcctattgccaagttatggactgagattttcgatgagacaacttgctggagagtccctatttttcagggactttaacaacatgcatttgacacataaatatttgatggcttagcaaataactgatccataaatgggagggcaatttctggccttgttctttaaatcaagagttctgcaaattttgcaagtccatgaggaagagcctgaaaaaaagaaaattggggtgaaagtgaccatggaagatacaggaaaagagagagagggaaaaaaaatttaaaaagagggtctgaagatcaagcagccccaagcaactctcctctggataaaaaaaaaa

SEQ ID NO: 261822 - DNA, 568 bp, Homo sapiens
agactgaatgatttgtcttctctgccaaactggctggctttaccatattgatgacttgcctatttgttcatttccccaccataatgtaggctccatgagggcattagtggtgtgtttgcattagtggtgtgtttttttgaacatccttgtaccctagagttaagtgcattgtagaaacttatcttcttaaaggaatcgagattattgctgggtggtcaaattaaaggtgattttaaacaaacatatataagaaaaatgctaataaagacatactggcagaattcattccaaaaagtattaagacaaggaaggggactttaaaatgaaaaagggtgcaaatgagatataatttatgaattgttatgtgcatcaaaatatatagcagcaatgtttgtaaagcaaaaaactaagggaggtacaaagaaaaataacggacaaaaacacagacaaagcacattaatactgaaaattttagttcatttcttttagttcatatataaaaatcttcctaagtaacaaaagttcccattcctcctcatacaccccaaaaataagcaggacacataat

SEQ ID NO: 261823 - DNA, 396 bp, Homo sapiens
ccgaggtcccgtgtggcaccagggtatgtcagggctgggggcaaacattttataggcagagccagcaaggagagctgtgctgggcccttctggaagggaaagcaggcctaggtggggtctgcatggtggaaccctgcagagagcattgctgaaagagcctggcggcatggcccgtgaagcggtttctgtgtcagggatggcgtgtctagctacagaatcatgcatgtgctgcacagtttcctttcttctttgtctgggacaagctgcagagggtttctcttctgcttttcaaagagcaagtggctacaaacagctcttgcagcatctttttataaatgacagaactgtggttggctgtgaataaggttcagttctgcagtgcccatcacatggtta

SEQ ID NO: 261824 - DNA, 514 bp, Homo sapiens
cttgaattgtaggtgtgaaatcttacaatctttcagaatgatttggtttgggggatggttggaactgcatggaattccttcagccaaaataatttttgtgagcacattcccaagctcacgatcatgttttgataagaaaaatccctttctccacaagttctcaggtcccactcattggcccctgccctcatttctggaacctatgttaggcagttatgtggctcagttcttggtgatatgttttcaatttgagtcaacttgatgagagaaaaattactaaaaaatgggaatgagctgtgaggtgaacagggttttcctatcaaagtggaggtatttttaaaagcatttattatttcaaactcaaacatttatagaaagccatgagtgtgaagtgtatgattaccagttgtggcttgctgcattgaaaaattcaagttcataggaaatatttactgaggctctggtttgcaagcagtttgttcaagagaacaatttggtccagaaggcatgtcag

SEQ ID NO: 261825 - DNA, 730 bp, Homo sapiens
caaacgcactgtcctgaacctctggtccttgatctcctcaagcacaggagccgcctgtcccgctgttccctgcctgggctcccttctttgtctctcgctgtctcttacacaaacttggtctttgtgactccagtctgttctccttttcttcctcttgcctctttggtgccaactctttctcccctccaaccccgtgaagtccacacaggccctcatttcatattccccctccttttcccatcatttctctaagctgtcatgctcaacagtgggtaatgagctgacacagggaggccttctgccggccttcttcccaaggcatttggatggtaaaagggatcccagcttcaagacttaattccctgagtcgttggtgggtaattttttttttttttttttttttttttttttgagccagagtttcgctctgctacccaggctggagtgcagtggtgtgatctcggctcactacaacctctacttcccggtttcaagcaattctcctacctcagcctcccaagtagctggaactacaagcacctttcaccacacctggctaattttggatttttagtaaagacagggtttcaccatgttggccaggctggtctcgaactcctgacctcaagtgatccacctgccttggccccccaagtgctgggattacaggcatgagctactgcgcacagctttggtgggtaatttcaaataccaaccataagtgggtcct

SEQ ID NO: 261826 - DNA, 644 bp, Homo sapiens
gttacaagggcaggtcaaaattaggcaaaagaaactttgatgctagattatctggcagtaaaacattcatttattaaacaagcagttgttatgagccttcttctctgtacgttaagggctgggaacagcaaagatggggaggactttgttctggaggtgctccagtgaggggagaaaaacacataaagataccttcaggctgggcgcagtggctcacgcctgtaatcccagcactttgggaggctgaggcaggtggatcacaaggtcaggagatcgagaccagcctggccaacatggtgaaaccccgtctctactaaaaatacaaaaaaaaattagctgggtgtggtggtgtgcacctgtagtcccagctactcgggaggctgaggcaggagaatcgattgaactcaagaggtggaagttgcagcgagccgagatggtgccactgcactccagcctggccgacagcaagactgtatcaaaaaaaaaacaacatgctgtggctgaatagacctatgggtgacctggagaagtgtgaaaaaagctttcccaaggtagtggcacctaagtgggaacttgaacaatggagagtctgcaaggcgagaaggagcaggagcttcagaggaagccatgggaaccaaaggatg

SEQ ID NO: 261827 - DNA, 135 bp, Homo sapiens
ggatgaagaaggaggggatgaactcactttaatttaggctgaacccagaagaatttactaaccaacaagcaagcaagtgagccaccaaagtaaatgctgtcaaccttaaataactacaaaggccaaaaaaaaaaa

SEQ ID NO: 261828 - DNA, 460 bp, Homo sapiens
tcacatgtttgctgttatcaagattgttgtatatgtgaatgaaatgatacgatgtctcagatttgctttaaaataatagggaggttggggaagtgggttggggtacagacgaaacaggagtaggtgtgagttgataatgttgaagttgagtgatcagtacgtgggtttattacactattcttttcacatttgctttgaaactgttcataaaaatttccataataaaagttctatatatatataaatatatacatacatatgagaaaatgatgtttatagcagagcttcactagacatggtatgtagcatgtagtgcacaagctgattttaagtgatattcagatggccttttaaatttaattattatgtatttaaaatttaattaattatagcaagtgatatgaactgtgataatgcagaaggtttccttttaaaataaagttcagtcaaaaaagtgaga

SEQ ID NO: 261829 - DNA, 434 bp, Homo sapiens
ccctccacccttatcactcagtacccacctgaccctacttatcttccagaggcaatcactgttctggattctctcaccacgaggaagtcaattcatgagagactgctccacaaagcttgctggggagagaagaagcgaacagattcaggaggcagaagagtagagtgagacctccatgtaaatatgtccaagctggcccgcttgaaggatggtaggccatgcagaagaaaaccaaggcacccagaaggacatcctgccaactgcgagatgtttgagtgagaccattctgtcagccagtcaccagccagccaaccagctaatgacagatgcatgcataggctccagagagatcagctgagttgtcccagactacaagaaccagccaacccgcagaattacaagaacaataaaaggttgttttcttaagccactaa

SEQ ID NO: 261830 - DNA, 400 bp, Homo sapiens
tgccgcgtgcccacccagctctttttgagccacccgttcaaaaggccagctcctcagtccttagctcctggagacggccacgctttccctcaggccggcttcttggcccggagtttttggaaacaagtttcaagaaaataatcgatttccaaaagaaagttagctggctccactgacgccttggcatggatggatagggagtggagatgctcaggtgaaaccgagaatccctcactgaatgcctactgggtgctagaggctgtagattttgcctggaacaagatagtcctgtcttcagggagttgatggttctatgcaattatcgtttgttggaaaccgaagggttaaaatcctaactaggctacccacctgatcgctgtctctgaaggtttttaaggaa

SEQ ID NO: 261831 - DNA, 630 bp, Homo sapiens
tgctgcaggcccaccatcagcagcctacatttgctcccctcctgccctctcttcccaggaagcccctcacctgtcacttcctgaagaatatggaagccaaggaggtcttcttcaggcattcctctccacccatgcacttcctccctccctgccagcttcaaaggaattgatttccagagagacccttcccagttgccccacctttccgtcagcctcttccaggaactgtcctctgacatctctctgtctaggtctccttgtcactcttgtgcacaccaagactgttctcccttttcctgtcagccactgagtccactcagatatcttctgcttcccaaaattaaaattacaaaccaaaacagagacagcttccatgaccttacacattgtagacacttggctacagcagtgaatgacataaacaaagtccctttcctcatgtagccctcatgctagtagagtgaaacagataataaataaactagtcaaatgttcagcatgtgagttggtgatgacagcacggtgcttcatgcctgtaatcctagtgctttgggaggccgagatgtgaggatggctaaggtcaggaatttgagaccagtctgggtaacatagtgagaccctgtatctaca

SEQ ID NO: 261832 - DNA, 614 bp, Homo sapiens
ggaggcctcaggaaacttacaatcattgcagaaggcaaagaggaagcaagcacgtcttcacatggctggcaggagagagagaaagtgaaggggaaggtgccgcacactttacaacagccagatctcgtgagaactctttatcacgagacagcactaggggggtggtgccaaaccattagaaaccatccgcagtatccaagcaccttgcactaggccccacctccaacaccggggattacaattaaacatgagatttgggtggggacacagagccaaatcatatcactgtttattcttgttccacttgagaatgctgtgtctttgcagggttagggtgatatctctgccaaagggttgtccctggaatagccccactcatccttgagaaacgtggagaactcattctattccactcacccggaaagagtaaatactcttctgccttatgggattaaagctctttcccccgtgtgtgtgtgtcttacctccttgacaggaaaatgtctccatagcaggcattcttgcctacctttgtagctccagcagcccctcatagtggccttgcagaagctgcatgtttaataaatagttgatgaagaaatgatcaaaacaga

SEQ ID NO: 261833 - DNA, 853 bp, Homo sapiens
aagaccttgggaataaaggacaaccttacaggcttagtcctcctgttcttccactgtgctccttaaaggaaattcaattgtctactgataaatttttcagaatggaaccatctgaaattaccaatggttgttttctttctattttaacaagggagtaaatgcttctttaattgcagcgggacccttctgagacagtgtctgtgaatgatgttttggcccgagctgcagccaagggtctgctggatgggattgagttgggtaaatcatcaaaacgggagaagaagaagaaaaaatcaaaaacatcattgacaaaaggtgccactactgataatggcatccaaatgaaaattgctgagttcctgaatcgagaaactaaagccagtgctaatctatcagagactgtaacaaaaccacctcttccccagaaaaatactgctcaagtgggggcttcctcacagaccagaaaacccaacaagctggccccccatcctgcagtgcctgcatttgtgaagaacacttgtccctccagaccgcgtgaacggcagacacacttcttaagacctcggccagaagacagaatggttgctctgaaacccatcgagattgttctgcctccagtctttatgccattttcaagtccccaagggatcagatctcggatgccaactcaacatttgtactgtcgttgggttgcacccaaggcacttgtgcccacctgccttcccacacactcactatccagaaaagaggaaaagcctaaagatgacacaccttcctccctactcaggcctcctcggcgatggctttgattgtcttgtgttttttataggggccaaagagcagttgatttttt

SEQ ID NO: 261834 - DNA, 445 bp, Homo sapiens
tagaatacgtccgggttaggacgtactgggatgaggaacgtcactgggataggaacgtcactcaactcagctgaagctcgagggcacctctgacgtgaaggaatcctatattcaggctccccaccctaagaaatcttatcccacacaccagaaattccatcctagaaaccagccagcctcattggtgattgtttagctccatcagaattggccatctcttgagactcacctccttagcttcccaggccaagggtgaatcctgcttttcaggagccagcaggatgacagccttccagtctagaaggttcctaggccctgcaaggactgccttggttctgcccccagggacaagatgaaacactggttggagtttgtaagtgaccaactcagaggagggctattctgagtcgacccgataaagaatgttttcttgtagcagtgtgca

SEQ ID NO: 261835 - DNA, 463 bp, Homo sapiens
tctgccaatccccagggcctaacacagagcctggcacagagtctatgctctgtaactgtttgttgattgaaagaaggtgacaactcagctgaagctcgagggcacctctgacgtgaaggaatcctatattcaggctccccaccctaagaaatcttatcccacacaccagaaattccatcctagaaaccagccagcctcattggtgattgtttagctccatcagaattggccatctcttgagactcacctccttagcttcccaggccaagggtgaatcctgcttttcaggagccagcaggatgacagccttccagtctagaaggttcctaggccctgcaaggactgccttggttctgcccccagggacaagatgaaacactggttggagtttgtaagtgaccaactcagaggagggctattctgagtcgacccgataaagaatgttttcttgtagcagtgtgca

SEQ ID NO: 261836 - DNA, 340 bp, Homo sapiens
tttttttttttttttgacagagtctgggtctttggcccaggctggactgcagtggtgctatctcagctcattgcaagctctgcctcccgggttcacgccattctcctgcctcagcctcctgagtagctgggactacaggtgaccaccaccacgcccggctaattttttttgtatttttagtagagacggggtttcaccatgttaggatggtcttgatctcctgacctagtgatccgcccacctcggcctcccaaagtgctgggattacaggcgtgagccaccgcgcccggctgtttctgtattttttgaaaagcctcacgtatttggactaatggctaaa

SEQ ID NO: 261837 - DNA, 310 bp, Homo sapiens
taggaatccagggtcctagtggcccaggtcaggagggagggggacagacagggctttgtcaccagagaacagagtgccagcttctattttctgattccagttttgccttggccccagggtgagcttgctgaacattattagataccctaatgtcagcatctaagtcccccattttattttattttactttatttttattttattttattttatttatttttgagacggagtctcgctctgtcgcctaggaggttgaggctgcaaggagctatgatcgtaccactgcgacagagcgagactgatatactta

SEQ ID NO: 261838 - DNA, 408 bp, Homo sapiens
ttcagttcctgcttcaggtgcagaaacatagctatttccagtgccagctgttgagccagtgccagcaccaggggcagagccccttccagggacagcactggagctagaggaagctccagagccctcctgccgctgccctgggattgcacaggaccagcccagtgagaagctgcctgacttcatggcacctcctgtagagccaccggcctcagccctggagctgaaagtgtggctggagctagaggtggcagagagggggtgaccagcacagctccagccagcagctcccacactgctcccagtcctgggcacagtggaagctgtggaggcagagaccagggtgtgcaacctgggctcctctgcctcactggagagggacttctctcattcagcaggcacagccctgct

SEQ ID NO: 261839 - DNA, 446 bp, Homo sapiens
cccacaatggcagtggcagcagatggaggagatggagcagaaggcagcagagggcgtcccaggtagtacgggcaagccaccttgtgcatgacttgtgtcttaggtgtgactgtgtgtcctgggatcagttctgggtggtcagaaaagtttgaagccagatgactccactgtcaaaaaacctctgtagagttttctaaaggtgaaagtatccagatgaagcagggctccttgaaggaatggctgcttctggagttggagcaggggagatacaagatgagcctggagctgcttgtagcaccagaggggaaggaggtggtcacaacccaagaggctgggacatcttacatgggcttctgagcccgagcctcagacaaaccacacgaccttggattacagcccctggagtcaaataaatatacctgagtccgtagtgacctaaataaaca

SEQ ID NO: 261840 - DNA, 429 bp, Homo sapiens
ctttgctgtttttaaagccacagtttaaaagtatttagctattctcaggtgatatggtttggatgttttgtcccctccaaatatcatgttgaaatgtaatctctgatactggaggtgggcctagtgggaggtgtttgggtcattggggcagatctctcatgaatggcctggtgttgtcctcaaggtaatgaatgagttgttgctctatgggttcacacaagatctggttgtttaaaaaagactggcacctcctccctctgtcttgctccctctctcaccatgtgacatgctggctccccttcaccttctgccatgattaaaagcttctgaggccctcaccagaggctgatgcaagcactatgctttgtgtacagccttcagaatgttgagtcaaataaatctattttctttataaatcaccctgtctca

SEQ ID NO: 261841 - DNA, 690 bp, Homo sapiens
gttcttagcttctttgtagtgagttagaacataatccttcagctcagtgaagttcattattacccatcttctgaagcttacttctgtcaatttcatccatctcagcctcagcccatttctgtgcccttgctggaggcctgtgcgaacctcctgaaggagaagaggcactctggctttttgagttgtcagcatttttgcattgattctttctcatcttcgtgggttcatccatctttgatttttgaggctgctgaattttgatggggttttatttgatgccttttttgttgatgtggctgtgttctgtttgtttttcttttagcagtcagaccactcttctgtggggctgctgcagtttgcttgcagtccactccggcccctattcgctttgatccctcccctccctggagttaacatcaggggaggctgcagagagcaaagatgtcaggctgcttttttctcggggggctctgtcccataggggcactggcctgatgctgactgaaacactctgtatgaggtgtcttgagactcctgttgagaggtcccactcagtcaggaaaagtggggttagggacctgtttaaataagcaatgtgcctgcccctttacagggtgggtgtgcttcacttgggagaatcaccctcatctgggctaccctgattctctagagccagaaggcagaaaagac

SEQ ID NO: 261842 - DNA, 610 bp, Homo sapiens
cgtcccttcaacggtgttctgctctctactcaactttatttgaaaatgttgcagcttcactcctgttagaaaaggaaatcttcatattttattaatcttagccgccagtgtactcttgtgggtgatgtggcaattcataatgtccagtgaatctggactctcttactgattcctggttttagtgtgtgtgtccgggggagtgtgtacctatatataaaggacaagtgtgatatggaggttttactcatgttgcccgggctggagtgctagtgacacgatctcggctaactgccacctccgcctcccaggagaatggcttgaacttgggaggcagaggttgcgatgagccaagatcacgccattgtactccagcttgggcaagaaaaatgaaactctgtctcaaaaacaaagaaaaaagtaaaaagagagttaggcttaggcttaatggaattttttttatcttctatctagaccaattaaactttcttcataacagcagcaagattgtttagctttttatcattcatgtattcactggagtagtactttaaatttctttccagaacacttcctttgcattcacaacttggctaagtgtttgttgcatgag

SEQ ID NO: 261843 - DNA, 830 bp, Homo sapiens
aaaaatttatttcttcagaaataaattagtcttaacttactgtaacgtttttattttataaacttaattttaaaaaacttttgactctttcgtaataatagccaaaaatacaaacacattgtacagtcatataaaagtattttcttcctttattcctatttttttcctatttttaatttcttttatttaaaaaaaaatttaaaaatgaagacacgaacacatttattagcccagacctacacagggtcgggatcatcactatcattgccttccacctccacatcttatcacactggttactcataaaatattatcagctggaatttttattattatttcctaatttgcaaatgcggaaagagggtcagaatagttagacattttcctaacgtcttgtcttggagcaataaatgtagagctgggatttgaatccaggcctgtgtatctcccaatgctgaaccctttctgcaagataagacacttggaaattaatgcttgaatttagtttgatgttccagtggctgtatgtttatgagactaaaaaataaaatgccagtcagtgtggaaattggtatctactgaattgaatgctttaagttatttaggttttccccaccttccctgtccctgaaacaggtacaaccaaaagcttcttattctaatcaaactaacactaaattatttttcttctgaatgatgactatacctttcccagacaataaagtcttttattttctgtaatttctcattctttctttttatacactacaaggttgttattattgagaattcaggtctattaataaaaacagttaaatttattctgtaca

SEQ ID NO: 261844 - DNA, 340 bp, Homo sapiens
tttttgagacagtctctgttgcccaggctggagtgcaatggcgcgatctcagctcactgcaaactccgcctcttgagttcaagtgattctcctgcctcaacttcccgagtagctgggattacaggcaccaccaccacatctggctaatttttttatttttagtagagacggggtttcaccaggttggccaggctggtctcgaattcctgaccttaggtgatctgcccacctcagcctcccaaactgctgggattacaggcctgagccaccatgcccagccccaaaatctttttgatgaagcctagcatttcatggtttttgtttttctgcaacagcaagt

SEQ ID NO: 261845 - DNA, 449 bp, Homo sapiens
gataactaaaaagcatagaatgcaaaagtagggagggccctgccctcctagccaaaattgcacataccttccctgctgcagctggtgaagcagctaactgcatgtgtttccctattgcaggcctttctggtgggtttacctcctgagaggaagaagtgagaaataccctcgctcctcttaattacacaggaggcaggtggagaggcattgttgtgcatgtgtggctcagttaaccccacttgtggcgcaataaatatgaaattatgacaattcagatcatctaccttgacttcctcaagtaggaatacaggtgtagaaagaagggttcaaagtgttcatgacaaaactgcctctcttctgggcttcttccctgtgggtttcttcttagagcagcactctccagtaatgcaaatgaatatgcaattctgtgttttctgatgactgcattt

SEQ ID NO: 261846 - DNA, 384 bp, Homo sapiens
atgtaatactcgcagaatttggtgttgccacttgtatgtgtgttctcagagttcgtgaggtggacttatatgtatttgataaaaatagtttgtggttctgtgtgtatttgagtttatgtggcttctgtgttttgtattctgggagatgtgggaggttcagtgcatgtatttggaaacagagaggctgtgtaggttgtgtttggattcaagaatcatggattcctgtattttagagctgtgggattgtatgtgattctttttctgggtgatgcatgacacaagtgttgtataccttgtgatttttttttttgagcctatgcctataggattttcattatgtactgttaacaaatctactgaaaaggattttctttaaaaaataac

SEQ ID NO: 261847 - DNA, 368 bp, Homo sapiens
gaaaatgttctataattgactgtggtgattatctgtttgcatctttgaatatactttactgaattgtacacttaaaagggatgcattgtgtagtgtgttttattctgatatagcttttcaaataaatatgacttcagatttttgattaatctgttaagcatactaagagtttccagatataccttaatttacatcactttttattgttcatttttgtatcagtgaaaatagggattcaattaccttaggtatatcatagtcgtttacatttcaaagttctctgcgaacacaatctgtaacctatttaaaataaattttcctgtagtgtgaaatgtacacttcagagtttaattgaacatatctcacag

SEQ ID NO: 261848 - DNA, 621 bp, Homo sapiens
aggtagaataagaacaaataccccaaatgaatgaatggaaaggcttaatgaaaagctgaaatcatggaataaaaaaccatacaggtttttcatcaaaatctagtcctttgaagaaaactattattcattagactttgtcagtgcctctactatattataaggagaaatggaatataactatatgtttggagatattttttagtattaagtatgtgaactctgttagacatgatttttatatgtgtacggtttttttctaggaaaacattattaaatatgattaagtttcaaaaacaacccaaaaagttcaaaaaatagaaaaaagtatcatgtaagatgaggttgagcacagtggctcatgcctgtaatccaaacactctgggaggttgagacaggagtatcacttgaaccaggagttccagacttgcctggacaacatagggagacccccatctctgcaaaaaataaattagccaggtgtggtggcacatgcctctggtcccagctactcaggaggctgaggtgagaggactgcttgggcccaggagtttgaggctgcagtaagctgtgatcaccccactgcactgcagtcggtgatggagcaagaccctgtctaaaaca

SEQ ID NO: 261849 - DNA, 538 bp, Homo sapiens
caccagagcacgagtgacctactgactgaaaacccccagggtcgcccaacaccctatggctccctaccgggtcctgccctattgctggaagggcatgactccagagcagcaagctgccatcaggaaagagcaggaagtacaacgctctaagaagcaagcacaccgtcaggctgagaaaacactggatactgaatggaaaagccagactatgagctcagcccaggcagtgctggagctagaagagcaggagagggaattgtgtgctgtatttcaaaggggtctaggatccttcaaccagcagctggctaatgagcaaaaagcccagcaggattacctgaattcagtaatctacaccaatcaacctacagcccagtatcaccagcagtttaacaccagcagccgctaagttcaggatgtctatctctctctcccttctcctccatcaagctcacaggtggttaggagtcaaagagaaaaatgctgcatactcccaccttctaacctaggtaataaagttctgcactcaaaatcaagtcca

SEQ ID NO: 261850 - DNA, 654 bp, Homo sapiens
caccagagcacgagtgacctactgactgaaaacccccagggtcgcccaacaccctatggctccctaccgggtcctgccctattgctggaagggcatgactccagagcagcaagctgccatcaggaaagagcaggaagtacaacgctctaagaagcaagcacaccgtcaggctgagaaaacactggatactgaatggaaaagccagactatgagctcagcccaggcagtgctggagctagaagagcaggagagggaattgtgtgctgtatttcaaaggggtctaggatccttcaaccagcagctggctaatgagcaaaaagcccagtgagttctaggtggtagtggtggagataaatgccaagggagggagaggagggatggtgaggaaccatggagagagggaaagcatgtcagctgagacctctggacttctttcacaggcaggattacctgaattcagtaatctacaccaatcaacctacagcccagtatcaccagcagtttaacaccagcagccgctaagttcaggatgtctatctctctctcccttctcctccatcaagctcacaggtggttaggagtcaaagagaaaaatgctgcatactcccaccttctaacctaggtaataaagttctgcactcaaaatcaagtcca

SEQ ID NO: 261851 - DNA, 427 bp, Homo sapiens
gtagtcaaatgaagcctatggatccttttttaagaataatattcttatcaaataatatctattacctaataatcaaataatatctaatatcaaataatacctattataataaatgtgaaatgatatttaatataatatgtatcataatacatatgcattatgaaattcaacacgaaccaattatattttagtataggtatgaaagatatatactttttttttttttttgaggtacaggagagaagtctcactctgtcacccaggctgaagtgcagtggggtggtcttggctcactgcaacctctgactcctgggttcaagctattcttctgcctcaaccttccaagtatctgagattacaggcacttgccaccacgcccagcaaatttttatattttctgtagagacggggttttgccatgttggcc

SEQ ID NO: 261852 - DNA, 255 bp, Homo sapiens
tacagacgcatgtgtcccagtgctctggccccatgacgtgtgaactccacccaccatcataaagggcactgtctatttggaagtcccccggtccctagctgggctcctgggatgaagaggaggatagggagggacatggcgggtgtaagctagggtcctgttctgcctgctaccctgggctgcagggaaatgctggtaaatgtttaacaactgacacccttccccaccaaaaataaaaagccccaagttatagca

SEQ ID NO: 261853 - DNA, 289 bp, Homo sapiens
ttttttttttttgcatttttagtagagatggggtttctccatgttgcccagggtggtctcaaactcctgggctcaagcgatcctcccgccttggccgctcacagtgctgggattatagatgtgagccactgggcccggtcatgcgagacttgtttcacttaattttttcaatccggaaaatccatgtctttgttctcattttgtaagtgggggaaaggcagaggttcagcaaggttaagtcacctgaataaggtcacacagctggcaggtggtggagctaggattccag

SEQ ID NO: 261854 - DNA, 533 bp, Homo sapiens
ccatgctggagagactaggtacatcatgggccagcaactgagagaaaatcgggagcacataagtccaagtgtaagaatatggggtcagggtagtggaaagaacagttatttaactgtttccccagaaggtaaaaacatgccatattttctcagcctgagaaaaattcaggatcaagtctgtttcacttgagaaaatctttcccacaagaacttatggatatcatttttttttttttttctagaaaaagtctcactctgtctcccaggctggagtgcacaggcacaatctcggctggctgcagcctccacctcccaggttcaagtgattcttgtgcctcagcctcctgagatatctttaaagttttcttgtttctttcttaagaaaactctccctattctaatctccactcataattctcaagatggtgtacaaatattgctataaataactattcatcaggaagttccaagaaaggttctgttgggcaatagttgatataactcatgaaataaatatttactgaacatgtaaa

SEQ ID NO: 261855 - DNA, 533 bp, Homo sapiens
ggctgtgtggcctggtgcctgaaggcacactgcccggggcgccctggagaggcgcagtggcgctggcagccgaggttccagagcgcacggtggcgcagtggctggcggaggcctgcacgcagccgccggaggagttcgtgtgggctgtggccctgctgctgctgcagctgagcgcggccctgaagttcctggaggcgtggggcgcggccctagtcgagttgcggccggagaacttgctgctggtggcacctcggggctgtgcgacgacggggcccccacgcctgctcctcactgactttggccgcgtctgtctgcagccccctggacccccgggatccccgggcccccacgcgccgcagctgggcagcctcctccgagcgctgctcagccttgctgcgccctcgaccacgcctttggccgcgggcctggagctcctggcagcacagctgacccgcttgcggccctcggcgtcccggacgcggggcgcgctgcaggcgctgctctgggggcccgggcctgagctgcgcggccgc

SEQ ID NO: 261856 - DNA, 497 bp, Homo sapiens
ggagggagctcttaaagacctgtgctgatgtcttacgttgtgtctgtgtgaacttgatagacttgcagcctaaccctggagggggcagaaataaagtggtggctgaggaggagaaagtggcctgagcccagcaggcccctggatggcaggagcggctgccgctgagctgtccctccgctaggcccagagtcagctgactctgcatccttagctttttccttctctcctaaggcccttcacccagattgcctggtgccaagcagcttactacttcttccctctctcttccatgtgtggcactcccttccccttgtttttctttttgtgggaaattaaaggaacctaatggtgcttattttcctaactccatcttagtgtatagcctggaaagacacctctgctgggaagagactcctaagtccaggagccaagctcctgtcattgccaaaggctttttgcatatgacctgtgggaaaaatttagcccccccaccgcca

SEQ ID NO: 261857 - DNA, 427 bp, Homo sapiens
ggagtgcagtggtgagatctgggctcactgcaacctcggcctcccaggttcaagcgatactcctgcctcagcctcccgagtagctgggactacaggcacatgccaccacgcccggctcattttttgtatttttagtagagatggagtttcaccatgttggccaggatggtctcgaactccagacctcatgatccgcctcggcctcccaaagtgctgggattacagacgtgagccaccgcgcctggccaaaaaaaacctttttttaaaaattagccaggtgcggtgatgcacacttgtagtcctagctgtctgggaagctgaggaggggagattgcttgagcccaggagttcaaggttacagtgagctatgattgcaccttgcaccactgcactccagtctgggcgaaagagtgaaactttgtctcaa

SEQ ID NO: 261858 - DNA, 481 bp, Homo sapiens
atttggaatgacagtgccaactcccaggaactgaggatttactctgttattttggttttagttcttcatgtgagatggtaaaacttgaagagaaattccatggaagattgtattaatatcattaattgctagattatcagtagcaggaaatgtatcactagactgtgatagacacacacacacataaatatatacctactactttatggtagaaagacaaacagcctagttccatgattttccaatttttggagtgtttgcagtttgttgactttgttgctagtaaatctaatgtggtctttttcaacaatggaccttcggcgttcgctatttctatgctggtttgatgaattagttgataagtcggatattgtattctcaagatcaaaattgtatttctatgtcagcatgtcagtgaacatgcatttagagtgtgatggagaaaataaataaaacacatggataatctcagtgtggaaca

SEQ ID NO: 261859 - DNA, 531 bp, Homo sapiens
aatcgacatcaaatggcagtctcaacattcaattaaatggacccattgttatgtcccctagtgaaagtaattttcttttgcatcacgaaatctttgagctagcagagcccaaatctgtggaattggaaaataaaatatttacaagtgagatttacatgtaataatgagaactaccattctaactataaattcagtttatggagacattgagctctagattgagctctagatcagctaaatgttaatcactagatcagagcatcccatgggatagtagcccaacctcacaatgttgtctctcaactcttgctggaactgagttctcaacaggccaatccactcttttgggtaatgaggaacatggtaaaaatcagagaatcccatgggcatgaacccactgctttgctttttttgttgttgttgttcagaagcagtgttgggtggctcaccataacagtgaatgttgcaatgtaagtccgttgatagtagcagtggcaggatcgtagcatgcagggaaagcaaatctatatc

SEQ ID NO: 261860 - DNA, 310 bp, Homo sapiens
gtggttattatacaaataaaaaaaagtttttagtgcctgtgaggttttcatcaactttagtcatctggaaaattaactttgtcaatatgctcagtcctctctgccaaacaaatcaaggacaatcatgctttagtatctttccaatacatatcctgtcattctgttggactttcttattatagatgagaagtgattccttccttcagccttaactttgagcccaccacactaagagcatagttggaataattttttattttttttcctgagacagtcttgttctgtcgcccaggctggagtgcagtggcac

SEQ ID NO: 261861 - DNA, 344 bp, Homo sapiens
ttttctcagcagcatccttgagaatgtgcgacgtgactgggttcttgaaaccactgttccgatactgctttcctttgctaagtttaaattccagcctcctaattctaatgttttcgtgggaccttctacaatccttcttttctgtatgtcttgggcaggcaaaggggggtattctccactagcatgttgctaaagagggcctctaccctttaatgaaactgttttacctgaataagctttgaaaaagaaataccgtagttgaatattatgctgtcccatctcctcatcagctactctccacaactttaaaaaacccaattcttaattcttaactacacagccat

SEQ ID NO: 261862 - DNA, 448 bp, Homo sapiens
tcttgactttgatgtattttgacttctaattttatttggataaatttttattctctaccaaaatggagaaaaattgtgaaagtctatgattttgcagtatctagatttggtgaaatgttgaaacaatcacagatatagacaacttgaaagttttatcttgtaagaaattattgagcaaaagtgctttgaatgaaggtagaaagacagcacctatgacgatattggcctgaaatatttacatattttaatctaaaaaatgagaagattcttcatttagcagaacttacaggttcatcagtatctagagaggaaatgtgttctcagttaaaaacatatagtgaagcatcaattaaagttgtccataatttcaaatatattaaccataaaatgaagttttgaaaaagattgcagttttataaaaaaataactgtttaaataaaaaacgaaa

SEQ ID NO: 261863 - DNA, 480 bp, Homo sapiens
gtggatgctcagaaagtggggaaggaaggaaagatacaacggtaaaaggcttacacgtcttgacaggaatgtccagttcggctcatttggctggagtcgtactgcatggctgccattctgctctggcatcctcagacaagcacactgcccattagaggaaaaagtgtgaatataagtgttgagtcagaatgctgtagacatttagtaacctccttcacaggaaaaaaaaaagatggggggaatgacagaaatccaaaaactagtagagcttccacttttcatttcagaagaaatcagttgctctcctataaggaccattactattaacaaaacagagaccttagaaggaggcattgtttatttattatatattttgtaatgttattaccaatcttgttatactctttcttataccctacaattgttagcagaaattattttaaattaataagatcctgcatgcttttccttaaaaaaaaa

SEQ ID NO: 261864 - DNA, 929 bp, Homo sapiens
gcaatggaacatctgagttttgtgtaactgatgtgaaagctgctgatttagaatactgcagcaataagactagatattgctttaaaggagaatgcagagatagggacagacagtgcgcacagttatttggaaaattttctaagtctgctagtgttctgtgtacagaaaaagtgaattttctaaatgacaaatttggaaactgtggttcccgttgtcatttttatgatattctttgtggaaagattgtcactggacacattcagaaacagtatcaatgacagactttgatatacaatatacttaccttgggggtcatgtatgtttgtctgcacatgcaagaaatggttcaaaataatgggggacctatgcagaagctacaagtgcatgtggtcaacacaggttatgtagattccaaggatgcaaatatcttagtgacataaatataacaagatataacataaattgcagagagaatagggcttgcaatgaacttttccattgtcagtgtgatcctggttatgctcctccagattgtgagccgccaatatcatcaccaggaggaagtgttaatgatggattttagcttacggtagaaaaaagtgtaccttgtttccaaaacgacgtgctgctcctaaaaacaatggtcttttgatcagtttctacatttcttttttacctttgctcattttaattgctattgttagtcttaaatggaataaaatgaagagattttggagcaaagcgggaacagtaagcagcatatctatctcagaagacagcagcaggaacaacaacgagtcacagagttaaagtagcccaagtgataacttcgaagccatagggtggagaaaggatattaccaagaaactcaccattaactggcctgatctaacaatggttttctctcattttgttatggcttaaagctt

SEQ ID NO: 261865 - DNA, 169 bp, Homo sapiens
tcttttttcttgttttttaaaaatgaatttgtattcccatgcttaatgtctcagtttgagtgtcacatcttcagaaagtacttactaaacactttatctgagactaccctttcattattttcattttcaaatccctattcatttcctttacaaaatttgttattcatcg

SEQ ID NO: 261866 - DNA, 259 bp, Homo sapiens
catgtttcgcttttggaaaaaggatgatgccaggtacggcaaacacgcccgggcgagcgcacacctggggccgcggcgcccgtaatcgcattggcgacgcctcgacaactgtgtctggaggcagccggcgccgccaccttgcgccctcccagcccagggaaacaggctcaggagaaggaaatgctttggattcacttatcctacaaattaactagaaaaatattttggtttcagtccaattttaccccctttcttgtcc

SEQ ID NO: 261867 - DNA, 409 bp, Homo sapiens
taagactcgaaggaaggatactcatgaagctgcttaccccagggcctggtccattttagaaagagttcaataagagtaattatttgggaataataattataacaaaagtagcactaatgcccctgaagttgtcccaggctggattttggtctcattgggaggtggctctggatttgaatgtgggtagtttgaagccattcactagctgagtgactgtggggacaagccacttccctctgtgagcatcagtttccacacctttaaaatggtgtaacattggcccctacagtcccttctgaggatccagggagctggatctttggcatagtctggcctggccgttggtgggcactcaataaatgactggtattgataaccacaataataacaaggagatgccagcaaggtc

SEQ ID NO: 261868 - DNA, 682 bp, Homo sapiens
gtctcagcctcccaaagctctgggattacaggtgtcaaccaccatgcccagctatatcaaactgttaatactggtttttcccaaagagttatatgggtgttggtggacagaggagggtgtgttagaagagagagctttcattttcttacttcatacaatgcagcaatgtttccaattttaaaacaaattagaacataaatatgtatcgtatattatacatacacacacacccatacatataagtaaacaaagaacaataactctggagttgaaaactctggtttcaaatcagctgtaccagttttaccttctctgggctttatcctcctttgtaaaatgagtggattggatcagatgaccttgaaggtcccttctggatctaacattctaactgtgtgaaaggaattaaaaatagatgcccgaggagacagctggccaaaaggtatccagacaataatttcaaggggcttccatacttctaaatgagggcatttgtcaccaatgatcagtgaaattttaaggccctgttttttgtttttgttttaattttgtctttcttctattctgtagtaaaatgtgaaatatgtaactatcttagactaaaataagagtcacaggattttaacttcacagcaggttttaagcagaagattgaattctctaaattcaaatttagacgcct

SEQ ID NO: 261869 - DNA, 461 bp, Homo sapiens
ctcttactacacacaaaacattgttctgagcgcctttcaaatacaaactcctttcatcttaagcaccacccgacagggcaggtactattaccatctccgtttgacagatgaggaacctggcacaggaagcatttaagtggattccccaggatcgccccactgtcaggagcagagtcagaatgggcctcagcatcaggctcccaatcctggcttctaactgctgcgctctgcccttctctctccccacctccccactccagtgcctttggtcatgccactgcagctttcaggccaatactggattagcctcttagtgttcttgtccctgcagccatttccccaggcagcaattccatgtgccctcactgatgtaggtggctcttgtgtcatttgtcacatcctattgaattgtttatgcatcttgttcacactcacagcaccctccctctcacacgtcctcc

SEQ ID NO: 261870 - DNA, 538 bp, Homo sapiens
gtagccaccatacaggccagggtcatcactgtgctcctccatggcccaggtctgtctgtcctgaagccactgacgggaaggggtggcagcagtgcgggtgtattcccagagagcctctgcagttgtgatgaggtgggtccctgagtgacttggccttccagtctggtcccccttctcgccagtcctgggcaggtcaggccagctaggtttgcttatgcatggcttcaaaggtgaggccttttacaaactctgtttatcactttgctgcactccttgagggtgtacaggattggtgtgtttatgataatccttaaaatcaggacagatgattgccctacactcccctccccccaagtctaggacctgagcctgtctccgtcacatcttgaaaaggcaagagttctgtgtgactccttgtgcagagtgggctgaagcttgggcaggtgtctcacactccaggtgagtgaggtggctcctggcctttgtcttcttttcctatgctgaattaaataaagatttttctgaagtaattcagtca

SEQ ID NO: 261871 - DNA, 306 bp, Homo sapiens
aggataaacattgctattctaaaagagagcaatgggaaggaagaaaggagtaacaggtcctggtaagtccaaaacgcaactgggcaaacattaaattcttaggcctcaaaataatcttcttggaccccatgtcccactttcaagacacactggggtagggtttgggctcctgaaactctgatggccctgcccccatggctttgctgggagaagccagtgcagcaactgtcctgggttgcagtcacatgcctgtggctccaccagtctgaggtctagggtgaccctgctgccatgactccactagac

SEQ ID NO: 261872 - DNA, 449 bp, Homo sapiens
atggaactcagtggccaatttgatgtggaacaggaaaacggaatggagagtccagaatgtggcagatttctggcaagaatggctgggtgggtgagatgcatctgacagatcaggaggcaagagaggagcagactcactgacagtgggtagaggctgagttcagttatagatgtgctggttttgaagtagttatgagacattcagctggacccagccagttgtctgttgaatactttggtctgatgcttaagggagatactagaattagaaatattgtttcaaaaatcagcaagatacaaggggcaattaagcaaacaacagtgaatgatacgacaaaggagactgtactgacagtaaagaactattgacaaagtagaacctttgggagcttcggtatttggggcaggaaaggacagaggacaagaaacctgcaaatacaattaagaaat

SEQ ID NO: 261873 - DNA, 176 bp, Homo sapiens
ggcacaaaaagacaaatactacatgttctcactcatatgcaaaatcctaaaaaggtgatctcatagaaatagtaaatagaacagtggttaccaaagactgaagagggtgggtggaagggagcttggggagtatagtcaaggaacacaaagttacaattaaaaaagaaggatagatg

SEQ ID NO: 261874 - DNA, 532 bp, Homo sapiens
ggcgagaaaagcacaacaaatcacattctagcagataagctaaactggatgtggtttattaaagacatccctaagccacaaaactggattagccgtgtgcacttgtggccgcgtgtacacaaccacaccccgaggcacaggcatggctcttggtttatgagatatccacgcactcaggacagtgacccagattgcaggcccgtgccaggtgagaagcagcgagtgccgccgccgcaccgtcccccttcctgaccactgagtgctgtgttggctccagagctctccctttagcctgggggttcagatgctgaactgggctccccagacagagtgctgcttgttcacagccggttatgctcggccacatacaagtccccatctggtagctggaatgaaagcagctgtaagaggatcccatggaaaaggtatgtgagctcatgtgggtgtggaaggaaagaactggctctgtaggcagagctggtggttttgttgtgaactctagggtttgcagcaggctggccctagccaaaaa

SEQ ID NO: 261875 - DNA, 714 bp, Homo sapiens
tgagctgaaagaatgcacagacctgaggaggcagataagtggctcttgtgcttcaaggttattaggaaccttgatggaggaacaccaaacagtctagagcatgcggctccactggggagaagtcactgaagagttagaggagaacttatttttaagatctgagggaggtgcagttacagtaagaacaatgaaagacttgctgaaagaaagttttaagaaacctttaaatgtcttagtttaaaaaattagcaaataaaatgaaaatgataatgattattgctgggaaaaaaattagttttctgaaaaaagatcccatgacagtgactaaaaacttagagttcgaaatcagaaattagtagacaagatctaagtacaggtccctaccttacaaatattaggtgggtggaagaagaagagaatgagaataattgaacaaataataagagtttatctgaactgaaaaaaaaaaataaaaaggtgtgcctcaaacttaaagggtctttgagtcccaggaaaaagtatcaagatacaaacctaaacagacatttgattttcaggaattaagagacagtagtataggtttccagacaggttgcttcaaaggaatgagactgagattagtattgaacatctaatcaaatctgcaatcctgcaatctctttctctctctccttcatacacatacacatccccccacaggatgtcagtcaagat

SEQ ID NO: 261876 - DNA, 500 bp, Homo sapiens
gagaagaggaaacacaagaagaaactcctggtgcagagccccaattcctacttcatggatgtgaaatgcccaggatgcgataaaatcaccacggtctttagccatgcacaaacggtagttttgtgtgttggctgctccactgtcctctgccagcctacaggaggaaaagcaaggcttacagaaggatgttccttcaggaggaagcagcactaaaagcactctggaaagtgctttccaaatcagtatctccaacccaaatctctctcctaaacttcaaacccacttatccaactaccagttggatctcaagttaggtgtctcataggcatctcaaactgaactcaaccatccttccctaatcttctcctccagggtttatctactgaatgacaccatcatcatcatctacctatctgcataagccagaaatttaagactaggttggtcctcttctctctactctccctagtaactaaccaccaaagcctaaatctttctca

SEQ ID NO: 261877 - DNA, 385 bp, Homo sapiens
tgagatcaagtgccaaaggacatctcaaaatacccacagccaaaacttctcagcatagctccctgcatggagaaggagacagctctgcaagtctttgtcctgaaccgtttacggattttccatggtctgcaagaccttggactcacgccgcctgccagctggcagccgctgtccagcctgggaacagagcttgctccggcctgtggcgagtcctcccggggcttatcgtgaatttccccggttttgcatcttcatcctgaaaacctcccgacctttccttaatgaagattttagctgggggaaattgcattagtggctcgtgtttttctgtcaaccttctaaattatgttagttgtaagtaaaaagagtacagtaagtcctttta

SEQ ID NO: 261878 - DNA, 501 bp, Homo sapiens
catgcatcgttctggctggggcacgacaaaagacaccgaaagagtcttatccactcagtcggggtgaagttaaactaataagcaactgctctaagtcttacggaaatcgtctctatgacaaagaaatggaatgtgcagagtctcgctctgtgccccaagctggagtgcagtggtgcaatctcagctcactgcaacatccatccacctcctgggttcaagtgattctcctgcctccgcctcccgagtagctgggattacaggtgcccgccaccacgcccagctaattttctgtatttttggtagagatggggtttcaccatgtcagccaggctggtctcgaacttctgacctcaggagttccaggcctcccaaggtgctgggattacaggcgtaaaccaccgcgcttggtctgcccaatactttcaacattgctctggatcttactgtaaaattcttggaaactgctgtgatactaagataaccagatatttacaactgata

SEQ ID NO: 261879 - DNA, 400 bp, Homo sapiens
tttagttctgtgccttctttggtgaatagaggggtatgacctgaattaataggtagttgagtgtctcaatttggttgtgttgtcttggagtatttttcacgcagaatccggtgatttatctaccatagaggcccacacaggtccatgggaggaggtctcccctgagatttgagctatttcctctccatttcacagacaaacaggtcattctggttgaaagcagggcccttatagagctccatggcacacagggttttaatttgatgagtcatcttttgttgatctttgcttaaatagctttagtccacagttgcatagttgattttcaggctgtagtttctttcctctgtgaaggtttgaggtttgttccttcattacccttttactttttttacttaaa

SEQ ID NO: 261880 - DNA, 544 bp, Homo sapiens
tggtgaaatggggtgaccactgtcatcccacagaaccaggggcttggtgctgctggacagcaaggacccccaaggccaagtcctgggctccttggggacctccctgccaggccctcccatgggatgcagccctggcctcttcacagggccctgccccaccgcccacaaccccctgcagccaggaccctcacctgtctgtgcaccagaactacctgggaagctttataaatgtcaaggcccaggccccacccagaaactctgagtcaggggcctgccctgggctccagatgctgtatgtagccaggacaggtgccccaggcttccccaccactcacgtggtccagcccagcaggtacaccctgcaacgtccctttctagtcctcacccctgcccacttccctgtggctcaaacctggccccaggacaaggcagcccgccccaccttacaggggaggcccagccacacctgtcactgcatctagccactcctgggcccatacttggggcacacggggtgcctgccgtcctctccctctgctccctg

SEQ ID NO: 261881 - DNA, 410 bp, Homo sapiens
taatttttttatttttgtatttttagtagagacggggtttcaccatgttagccaggatggtctcgatctcctgacctcatgatctgcccacctcagcctcccaaagtgctgagatcacaggcgtgagccaccgtgccctgccaacaccaactatttcattggcagtagaagaatcacactctgcagctactgagaggtggaggtgaagccaccctgccgagcagccaacctcactttttggttattatccttgtgccgatgctgccggacaaactctctctacaaatctcagcatgtggaagaaacagaggcaggaacaattgcccagcacctttctatttctcgaggacactcttgaagttattcatcaatgttttaattaaagcagatcttatcgcttttcctcaaat

SEQ ID NO: 261882 - DNA, 751 bp, Homo sapiens
tggtgggagaagaggggttggagtgaatccatctctattcaaattccagctgggattactctaggagtcttcctggcttgttttgggctcaaacttagctacattgtttattggctcccaaagtcgggattgaagagtgaaaagatgcaggcaatgaatccttctgcacactcctccccaacctttccagcgcttttctacttaggaggccagtggaagggaggagaggccatgccctagcccacaggggacaaggttcattgttcttccaggcttggttcactctgcttttgattcagaagctctttccctacccagcaagactacactttcttgccttcttgtctattttttctttttgtgcgtataaatggtatgttgtgatatattctcagtgcttgtgcccaccttggaactctgttcttgctcttcattccgcatgtgatactctggtccaagatcttggccaggtgccttctgctcaaatatcgtctcagaggtgcttcccttgaaaactcggtgctgtttccatagttactctatttgatcactctaagtttggttgtcttcatagcacttgtcaccctctggaactattctattcatttatttacttgtttaatgcttggctcttttcccctcctaacgtaaactccatgattgccaacacctgtttacttactacagttccccctccccccacattcctgacactagtaagaaccaataaacacttgttgacggaatgaat

SEQ ID NO: 261883 - DNA, 400 bp, Homo sapiens
attcgcggccgcgtcgacataaaattcattgattttgatatttttccacgaagtaattcttttcaatttcatcatgatcattggtcacacagcatttcttaaaagacttcaccggcctggcgcggtggctcacgcctgtaatccttgcactgtgggaggccgaggctggtggatcacgaggtcaggagatcaagaccatcctggttaacactgtgaaaccccgtctctactaataatacaaataattagccaggggtggtggtgggcgcttgtagtaccagctacttgggaggctgaggcaggagaatgccatgaacccaggaggcagagttcgcagtgagccaagatcatgccacagctctccagcctgggcgacagagcgagactctgacaaaaaaaa

SEQ ID NO: 261884 - DNA, 415 bp, Homo sapiens
ttttcgccaaagaaatctaggattcatgaaaccccaaccaacagctggaggatgtgggctctgagtgagcaagttcccttggttctcagtaaccttcatcctgtggagagaaagaagtggagctggggagatgaggaaggaggaagctgagttcattcctcagaagctccagacccagggccaggttcccttttgctaggtctcagggcagttctcctgccaggaactgtactaggaaaggagatacagagctaaaatgcacatttcaagatgtcagaggaacttacattttagtgtgattaatactggaaggtttacatgatttaatattttctgaactgtaggttaactattggaagtacaatcatgaaaatgaaaacattttaataaaaatgatagtattattaagtataaa

SEQ ID NO: 261885 - DNA, 791 bp, Homo sapiens
tctcaaaaaaaaaaaaaaaaaaatcaggttcaagatcactttcattccaacaactatagtcattattgaattttacttaccttcatggaacatatgtatatctcagcatagtcagatataatggaaatttctcttagaaaaataaccgttctttgtaaaattcacctttttagttgtgatagatatctaagatttaattccatcaagtggaaattaagatttttctagtcaggaaaatctgactagatgtgttgaaagtatgggacaaatcaagaaaaacactgacaaaattaaatctttttttttttttttgagacggaatctcgctttgttgcccaggctggagtgcagtggtgtgatctcggctcactgcaacctctgcctcctgggttcaagcgattctcctgcctcagcctcctaagtagctgggattacaggcacccgacaccacacccagctaatttttgtatttttggtagagatggggtttcaccatgttagtcaggctggtctcaaactcctgacctcgtgatcctcccaccttggcctcccaaagtgctgggattacaggcgtgagccaccacacccggccacaaagttaagtcttaactgaagtttttccttttgatggataaactttagaggcatggttctgcttattaaagaaatttgttagggaagccacgctgaagacctccgtgtgacagaagggttcatgaacaaggcttcatctgctcactctttctgcagacgggatcatttctccgttccccacccctggcgtttggctc

SEQ ID NO: 261886 - DNA, 378 bp, Homo sapiens
agaaggctcttggctgagaaagaggaacttttaagtgaaaatagaataatcactgaaaaactccacaaatgcttagaagaggctgcccatactgagatgagcctgaatgagaagatcacttacctgacttccgagaaggagatggcttctcagaaaatgactgaacttaaaaagcagcaggatagtctcttgaaagaaaaatcctcactggaaacgcaaaatggagctttacttgcagagagagagaattccatcaaagccataggagacctcaaaaggcaatgtgatcaagagtctgcaaacagaagtttagttgtgcaagagaatatgaaactcctcggtaatattgatgctctgaagaaggagcttcaagagaga

SEQ ID NO: 261887 - DNA, 374 bp, Homo sapiens
tcatgtctctgaaaacaaggacgatatcttttgttgcttttgtattctcaaggcctaacacgtctaacagaagacggcgaaattagagatgaggaagattaaggagattcaaagtgggagccaatacagaagcaaagatgacatcctctgatttggacagaattgtcctgctacagagaggccagagagtataacataataccaagagttaccatttacttaaagcttactggttcttgggcactgtgtgtgaattgtctcagttaataaggtctgaaataggtcctcttatccccattttacagattgggaaacagacccacagaatttaagcagttaataaaggattgggttcatacttaaatccaggtcta

SEQ ID NO: 261888 - DNA, 815 bp, Homo sapiens
gtatccccaacacagcagcaagaacaaaccaggtacaacattttttaaagttttctgtttagtgtataaaaatgagtaaccactaaaaatgtactcttcattttattactatggtcaaataacttcattatgggtgtaactacaccaacaatgatgatccaagtaaaaatctggggtgcacatactgacattttaatcacctaatgagttttcagtgttgggcgataagtgatgttatcgcccaacacaagcatttgttatgaaaagggaagaacaccacataggacagaacttaaaccaactgcatttttgtagcataaatttaattttctaatctattttgagcatctcattttgtaaataacagcatatcagatgttaattcttgagacatgacaactaaatgcaataggcaattctggtctgatttggtagtaggggaaaagtgctttaaaggatgttactgggtcaattgacaaaactggactatggacagtagattaaataaaagtttcatatcaggccggtcgcagtggctcacacctgtaatcccaacactttgggaggccaaggcaggtggatcatctgaggtcaggggttcgagaccagcctggccaacatggtgagaccccatctctactaaaaataccaaaaaaaaaaaaaaaattagttggacgtggtatgcgcctgtaatcccagccactcaggaagttgaggcaggagaatggcttgaacccaggaggcagaggttgcagtgagccgagatcgcaccactgcactccagcctgggtgacagagcgagactctgtctcaaa

SEQ ID NO: 261889 - DNA, 952 bp, Homo sapiens
ctgaggtggtgcacccacatgcctggcaggttggtgctggctgttggtgggaggcctcagtttcccaccacatggactcctctacagagctgcttaagtgtccttacaacatggcagttggctgctcccgaggaagtgattcaaggagagcaaggcaggaaccatgtcttttatggcctagccttggacatcatttctgcagtcctactggttgccagatgggtcctattcagtgaagaggggactctccaggatgtgactactggggctcactgggcagcatctcagagctgccaccatgctgctgcgtggttggcccatctggaacacttagtcttcagtcacttggtttgattcaagaacaaagagttagaaactcttcaccttttgaatgcaaggaagtaggctgacccctcaaagtgtgccagacaagccattttaagcatagttgggtgagatgcaaagaggaagcctgcatattcgctgcttacgtgaaatgtttggcgcctactcatgctttctatccacagagtctcactgatagtttgtcagccttgcatcccatctgccccatgtgggtcctgtgaagctgctggtcaacctatcccctggctttgggggaatgcaacccatgtctggccaactgtggtgccccatttcccagtctagagttgttggtccaagaggaggctctctcttactctgaaatcatgagctgagggtttactgtgtatgcctgaagctatcagacaatgaagaaagaagagagagaaagagagagatttgagcacctgggtccagctatgactgaagctagcaagacacccatctttgttctctgaaattatgtaagaaagtaaactccctttttggaattttgcttgtttacttttgcttaagttaacttgagctggaatttcatcatcacaattaaaaacatcctaacaactta

SEQ ID NO: 261890 - DNA, 513 bp, Homo sapiens
aggcagaggttgcagtgagcagagatcaggccactgtactccatgatctcactccagagtaagaccctgtctcagaaaacaaaataatcccacaggaagtggatagcagtgtctatgaaaactgtggccactaattgatcactgcggacggtgagagatgggtatgtaacattctttacactcttctctctacttttgagtatgtttgaaatttttcataataaaaagttaaggccaggtgtagaggctcatgcttgtaatcctagcactttgggaagcagaggtgggaagacagcttgagcccaggtgttggagaccagcctgggcaatatagcgagacatccgtctccacaaaacatagaaaatttagccaggcatggtagtgtgctcctgtagtcccagctactcgaggacgcccaggagagaggatcgcttgagcttgcggggtggaggctgcagttccactgcactccaccctgggcaacaaagcgataccttgtctccaaaaaaaaa

SEQ ID NO: 261891 - DNA, 454 bp, Homo sapiens
gggactatcgaagattgcttaatcactcaacaagattttaaaacgtgattgaagaccgcctacctgtgagggcagcgccgaccaggcttttcttgcccgctagtccacgtaatgcggtcgctaagaagcccgcagcagggttttcgcgtgaccttcatagggcctggccaggccagctgaggggcgcgccgggctgcgcttccatcgaggaacctccgcacatgcaatcacggttgtctcgtcttctggcaaccctggatctccacaaactgatcttcagggtgcttctctcttcagcagttttgcctcaagggcatggcgcctcagctagtttttggctgtaaacaaaccgcggccaccgccaggctaccgggttaccagtacctgttcttcggagtttcttaggcataaactataagaactacaaataaagattttctgcttccttatttca

SEQ ID NO: 261892 - DNA, 311 bp, Homo sapiens
gctggagcggtgcaatgccatgatcttggctcaatgcaacctccgcctcccaggttcaagcaattctgctgcctcagcctcctgagtagctgggattatagacgcgcgccaccacacccagctaatttttttttttgcaacgacattaagtgaggacttgctgtacagacttaaaacagaagccaaagacagagctctgaaggatcacagaaaacagaagataaattagcaaagccttccaagcaaaagtgctttaaagggtattaaacgcattagacccatgacatttgtgaggaataatctaaagatct

SEQ ID NO: 261893 - DNA, 609 bp, Homo sapiens
gtaccaaaagaattggaagcgggacctcagagacatttgtacacgttatgttcacagcaacactattcacaattgctaaaactggaagcaactcaagtctccattaacagacgaatggatctgttatctgttatgaatggcccttgggaggccaaggcaggcggatcacctgaggtcaggagttccagaccagcctggccaaccaatatggcaaaaccccgtctctgctaaaaacacaaaaatcaggccaggcgtggtggctcatgcctgtaatcccagcactttgggaggccaaggcaggtgatcacctgaggtcgggagtttgagaccagcctgaccaacatggagaaaccccatctctactaaaaatacaaaaaatcagccgggcatggtggtgcatggctgtaatcctagctactcgggaggctgaggcaggagaatcgcttgaacccggtgggcggaggttgcagtgagccgagatcatgacattgcactccagcctgggcaacaagagtgaaattccatctcaaaaaaaaaaaggccaggcgtggtggctcacacctgtaatcccagcaatttgggaggctgaggcaggcggatcacaaggtc

SEQ ID NO: 261894 - DNA, 543 bp, Homo sapiens
taaactgggatgtttgattaacctccacattgtacttctggcttcccccattattttgtctagtagtgttcacacatgtagtgaacagagtctcattttaccatttgggtaaatctgaaaaaccctgtccaaacagtgttaataacatctccttttaaggacagcatgaaggattcttactgttaaaacaaagtgagttgaagcatgagcagctggagattgctcactacttctgtcctcaagtggtattactcagagtaggcctgccaaatgtagaaattaactagactggcagttgttggggtaagtgagaaataaaggctaggtagttatgaaagatgtgctggacaacgctgagcagtcatgccatagagctgtcctctgtatttggttgtagcatggcactcttgttacagaagttttatcatttattatacagtctacaactatttattaattttatcctttgtcagctctttttacattttgtaatgtaatgagcactcttatgaaccaataaactaaaaagtgtgtgtttattga

SEQ ID NO: 261895 - DNA, 593 bp, Homo sapiens
gcgattctcaaatcacaatgtgcaaacttcacgtaaaataattaagtattttttatcaattacattttcacgtatgagacaaatattttaaagtaaaaattaacctgtaatatttatttttacatttttcattaactaagatattatcactggtgttagtcctctgtattattcaggattctccagacaaatggaacccataggatagatagatagatagatagatagatagatagatagatagacagacagatagaaagtgatatgttatgaaggactggctcacacaactgtggaggctaagaaattcaatgatctgctgtcagccagctggaggctcaggaaagccctggtataggtccagtgtaagcctgaaggcctgataaccaagggagccaatggtgtaagtcccagtctgaattagaagaccataaacccaagagtgccaacatctgagggcaagagaagatgaatgttgcagctcaaaaatggagtggacttgccctttctccacctctttcttttatttgggccctcaacagattggatgatgcccactcacattggtgaaggtgatattcttctttgaccag

SEQ ID NO: 261896 - DNA, 679 bp, Homo sapiens
ccctgttgagtgtgattatcgaggccagtgctccgctgcctctcacgtaccatttcgctgctggtcactcctcattagtgcctttcctaagggtaatcagaggacacagaaggaaattaaattgaaacctgagagtattcccaccatctattttccttatctgtagttgggcctcctgaatttggttctagaacactccaaggacttgagttatctcaaggagattgatgaaattcctgctatgaagttagctttgattacaaaacaatgtgtcacaaagtacaacatgttctaattggagttttggagctagatggagctggagttgaatcctagctccatcctggcctactgagcaagtctctcgattgccaagcatcagtttctccatctgtcaaatgggcacagtaatactaaacccacagggctgtatgagaagtaacaaaacaacactaggataggccgtagcctggtgtctggcacatggcagacctccaggaaacagtagtgtccgtctttcctcattggtacttttttgaggggtgaagaaagagtggggaagagagaagaggaagtacatcaataaatgataagaactcactcacacctattaaaaggtttataccaaagtttttcgcactatgggctgctacccattagagagttgtaaccagaattg

SEQ ID NO: 261897 - DNA, 387 bp, Homo sapiens
atcagagaagacgttgaggtggagaatgtgagacccacatgcacacaagccggcatgctcttccctgcctcctctttcttttgtgacctcttatggaatgctgtgggaaagcactcaagtcctgaggttccattggctacggaaacgaagaaatttgaactaactcttgctaagaaactgtaattaggacatggaccctgacataattatctttgtgaatttcattgtgtttttttttttattttttctaagtgaaattgcttcagaaaattggagagccatcttacattccatgtggagaatttattagctatgaaaataattcatgaagttatgggtagaaacatgttgttaaccttgaaggaaaattaaaatcagagtaataaa

SEQ ID NO: 261898 - DNA, 410 bp, Homo sapiens
cctaaaaaatccacacacaagcactaaatgccttaaatattgctcaattcagaaatgaatcttaattaagtcaacatctatattcttcctattttactacatgacttccaagtaagatgccacaagcgtcactggtataaattgctccggaaaacctgaaaacttacagaaaatcacaatcacattatatttaacaggtgttataaagactgcccagtttgtccaaataaactagttttaactgctgaggactgagtatcagttctcagtttcagcacaatgcttttactcaattacctagattaaatcatgcttactcaatggtctagattggtacttgcgtgtattttgtttccaagtacttgcattcactttagggcaagaaaaaacggtattacatttgatcatga

SEQ ID NO: 261899 - DNA, 468 bp, Homo sapiens
aacaccccttcctctccttcttgtccctacactgaccagcttctcaccccttccttctcacatgctcagggagaaacccatgggcagagtgacacacgccttggtcatcactgtgtcccggtgcctagaggagggcctgctcagagcagcctcacaagaaatgtgcttttgacttaaagaccacagtgagaggagagactctctcagtcacacccccggactcttgtccccacagagccccaggtcccctacccctttgtccatgccactgtgtgggtcaggagagctaggctcgagtcctgacactgagcagacacaaagcttgggcaagtcacttccccctcccaggactcagttgtcctccccgtaaaaggagaggcagtaacatccacttccttcatagggctcccatgagaggaagacgttagaagctagaacaatgcaattcaattcagtctgacaatctga

SEQ ID NO: 261900 - DNA, 2451 bp, Homo sapiens
  misc_feature (76)..(76): n is a, c, g, or t
gggagggcggcagtgagggcgcggcggcgggcggcttggggctggattccggctccctcgctcgctcgctccctcncgagccccctcccacccaggcccaccccacccagcacccctggcgcagggactgctggaacctggctgtgcgcgctgtcgctttaagacagactctgccggcgccgtccggagccttagaaaccggccccggatccgagccggagccggagccggagccggggccggccgggctgctgaggcccgagcggcaggagcgcagcgcggagcgctgagccaggcgcccagtcgcgagaagctgccgccgcctctgcccgcccggcgccgcagccccgggcggtccatggggcgggcacggcgtcgctgcaggcgccggcagccctggagggcagccgcttaggcgctgcgctcttgtccccgcaggtcgcagccagggcggcggggcgcgcccagccccggcccctggagcgcccgccgcggtccccacctccatggacgccttcaaggggggcatgagcctggagcggctgccggaggggctccggccgccgccgccgccaccccatgacatggggcccgccttccacctggcccggcccgccgacccccgcgagccgctcgagaactccgccagcgagtcgtctgacacggagctgccagagaaggagcgcggcggggaacccaaggggcccgaggacagtggtgcgggaggcacgggctgcggcggcgcagacgacccagccaagaagaagaagcagcggcggcaacgtacgcacttcacaagccagcagttgcaagagctagaggccacgttccagaggaaccgctaccccgacatgagcatgagggaggagatcgccgtgtggaccaacctcaccgagccgcgcgtgcgggtctggttcaagaaccggcgagccaagtggcgtaagcgcgagcgtaaccagcagctggacctgtgcaagggtggctacgtgccgcagttcagcggcctagtgcagccctacgaggacgtgtacgccgccggctactcctacaacaactgggccgccaagagcctggcgccagcgccgctctccaccaagagcttcaccttcttcaactccatgagcccgctgtcgtcgcagtccatgttctcagcacccagctccatctcctccatgaccatgccgtccagcatgggcccaggcgccgtgcctggcatgcccaactcgggcctcaacaacatcaacaacctcaccggctcctcgctcaactcggccatgtcgccgggcgcttgcccgtacggcactcccgcctcgccctacagcgtctaccgggacacgtgcaactcgagcctagccagcctgcggctcaagtccaaacagcactcgtcgtttggctacggcggcctgcagggcccggcctcgggcctcaacgcgtgccagtacaacagctgaccgccccgccgcaccacgcgggccggcggccggagcggggaagggcgcgggcgcgggcgcggaggacgcacgcggggccccggctcgcaagccccagctcaccgcgccgcggacctcacacctgcgcagccccctcctcccacttcccactccgggttggttttgtgtttgcttttccggaccccactctgccctccaaaaagacaaaaaaaaaaaaaaaaaaaaaagcaaaaagacgtcggagaaaagtgccgcgaaaaaatggatgagttgcaatttctctcgggatggcgcgggtggtgtgtgtgtgttcccacgggccccggaggcccactccgcggagggcacgcggcgcggtaggcgagcgccgaggcccagcggccgggggaggacgacctcgtatcccgcgtccccgccgcgctggatccggactgagtggccgggcctgcggactggatgtgcggggcctggacttgcctaggatttcccgaccccgtacaaaccaagttgccctctccgagctaggcccggccgagagcgccttagctcgagtcggatccgtgttggggcgggcgttgggtttggggggacggtgcccccagcccaggatcgggcactcagtggagccgcacacggccccggcgcgcctggtagagcctcgctggccccgcgccccggagccctatattaaggccacggagcgacagcgggcagtgcgggcctggcgggaggtgggggaggtccatctcagaacaccccagccttgagcttagctgcaggcccaggccctctgctctgctcccgggctaggaggtggccctctgtctgggcgaacagccccctcctcaccgcccgccgtgcaagagtcgagccggcagagcaaggggcgcggccccagggccctgcgcccactttgcacacccgctctccggcccgcgcccctgtttacagcgtccctgtgtatgttggactgactgtaataaatctgtctatatcgact

SEQ ID NO: 261901 - DNA, 243 bp, Homo sapiens
gggcaggcggcccctcgacgaggacaccgctgggagctgccggaacgggccccgggctctgcccccgccccggcgctggctcgaaggcgcccgctcggtgcgatcctgttcggcaaacattcactcatcctgggctgttctcgccagggctggggacttcgaggcggccgagacgggagttgattctaggcgaaacaagtcatttgaggcctgaggtgtgcacgagccgcccgggactcgcag

SEQ ID NO: 261902 - DNA, 2279 bp, Homo sapiens
gggcaggcggcccctcgacgaggacaccgctgggagctgccggaacgggccccgggctctgcccccgccccggcgctggctcgaaggcgcccgctcggtgcgatcctgttcggcaaacattcactcatcctgggctgttctcgccagggctggggacttcgaggcggccgagacgggagttgattctaggcgaaacaagtcatttgaggcctgaggtcgcagccagggcggcggggcgcgcccagccccggcccctggagcgcccgccgcggtccccacctccatggacgccttcaaggggggcatgagcctggagcggctgccggaggggctccggccgccgccgccgccaccccatgacatggggcccgccttccacctggcccggcccgccgacccccgcgagccgctcgagaactccgccagcgagtcgtctgacacggagctgccagagaaggagcgcggcggggaacccaaggggcccgaggacagtggtgcgggaggcacgggctgcggcggcgcagacgacccagccaagaagaagaagcagcggcggcaacgtacgcacttcacaagccagcagttgcaagagctagaggccacgttccagaggaaccgctaccccgacatgagcatgagggaggagatcgccgtgtggaccaacctcaccgagccgcgcgtgcgggtctggttcaagaaccggcgagccaagtggcgtaagcgcgagcgtaaccagcagctggacctgtgcaagggtggctacgtgccgcagttcagcggcctagtgcagccctacgaggacgtgtacgccgccggctactcctacaacaactgggccgccaagagcctggcgccagcgccgctctccaccaagagcttcaccttcttcaactccatgagcccgctgtcgtcgcagtccatgttctcagcacccagctccatctcctccatgaccatgccgtccagcatgggcccaggcgccgtgcctggcatgcccaactcgggcctcaacaacatcaacaacctcaccggctcctcgctcaactcggccatgtcgccgggcgcttgcccgtacggcactcccgcctcgccctacagcgtctaccgggacacgtgcaactcgagcctagccagcctgcggctcaagtccaaacagcactcgtcgtttggctacggcggcctgcagggcccggcctcgggcctcaacgcgtgccagtacaacagctgaccgccccgccgcaccacgcgggccggcggccggagcggggaagggcgcgggcgcgggcgcggaggacgcacgcggggccccggctcgcaagccccagctcaccgcgccgcggacctcacacctgcgcagccccctcctcccacttcccactccgggttggttttgtgtttgcttttccggaccccactctgccctccaaaaagacaaaaaaaaaaaaaaaaaaaaaagcaaaaagacgtcggagaaaagtgccgcgaaaaaatggatgagttgcaatttctctcgggatggcgcgggtggtgtgtgtgtgttcccacgggccccggaggcccactccgcggagggcacgcggcgcggtaggcgagcgccgaggcccagcggccgggggaggacgacctcgtatcccgcgtccccgccgcgctggatccggactgagtggccgggcctgcggactggatgtgcggggcctggacttgcctaggatttcccgaccccgtacaaaccaagttgccctctccgagctaggcccggccgagagcgccttagctcgagtcggatccgtgttggggcgggcgttgggtttggggggacggtgcccccagcccaggatcgggcactcagtggagccgcacacggccccggcgcgcctggtagagcctcgctggccccgcgccccggagccctatattaaggccacggagcgacagcgggcagtgcgggcctggcgggaggtgggggaggtccatctcagaacaccccagccttgagcttagctgcaggcccaggccctctgctctgctcccgggctaggaggtggccctctgtctgggcgaacagccccctcctcaccgcccgccgtgcaagagtcgagccggcagagcaaggggcgcggccccagggccctgcgcccactttgcacacccgctctccggcccgcgcccctgtttacagcgtccctgtgtatgttggactgactgtaataaatctgtctatatcgacttgtccatgtacgtctattaaaaccatagtccgagcgtgctaagcaaaaaaa

SEQ ID NO: 261903 - DNA, 1934 bp, Homo sapiens
ggcacgaggcgggccccatgtcatggggtggcggcggcgccggcccgccgacccccgcgagccgctcgagaactccgccagcgagtcgtctgacacggagctgccagagaaggagcgcggcggggaacccaaggggcccgaggacagtggtgcgggaggcacgggctgcggcggcgcagacgacccagccaagaagaagaagcagcggcggcaacgtacgcacttcacaagccagcagttgcaagagctagaggccacgttccagaggaaccgctaccccgacatgagcatgagggaggagatcgccgtgtggaccaacctcaccgagccgcgcgtgcgggtctggttcaagaaccggcgagccaagtggcgtaagcgcgagcgtaaccagcagctggacctgtgcaagggtggctacgtgccgcagttcagcggcctagtgcagccctacgaggacgtgtacgccgccggctactcctacaacaactgggccgccaagagcctggcgccagcgccgctctccaccaagagcttcaccttcttcaactccatgagcccgctgtcgtcgcagtccatgttctcagcacccagctccatctcctccatgaccatgccgtccagcatgggcccaggcgccgtgcctggcatgcccaactcgggcctcaacaacatcaacaacctcaccggctcctcgctcaactcggccatgtcgccgggcgcttgcccgtacggcactcccgcctcgccctacagcgtctaccgggacacgtgcaactcgagcctagccagcctgcggctcaagtccaaacagcactcgtcgtttggctacggcggcctgcagggcccggcctcgggcctcaacgcgtgccagtacaacagctgaccgccccgccgcaccacgcgggccggcggccggagcggggaagggcgcgggcgcgggcgcggaggacgcacgcggggccccggctcgcaagccccagctcaccgcgccgcggacctcacacctgcgcagccccctcctcccacttcccactccgggttggttttgtgtttgcttttccggaccccactctgccctccaaaaagacaaaaaaaaaaaaaaaaaaaaaagcaaaaagacgtcggagaaaagtgccgcgaaaaaatggatgagttgcaatttctctcgggatggcgcgggtggtgtgtgtgtgttcccacgggccccggaggcccactccgcggagggcacgcggcgcggtaggcgagcgccgaggcccagcggccgggggaggacgacctcgtatcccgcgtccccgccgcgctggatccggactgagtggccgggcctgcggactggatgtgcggggcctggacttgcctaggatttcccgaccccgtacaaaccaagttgccctctccgagctaggcccggccgagagcgccttagctcgagtcggatccgtgttggggcgggcgttgggtttggggggacggtgcccccagcccaggatcgggcactcagtggagccgcacacggccccggcgcgcctggtagagcctcgctggccccgcgccccggagccctatattaaggccacggagcgacagcgggcagtgcgggcctggcgggaggtgggggaggtccatctcagaacaccccagccttgagcttagctgcaggcccaggccctctgctctgctcccgggctaggaggtggccctctgtctgggcgaacagccccctcctcaccgcccgccgtgcaagagtcgagccggcagagcaaggggcgcggccccagggccctgcgcccactttgcacacccgctctccggcccgcgcccctgtttacagcgtccctgtgtatgttggactgactgtaataaatctgtctatatcgacttgtccatgtacgtctattaaaaccatagtccgagcgtgctaagcaaaaaaa

SEQ ID NO: 261904 - DNA, 2118 bp, Homo sapiens
gccgatcaagggatccggcccacgtgcgcggccgaagcccggagcagcccggctctggcccccgccccggctcctgcgcgtctccctccgcgctgcctttttttgtccgagctggagcttttttccagcagcgaactgggcccgcgggtggccggcgcgggcagtggggcagcgaatccgctgcccagcgcagccggccgggttccggaggggctccgagctccccggtgtgggcgcctcttctgcgttcatttcttaatacacagctgaatgtttctctccactttcttaagaaggagcgcggcggggaacccaaggggcccgaggacagtggtgcgggaggcacgggctgcggcggcgcagacgacccagccaagaagaagaagcagcggcggcaacgtacgcacttcacaagccagcagttgcaagagctagaggccacgttccagaggaaccgctaccccgacatgagcatgagggaggagatcgccgtgtggaccaacctcaccgagccgcgcgtgcgggtctggttcaagaaccggcgagccaagtggcgtaagcgcgagcgtaaccagcagctggacctgtgcaagggtggctacgtgccgcagttcagcggcctagtgcagccctacgaggacgtgtacgccgccggctactcctacaacaactgggccgccaagagcctggcgccagcgccgctctccaccaagagcttcaccttcttcaactccatgagcccgctgtcgtcgcagtccatgttctcagcacccagctccatctcctccatgaccatgccgtccagcatgggcccaggcgccgtgcctggcatgcccaactcgggcctcaacaacatcaacaacctcaccggctcctcgctcaactcggccatgtcgccgggcgcttgcccgtacggcactcccgcctcgccctacagcgtctaccgggacacgtgcaactcgagcctagccagcctgcggctcaagtccaaacagcactcgtcgtttggctacggcggcctgcagggcccggcctcgggcctcaacgcgtgccagtacaacagctgaccgccccgccgcaccacgcgggccggcggccggagcggggaagggcgcgggcgcgggcgcggaggacgcacgcggggccccggctcgcaagccccagctcaccgcgccgcggacctcacacctgcgcagccccctcctcccacttcccactccgggttggttttgtgtttgcttttccggaccccactctgccctccaaaaagacaaaaaaaaaaaaaaaaaaaaaagcaaaaagacgtcggagaaaagtgccgcgaaaaaatggatgagttgcaatttctctcgggatggcgcgggtggtgtgtgtgtgttcccacgggccccggaggcccactccgcggagggcacgcggcgcggtaggcgagcgccgaggcccagcggccgggggaggacgacctcgtatcccgcgtccccgccgcgctggatccggactgagtggccgggcctgcggactggatgtgcggggcctggacttgcctaggatttcccgaccccgtacaaaccaagttgccctctccgagctaggcccggccgagagcgccttagctcgagtcggatccgtgttggggcgggcgttgggtttggggggacggtgcccccagcccaggatcgggcactcagtggagccgcacacggccccggcgcgcctggtagagcctcgctggccccgcgccccggagccctatattaaggccacggagcgacagcgggcagtgcgggcctggcgggaggtgggggaggtccatctcagaacaccccagccttgagcttagctgcaggcccaggccctctgctctgctcccgggctaggaggtggccctctgtctgggcgaacagccccctcctcaccgcccgccgtgcaagagtcgagccggcagagcaaggggcgcggccccagggccctgcgcccactttgcacacccgctctccggcccgcgcccctgtttacagcgtccctgtgtatgttggactgactgtaataaatctgtctatatcgacttgtccatgtacgtctattaaaaccatagtccgagcgtgctaagcaaaaaaa

SEQ ID NO: 261905 - DNA, 1246 bp, Homo sapiens
  misc_feature (76)..(76): n is a, c, g, or t
gggagggcggcagtgagggcgcggcggcgggcggcttggggctggattccggctccctcgctcgctcgctccctcncgagccccctcccacccaggcccaccccacccagcacccctggcgcagggactgctggaacctggctgtgcgcgctgtcgctttaagacagactctgccggcgccgtccggagccttagaaaccggccccggatccgagccggagccggagccggagccggggccggccgggctgctgaggcccgagcggcaggagcgcagcgcggagcgctgagccaggcgcccagtcgcgagaagctgccgccgcctctgcccgcccggcgccgcagccccgggcggtccatggggcgggcacggcgtcgctgcaggcgccggcagccctggagggcagccgcttaggcgctgcgctcttgtccccgcaggtcgcagccagggcggcggggcgcgcccagccccggcccctggagcgcccgccgcggtccccacctccatggacgccttcaaggggggcatgagcctggagcggctgccggaggggctccggccgccgccgccgccaccccatgacatggggcccgccttccacctggcccggcccgccgacccccgcgagccgctcgagaactccgccagcgagtcgtctgacacggagctgccagagaaggagcgcggcggggaacccaaggggcccgaggacagtggtgcgggaggcacgggctgcggcggcgcagacgacccagccaagaagaagaagcagcggcggcaacgtacgcacttcacaagccagcagttgcaagagctagaggccacgttccagaggaaccgctaccccgacatgagcatgagggaggagatcgccgtgtggaccaacctcaccgagccgcgcgtgcgggtctggttcaagaaccggcgagccaagtggcgtaagcgcgagcgtaaccagcagctggacctgtgcaagggtggctacgtgccgcagttcagcggcctagtgcagccctacgaggacgtgtacgccgccggctactcctacaacaactgggccgccaagagcctggcgccagcgccgctctccaccaagagcttcaccttcttcaactccatgagcccgctgtcgtcgcagtccatgttctcatccctgctcaagcatagcccagctctggcctcggccggtccccacgtgtctcacgcctgcgttaccaggtatccccggtcttgtcgggggctgcg

SEQ ID NO: 261906 - DNA, 160 bp, Homo sapiens
ctcccggcccgcagcggccctgacccttctcccgtcccctcccccaggtctggttcaagaaccggcgagccaagtggcgtaagcgcgagcgtaaccagcagctggacctgtgcaagggtggctacgtgccgcagttcagcggcctagtgcagccctacga

SEQ ID NO: 261907 - DNA, 2502 bp, Homo sapiens
  misc_feature (76)..(76): n is a, c, g, or t
gggagggcggcagtgagggcgcggcggcgggcggcttggggctggattccggctccctcgctcgctcgctccctcncgagccccctcccacccaggcccaccccacccagcacccctggcgcagggactgctggaacctggctgtgcgcgctgtcgctttaagacagactctgccggcgccgtccggagccttagaaaccggccccggatccgagccggagccggagccggagccggggccggccgggctgctgaggcccgagcggcaggagcgcagcgcggagcgctgagccaggcgcccagtcgcgagaagctgccgccgcctctgcccgcccggcgccgcagccccgggcggtccatggggcgggcacggcgtcgctgcaggcgccggcagccctggagggcagccgcttaggcgctgcgctcttgtccccgcaggtcgcagccagggcggcggggcgcgcccagccccggcccctggagcgcccgccgcggtccccacctccatggacgccttcaaggggggcatgagcctggagcggctgccggaggggctccggccgccgccgccgccaccccatgacatggggcccgccttccacctggcccggcccgccgacccccgcgagccgctcgagaactccgccagcgagtcgtctgacacggagctgccagagaaggagcgcggcggggaacccaaggggcccgaggacagtggtgcgggaggcacgggctgcggcggcgcagacgacccagccaagaagaagaagcagcggcggcaacgtacgcacttcacaagccagcagttgcaagagctagaggccacgttccagaggaaccgctaccccgacatgagcatgagggaggagatcgccgtgtggaccaacctcaccgagccgcgcgtgcgggtctggttcaagaaccggcgagccaagtggcgtaagcgcgagcgtaaccagcagctggacctgtgcaagggtggctacgtgccgcagttcagcggcctagtgcagccctacgaggacgtgtacgccgccggctactcctacaacaactgggccgccaagagcctggcgccagcgccgctctccaccaagagcttcaccttcttcaactccatgagcccgctgtcgtcgcagtccatgttctcagcacccagctccatctcctccatgaccatgccgtccagcatgggcccaggcgccgtgcctggcatgcccaactcgggcctcaacaacatcaacaacctcaccggctcctcgctcaactcggccatgtcgccgggcgcttgcccgtacggcactcccgcctcgccctacagcgtctaccgggacacgtgcaactcgagcctagccagcctgcggctcaagtccaaacagcactcgtcgtttggctacggcggcctgcagggcccggcctcgggcctcaacgcgtgccagtacaacagctgaccgccccgccgcaccacgcgggccggcggccggagcggggaagggcgcgggcgcgggcgcggaggacgcacgcggggccccggctcgcaagccccagctcaccgcgccgcggacctcacacctgcgcagccccctcctcccacttcccactccgggttggttttgtgtttgcttttccggaccccactctgccctccaaaaagacaaaaaaaaaaaaaaaaaaaaaagcaaaaagacgtcggagaaaagtgccgcgaaaaaatggatgagttgcaatttctctcgggatggcgcgggtggtgtgtgtgtgttcccacgggccccggaggcccactccgcggagggcacgcggcgcggtaggcgagcgccgaggcccagcggccgggggaggacgacctcgtatcccgcgtccccgccgcgctggatccggactgagtggccgggcctgcggactggatgtgcggggcctggacttgcctaggatttcccgaccccgtacaaaccaagttgccctctccgagctaggcccggccgagagcgccttagctcgagtcggatccgtgttggggcgggcgttgggtttggggggacggtgcccccagcccaggatcgggcactcagtggagccgcacacggccccggcgcgcctggtagagcctcgctggccccgcgccccggagccctatattaaggccacggagcgacagcgggcagtgcgggcctggcgggaggtgggggaggtccatctcagaacaccccagccttgagcttagctgcaggcccaggccctctgctctgctcccgggctaggaggtggccctctgtctgggcgaacagccccctcctcaccgcccgccgtgcaagagtcgagccggcagagcaaggggcgcggccccagggccctgcgcccactttgcacacccgctctccggcccgcgcccctgtttacagcgtccctgtgtatgttggactgactgtaataaatctgtctatatcgacttgtccatgtacgtctattaaaaccatagtccgagcgtgctaagcaaaaaaa

SEQ ID NO: 261908 - DNA, 2007 bp, Homo sapiens
acaaaaaaaaaaaaacggacaaaaacttaggctaggtacgaggcctggtgttaattcggccgaggctggcgcgcgctgacacccatgacatggggcccgccttccacctggcccggcccgccgacccccgcgagccgctcgagaactccgccagcgagtcgtctgacacggagctgccagagaaggagcgcggcggggaacccaaggggcccgaggacagtggtgcgggaggcacgggctgcggcggcgcagacgacccagccaagaagaagaagcagcggcggcaacgtacgcacttcacaagccagcagttgcaagagctagaggccacgttccagaggaaccgctaccccgacatgagcatgagggaggagatcgccgtgtggaccaacctcaccgagccgcgcgtgcgggtctggttcaagaaccggcgagccaagtggcgtaagcgcgagcgtaaccagcagctggacctgtgcaagggtggctacgtgccgcagttcagcggcctagtgcagccctacgaggacgtgtacgccgccggctactcctacaacaactgggccgccaagagcctggcgccagcgccgctctccaccaagagcttcaccttcttcaactccatgagcccgctgtcgtcgcagtccatgttctcagcacccagctccatctcctccatgaccatgccgtccagcatgggcccaggcgccgtgcctggcatgcccaactcgggcctcaacaacatcaacaacctcaccggctcctcgctcaactcggccatgtcgccgggcgcttgcccgtacggcactcccgcctcgccctacagcgtctaccgggacacgtgcaactcgagcctagccagcctgcggctcaagtccaaacagcactcgtcgtttggctacggcggcctgcagggcccggcctcgggcctcaacgcgtgccagtacaacagctgaccgccccgccgcaccacgcgggccggcggccggagcggggaagggcgcgggcgcgggcgcggaggacgcacgcggggccccggctcgcaagccccagctcaccgcgccgcggacctcacacctgcgcagccccctcctcccacttcccactccgggttggttttgtgtttgcttttccggaccccactctgccctccaaaaagacaaaaaaaaaaaaaaaaaaaaaagcaaaaagacgtcggagaaaagtgccgcgaaaaaatggatgagttgcaatttctctcgggatggcgcgggtggtgtgtgtgtgttcccacgggccccggaggcccactccgcggagggcacgcggcgcggtaggcgagcgccgaggcccagcggccgggggaggacgacctcgtatcccgcgtccccgccgcgctggatccggactgagtggccgggcctgcggactggatgtgcggggcctggacttgcctaggatttcccgaccccgtacaaaccaagttgccctctccgagctaggcccggccgagagcgccttagctcgagtcggatccgtgttggggcgggcgttgggtttggggggacggtgcccccagcccaggatcgggcactcagtggagccgcacacggccccggcgcgcctggtagagcctcgctggccccgcgccccggagccctatattaaggccacggagcgacagcgggcagtgcgggcctggcgggaggtgggggaggtccatctcagaacaccccagccttgagcttagctgcaggcccaggccctctgctctgctcccgggctaggaggtggccctctgtctgggcgaacagccccctcctcaccgcccgccgtgcaagagtcgagccggcagagcaaggggcgcggccccagggccctgcgcccactttgcacacccgctctccggcccgcgcccctgtttacagcgtccctgtgtatgttggactgactgtaataaatctgtctatatcgacttgtccatgtacgtctattaaaaccatagtccgagcgtgctaagcaaaaaaa

SEQ ID NO: 261909 - DNA, 1904 bp, Homo sapiens
ggcggttcggtggagccgggacggggtgcaacggggcgtaagcccaggtgacccgctccccgtcctgcctactgcagagaaggagcgcggcggggaacccaaggggcccgaggacagtggtgcgggaggcacgggctgcggcggcgcagacgacccagccaagaagaagaagcagcggcggcaacgtacgcacttcacaagccagcagttgcaagagctagaggccacgttccagaggaaccgctaccccgacatgagcatgagggaggagatcgccgtgtggaccaacctcaccgagccgcgcgtgcgggtctggttcaagaaccggcgagccaagtggcgtaagcgcgagcgtaaccagcagctggacctgtgcaagggtggctacgtgccgcagttcagcggcctagtgcagccctacgaggacgtgtacgccgccggctactcctacaacaactgggccgccaagagcctggcgccagcgccgctctccaccaagagcttcaccttcttcaactccatgagcccgctgtcgtcgcagtccatgttctcagcacccagctccatctcctccatgaccatgccgtccagcatgggcccaggcgccgtgcctggcatgcccaactcgggcctcaacaacatcaacaacctcaccggctcctcgctcaactcggccatgtcgccgggcgcttgcccgtacggcactcccgcctcgccctacagcgtctaccgggacacgtgcaactcgagcctagccagcctgcggctcaagtccaaacagcactcgtcgtttggctacggcggcctgcagggcccggcctcgggcctcaacgcgtgccagtacaacagctgaccgccccgccgcaccacgcgggccggcggccggagcggggaagggcgcgggcgcgggcgcggaggacgcacgcggggccccggctcgcaagccccagctcaccgcgccgcggacctcacacctgcgcagccccctcctcccacttcccactccgggttggttttgtgtttgcttttccggaccccactctgccctccaaaaagacaaaaaaaaaaaaaaaaaaaaaagcaaaaagacgtcggagaaaagtgccgcgaaaaaatggatgagttgcaatttctctcgggatggcgcgggtggtgtgtgtgtgttcccacgggccccggaggcccactccgcggagggcacgcggcgcggtaggcgagcgccgaggcccagcggccgggggaggacgacctcgtatcccgcgtccccgccgcgctggatccggactgagtggccgggcctgcggactggatgtgcggggcctggacttgcctaggatttcccgaccccgtacaaaccaagttgccctctccgagctaggcccggccgagagcgccttagctcgagtcggatccgtgttggggcgggcgttgggtttggggggacggtgcccccagcccaggatcgggcactcagtggagccgcacacggccccggcgcgcctggtagagcctcgctggccccgcgccccggagccctatattaaggccacggagcgacagcgggcagtgcgggcctggcgggaggtgggggaggtccatctcagaacaccccagccttgagcttagctgcaggcccaggccctctgctctgctcccgggctaggaggtggccctctgtctgggcgaacagccccctcctcaccgcccgccgtgcaagagtcgagccggcagagcaaggggcgcggccccagggccctgcgcccactttgcacacccgctctccggcccgcgcccctgtttacagcgtccctgtgtatgttggactgactgtaataaatctgtctatatcgacttgtccatgtacgtctattaaaaccatagtccgagcgtgctaagcaaaaaaa

SEQ ID NO: 261910 - DNA, 919 bp, Homo sapiens
gcggccgcccccggggagcccggcgggcgccggcgcgccccctcccccaccccactctgccctccaaaaagacaaaaaaaaaaaaaaaaaaaaaagcaaaaagacgtcggagaaaagtgccgcgaaaaaatggatgagttgcaatttctctcgggatggcgcgggtggtgtgtgtgtgttcccacgggccccggaggcccactccgcggagggcacgcggcgcggtaggcgagcgccgaggcccagcggccgggggaggacgacctcgtatcccgcgtccccgccgcgctggatccggactgagtggccgggcctgcggactggatgtgcggggcctggacttgcctaggatttcccgaccccgtacaaaccaagttgccctctccgagctaggcccggccgagagcgccttagctcgagtcggatccgtgttggggcgggcgttgggtttggggggacggtgcccccagcccaggatcgggcactcagtggagccgcacacggccccggcgcgcctggtagagcctcgctggccccgcgccccggagccctatattaaggccacggagcgacagcgggcagtgcgggcctggcgggaggtgggggaggtccatctcagaacaccccagccttgagcttagctgcaggcccaggccctctgctctgctcccgggctaggaggtggccctctgtctgggcgaacagccccctcctcaccgcccgccgtgcaagagtcgagccggcagagcaaggggcgcggccccagggccctgcgcccactttgcacacccgctctccggcccgcgcccctgtttacagcgtccctgtgtatgttggactgactgtaataaatctgtctatatcgacttgtccatgtacgtctattaaaaccatagtccgagcgtgctaagcaaaaaaa

SEQ ID NO: 261911 - DNA, 1141 bp, Homo sapiens
atctgacctgaagtgtcagtggtgctgaggttcacaataagctcctgtgcaatgaggacatttaaaagaaatcaaaatgttgataacgttattgctgggtctttgatatgttgccttagggtggaagaagtatgtgtaattaaaggaactaagctttctgcccaccttgaagttcaagattgtttcgtatggcatccaaaatgagggagactttctttttctgaattaaaaattttcatttattttccttttctgtaacaactcttctctcaaggtccccctgcagtagcaacttatacggtttcttatacggtagtgtggcagccttttggggaaggaggcacatgcagaggagctcacaacttttgctttaaaaagccaagcactacaggatgtaacgtaaatgaaagatgcagtaacctctggagtcaccgtgacttccctgtcaagctgccagcagttccctaggttggaaaatgggcatggtcataacctaaccacttctgaataggtttcagaatgaccatgttcaaaaagagatgtgtggctggatgcggtggctcatgcctgtaatcccagcactttgggatgctgaggtgggaggatcacttgaacccaggagtttgagaccagcctgggcaacatagtgagaccccgtgtctaaaaaaaaaaataacttagctgggtgtggtgttgtgtggctgtagtcccagttccttgggaggctgaggtgggaggatcacatgagcctgggaggtggaggctgcagtgagccctgatatcatgtcactgcactccagcctgtgcaacagaacaagaccctgtctaaaaaaaaaaaagatgtgcaaaaatattttagtcaaaggtaatgtctgactatgatataaataatagcagtatagtaaaggatgagcatccccaatgcagaaatctgaaatgcttcaaaatcccaaacgttttgcatgcctgcatgatgttcagaggccatgctctacagaaatgctcactggagattttggattttggctcttcagattagggatgcttaactgggcataaggacatattccaaaataaaaaaaaatgtaaatcagaaacacttctggtcctatttcaaataagggatactcaacctgtataa

SEQ ID NO: 261912 - DNA, 424 bp, Homo sapiens
tgtggcaggaagcagacaagcaattttgagggcctaaagaataccagagagattgggaacagaaatacagagttgaggactgagagttatttaggagcatgagacaatgactagaactgactcatactagctaaaaatcaatcatattttttaaaaattttgtgagctggttggttgttaaacacaacagttactaaaagtgaaactgggctgaagcgagtggatcatgaggtcaggcgtttgagaccagcctggccaacatagtgaaatcccgtctctttttgtattttgtaaaaatacaaaaaattaggtgggtgtggtggtggctgcctgtaatcccagctacttgggaggctgaggtgggagaattgcttgaacctgggagatggaggttgcggtgagctgagatcgcatcactgcactc

SEQ ID NO: 261913 - DNA, 794 bp, Homo sapiens
aatctgatatacagtagtgtttctcaaagtatagttcatgaactccttgcatcataattacctagatgcctcttaaaaatgaagatttcagagacccattctaaacaagggcattcactctctggaagtagcatggccttgtgaacttaaatttggttttgttttttcttttttgctgttagaataatttcagacccaataaggaatttcgattattaaagttgagaaatttcacaaaactgcctggcacacaagcacacacatacatagacacattttaagtgataatctcttgatattagaagttgcatttgttaaatacatgctgtattttttatgagttgacttaatagtttatgtatattgactttgctttgtaggaagtaaatcaccagatatcttattgtttcatttaggaaagtagtgatatagatgaagagccaacttgatgaatgtgctattcataagctagaaactacagtttttccaaactaataaactgatgaattctaaataagttcagagatatagtcatatttaaagttgtcctacagtttgcagataatttttatattactattcttcacattaacttctgcttatttttaatggtactatatgtaggccttattaaaattaagattgtatggttaagtaaagttaacaagaaagcctgatttatctttaattctgtgctaggtacttttgattctacatgaacaatacccttttcagttcccttcattctaatgtcctcaactgtaccaaataccctgtgactccctaaacgtaag

SEQ ID NO: 261914 - DNA, 337 bp, Homo sapiens
ccctgccctgccctctatcagtaggcataaggctggttccaggcaacaggcaggagggtattggtggtaaggggaagtatttcaatctgattgacatgcgtgcccagctctgcctgctcagtaccttgggaagttcagaggagggagtcccttagccccttcctggctgagttgagggggctgggagggcatggagacccttttgctcagctgcctcctgtatgacaacatgggcagggcagcagcagcaacaagggggcaacacttccattacaggcgtgcccaaggcccggcctcccactgaggcccggaccccttagtgtcactgtagaaaatt

SEQ ID NO: 261915 - DNA, 273 bp, Homo sapiens
tgcacaatttgttggactgcatctctatctcgagttctccatgacactcaggtgtggtgttgcccaaataaaatagtggtctctgcctctggtggcttgacctgggacacgtgcacatgaggtacatgggaatgggtccacctgggctgggagaatgtggctggtggtccccgaagaaaggccaaagagcagcccccgaggaagcgtctacttcagctccctgggagaacgagagctttgtctgttgttttagagacattttagaatgcattt

SEQ ID NO: 261916 - DNA, 255 bp, Homo sapiens
ttttttttttttttttttttgccattaaaaaaatattggcaaccctgtgagagtctctgaagtttcattttgaagcttcccttgcccatgaaatccaaagtctgggacccactggcctgagatcacacgtggttctctggcagcagtcaggctgttggttggcatggactgtgcctgagctggaaacccccaagggtgcttctgagcaaggaaagcgagatggctagggagggaggcagctttgcgttactgttg

SEQ ID NO: 261917 - DNA, 780 bp, Homo sapiens
accttgcctcatttcacacacaaaaattaactcaaaatcgaagacctagacataagacctaaaactataaatctcttaaaacagaagggaaaagcttcatgacactggatttggcaatgatttcttgaataagacaccaaaggcacaggaaacaaaaagaaaaaataaactgggcttcatgaaaaatgttaaaatgtgtgcattaaaagacacacagcagagtgaatgggaggaaatattttcaaatcacgtatctgaaatgggattaatatccagaaactcctaaaacttgacaaaaaataatccaattcaaaactggttaaaatactcaaatagacaattcttcaaaagtgcaaatgctcaataaacacagaaatgcaaatccaaactatgatgtcaccttcacacctattagaatggctatcaaaaaatactaacaaaaaacaaaaaaaaaatgttggtaaggatgtggaaaccctgaacccttgcgcaccgccggcaagaacgtaaaaaggtgtagccgctgtggaaaacagtgttgtggctcctcaaacacttaaagacagaaatgccgtgtgacctggcaatcccacttccgggtatacacccaaaagaactgaaaacaggctcagatacttatcacccatgttcttcacagcattattcacgatggctaaaacatggaagcaacccaagagcccatggaggaaggaatgggtaagcaaaagcttatctccacatacagagggttattcagccttaaaaggcaaggaagttcca

SEQ ID NO: 261918 - DNA, 529 bp, Homo sapiens
tcagcacgacccggcgccagagacaattcagttttctggaggtcaaagaacttgacggataacatcatggcacaatgtagcaaaaacaagcctcctttgctgccatcactgtatcctctccatcactgcctgaggaccagggagtggaatgaagtttgtgaatgtgggagaagggtcggaagtcctcctttagcagctgggttaaacctaagcaagctaagcagatgaagcagaggatgttccttagcttgatataatgttactttccttagattgatacaatgttaggagccccgcgaaataagcaaggaaagaatgatgttagatttcagcaatgtaaacataatattgatgctcaatatatgctaagtaataggccttcattattgatttataaccaggccactagttggtaaatatgtatctactgatgaccaagaacaaggctggtatcagcaaattacaagaaggaacaaatttcccaatgaaggctgagaggtggtaatataacctccattcaaaagaagaa

SEQ ID NO: 261919 - DNA, 476 bp, Homo sapiens
acttgcaaactaaggggaacgagcttccctctgaatgtttatgaaggagagaccactgtgaggatagacagtgaagtgcaactacagcccgcaaatgaaaatgaataaaattaatccagcccctcaaggcagtcatctgtcttagagctattggaatcctggatcattgtgggaaatgaaaaatacttcgatggaatcagcagccattgatccaatgccaactccaagactggaacgtcgcaatgatagttccaaggcggaaatttgacgtaattcttttcgacacagttttacaggtctggatgcccattttaattcttctgaaagcatgcctccttctggcttcaggactccatctccagccttatgatctaaaaataatccccaaaccaaaaaattagatattatttcctcaaaattaggtgttttaatcaaaacatcttaacataaatacattattatcacccaataaaaaa

SEQ ID NO: 261920 - DNA, 631 bp, Homo sapiens
acttgcaaactaaggggaacgagcttccctctgaatgtttatgaaggagagaccactgtgaggatagacagtgaagtgcaactacagcccgcaaatgaaaatgaataaaattaatccagcccctcaaggcagtcatctgtcttagagctattggaatcctggatcattgtgggaaatgaaaagaactggtttttagcaaggagaccaagaaactctactccctaggggctagcaatgagagaaaggaagccttgagtctttgagcacagggtgacagtttgggtcctatgtgagatgatcaaatccacagcaacagaggaaaggacaaaaggaaaagatacttcgatggaatcagcagccattgatccaatgccaactccaagactggaacgtcgcaatgatagttccaaggcggaaatttgacgtaattcttttcgacacagttttacaggtctggatgcccattttaattcttctgaaagcatgcctccttctggcttcaggactccatctccagccttatgatctaaaaataatccccaaaccaaaaaattagatattatttcctcaaaattaggtgttttaatcaaaacatcttaacataaatacattattatcacccaataaaaaa

SEQ ID NO: 261921 - DNA, 785 bp, Homo sapiens
acttgcaaactaaggggaacgagcttccctctgaatgtttatgaaggagagaccactgtgaggatagacagtgaagtgcaactacagcccgcaaatgaaaatgaataaaattaatccagcccctcaaggcagtcatctgtcttagagctattggaatcctggatcattgtgggaaatgaaaagaactggtttttagcaaggagaccaagaaactctactccctaggggctagcaatgagagaaaggaagccttgagtctttgagcacagggtgacagtttgggtcctatgtgagatgatcaaatccacagcaacagaggaaaggacaaaaggaaaagatacttcgatggaatcagcagccattgatccaatgccaactccaagactggaacgtcgcaatgatagttccaaggcggaaatttgacgtaattcttttcgacacagttttacaggtgtgacaccatgaagtcgtcccacatttcccacaacctgaatttgggatgacagtcgactgagattttgtaaactgattatcatctgtttctgttttattctcattacctaacatatgcccactggggggtgctaaagaactatgaattggaggtctggatgcccattttaattcttctgaaagcatgcctccttctggcttcaggactccatctccagccttatgatctaaaaataatccccaaaccaaaaaattagatattatttcctcaaaattaggtgttttaatcaaaacatcttaacataaatacattattatcacccaataaaaaa

SEQ ID NO: 261922 - DNA, 486 bp, Homo sapiens
acttgcaaactaaggggaacgagcttccctctgaatgtttatgaaggagagaccactgtgaggatagacagtgaagtgcaactacagcccgcaaatgaaaatgaataaaattaatccagcccctcaaggcagtcatctgtcttagagctattggaatcctggatcattgtgggaaatgaaaaatacttcgatggaatcagcagccattgatccaatgccaactccaagactggaacgtcgcaatgatagttccaaggcggaaatttgacgtaattcttttcgacacagttttacaggcatcttgcatgtgaataactcacaactttaattcatggaacaaattgagaaatagtcttttgggggtttggtactccctggaaacataagagtgctttgggcacctctggtgcctttccatgcctgccttctctgctgttcttgctactagtgaattctaaatcatggccaagtgatgccagcactgga

SEQ ID NO: 261923 - DNA, 337 bp, Homo sapiens
agccttgagtctttgagcacagggtgacagtttgggtcctatgtgagatgatcaaatccacagcaacagaggaaaggacaaaaggaaaaggtctgtagcagcactacatcagaaaaaatggattccgcaaggaagtgggtgactctgagtaagcatccatgtcaggatggttttgctacagcccccaaccaaacattaattagtttaagaaactcaacttcggtttacaagtgttttggaaaagtaacaaagaacaacctaaataacaaaataattcctcaggtcattacaatggatgtttcctataactgaaaaatatggttaaaaagtacaaact

SEQ ID NO: 261924 - DNA, 474 bp, Homo sapiens
ggcgagcccttgtgagagaggtctaaagatagaagacatgaaagagattcagagctgcagaagatgctctcctgttgttctgcaagggcagactgccatatgtgagaggctctatggagaggccacacaggaagcaaggacctgcatgcagcctccaggagctgagagcggtccctggccaaaagctggcaaggaattggagacctcagtcctactgccataaggacatgcatcctgccaacaaccagggatcttggaatgagaacataagcctcagatgagatggcagtcccaggtgacaccttgatttcagcctggtgagaccctgaacagagaacccatctgcaccatacatgaacaccagcctacagaggctctgagataacaaatgggtgttgttttaagccactgcatttatgatcatttattatgcagcagtagaaagctaacaaatgctgtgagaaaaagccaaat

SEQ ID NO: 261925 - DNA, 435 bp, Homo sapiens
ttcataattagtactttttctttgaatgtgtgagtggtagatgcaattggaacccttttgcaactcttcttggttggaaagttatctaaagttgctaatcagaccctctgctaatgtaaattctatatactgagacactgctaaacacccattaattttaactttctcattaaaaaggatgacatagaaacccttctttgtagtcaatatagatgtattttctcaaagtgaatcattaaacttaagggctttgtcatgtgaggcctctgaaaattgtacaatattagaaacatcaatgtctgtgtttaataaacttactggtagctttactgtgttgaatgtctccacctaattttgtttgtttaaaaccttgcttttggaaatttagcccttcaacttttctttaacaaaatcttggaatgaacttctgattta

SEQ ID NO: 261926 - DNA, 363 bp, Homo sapiens
cccctttttcttgtttgtgaaactgtaacagacctagtcccagcattaacagagtccctgctggggagcaggaatggaacatatcttgtccacacattcctctgttgcttaggccccagagctgcaagcccactttgttataaaaatgcagttgtgcctaacaactgtctgcttcttggtgattggctttatgattgcagccagctaagaaatggtgttgtcattccagaagtctcggtggtacacaacgctgaagtcggcagctaacaagggctatgagagatgagaatttcactctgaggatcctgtggggaggaggcatctgcagcagggactggagggaaccttggtgttaaaaaaaaa

SEQ ID NO: 261927 - DNA, 388 bp, Homo sapiens
gtcactgagatttttgggtttatctgttatagcagctagtattgccttaataattctacaaaataagtacagttattagccttcttttgaagattaatatagcagagaaaatagttttaggtggaaagatattaagctgcctgtattacttttaggtagagggacttataaatataggtctgaagctcaggatgaggccagtgtgataatcaccttgtgagtcatcagtgtacaggtgattgttgaagtcatggaagtgaaagtgatcccttgaggagacaaagcagggaataaaggaagtggactcattatagaattttagtacaagcagtatttcaaaagaggataccatgttggagaccaagaaaaaaagtcagcgaggttaaaa

SEQ ID NO: 261928 - DNA, 374 bp, Homo sapiens
ctcctgcccttggaaaacaagactccaggttcttcagctcttggaatctggaacttgcaccagcagcctcgtgggggctctgaggcctttggtctcagactggaggctgcactgtttgcttggctggttctgagtctgttaaatttggactgagcctcagtactggcttctctggttctccagcttgcagacagccccttgtaggactttgcctctgtaattgcgtgacccagttccctctaataaatcccctttcatatatatcttattgcctctgtccctctggagaaaccctgactaatacagacacttatgttaactccataacttggctattgtgagtaatgctgcaataaacatgggatacagatatc

SEQ ID NO: 261929 - DNA, 445 bp, Homo sapiens
gcttattcaatattttggttgttttggattttcactgtttatgctaccttcagtgtatattttttgaacatctcacagttttccatggttcctataactgaagacttcttgtttcagtgaacaaatgcccaaaagatattcaggaagctctaatcagaggaaatacatatagtcaacaaacactgggcagaaatttcagtcccctcatctcctaaggcaaatttagacatttctgaattatcacctcataaatcaataaaatgggtgcagaaatcaatggaattgctagcaaatcattggcatgagggttgtgagaaaacattaataaaactctgaagattggtacagttttctggaggtttatccatacacaataaagtcataaaacgattctatcatttaacctaggaacacaactttttgaaatttatccaaagaaagagct

SEQ ID NO: 261930 - DNA, 537 bp, Homo sapiens
gatactattaggagaaatacctaatgtagatgacgggcggatgggtgcaacaaacctgcacattctgcacgtgtatcccagaacttagagtataatttgaaaaagaaaaaggaatgaatgaagatgagtgacaagtaacaatgtcaacagattttattctttttggtgacaaagtaaatgtacccatactccctaagacccactgtttgatcaggaggaaggcaaaaagcattctaatctttcatcacaatgcccttcagaaacatcagcgtgtgtgcatgcatatattgttatcttttgaaactaataaaaatcagtcactgaggaaacataaaacaaccaccaaaggtagagctgttctcagtctgcaatgctcaccatgagcagagacgtacggtgatgtacaaaaacttaccaggcagaacccacagaccatataatcttcacaaaagctagaaaaaccagttttggacaatgtgacattttacagaacacattcaagttggtactgtcatgaggggaaacccccataaacca

SEQ ID NO: 261931 - DNA, 369 bp, Homo sapiens
gaggaatcccctgcccctgcccctctgcccccagacctgtgtggataagggaggggctgaacagaggggaggaagacgagcaggcggtggagagcgaacctgacggcattcggcctaggctgtgtgtctctgctgaggctggtaggaggtaggtgcctagaaccctatgtcctgcttcccactgaggtccaccacctgccctaggatccatggtctgcaatagggctggggaggcagcactctcagtttggccaggtggctttgttctttggggcacagatgctacaacggccaagtgctggaccagatggtccatttggagccagttctccctccctcctcgcctcccaatctcctggcccagtttgt

SEQ ID NO: 261932 - DNA, 1563 bp, Homo sapiens
gtgcaatggggcgatctcagctcctggcaacctctgcctcctgggttcaagcgattctcgtgcttcagcttcctgagtagctggggttacagacacccaccaccatgcccagctaatttttatatttttagtagagatggggtttcaccgtcaccatgttggccagcctggtctcaaactcctgacctcaggtgatccacctgccttggcctcccaaagtgctgggattacaggcatgagccaccgcacctggccccatttaatttatataataaaacaagtgcaggctttacctgattttattctcaccttctgttttcttcttctgcattatctgtcaccatgggttggctcctccccactttctcttttttattcttttctctctttttgccacactaaattgtaatgtgtttgaacaactctgacttaatattacctctaacaaaaagctggaaactgcacaaatattctttgtaggctctaaaagtaggttggctgaagtatgatacctgaactaattattcatttgtatgcttgttttataagtttgacttccatttcatgatttttttggtagctttatgttatttctgttttcagcaatgggtactttgacatctttctgtctctgaattgaattttcattttgcaacggaagagaagacaacatatttattccataatgaaagagctaatgaagtagaataactattaaattgagatgttttagcaaaaaaacaaaaacacaaaccccaaacgggttgttttgttttatttttttctaaaacatttctaacaattcccagtaggaatgggtggggccagccttcctcatttacaatccagctgcagtgagtcaagatcctagcttattctcccaattgtgtaataaatgcagaaaaatgatgtgacggtcactattctcaaatccattgcattgtattccacaaaggatatcctggcggaaggtggaaatatgggagggtaccatgatgtaaagaattgcctggaaatttccttgagtcatgcattttgtaaaaccttacattactgctatgagttaataagagacaggttaaaccactcccctcaggatagtaagactggttaaaaacactgctctcagcccacacagttatagctacagcctaggttaaatgattcctcatcctggtgtttttattctcatgtttaattacttctttaaagattaagattatatatagaaaaaataattgtggtatcagagaatacaggtagaatttttcatatatcaggactatgtgatgatacttaagcaatagtgtacatacagtaatatatgtttaatatcgagtatggataatgaaggacttttctttttcaccttgtttataatgacattttatccagggtttgaatcaaataaattcatgttaactgtactattttattgaaatgttctagtcttattattggataattagaaataaacattttaaagtctttatgaataaataaggatgttttcctatgtatacaactgtactattttcattagtaataaacatcactttcaag

SEQ ID NO: 261933 - DNA, 306 bp, Homo sapiens
acggggagggaaaaagtgtaatcttggtcaattctatcatgcaaccagatcaaataacatttcaagtgcagcctgccaagcgccagcgcctgccggagtacaatgagcgctcaactgctctggactgaaaaaccatctttcactggtcccagggatctttataaaatagtttaaacactactaaattacagagttagaaaaaaaaaatacaagctcaactctgctgcccccacactattgtgaagctgctgttaagcatctaaaaatctgccttgtgtaatttactaggcaatgtaaatattcaga

SEQ ID NO: 261934 - DNA, 486 bp, Homo sapiens
attcatttagcttgagttcatttaagaaatctgatttgttttaaattcttggtgtataacataaaacactgatggaggggttcaaatctgaaattttcctaggttaagtcttcaatcctttagtgagcttccttttatggaaaacttggttgtgtgttctgagctaaaaagtaccaagtcataaatgaatatgatagaatcatgtggtggcaaaatcaaagcaaagttacaattatcctctattgaccccagcctactcagcagtgcaaaatgctgagaaagaataaataagttgtctacccttagaacttactacctggctggagaaagagaaattagttcatcaggtacctgttatgggtaaagcattttgttaagtatggtggggtacagataaagataggagaagctccctgatctcaaaaatcttactgcctaattgagaatgatataagcatatgtattaaaagataaccaataaaggtc

SEQ ID NO: 261935 - DNA, 551 bp, Homo sapiens
gcactgtgagcaggtcataatagtggtgggagggttttccctttctgaagccagaatggatgggctgcctgggtcagcgggagtggggaagaggaggtattgggaagctccaaaatgattactgtaaagatcaggggaactggcaagaggggagactagcagtttatttcctggtagcttgtcttctccatccgtggacttgctagcctgcctagtgccttcataagtgggagtgggtggacgtgttgggggaacgtcgggggaacgtcgggggaacatcaggggaacaaaactggagaaagatgcagggggaaggagagtaggagaaaagggaggaagaagagagagagagataatatgatttgctttaaaaacaattgcctttgtttaatactcagtaaaagttcagagttcttattctaagttgagaattctatattctgacagtaatattcaagaaacacttctctaggctaactgaaactatacatctacctaatagcaaaaagcatcccaggttactaaagtctgattcacattttaaaaaaaaa

SEQ ID NO: 261936 - DNA, 278 bp, Homo sapiens
ctaggctggaggactgcttgaggtcaggagttagagactagcctggacagcacagtgagaccctgactctactaaaaaaaaaaaaggtttagtttttgatgttatattttgagatgcctactggcccctgagtgaagaagctgagtaagaagtgaccaccgaggtagaaagaaaacccaaagagtcctgaaagcgatgtgaacaaaggctactcaggaagtgggagtgatcaattctgtcaaaggcttatagggtatagcaagggctgaaaattgatc

SEQ ID NO: 261937 - DNA, 569 bp, Homo sapiens
atcacgaggtcaggtgttaaagaccagcctggccaagatggtgaaaccccatctctactaaaaatacaaaaattagccgggcgtggtggtgggcgcctgtaatcccagctactcaggaggctgaggcaggagaatcacttgaggccgggaggcggaggttgcagtgagccgataacgcaccactgcactacagcctgggtggcagagcgacactccgtctcaaaaaaaagaaaagtaaccttttataaatatggggctgaaaacgttatttttaaattttggaaaaagttctactagcttgaagattacttagatttattttttcttggcttatttagatatttggcctatttttaaaactataaataaataattggattttaatttgatagagaatcagaaaaacagagactttatataatttttgttacatttgaattcattttataaatatatgttgtaaaaattcttccagtgcaatattttttggaaaatattgttctagtcgttgtttgtataggtttatttctaattatattaaaagtaaaattagaaaaatatgtaatatt

SEQ ID NO: 261938 - DNA, 401 bp, Homo sapiens
caaagatgtacatcactgtatactgcaaaaggcatgcagtctaatgttggataatctagaaaaagttctctggctaaagccttttccatatccagatccaaatgagtttgatctccctgtgatacaggggttggaggcagaaagagaggaggctgggaaaacaaaaacaagaacaaaaccaagccaaacaaaaaatcaatgactggctctgactttagatagatctggtttgaatctcactccaatatataataacaggtgtagccccaactactagcagaggcaagagaatagagctatgccacttcttccatcagtaagggagcactcaatgtaaactccctaggaaagagctgctaacaaaagtctttgtgtttcaattaaaccaaggaaagtgaaaa

SEQ ID NO: 261939 - DNA, 878 bp, Homo sapiens
atatcaaaccaatggccttctccactaagccagcaactaaaggtattcagaaaacaagttaatcaaggtgggcagaactttttgaactgtgaggaaatgttcctaagtttagatttattacctgtcatttagggcaaaaatctaatgtcttttttatttcttaatcttgtagaactctgtatttcatagtaatgagtacttagggatcattgctctattagcctctgggagagatcttctagagtttgccattcctttttttccaaaattttttgttgttgttgttgttgttttaactgcaactggttacttttctcaaccatggtcctgacatgtttatactatgatacttttgagacttcgctaaagaattaaaagctgtgaaacaacatttgcttctcatccttcagacaaaatgtgttccatttaagcagcatggttaaacactaattttgggataagggagggatatgttttctttactttctttttggatttcatttctgtggcatgagcctatttgcgtttggaaggaaagatgccttcctttacattcttcacactggtaattttttcatactgaattaagaaattatcatcccttcaaaacacatattaatatagcaacattagagtaagggagatggcatttcatctcctctcctcagtcccttgatgttggaatgttattatcatttccaggagccatactttgaaattaaaaacaaattgaggcattaccagtctgatgaaggaattttaaatgcaagccatttaaagaatacttgaaggatttggggagacttaggttaggaaaaagaggggaatacaattagtgcattagaacaagatgctctgtggttcagaggggtggaatg

SEQ ID NO: 261940 - DNA, 432 bp, Homo sapiens
gggttcaagcgattctcacacctcagcctccccagtagctgcgattacagacacgcaccaccacacccagttaatcttttatatttttagtagaggtaaggttttgccatattggccaggctggtctggaactcctgacctcaaaagatctgcctgcttcccaaagtattgggattacaggcgtgagcgaccgcacctagccaatttttattttaaaacgatgagaggcgtccatggcagagcagtggtctcaaatcctggctgtgttcgagtggtaccaaccccttctgtgccacttttcttgcccagcagagagttcagctatggaagtacccgaatgacctcttcaccctaaggtggtgctggggcatgtgcctcaaaggcagtgctgtcagaggttcctgggcatctttattacttatagttttcttt

SEQ ID NO: 261941 - DNA, 381 bp, Homo sapiens
ccagtggtcgccagtcccacttttcctcctgcctgcttgctgtgagttaatattgcagtctggtcagcctcacaggcactgccagaggatgcacagttgcctgactgctccccagaggactgggtgagttgcctgcagagtccaccccagccagttcactgcagtgtctgatcatcagactggttcttgggccagtcaaggctcaaggcctttctgcctgcttttccccagattattcatttcctgaacccttgcccagttgcttaggaatgatactctctgtttcctttggttgaggtgggggaaagtgatgatgagagaagaggatagagcagactcagagttcccagcagaagtcactctattccccatgttctccca

SEQ ID NO: 261942 - DNA, 391 bp, Homo sapiens
ctccccagccatgatcctgtgtagtctgtggaactgtaagcaattaaatctctttataaattatccagtctcaggtatttctttatagcaattcaagaatggaccaatacggttgtgtataaaagtattggctggctgtggtggctcatgcctgtaatcttaacaccctgtgaggccactcgctttatgtcaggcgttcgagaccagcctggccaagatggtgaaacccagtctctgcacaaaacttagctgggcgtggtgccacatgcttgtaatcccagctactcaggaggctgaggaggatcacttgaacccaggaggcagaggttataacgagctaagatcacaccactgcactccagcctgggcaagagtgagactccatctcaaa

SEQ ID NO: 261943 - DNA, 253 bp, Homo sapiens
ttcagagcttcacatgtattaataaatacttataataattcaatgaataggtactattaatacctcattgttacagatgtggaaactgaagcatagcggttaagaaatatgtccacaatcaagcagctagggtcttttggaagccatatgctatattagaaatcttgtgcaccagaataaaaaatctggaaacctgaaatccattttcttcagaatttgcagatgcacaaataacatttctttaccattgtga

SEQ ID NO: 261944 - DNA, 337 bp, Homo sapiens
gcattcagggagccatgttgatacaccagaagaaatctgccaggactaaagaccgacccaataattcccgaggtaccttcaggaaagtcaatttatttttgagtcaaaggaatctcaaattatcctaaatggcattgcttccaccagagttctgttcttaatttaataagctgctacaagttccaagccaatgttccttcttagaaatatgctatgctatgggatgtaaatctttttaagtgcatttcattgtaccaattttttcattttgaaaaagcccattggtttattattaagtggtctatttaatagtgccaataaattctaaaactggaga

SEQ ID NO: 261945 - DNA, 292 bp, Homo sapiens
agaacaaatgagcttattgtatgattatcgaatttgtagatgatccaggctcttaacttctttctcctcttcctgcttgttaacttacactgctttttaaaatctccactagagaggatacattaaaatcagacagtttgtcttggttttagtttcgtgaattggctgatagggaaaagatgttaaagctcttgggcagtaaggaaaagagtaagtatctggattttatgtatttaagacacatgcatgcatatgttcattgcagcactatgcacaatcacaaagacatgga

SEQ ID NO: 261946 - DNA, 451 bp, Homo sapiens
atctcagatgaatcaggttttccctaggcgccagctggatgctggggctcagcttagcctagtgggctcttgctctggtaaggctgtggcaaggggaatgggggtgcttgtgcccttgcagaaacgcctctgtataaacctggcgcatggcccctcttctgcatcttctccctgtggtcagaagaccctgctttgcaagcatacatctgctgctagaaggtactatgtaccaaggggcttctctggtatttaaatgctgatacaggaggcaagagcaaggcttagctcaaaggaatgaatatttttgtttttcaacaatgaaatctcatttttcctcaagtctatgaataacactatgagtaactactatgagtaacatgtgctctttgcaaaacaatcaaggaatacataaaagtataaagaaagaaagtaaacctcacttgataaccca

SEQ ID NO: 261947 - DNA, 935 bp, Homo sapiens
ttgcattactgatttattcactaccttagcagcatgtagtatacagacattctgctcttcctcttcctctctaacacacacacacacacacacacacacatatccctgtacagactcacgcaggcatgaggggtagggatgaaactataagctagaggcttacttgctgcatattccgttgctgccagtctattctaacgtgtaattcatggagaagactacagttaagtactaagaatcttctaaatgtaatttcatggattgcaattgaaatgtaaaagatatccgacaatgccattaaatgattcggaagcactaggaccctagaaaaattcaaggagaaaaatgtaaaccaatttacaaagctattgccctccctgcatttccaggcacaaacaatttatttcaaggtgccttataactgctaggtcttggaagtcaaagagaaatctatcaattcagctttgaggaacagggctgtggcaagcacaggtaccaaaatattatccaccttgtagagtagtcataattttctgttcttcaataaagggatgaagcacgcactgtgattcttaagacacatcttagtgtataagaatccagatctgccgtaggcatgctatgactcctaatacatacaatcactagaacaaaagtctgtgatggcccagtaaacttccccacatgccctatgatcaagatgttccttgtatgtgtttgatgacctttggtattaccactgcctgatctgggtacttccttgtaatttgactttaaaaaaaatgacaccaattgcaaaatttgcatccagttgacaagacatttaaggtgtttatcaggatcatgccctggccccagcttcccaataccagctgttgaaaagattctctctcatctggagagaactggagtgcacagttcacccacgtggctcc

SEQ ID NO: 261948 - DNA, 386 bp, Homo sapiens
gctttgttctgcccccgtttacattgttttaaaggagaaaaatggcctagaggatgtgtaaaattgtgggagggtcaggggagaaaagagaaagaaagaaacaaaataagcacagaattacaaaaaaatcagaaaagagaaaatgctaccctgcaactatgtttggcctgaaaaattacaactttcatcgtcatcattctaaatatttttttgttaaatcaaagtttatggtaaaaaatacctgaaaaattccaaaatattcatttaaaccacataaataatgcttcaaaatgatcataagaatgttttttgtttagtaaatatttaatatttcaatttgcatcttgactagtagatattaaagtatcaacttttacatcccactt

SEQ ID NO: 261949 - DNA, 474 bp, Homo sapiens
agtttactgggatctaaaggaactccccaaacctttatgatttaacaggagacaagataagggtaatcaccccagcacctacacctatttacattaagtaaatttactgaggctccagaagaaggtcttcaggactcagaccttagtcatagattaaaagaagttaatcacttatgtctttagattaatgcacacttacacacagacatatagcttgaaggtatatacactctgaaaaacttcgtaattttgagttgttctggcaataatttccaggccttctccctgtaactggttacagaaataaaaactctcttcctccccagttcatctgcatctcattattgggctgcgagacatagcagcctgaccctcagtttggtttgagaacatcaccatgttgccaaggctaatcccagcactttaggacattgaggcaggaggactgattgagcccagaagctcaagaccagc

SEQ ID NO: 261950 - DNA, 891 bp, Homo sapiens
aacaggtgtataccggccaagtttggaagaagccagaaataccttgagaatgtcttaggacaagattagaaggaaagataattcattggaaggagtccaggagcctgggccactcaagtctgtactcactgaaggttaccatgaaatcatctgcatggaagcccttgtttgtcaatatctatttgtcaaatattatcttgagagagaaggttccacatgaacaacaacaaaaaaagttgttccatttatgtttctctaaatgccaaatgaagtattttaaataagcattttataaaaagttatggtaaagctgtagctgctgaaagcctgctttaggaaaatagtgatacatcttatcaactcaagcagtaaacaggaacttccagtgctgcatgatggaaggtcaccatctagaggcccaattgtattaggatgtttcactacaagctccaatgactccagaggctaggaaggcagcctgtgtaagaagcagcagccagccccaaggagaggagggaacagcaagactttggccctgcagactttgcctcagtaaatgcattcaaaattccagttacaaacaaaacaaactaaacacagtgccttcaaactgagcaatctgccaaatcaagctttgatcctgggcctctgctcactgtcagaatatgaatggaaagttgaatgtgataagtaaagtgataactccttgggagataagctcaaagagattccaaacaatggaggcttttacaatttcttgtacaaaatctttgcttcttgggagtaactttacaattgaaaatttggtttggttgtggtaggtggtaaaggaagctgtgatattttcagaaaattaggaagaaataaagtcaccagaagatatcattgact

SEQ ID NO: 261951 - DNA, 329 bp, Homo sapiens
cgtctatctcctcagcactcccttgccctgaaccccatcactggggctcagttgctggttcattcattctttgtaactccggtcatcattttccgggtgcctttcaagtaaactttccttagtgaaacccttcttccagctgaatgtttcttcctttcgtgagccctctggtctctatgctatttcctgtattctgccctctgctctccatacatgtgtattttgtgttctgtcctttattagattgtaagctccatgagggcagagtttgggtctgattacccatcctttcccccttttggttacagtctcccagtttttctttggga

SEQ ID NO: 261952 - DNA, 455 bp, Homo sapiens
tacgtgctttaaagcctatcgagattctcaaatgtattttagtatgagaaacatcctttttaactagataaaagtttaaaggtataatctctgcttctgaaaattatgacaataactcctaatctgggtgctgttctctgaatgagtcaccaaaatcatctatggtggaattgttggatctcacaaggttctttcacacagtttttctaaattctttggctattagtttcaacaacttaggctatcgagccatatcctgtatttgttattttcattgaaagttgtttacctattttgcttttggttttaagcctagattgatggattaaattttatacacattaagaaatttttaaaatattctatacatttctaaatcaagcatagccattttttcagaaagtgtgataaagttaaatatggagtagaaagcttatagtgcaagccaaacactt

SEQ ID NO: 261953 - DNA, 495 bp, Homo sapiens
tttagtagagatggggtttcaccggttagccaggatggtctcgatctcctgacctcgtgatccgcccgcctcggcctcccaaagtgctgggattacaggcgtgagccaccgcgcccggccatgcatacaattttgaggatcatgagcatagagtaaaatgagaagaaattccacatagttcacgttggttttaaaatctgttttggagagcaaacccatttaagaacatggtaaatgcatttctagaagcagcatgcacgcacacttttgcagataattttggaggtttctcagactcttcaagcctttccctggacccgggattaaaaacacttgacataaaagataagtagaaaggaaacctgtgaaggaggctgagcaggaatcacagagagcgaagtggaatgccaggagaattggaaggctggggattaaggaggagaggttttcagaatgaggacatagcagtgcctggctcactaatgggcccagtga

SEQ ID NO: 261954 - DNA, 829 bp, Homo sapiens
tgctacagtcctctattaagcaatgtgccacagcagggtccctgacccctgggccatggacatgtactggtctgtggcctgttaggaactgggccacagagcaggaggtgaatggtgggtaacaattgaagcttcgtctgtatttctggctgctccccattgcttgcattgctgcctgagctctgcctcctgtcagatcagcagcatcattagattcttacaggagcatgaaccctgttgtgaattgcacacacgagggatccaggttgcatattccttatgagaatctaattcctgatgatttgtggtggaacagtttcatcccaagaccattaccatcctgcgccccatcccttgccgcctgtggaaaaattgtcttccacaaagccggtccctggtgccaaaaatgttggggactgctgtgctttagaatctgccatgaatctgcagcctctattatatagctccctatagactttgcttcctaccgtcttacgttctgccttataggcatttgactttgcaacccttgtttttgttagtatgctacgctggtgacattgaccaaattgaccacacattaattataagcttagttggtgatgacctcaacggaataacgtgacataagtattgtgacaatacttcttgcatgtatctgcaggtggaattgtaaacctggtggtccgagatggtctaattccatcttcctatgtatctccttatattaatagtggtaacatttgtggtggtgattcagcatttcaatgcctcttctcatggcaacaacaaacgttttccttctgaatcaacattaacctagatgtta

SEQ ID NO: 261955 - DNA, 713 bp, Homo sapiens
tgctacagtcctctattaagcaatgtgccacagcagggtccctgacccctgggccatggacatgtactggtctgtggcctgttaggaactgggccacagagcaggaggtgaatggtgggtaacaattgaagcttcgtctgtatttctggctgctccccattgcttgcattgctgcctgagctctgcctcctgtcagatcagcagcatcattagattcttacaggagcatgaaccctgttgtgaattgcacacacgagggatccaggttgcatattccttatgagaatctaattcctgatgatttgtggtggaacagtttcatcccaagaccattaccatcctgcgccccatcccttgccgcctgtggaaaaattgtcttccacaaagccggtccctggtgccaaaaatgttggggactgctgtgctttagaatctgccatgaatctgcagcctctattatatagctccctatagactttgcttcctaccgtcttacgttctgccttataggcatttgactttgcaacccttgtttttgttagtatgctacgctggtgacattgaccaaattgaccacacattaattataagcttagttggtgatgacctcaacggaataacgtgacataagtattgtgacaatacttcttgcatgtatctgcgtgtgaaatggaactacggtgaaatggaacctgggacctctagaacgctac

SEQ ID NO: 261956 - DNA, 700 bp, Homo sapiens
aaaagagtacagtgcacattgcccctcagtgtctgtgtgagtgtcagagggaaattttaagtctaacctgagagctctaggcctcactggcttgtacataaagatggcacacatcaggagtcacagcctacatttcagaacagctgactctctccaggcctcagctccccacaaaatccctcaagcacttctggaagtcaacaagggtttcttactgtacctcaacgttctacttctctccgacatccaaggacttgtcactggttcaagcttgggactggctccgcttttcctgaggatgagcccaatcccaggaggctcctcagtctctgctcagtgaacgactgttgggtaggtcttgccaagtcttcagaggcagctctgcaccccagagatggacacgaccagactcctgcaccattgcacacacaaatcgcatgttcccaacactgacgggctttaagttcttggacaaaaagactttgctttctatttattctgtactgtctttcctagggttcttgaacaatgtttgcaaaatagtgagcacttaatactgttaccacatgtattgtttcagaagtaaagtgggtgccaggcagtgcacttcaatttcctcaaatctgaaatgagaaagttaaaataaggaccaaattatatgataaatatagaagcacattaaagagtattcattccatat

SEQ ID NO: 261957 - DNA, 554 bp, Homo sapiens
attctttagttactttttatagttacttcagttaatttaaactgttttcaaccagcaggattgcttgagcccaggagttcaggactggcctggacaatataatgagacctcaactctataaaaaactaaaacattagacaggcatgatgttgtatgcctatagttgcagcttctcaggaaattgaggcagtaggcttccttgagcctgcagtgagctgtgattgtgccactgccctccagcctaggcaacagagtgggaccttgtctcaaataataataattctctctttctatacacgcatttagtgaaataactcccttttcacagctaatagcctgcatattttgatatgttgtattttaatttttattcagttttatgtattttaaaaatttcctttaggattttctcttagatcaatgtatttagaactgtttaattcccaagtggtggggagtggggaggctttatttttgtataataccgatttccactttggtttgactttgctcagaaaatacactgtgtattatttcagttcttttaaaaaaaa

SEQ ID NO: 261958 - DNA, 423 bp, Homo sapiens
atagaatacaataaatgaatctgcctggtacctttaaaaaaaaaatcaaaggtctgccggccctgccacccgaacccagtgagaggccctgcaagggatccccaagtccttaaggggctggaaaagtagcccaggagactggacagccaggcaggaggtcccggtagctgtgctccagctggtgctcctgcgaggaggcggctttcgaggtcccagtctccttctagctgtttctgaagcgagttgtcctgcctcctcctctcacctgtgctggcccctccctgccctctcagtgtccctggcctatcagagagtaggtggggctggggatccgcctccacagagggttctgggaccctggtcactgtctttttgtatttgcgatgctaatttgttcaacataaacatttaaagtctactgta

SEQ ID NO: 261959 - DNA, 549 bp, Homo sapiens
agctgtggaagctgctggtgcggtccctgcacgtgtggccgccggggctgagggcctaccgcgaggtgtcctctatgttgctaggaggtcagcgctcacagctcaggtcccttccacccagtggtggaggcagtaggggtgtggggagccttctgctgcagccctgtttcccgccctgcgacccaccccgagtcccctctgtgtcccacctcatgtccaccctgtgtccagccttgtgtccagtctgtgtcccgccctgtgtctgccctttgtttaccctgtgtccatcccgtgcccgcctgtgtccaccctcttcctcctcacttggagctgcccccacccacctgccgtcgcagcccctttagaggtcaccagccctgaccctttcgtcgcccagggccctgcggtgctctgcctgtggccctgctcccactgccttggagggaggctgctcacagcgcttcatgccgggcactgagtggtgcagagtcttcgagaaacctttactttttaaaatttttttattaaaaataaaactattaactgaaa

SEQ ID NO: 261960 - DNA, 516 bp, Homo sapiens
ggaatcctttgggacctaattccttgacccacacgttgatgacgcaactagctacagaagggcggcctcccttttgttcccagagaagatgttggatcttggcacagttctgcatgccattctgaaactaactttctcttctctttcaaaatttaaatcacagtggttacaactcagaaaaaaaatacagcttttatataaattaatacagtgatatttgcagggtagcaaatgttttgttgaataatagaagcacaggcctcttatcaaaatatacagtaggttctctcagtttatatgcagcattctttttccaaatcttctattgaaggtttaggaagtcaattttttaaacccattatttttaacagttttttcatacagctttctaggtcataattttgacttctctttgccaatagtgattgatagggatgtattttgcaagtttctacaatgaaacccaagacaagctgttaattatgacctgtttttcctcatttcaaaaaaaaaaaa

SEQ ID NO: 261961 - DNA, 341 bp, Homo sapiens
gatggcactggaaaaccaagaatagctaataatagctaacatttattgagtacttatttactgtataccaggtgctattctaagtgctttacattatattaactcctataatcttcatagcccagtgagagaaggacagttcttacagataaggaaaagtaggcacagagaagcgaagtcacccatggaaagtcagagatggaactaggaaatggctgagctgggaccagaatctggagagcccagtcctaaaatctccattcttaactccatactctcctcctccctattgacataatttagaaaatgaaaatatattcgaagcccacatttagaaccaa

SEQ ID NO: 261962 - DNA, 275 bp, Homo sapiens
gtgaggcataatgatgtttctgtcaaggacgggctgcatataggatggtggtgtcatatgatgataatggagctgaaaaattcttactgcctccttgcagtcacagccatgatagtgtcatagtgcaacacattactcatgtgtttgtggtgatgctggtgtaagcaaacctgtgctaccagtcgtgtaaaattctagcacacacggttatgtatagttcataacacttgatcattataataaatgattatgtcactggtcatttactgtatgta

SEQ ID NO: 261963 - DNA, 459 bp, Homo sapiens
cttgccagaaactaaaccccgctggaaacttgattttgcgctttccagcctctagaactaatatgtgaaaaacatttaaatcagaaagtaaatgacaggatgatttgcaagacacagggatgtaaaattaaaaagcctctcgagctccaaagggggatgcatcaggacgataatttcaagagttcaatggtgaatttccttggcttccactgagctacctgttaacttcaacaagcacactggcctggagactacatgatggtgtctcagtaatggatttacaactgcaaacatctcaagcagcagtgccacatccctgctacctccctgcttgtgcgtgtgtccctacattatccaaaataggggtgggctaatgacgattgcaggctaactccagcctaccacttgcttctataaataaagtcttattgtacacaaacatagccatttatttaagca

SEQ ID NO: 261964 - DNA, 289 bp, Homo sapiens
atcatgttgaatttttcccaatggtaatcttatgatggctgcagctacctgttaacttcaacaagcacactggcctggagactacatgatggtgtctcagtaatggatttacaactgcaaacatctcaagcagcagtgccacatccctgctacctccctgcttgtgcgtgtgtccctacattatccaaaataggggtgggctaatgacgattgcaggctaactccagcctaccacttgcttctataaataaagtcttattgtacacaaacatagccatttatttaagca

SEQ ID NO: 261965 - DNA, 474 bp, Homo sapiens
catcattcgagctgagcatgggtttccattcagcccagaagtttcaactgcacacaagagatgatgaagcagcaacacagaagcacagacagaggtgtggagcacagtctaagccatggggagagattttctcacctgggctgcaccaggatgagagcataagctctccaccatcatccaaagcaaagctggctctgcagccatcaatgcaggaaactgggttctgtctggtcccagctctgtagtactgcaggaacatcataaagaccataaggaatggcagacaggacagagttttgaaaagtacaaagctgggtgggtgcaatggctcatgcctataatcctagcactttgggaggctgaggtgggaggatcacttgaggccaggagtttatgaccagcctgggcaatatatcgagactccatctctattttttaaaaaataaaataaaataaatgttaaaaagaaaagta

SEQ ID NO: 261966 - DNA, 516 bp, Homo sapiens
cttttttcatctgcataccccagctcaccaagcattccataccctccccccaacatttagcacatagaatattctttaatggcaaagtagctgatgatatttcaagtctgaactactcagataactaagtattaaatgtaataatgagtaattaacttgtatccacccaaagtttgcccagagtgctttctaggaaacccccctcaatatacataagtagatacaaatctccttttaaggtctacagttcccactgtaagagggggaagaaaaatggaattgtattgtcttactggtccagtaggagctaacatgtctgacaagtggcctgtattgtcccaccttcagtccctcctgtttttaatgaaagttataaactagtgtctctctcgaccctcattgaaaactaacacctatgagtcagtctcaggaagtctgttgaatttgtttccccagtattcttgcttaaagaaaagttccctaggctgaagtaagccagagatttaaattaaaaaa

SEQ ID NO: 261967 - DNA, 676 bp, Homo sapiens
gcacgtgtcccattgtcatctcctctaaggagccttctgcattccggctacgctccgaggtgcccgccttttctcacatggctgcagggcatcagccccattgaccagtatcacttttgtccacttagagacccaagaaatgcagaactacacacagacaacttaggtcacacacatgatgtccaggacaaaagctttcctgattttaatcatctgggttttgtttaggtgccatagtaacagtctcctcttgtctcattctgctctgactcctgatcagtggcctgagaaggagggagaagcagagaaaacatgagtaatgaatgataacgaggatgtataacctcacggaagtgttccagggaaaacttgtcgaccatctgctaataattatcaagtaccccagtcagtggcagccattctcctttccattgtgtgaacttaggtctgtgagctcccccttctaatttcagtcagtctggccctagacacttagggccaagagatctcatctgctgagtcctccctgaacttaaaagaccctgaagtgagacatgctaaattgcagaactgcagggcagcagttcaaattggatcttgtttttacaactgaagaaccacatggcaggcaccgtggggccagggactgacaaagtcgtggaacaatattaacccg

SEQ ID NO: 261968 - DNA, 100 bp, Homo sapiens
gtggtgtgtcacattcagaaggcctttaatgcctgtttgtcaaattcttggctaattaacaactgctgtgtgaggtaagccatggaggaggccgtgtgaa

SEQ ID NO: 261969 - DNA, 390 bp, Homo sapiens
taacataaagatgtacatctatatgttatatatctacatctgtctctccttttttataaggcctaaaaacaaatgctttattacttgcaaaccacaacatcaaaacaattttatatgttaaaaataagacaacagggaggctgaggtgggtggatcacgaggtcaagagatcaagatgatcctggccaacatggtgaaaccccgtctctgctaaaaatacaaaaattagctgggcgtggtggtgtgtgcctgtagacccagctactcgggaggctgaggcaggagaatcgcttgaacccaggaggtgaagattgcagtgagccgagatcgtgccactgcagtccagcctggcaacagcgagactccttctcaaaaaaaaaaaaaaaaaaa

SEQ ID NO: 261970 - DNA, 349 bp, Homo sapiens
cactccacccctttcctttcctaccctatcccactcctcgaggaatcatccctggctcccacctcagtttcccgcctccaaggcagcatggcgggcaagaagttgaggccactgtccctgggtgttcctacccccacaccctcaccccaagacagcctgttactgcggcgccaacagccacggtcgcctacatctgataagacttatctgctgccccagggcaggccggagctggcgtaagccccagtggggcgctaagtgagtgtgcccctgcctcccgccagcactggcctggcctgcaggcttagcctgggtcatcaaggtatcccacaggctctagttcaaatcc

SEQ ID NO: 261971 - DNA, 1574 bp, Homo sapiens
aaagccaacacaacccagtcagaaaatttaggtcagagtggcactcaccccagctgatggcaaacagccttgaatcagagcctgagcagccttctctggctaactgcagagttcgctctctaggcttcagtttcaccactgtaattatgagcgagaagcctatagttaattacaatgcatgaatgggagatattcctggacttatttgcattcattacttgctggtagtttctctgttgaggtctccatccttgtttttacagagcttttggcagtgtttctgcagttggtgtgtgaatttttatgatctgttgcatgttattcatgcaatttcctgccctgtaatggtatcagttttccagacgcagaggaatacagactaaaacccaggagcctgtattagcataaaatgtcccagttctgtcagtttgattaatttgtctctttgtctccactctatatgataagtgctattaatggttgcagcacttcatatgtcaaagtctttcttcctaatgacttgaaaatgcggtttatttcccccctttttgtattatttttctcatttagcattccactcaagtatagatttatgccatgctctttcattatcttactggttgcagcactggagtgattacatatggtgtagagtatgcgtaaagatgtgatcccaggggcagcagctgctgatgcaagctgaaaatagatccagcgtacgctcagcacttttcccagaggccttttatttattagtaacagtcttcgtacaggacagcttggatcctcatttagcaagatgactttttgcctttctgaacactgcagtgactttgctctatttactgacactgctgtgtaatttttttcaaccgccttgtatctcagcaatgacttaacctaacataaattgtaatataatctcgatatataatgaactcaagaagcgataggctccatttgaagtaatagagcttgacagatctaaggtttaaattaaataatcctatttgtaagacagcatttgtacatggtacactgctttaaaatgaatttctattcttctccagtggttcttacaccgtttttagtattctccctttcaaaaggacttttcttcagaaagaaatggattgcaaagccagcagctctttcataaggaaagaataagatgaaatgtttttttacccagttcaatcactgaactggaaccagcatcattaatgatttgaaatgggtagttattaatccaagctggcaaatccaatagctcagacttttctatcagcacagtacatctgtgatacaaatataatagcagaatttaggattaagataatagctaaccttctgtacatggctttaggttcaaatatatattttttcataaatttgaaaagtcccaataatgaatatatgtattcatttttcaaataaatccaagaagggctcttattttgtattctttttgagaggtgtactttcagtaggataaggagaaagttcattgtatatcctagcagatagcatctagataataatttctcactgcatgataaaatttgccaaattgc

SEQ ID NO: 261972 - DNA, 405 bp, Homo sapiens
gtgatggcgcctgggccccctgaagcctcctccccgcacttgtccaggttttaactgaagaggagccagagagccgttgacatctgagttgatcatctccagggacccctctatcccagagccctggatccccccagatgccagaccaaggctgcgggaacagcagtatgccaggtgcagggcctgtgcaggcagcctgggagcttgttccccaggagtgtaagaaaggctggcgggtctgccccactccaggccacaaagagtgtactttctttggggcatttttggtaagctttcagatgatgtattcattaatattttatctgcagtgtgaccttaagcaacttgtctaactgctttaggcctgttgtgggacgaagccccagaggagggcttggtttcgtt

SEQ ID NO: 261973 - DNA, 200 bp, Homo sapiens
acctatattcattttaaaagaaaaagttaaacaaaaattttttaaatccttattttttaaaaatacctggcttattcctactactcccttatgagatgtctataaagagtatacagagcctaacaacatagtaaagtagatataagtagttataagcctgactcattggtttgtttgcagaaaaaaaaaataattctaaa

SEQ ID NO: 261974 - DNA, 405 bp, Homo sapiens
agttttaaaattatatttgtttttaaattagcactgttttatgtttggactgtatatatttaaatatattatttagttaggattatatctccatttcaagggtttgggaattatatgccctttaccaggaaaatggaataatacctgtaatcccagcactttgggaagctaaggcaggcggatcatgaggtcaggagatcgagaccatcctggctaacatggtgaaaccccatctctactaaaaatacaaaaaattagctgggcgtggtggtgggtgcctgtagtcccagctactcaggaggctgaggcaggagaatggcgtgaacctgggaggcagagctggcagtgagccgagatacgcaccactgcactccagcatgggtgacagagtgagactctctctta

SEQ ID NO: 261975 - DNA, 484 bp, Homo sapiens
gactgacaactcacttacaacccagctgaagaactggatgctctaacagtggtatatacagaaactctagcaatgtgtaacacaggatataataacatttctgagaaatatgcatttaaagtccagttttaatctgcaggcaactgacactcctgctgtacccctggcactgggctggaggttccatctctagctgttgggagctatgccttaatcccaattactggcctaatgcaagggttctagcagggctgagagggagaagagtggggtaaaagggcatccaaagagttcaaaaacaaggcacctagaggtgtgagtgcctgcagtgtgcagacaccctggggctatggtcagctggcatggcctctcttcaacctttctttccctgtatacttctcttcctactgtgatttccatcaaattctcctccaccctgtgcttgccctaaaataagcatatttccattttaagggtttactgc

SEQ ID NO: 261976 - DNA, 498 bp, Homo sapiens
agtgtggggattccttaaagagctaaaagtaaatttaccatttgatccagcaatcccatactgggtatccacctacaggaaaagaagtcattattcaaaaaagatatttgcacacacatgtttatagcagcacaattcacaactgcaaaaatatggaaccagcccaaatgctcatcaatcattgagtggatttttaaaaatttggtatatattttaaatgcttaaaaatttggtgtgtgtatatacacacacacacacacacacacacatatatatatatatatacacacacacacacacacaccaaattttatatataataccaaatttggtatatatatatacacacacacacaccaaatgtatactgtataccaagtgtacactgcttgagtgatggacgcaccaaagtctcggaaatcaccactaaagaatttatccatgtaaccaaacagcacctcttccctaaaaacctattgaaataaaaaattaaaatta

SEQ ID NO: 261977 - DNA, 375 bp, Homo sapiens
tttagtgcatattgttcctcttagtatacagtcagcccgctgtatacacaggtttcacatcctgtgaatattgtattttctatctgcattggggtgaaaaaaaaaaatctgtatgagtggacccacgtagttcaaatctgtgctgtttaagggtcaacagtactcagtcgtgtatttgatattgtaaggaatttgtgaaatgagtagaaagatctctttttttaaagaaataaccatctagattgcaaaaactgttttattgattttatagtggataatttatagcaatacaagttcatgttgaaaaatgaaaaaatataattttatattatttaaaatatgttattttatattaaatgcaaatttaaattgtta

SEQ ID NO: 261978 - DNA, 545 bp, Homo sapiens
agatgtggtgctgtgggttaggaattgtaggttctttaatgttttctgaaaatggagagccaaggctgaaattactctgtaatgcctttttgttgctgggttgtttctgtgaatgtgacactgggctgaattgaaccacagtgaaatctggaatttatttgatttgcacataaatgggattatgtcaaccatactgctttgtaattccttttgtcttgaaaatatgtgatggagcttctatttgagtcaaccaatatgaattacatgattcttttcagtggatgcataaagtctcttgtatgaatacctcgtatctttttgaactagtctcatgttggtggacattttggttgtttctaattgtgatgaacatcttgtgtatacttgcatatttatgtaactacctcattgggatagattcttggatataaattttctgcatgaaatggtatgtacgttttacattttattacataacaccagcaaaaagtcatgctgatttatattcctctcactgtatattaaagtcccatatccacaaaatc

SEQ ID NO: 261979 - DNA, 690 bp, Homo sapiens
ataagactggagtttatgagcatgatctatactacatagatctatactatacagagttgaacatcccatgccccacccaaacagggatcgatctatctatctatctatctatctatctatctatctatctatctagcatagatcatgctcataaactccaatcttatacaccaagtgcctaatgaatatttctccctcaatgtacaaatgaaaactttagtaccgatctctgataacccaaaacttgttacaccacagtagtcgcacctgggtgtcaatgccatcattccagatttaaagtgacccttaattcctctctttctctaatatcctaaaggaaatctaacagaaattcctgtcatgactatcttttaaatatatccataagccaatcacatgccaccacctctgctgctaacacttagtgccactgccgtcatatttcacctcaatactgtcaataacctaagtgggtttctctgtatctacccttatcacggtcaccattaggctattcttatcaaagcagccagaacgatcatttttagatataaggaaggtcctatgattctcctgaaatctgctcaaaatcttctagtatctgcccatgttactcagagtaaaatccaaagtttttcaaaggcccaaaattaatataaacacctgtgtataagcaaatgagggtttctt

SEQ ID NO: 261980 - DNA, 341 bp, Homo sapiens
ctgcctcagcctccctagtagctgggattacaggtgtgcaccaccatgcccagtgaatttttgtatttttagtagaggtggggtttcaccaccttggccaggctggtctcgaattcctgacctcaggtgatccccatgcctcgacctcccaaagtgctgggattacaggcgtgagccaccgcacccagcctagaatttttttaaccctttatacacacacacacacacacacacacacacacttttcaaaatcaaatataccaagagtcttttattgaaaaggagcagccctcttctgtacctctcttatttcccagagggaactctttaactcttttagc

SEQ ID NO: 261981 - DNA, 598 bp, Homo sapiens
cacaaagcctgtttggtggtctcttcgcacagacacttgagaaagggttcagtaaaaaaagaaaaaacagctgggctatctcgtgccaacaaacgaaagggaaccacaggagcagagcaaatgtgggcaatgttttgaagacaacagactataaagagaaggaagcagagctatagagcatagttagacgcaactgaagattgcttactgccctagtctgttcacactgctctaataggataccattggcttgtaaaacaacagacgcttatctctcacagtcccgcaggctaggaagtccaagattagggtggctgcagatttggtgtctggtgaaggctcacttcctggttcatacatggccactttttgctgtgttctcacatggttgagggggcaagggaatctctctgggctctcttttgtaaaggcactaattccattcatgaaggcatcaccctaattacctccctaaagccacacctccaagtaccatcaaattaggattagatttcaacatatgaattttgagggatgcaaacagcctgttgctcttagttttgcaacagggaagccaaaagatgctaaaagaggctga

SEQ ID NO: 261982 - DNA, 539 bp, Homo sapiens
atgattttcttattattcagattaaactttttttggcagaaaactacagaagtgatgttgtatattgtcaccctagggtatctaattaggagacgcattaggtcagtttgttcttttattggttatgctaaatttgatcttttgattaaagtgaggtccatcagatttccccactatcaaatatacctttcttcattaaaattaataagtaattgaaggagaaataatttcagattgtgttactatcctgttcttcaacagtctttcatctgtgcttttggcatctattactaattattatctcaatcaattattactatggtggttgcaaatggtgatttttgaattctattattccttcttaatttattagttagaattattttgcaaaacagagcttttgcttgtccactccacttaaaatattatttatttatcattgttaaacatataaacatgaccacacacacatatataatatatatacacattttatatttgtatggaatcatgaattaaaaaaattcattttgttatta

SEQ ID NO: 261983 - DNA, 265 bp, Homo sapiens
gttaggttcatgctggaatattccctccaaagcaaacgataaattgctgcatcttatatctcatacctcaaaaaagaagtgcctggtaggcctctttgggttctgaaggcaactcatgccacacttaagactgcagttccaggccaggcgtggtggctcacgcctgtaatcccagcactttgggaggccgaggcgggcggatcacgaggtcaggagattgagaccatcctggctaacacggtgaaaccccatctctactaaaaaa

SEQ ID NO: 261984 - DNA, 410 bp, Homo sapiens
ggatcacagatccctggaaattttttgtaggatggtttaacgttcattcattaaaaacattaaatatttatttttctttattgatacaaaatagatgtacatatttttgcacattaagtatttttatgctgtaggcacaggagaaacagcagtgaacaaaatagaagaggaaaaagtccctgtttacaattaggggggtggtagggagcctatattctattctggtagaggaaaacagatgataaactattaataataatatgtaatgtagtaggtagagaagtgctttgaagaaaataaagcatagtaaggaggatagagtagggagtgaagttggagagtagaatgctgttttgtgtcagattaagaaagacttctcctacaattatggtctggcattcatatacagt

SEQ ID NO: 261985 - DNA, 303 bp, Homo sapiens
agcctggggagtttgaggcttcagtgagccgtgatgacaccgtactatactccactccagcctgggtgacagtgagaccctgcctcaaaaaacaaacaaacaaacaaacaaaacaaaattaatctttttgctgatgtcatgtcagcagtgtgtgttgaaggctgtaaagcagccatttgttcagtttatttttccattgaacaagtatttatcaaaaacatactttgtggcagtcactatgctaggagctatgaatacagaaggaaaagtaaatgctcttggatactacactccagttgtgat

SEQ ID NO: 261986 - DNA, 790 bp, Homo sapiens
aagagtacactcaagatcacccttacttctgacaccaaatgcaagttttggtgtttcccaaaagaatcctcaggtttgataattcactggaaagattcacagaacttactaaaatttttatattcctgattatatttattacaagaaaatgttacattaaaaatcagccaagggaaaaacaaatagggcagagtctaagaggattccaaatgcgaagtttccattgtcctcaggaatacattattctaccagcatcgatgtgtaacaaaagcatggagtatggccaacctgaaaggctcacccaaactttagtgtctacagttttcactaggcattatgacataggcatgattaattggttgaacttaacctccagcctgtctcctcctcaggtcaggctgatatcacatagctcaaagttccctccctaaactatgattggtctttctagtgtcattataccccaccctaagactgactagtgtagaaggccctgccctgagacatctcattagcataagctatcaggtgtaatttaagggagcagcatagataagaaaacctgtgtaactcataaaattccaactgtttagatgttgcctcccagaaactgaaaacaaaggtcagatatctctttggatgaagcaaattctttactacaaagtatcctttatcaggttgaataacttttttactattcctagattaccagtagtttttatcacaaattgttggattttctcaaatgttcttctatatctattaaaataatcatattgtttactctgtt

SEQ ID NO: 261987 - DNA, 554 bp, Homo sapiens
gggaatttgtccatttttcttcttataaaaaccatctacatctttacaccacaatcttgcaaagtttaagatataagtatgattatatctatttaatgtaagtatgatttttgtgtgcttattttaattttctatttttaaaaagaacttaataaaggaaagaaaaaacattaaaatgatagattgtaaaatcatggaaggcatacaattttagctatgagttgtagctgaggcttgaacttgtaggtataaataggctattaatctctttctttgtaataatatatgagtgaagaataaatatgaatcttattggatatagtttagtaaacatgtttggttagtcaattagctgctaaatcagacattttcatttggtttactacactcatgacaataaacacaaattaacaagtatttcatatcctatattattttgtccccaaggagacttttgaatattccttcagataatattcacagagaatcacagctatttggcattctatggatccagagggacatatgcttgctggcacattgaggaccattgc

SEQ ID NO: 261988 - DNA, 521 bp, Homo sapiens
agaggacagagaaacattgaactgcaccatgagagtacatcagcagatctggacatataaatgaaatatcttaggtactttaacggagagattgtaaggaagagacagacaggaaaagagacttgaacgctctaccaaaaaaaaaaaaattcttagaactgatcaacaaatttggtaaagttgcaggatacaaaatcaacacaaaaagatcagtagcatttctatacacaaacaacaaactagctgaaaaagaaattaagaaggcagtgtcatttacaatagctataagaaattaataaaatacctaggaataaatttaaccaaggaagtgaaagacctcttcagataaagctgcaaaacactgatgaaagaaattgaagagggatacatacaaatggaaaaacatttcatgctcatggattggaataattattatagttaaaatgaccgtactacccaaagcaacctgcagattcagtggagtccctattaaaataccaatgacattctgcacagaaata

SEQ ID NO: 261989 - DNA, 347 bp, Homo sapiens
gcctatggggaggggcttggggagtggtatctaaatggtgcagtttcttttggaggtagtgaaagagttctaaaaaatgactgggaggccaggtgcatggctcaggcctgtaatcccagcacttttgaaggctgaggcaggaggattgctcgagccaaggagatcaagatcagcctaggcaacatagcgagaccccatctctataaaaaaaattaattaaaggaaaaagatgatcagggcagtaaatacacaagtctgtgattatactaaaaccattgaaatgtaaacttttaatgggtaaattgcatagtatttggattatatctgaataaagctgtttttagaaa

SEQ ID NO: 261990 - DNA, 496 bp, Homo sapiens
cttccccaggaataaagatttaaatcacaccagctcaatgctggttgagggcaagggaacaatgaatggcttgtggaaggggaaagttaaaaatgcaaattacaactttgtgccccatttaaggaaagagaacttgaatagctatgcatatttgtgttttcttccttgctttgttatgtacatatttgtatatatcagccactaacttcttatctttccttcattcttcacttactaatttacataaggtactggtagttcatataaattcatttttagagactaaatataaaagcagaattgcaactgaacttaagcaagaatcattatcacccagggctagatttggtgactaatagaagtttggatctctatttttagaggagggattgagaaaatttttgtatggggaataattctattctattagcaagaatcgtgttgttttttgccattgctgctaattaaaattttaaatattgtcaaaagtggtata

SEQ ID NO: 261991 - DNA, 230 bp, Homo sapiens
ccacttccacctctgctctcctgtccacatgtcccacacggtgcacgaggatgtcatgtgacaacttgtcagtagctcattcaaatccatgcatgttgcaccagttcatggaaggaagcgttctgacttcacttcttactgaactcatgttcaatctctgtgatattttcaactaagtttcttgttactaaaatgagacttaaattaataaactttcatttctctcttct

SEQ ID NO: 261992 - DNA, 2721 bp, Homo sapiens
  misc_feature (331)..(331): n is a, c, g, or t
  misc_feature (961)..(961): n is a, c, g, or t
  misc_feature (2591)..(2591): n is a, c, g, or t
  misc_feature (2627)..(2627): n is a, c, g, or t
  misc_feature (2664)..(2664): n is a, c, g, or t
aaaggttcctgcggtgctctcccgtccagagccctgctgatggggaagtccgaaggccgtggggatggtggagagcgccggccgtgcagggcagaagcgcccggggttcctggagggggggctgctgctgctgctgctgctggtgaccgctgccctggtggccttgggtgtcctctacgccgaccgcagagggaagcagctgccacgccttgctagccggctgtgcttcttacaggaggagaggacctttgtaaaacgaaaaccccgagggatcccagaggcccaagaggtgagcgaggtctgcaccacccctggctgcgtgatagcagcngccaggatcctccagaacatggacccgaccacggaaccgtgtgacgacttctaccagtttgcatgcggaggctggctgcggcgccacgtgatccctgagaccaactcaagatacagcatctttgacgtcctccgcgacgagctggaggtcatcctcaaagcggtgctggagaattcgactgccaaggaccggccggctgtggagaaggccaggacgctgtaccgctcctgcatgaaccagagtgtgatagagaagcgaggctctcagcccctgctggacatcttggaggtggtgggaggctggccggtggcgatggacaggtggaacgagaccgtaggactcgagtgggagctggagcggcagctggcgctgatgaactcacagttcaacaggcgcgtcctcatcgacctcttcatctggaacgacgaccagaactccagccggcacatcatctacatagaccagcccaccttgggcatgccctcccgagagtactacttcaacggcggcagcaaccggaaggtgcgggaagcctacctgcagttcatggtgtcagtggccacgttgctgcgggaggatgcaaacctgcccagggacagctgcctggtgcaggaggacatggtgcaggtnctggagctggagacacagctggccaaggccacggtaccccaggaggagagacacgacgtcatcgccttgtaccaccggatgggactggaggagctgcaaagccagtttggcctgaagggatttaactggactctgttcatacaaactgtgctatcctctgtcaaaatcaagctgctgccagatgaggaagtggtggtctatggcatcccctacctgcagaaccttgaaaacatcatcgacacctactcagccaggaccatacagaactacctggtctggcgcctggtgctggaccgcattggtagcctaagccagagattcaaggacacacgagtgaactaccgcaaggcgctgtttggcacaatggtggaggaggtgcgctggcgtgaatgtgtgggctacgtcaacagcaacatggagaacgccgtgggctccctctacgtcagggaggcgttccctggagacagcaagagcatggtcagagaactcattgacaaggtgcggacagtgtttgtggagacgctggacgagctgggctggatggacgaggagtccaagaagaaggcgcaggagaaggccatgagcatccgggagcagatcgggcaccctgactacatcctggaggagatgaacaggcgcctggacgaggagtactccaatctgaacttctcagaggacctgtactttgagaacagtctgcagaacctcaaggtgggcgcccagcggagcctcaggaagcttcgggaaaaggtggacccaaatctctggatcatcggggcggcggtggtcaatgcgttctactccccaaaccgaaaccagattgtattccctgccgggatcctccagccccccttcttcagcaaggagcagccacaggccttgaactttggaggcattgggatggtgatcgggcacgagatcacgcacggctttgacgacaatggccggaacttcgacaagaatggcaacatgatggattggtggagtaacttctccacccagcacttccgggagcagtcagagtgcatgatctaccagtacggcaactactcctgggacctggcagacgaacagaacgtgaacggattcaacacccttggggaaaacattgctgacaacggaggggtgcggcaagcctataaggcctacctcaagtggatggcagagggtggcaaggaccagcagctgcccggcctggatctcacccatgagcagctcttcttcatcaactatgcccaggtgtggtgcgggtcctaccggcccgagttcgccatccaatccatcaagacagacgtccacagtcccctgaagtacagggtactggggtcgctgcagaacctggccgccttcgcagacacgttccactgtgcccggggcacccccatgcaccccaaggagcgatgccgcgtgtggtagccaaggccctgccgcgctgtgcggcccacgcccacccgctgctcggaggcatctgtgcgaaggtgcagctagcggcgacccagtgtacgtcccgccccggccaaccatgccaagcctgcctgccaggcctctgcgcctggcctagggtgcagccacctgcctgacacccagggatgagcagtgtccagtgcagtacctggaccggagccccctncacagacacccgcggggctcagtgcccccgtcacanctctgtagagacaatcaactgtgtcctgcccaccctncaaggtgcattgtcttccagtatctacagcttcagacttgagctaagtaaatgcttc

SEQ ID NO: 261993 - DNA, 380 bp, Homo sapiens
cccctccctccagttacaaaagttaaaaatatctccagacattgccaaatgtctcctggggggccaaatcaccccctgtcaaggaccactgcaataggggaatagtcgtcagcctcccacattgtttcaaaaggattttttagtagatgttggaaagagaagctgtgcactgatcttcccagaaggaccacctagtaggaaataaaagccagtctcaaagtcctcatttcagagttggtttctctgctaaagcactaaatctttgatgctgagaagacaatgtatggtactactgtgtggcagaactagtgaaaatactgtaagttgttgaagacatttgtaaatatatactataataaaaactctacctcacaacagcc

SEQ ID NO: 261994 - DNA, 398 bp, Homo sapiens
ccctgcttgcctctactccctcgagaatggagccgccattttgtagcagctttctagagaagtttttttcaagagcactttgagagttgacagtctgacttaaactgaggtccatgaaagctgggttcagccagagcagggcagaggatggccagaggagaagagggcagagagacgatgggaagacaagacgaccctctctgctgagagcttcagagacctgcagagacatccaaatgacctgcctgcagagaggagccaacccctccagggcctcctctctgctgagagctgaacactccatgggatgatctgcctgcaaagaggagctacccactgtgggtctcctctgagctgttttaacactaaataaaactcttcatcttcttcacccttca

SEQ ID NO: 261995 - DNA, 657 bp, Homo sapiens
tgctgaatgtttatatagtccatccaatgtcttcttcagttcctaaaagaatgctggaaacagaataggcatttaataagtattcttgtgttttaaaaaattatttgaatttttacaatgggagcccttcatcacagctttgtagttacctcaactctggctgttgagtaatttgctcagttaaatctgtttgtgggtgtagtgaattacaacctcctctggttccctcgagatcaagtctaacctggtgattgcgtcatctggtgggagagcacggctacaacagcaggtggaaaccatgctcgggtcctggccactttgcctaggatgaaagctgttgtggcaaacaggggaaagagcttcaagctttgtagtaaaaggaatctgggcttaaattcctcttatcagcactgtgaccttggagaattaatcattcttggttgtggtgagggttaattgagatcaggtatttaaaggacatctgacagtgcctggcacgggataggtgctccataaatgcctgtagctataattattactgttccactagctgtttacttaagtaacattgaatttccacagaatgcatttcgaatcaggtggactatgattatactgatttttaaaataaagagctgcatctgttaaaggattcta

SEQ ID NO: 261996 - DNA, 262 bp, Homo sapiens
tattcctgcccaagatacgcacagacttctccgtgatcaataccctgcactgaagtaataacttgcaactgacaaacccgcatggacacattaattgtttccttttctggcgtcccctagtataacaagcctaaactatcttgaaacaccccgggttcctcaagcggattactgggaatgatgccaggtagagggaaagtgggtggggacgttcctctttgcactctttcctcaagaatccataaaatgtacattgatttgg

SEQ ID NO: 261997 - DNA, 703 bp, Homo sapiens
tgaaatgagttaagactttgggggactgttgggaaggcagagagggggactgtgatgtgcagggcatccacgccccatggctgtgatgtcgggcagcctgtgcccaggaagggcagctggcacagcaaggggtggccagacatgtgcattcctaccctgagtgaactctggggtgagagggtatctgtctggaaggagcaagcatcggtccttttcccacagtcctctcagcaaacacaatcactggttcaaggtttggatgcacctgtgctcatgggctcagggaccagactccctcctctggccagaagcctggcaccatctgcctggtctgcccccactttagggacgtgggctgtggacacagcacctggtccacaactcccgtgtcagaggtaattgcagggagatattccttagaatggtgagacagattttattccttaattcctgacagtaggggaaggagctgtgttccctgccagttcagcagaggtgacttttggatttaaagggagtatgattagctgggcctggtggcatgtgcctgtagtcccagctactcaggaggcttaggctggagggtcacttgagcccagcattttgaggctgtgatgagccttgattgcaccactgcactccagcctgggcagtagagtcagacgctgtctctaaaaaataaaaataaataaataaataaata

SEQ ID NO: 261998 - DNA, 570 bp, Homo sapiens
aggaggaacaagtcacagcttacgtggatggcagcaggcaaaagagagagcttgtgcagaaaaactcccatttttaaaatcgtcagatctagcgagacttattcactatcatgagaacagcatgggaaagacttgcccctgtgatacaattacctcctaccaggtccctcccacaacacgtgggaattcaagatgagatttgagtagggacacagccaaaccatatcagacctctatccctgggtaactgaatagttaatgagaagaagtgtccctatctggagcattccatggaataaatgacaaagaaaggatggaattagagtatcaccattttacaagccccagtgaattaagagaggcctgagttattgacagctgttaatataagagacaatctaacgtgcctcctgatgagagaacgcaccagctctagtcttgccaaagggatcacacctgagtctgtccagtcttggctccagctgacagttttcaggaattcagaggaacatattgaactgcatatgaagcagcaaaacccagaccgagagactaggctctcttcagcag

SEQ ID NO: 261999 - DNA, 699 bp, Homo sapiens
cttggaactggaagaggaagcagagatgggccaccctccctaccagcatgaagagatggaatatgagtcagatgtagtgtgagtatagatgtgggttccatcctgcttggcccttcctggcttgctgactttaggcacttcccttccctcctctgctagtttctttttttgtaaaacaagaaggttagaatccttgatataacacgtttctccaaactctacaacttagggctttggtgttcatttacagaagagcttgccctgtcaggcaagctgtctgttctaccaggcagatttggaaatgcttcccaaagcagatagtgtgcaccttgaatggtggtggagaaatgtcttggagaataagcagggcttggcattatagtcagagagcacatgctgagagtgagtgggaagagggtctgggaaggaattcagaagaaagagtaggttgggaagcagacggaaaaagaggagagtgaagtagagaaggcaccatagcaaaatgctccaggtcctggggagtcatcctgggttgtcccacagcaaaagaaatgtacagttactgatggacattgagaaggagaggtcaaaggggccttaaatccaaggatagaagggaggcagtgggggactcagacaagaccccaggaacatgggctctgtaagttcctactcagcctgacctcaagcaagagactt

SEQ ID NO: 262000 - DNA, 661 bp, Homo sapiens
ttagagagttcaaataatggccattgagctctgaattttccttggtgtcattttgccaatcacttaaaaaatgtgcatgagaatgggccacaatatgtaactggctggaatcccagcacaccaggcataccttaatgtgttagaatctcattcaattcttattaatctcttgagagcaaagaaaatctgcaaatccagccagggaatgtcaggagtttagaccatgtttgagatggcggtggctgccctgatggcctttagttagcaattctgcactcaccatttagaatgtttatttttgttctcagaagatttttaaaaaccatcaaggggaaagactcaaatcaagtcaaaaggaaccaaggtaagagtgttcacaaaaattttaacctaggtgtccacatagaacaaaatgttaaaccaggcatgcagatcaaaagtgaattcacaagtaaacacatgccttacagagagaatgttaattctgtacaaatcagagcattcaacccagaaagatttatgcctttgtaccagaaaggacttagcagaaaagacaaaaaggctgtttatcatctcgggctggatgtgtggtcctttatcaaggcagcctcatccaagtcacattctgagtagcatcaaaaagcctccagcacaaagagaa

SEQ ID NO: 262001 - DNA, 402 bp, Homo sapiens
ctggcctgatgtccaccttgggatggatgtccacctggggacagatgttcatttgtggcctgagtgtccatctcgtatctaatgtctacctggggcctggtgtttgcctgaggccttatatccacctggggcctgggcatccatttgaggcctgatgtctaactaagacccggtgtttaattggggcacagacttcttcctggagcccaatgttcacctggagcctgaagttcacctatgcctgttgtctacctgaggcctatgtgtcaacctagcgcctgaagaccaccctgagttcagtgttcacctggggactgacatctgcctggagtcctggtgtccacatagggcctggtattggcttgggaccaaagtatttacctagggcctgggtgtctactt

SEQ ID NO: 262002 - DNA, 240 bp, Homo sapiens
agaggcaaaaggaagatgagcctggaggcatccaagagcctgggattcagggaattgccacacctttctgtgcagagcacacaggatcagtagaagttatgagatgcggactctggcccatcagtagcgatctacccggatccctcaggaccatgccccttaatcctccctccctgcttctagcatatttaattaatgtcatactctctaatttttttacctgccctctcactaaaaaaa

SEQ ID NO: 262003 - DNA, 660 bp, Homo sapiens
gtctgtaaatcctgaggaaaatgtatatcttttcctttaaagttctaattcaagacatggatgtgagagttctgaagggactttgggactgcggtaaaatttcgttgtcatagtaacagaaagggaaataggcctagctcacctgggactttaacactgcaaaagctggattttttttttttttaagggaaaggactctgcaagtgaaataaatgaaaaacttactgtattttgaaacaaattttcaaacattaactaggtgagttgctgaaaaggccacttctgccatttttcttggttaacgtagttgcctgatgaaagatgcccaattttaaaattgcacagataggccatttaagagagaatattggcttcaagaaatatatatgacaaatgctaacctcagaccatgattctgtgctttcatgtttctctgaataatctatacatgaactgagaggatattcacacttcttattaatcataaaaactctggcatatacctgcacagatggactttgtctttggaagataacatatcattttctgattttgtaaacattagttgaatatatcaggccaccttcacgtatgagcatgaaggtgtctggggccagtggagagccacacagacgagacgccctgggattctggggccgg

SEQ ID NO: 262004 - DNA, 649 bp, Homo sapiens
  misc_feature (36)..(36): n is a, c, g, or t
gggtttgatattcctcttggtcttcaaggcacaagntttgacaatcatccttcacaaagacttgaagatagagacatggtagggggagatataaggatgctatattcatagcaaagtaccacagactgggtgccttgaagaacagaaatgtattgtctcacagttctggagactagaaatccaagatgtcagcagggttgtttccttctgagggcgtttagggaaacatctatgaaccaagagggaggacatcagatcagccaccatttcgatcttgaacttcccaggctccagaaatagctaaaattctataaggggcgagaaagaaccatcaacaatcaacataacagataactacattatgtgatattttagaagttgatagcctcattaaaaaaagaaagaaacagtagagcagagtaaggaagataataagaatctagtggccagaagaggcaaattgtagtaataaataagaaggtccagataggacgcattgagtcagtgacatttgaccaaaattttgaaagagaagaaatgtttcactaattggatatctgcgagcggagcattccaggcagaggggactgcaagagcaaaggcggttgctcaggagcctgcttgcggagacatcaggagcaacgttagc

SEQ ID NO: 262005 - DNA, 578 bp, Homo sapiens
tattttttccagttattacattgagaacaaagttatatttgcaaagttaagatttttataactatccctaaaactgattctcagtgactcccttgatctacatatgttaaggaaaaaggcaaggtgaagatgtgttaaatattttccagtttttaataatcgctttaatataaggtatacccaaataatggtgaattaattgaccatgaaagtacgttatagcagatgcccactcatcagtatgccttgaaattaaaggtttataaggtgcataagggcaaagtttttgatgttgccattacgttcacaaaagtatctcaggcacatacagcatgaagttcagtaagtgcttgcaacataagcagcactaaattttgttgaataaataaatacttttgtatagcatctgttcaaaatctctgatgtaaaaatgaaaataatctgaaaatatgcaaaaccgaaatttcccatataggactgccaattcatacaaacaataagatgaatttcaaaatgagaacatgacagtaaaatcaagtttcaaaatgactggtcttttttagaaaaacccatgttca

SEQ ID NO: 262006 - DNA, 435 bp, Homo sapiens
agcatttttcacattaggcaaaaggtggaaacaacccaagtgttcataagcagatgaatggataactgtaaggtggtatatacacacaacatagtagtatttagccttaaaatggaaagaaaattgtacacgtgctacagagtagaaccttggagatgttatgctaagttaaatcagtcacaaaagcagaaatattgtatgattaaatttatgtgagacactaagaatagtcaaattgataaagacagaaagtagaagggtagttgccagaggttgagagggaggaaggaatgaggaattactgcgtaatggatacagagtttcagttaggaaggatgaaaaaagtttctggaggtagatggtggtgatggctgcacaacaatgtgaattttttatttgatatatattttaccatatttttaaaaactctattac

SEQ ID NO: 262007 - DNA, 644 bp, Homo sapiens
ttaatgtaagtgctataattgcttagaatgtataatttggtaaagaaataaggccaacacctgagacagagttggaacaggatctatatgaaaaggtcctttcatgacagcaggtgtctctctttctttctgattcacacacatccagaaacctttaaactactatttggtgacacctgacagagagcaagacctttccttcctctaaaacatagctatcaatttaaatgttaaaaaagtacctaaacttatctcatctatgctctttacaaagctgcaaaagggaattttctgaccaaatacctgggctttggtgtagttacatttttttctctaaatgattttaactcctttatttctctttaatgcctgtactgcccccatccctctgcagggtgcctgtgtagctcagtggactctgcagccaaataatggccaagtaacggctgtgacttctcacccagggctgacaaaccacaatgtcaagggtacatattcaatgagagaagatgatttctcaacatcttgccctcaaattctagaacttcctcctcaatacttcttggagatctaataaaaaaatgtatctaatctattccctccagtgggatattttaccttggttattatcacaactattttgc

SEQ ID NO: 262008 - DNA, 422 bp, Homo sapiens
aaagaacccacagctgttgtaaaaccttacactctccagaatgcttgctccctcttttctccctccctcatccccaacagatggctgcaagtgcttcccttgctgcttccaggtgactctgagatagagagattatccaatgtatgctgtaccaaattctgcacgttgtctgcgactgttatagaaatttagatcctttagttgaaaccttcccaatcaaaacaaataacatcttcttagccttcttgatttcagggtgagccacatatttgaggcccaataggacccaaattttaatcggtgcatgatctaaataagcgaagagtttatccatgaaggcctatgcatgcctgtgtgtgttgactgatgaatgaggctactgagagagattagaaaattagaaatgtttgcctgctgtgagc

SEQ ID NO: 262009 - DNA, 695 bp, Homo sapiens
acacgggaggctaagagaggagaatcacttgaacctgggaggtggaggttgcagtaagccgagattgtgccactgcactccagcctgggacagggtgaaactccgtctcaaaaatgaaaagaaattacagcttgttgcatttccatgtactatcaaagaataaccacaatggtcagaaaaaaactatctaaaaacttcttccagctacatatctgtgtgaagccagattttcttcatatccttcaactaaaacaacatattgcaacagactgaatgcagatgcatacatgagaatctattagctaaagctgacgttaaagaaatttgtaaaaatgtaaaacattgacacccttctcattatattttttgttttggaaaatataactgtttttcataaaaatatttatgttaatgtacaataagtttgctgttatttagttttaaattctagtacagtaattgataatacacatattccacataaacgaaagctcattagtttttaagacttcttggtttgagaactactactcaaaattttttgtttgttttgagagagggtctctgttgctcagactggagtgcaatggcacaatcatagctcctgactataaactgaacctcctgggcaatcctcccatctcagcctcctgagtggctgggactacaacacctagctatttttttttttttaa

SEQ ID NO: 262010 - DNA, 253 bp, Homo sapiens
gggcacataagtgaagcaaagtgaaaggacacaaagtggtggggggcacgggggaatggggaggctttatccatgcacagacaccaagaaagacgctgggatgaatatgactggctttccggagaggaagtgtctttctttctctctttctctctctccctttctttccttcttttccttttttttttttttttttttgagacagagtcccactctgttgcggaggctggagtacaatggcgcgatctcggct

SEQ ID NO: 262011 - DNA, 1166 bp, Homo sapiens
  misc_feature (1166)..(1166): n is a, c, g, or t
tgcacaagcagaatcttcagaacaggttctccttccccagtcaccagttgctcgagttagaattgtctgcaatggccgccctgcagaaatctgtgagctctttccttatggggaccctggccaccagctgcctccttctcttggccctcttggtacagggaggagcagctgcgcccatcagctcccactgcaggcttgacaagtccaacttccagcagccctatatcaccaaccgcaccttcatgctggctaaggaggctagcttggctgataacaacacagacgttcgtctcattggggagaaactgttccacggagtcagtatgagtgagcgctgctatctgatgaagcaggtgctgaacttcacccttgaagaagtgctgttccctcaatctgataggttccagccttatatgcaggaggtggtgcccttcctggccaggctcagcaacaggctaagcacatgtcatattgaaggtgatgacctgcatatccagaggaatgtgcaaaagctgaaggacacagtgaaaaagcttggagagagtggagagatcaaagcaattggagaactggatttgctgtttatgtctctgagaaatgcctgcatttgaccagagcaaagctgaaaaatgaataactaaccccctttccctgctagaaataacaattagatgccccaaagcgattttttttaaccaaaaggaagatgggaagccaaactccatcatgatgggtggattccaaatgaacccctgcgttagttacaaaggaaaccaatgccacttttgtttataagaccagaaggtagactttctaagcatagatatttattgataacatttcattgtaactggtgttctatacacagaaaacaatttattttttaaataattgtctttttccataaaaaagattactttccattcctttaggggaaaaaacccctaaatagcttcatgtttccataatcagtactttatatttataaatgtatttattattattataagactgcattttatttatatcattttattaatatggatttatttatagaaacatcattcgatattgctacttgagtgtaaggctaatattgatatttatgacaataattatagagctataacatgtttatttgacctcaataaacacttggatatccn

SEQ ID NO: 262012 - DNA, 619 bp, Homo sapiens
agattacgacctatcggggcatgcatagaattggatatgttccttgttattcgcgtcagcagtcactcatccaaagaccccaaagcttctagtgttctaaaggctcacaccttctgtgacaggaatcttgattcccattcttctcaatcaagacctaccctgaatggatttggagtagtgtggtataatgggaaaaattcaagcttgggggccaggcagatccaggtttcaaacccatctctgccacttcttacctctgagacctttggcaaacattttgacttaattgagccttagtttcctcatctataaactggagatactagcaccaaccttccagaattgtgtggattaaataaaatcaaggacatagattttgtgagcacaggatacttagtccagttcctggcacataatgaacgcattatgtaaatataagtttctcttccttatttcctgaccaccatgaacctagctctagtttctggccactagtctccatgacaacaactgaggaagagcacccaaacaagaagaagaaaaagaatgttttgccaaatatgtgaagatataatacctatcaccaaagactttaataagaataatgagactccacact

SEQ ID NO: 262013 - DNA, 224 bp, Homo sapiens
aaagggctattttagctgggtcttgaagaatgaagaaaagttctccaggcagagaggggagatggcatttggggcggaagaaacttgcctgttcaggctgggtgtggtggctcacacctgtaatcccagcactttgggaggccaaagtgggcggatcacttgaggtcaggagttcgagaccagcctggccaacatgctaaaaccctgtctctactaaaaatacc

SEQ ID NO: 262014 - DNA, 110 bp, Homo sapiens
gcttggcagatgaagagattggaagtgaaccactgagatgactgatgagcgtcctcagcaggctgtgttgcagggggaagagtgcaggttgtttataaggcctgggtcgt

SEQ ID NO: 262015 - DNA, 616 bp, Homo sapiens
gacaccaaaagctgcagcttccacagagcacagggaattgcaaataactgtcttctatgaggagctgccatttgtggtttcaccagtttcccagcattgcttctttgtaactcctggttcttgtattagaagaggatgctatgtccatgaagaatgtaggtatcaagcatgtcctttgggagcctccttgctttaacccctctcaccccttccaccccgccttcattagtaacccatcacctgggtcttcatatcccaactaactacagtcttggctaagaaaaccccatacgccttaactcagcaatatgcctcactatgtctttgtccattcagttatccattttgcaactgtttcttgagtgctgcatatgccaggtcgtacaggaggccaggtctacaaacaggacaagatggagaatcacagtccccgtggagctaataggctgttgtgagattcaggccggttagcctgcaagtgaaatgggatgtgctgagagctgtcctggggaagggatggtgaggtgtgagagcacgcagaggagtacagggtggtgagagcaggctccccagcaggagtagagaatgtgagggcggtgttgtgagaaagtgactc

SEQ ID NO: 262016 - DNA, 237 bp, Homo sapiens
ccttgctactacgcgaagacacagctagaagatgccatttatgaatcagagatcgagctctcaccagacattaaatctgctggtgccctgatcttggacttctcagccccaagaactgtaagaaataaatttatattgttgtaagctactcagcttatgatattttgttataacagctcaaataagccaagacaataaccaaaacatgtaaagaactcatacaactcagtagccaaa

SEQ ID NO: 262017 - DNA, 702 bp, Homo sapiens
gggcttctcattgcctgaagctggacgagtcagccactgggaggtctaggcttggtctctagcccaggctcagcctcagccttccagtgtgcatcttcctctctgggtttcagttttcctacctgtaacctaagttggactagaacatttccaagttcctcccagccctgtaaattctatctttgatacttatcttagatctttacaagggcttagcagtctcctaaaataagggaagagagttgcttctactctagcaaaaaaaaagttggggacagatgaaggaagaatgggtgaaatgttggaaatttgtgaagctgagtgagaagcaggtgggggttcattatgctactttcaccattttgtgtaacttaaaaattttccctgataaaaaaagtttttataaaatagaagttccattgaaattgagtgtctttacagcctttgttttctggtacccttgggaggcatccatccgtttaataaaaggtaccttccacaggaaactcccttcctttgtcatctttggtatccccatctccatcttccacaacagacagtttgaacagccgcaccactccagcatcaggacagtttgggggggtttccagaatcttctattcccacttcccatttctcaaatcatttgacctgtcgtacgtacaaagtaaaaagtcctagacaagagccaggagaggattt

SEQ ID NO: 262018 - DNA, 594 bp, Homo sapiens
ctgacctgctgttcaccgtggccttaccgggaagggtggtgtgttatgtgctgggctccagctggcctttcggcaaggggctctgcaggctgacggcgtttgtgctctacaccgacacctacggggggtctacctcatggcctgtgtgagcgtggaccattacccagcgtgagccactgcgcccggccaagtctgatgccatttatggagcattttgacgtgggtgattttgtgtttcgtaaagcattaggttggtgcaaaactgctgttctgccgtgacttgtgcaccaacctaatagaatgtgtgctttcctgccaagcgcatgttcctgacgacagtccctggcctttccctctgcccccaccgtccccccacactccggcggttcagacaggaataagcgtggagtcctgcctcaagccctccccagtcgctgtcccccagagaccctcttctctcctgatgcttcttgcatcttccaatttccggctacgttttggacatttgactctcttcaaggcagaacttcacatacactttcttgagtggggaatgtctcatcctgtgacgttgtgataaaataagaaatacgt

SEQ ID NO: 262019 - DNA, 262 bp, Homo sapiens
catcttcattatgtaaaggtataaaaggctgggaagtgaggacaaagaagtcccctcaggggcacacagctgggaagtgttagagctgggattgggaaacagttcaagaacgtcccaccgcagaataccaaaggcgagtcccttggattatgaaaagctttgattttcttccttgtaccattatatttttaagattgtctttaacgcacagatgttacttcagcaccacaaggactgttgatggaataaacaggccgactta

SEQ ID NO: 262020 - DNA, 576 bp, Homo sapiens
cttggtgccagaatccctatgtctctgcacatccttactgtcctctgattgaaccacacaatacatccaccgctggaggcagattggatagacagcccaggactcggtcaaccagacctaatcgagcctcagggtctaagaaaaagaagacatctgagtcacaaaagcaataagcagtcaactcaacctttaaagtaatctagtccaccctcaaccagctactagaaaagcaaaagagaactcaaatccctgaggcctgctctgcaacctccctgctattccatgagagggtgaagacatcacatttctatatggaaaaaggatccaaaatttgtattgctgtagaattggtgaattatagatgcttgatgaaatcacaagtcctaccactcctgccttccaaatccctgcagaaaacaagcagatggttagtattattcaatggataaaattgctatttgccttagatttctctttttgtaaacaaagttattttgggtacagaactcacaaaagaagagcacgtgcaattgtttaaccattttacattgactgataaatctcttttttccataa

SEQ ID NO: 262021 - DNA, 255 bp, Homo sapiens
catggatggcagggagaaccactgtgttccctaaatgcaatacgacccaaatatcttcctttttcatttttttgagatgcagtctcactctgcactccagcctgggcgacagagcgagactgtctcaaaaaaaaagaaaagaaaagaaaaagaatcgacatgttacagttttcagaatgttttgcatattttaaaaatacgtagtccaacatgaacagttaataaaagtacaaacagcgaataaacatatgaaaa

SEQ ID NO: 262022 - DNA, 669 bp, Homo sapiens
acaggcatgtgccaccatgcccagctaatttttgtgtttttagtagagacggggtttcaccatattggccaggcctgtctcaaactcctgacctcaagtcatttgcccacctcggcctcccaaaatgctggaattacaagtgtgagtcactgcgcctggccaagaatgtgcactataacaagtcaccaggtaatgcgaatcccagggggttccaggaccacgctttgagaaccactagtctatcctgatgtttgcactgtttaacatagaagttcaaaacccgggctttacagtctgtcagacctggtttttattcctaattccatcaattaatagctatgtgaacttgggccagtaactcaattaatctgagcctctattttctcacaagtagaataggaataattgcagggttgttctaagaaatggatcatgtaatgtgtaagtgcttacacttatgaagcattgccagcttcataataaacatttaatacatgattattagtctttctattcaagccctacctcaacaccctcctggaatctttctgcacctgttcctattgatctcttagtcctctaaaatgttggttcacttgctttccaacccgctctgtggtaaggaaactccatttccccacccccatagagcctcccgactccactagc

SEQ ID NO: 262023 - DNA, 367 bp, Homo sapiens
gagactagaagctgcaaaagaaatctaaaaacgtctcctggcacttgtgaatttctgatctaaggtttctttggagccattagtgaaacttctgaaattttgaagaaatttactgccttgattattaattatggttatcattgctgttttactctgtgggccaaggacaacgccacaagctcaaaagcagacttaagtgttttttgaacacagcttcttaactccacgcttagttgatttaatatttaagtgataagaaaatgcagtcgatttctggccctttttattgtttgggatgaagtcttgccctgttgcccaggctggagtgcagtggcgcgatctcggctcactgcaacctctgccttcc

SEQ ID NO: 262024 - DNA, 474 bp, Homo sapiens
agtaccatgaatattaggagagtatgcagtatagtcctttccagtgcatagagtgacttgctgtggggccagaacaagtcactcctgactcctgtgtccactgcgacccgtctcctctccactttcaaaatgttccctcgactgctgtgatcaccacctggtcaggggagaggaaggaaaagtgttgttggcctcactcatcaccccacagccattgagtgaacattcatgcatatgtgcatatagacgtactccccttcacgtgttcaagcgtgcatacatgttgccttgagggtatgcagctgctctcttaagtttcttagaaagagagtctgaagtagtttctcgttcaagtgatttattgttggggagcaggataggatggggggatgctaagcaaaaatgtggtctcagttggagactgacttcctgcaggtgaggctcgggagcatgaattgcatcacagagttcatc

SEQ ID NO: 262025 - DNA, 342 bp, Homo sapiens
tgctatgggaaggtcaccggctttagcaagcagctacaccaaagatcaaaatttgactctactctctattaacttgggacctatagtaaattgttctccaagcctcattttttttttttttcatctagaaaagcttcagaggataatgggacatttataaataatgtacctaaagtatctagcatagtaaggaatattaggttttctccttttcctcttaaacattatttagcattctctcttacacactagagaaacctcaccagcccacttatttagaaattatctgaaatacttttgaccactttgagcttcagtgttcacatctgtatgtctttaaaa

SEQ ID NO: 262026 - DNA, 211 bp, Homo sapiens
attttttttctgtggtttaaaaatgttaaaaacatttttcactggcagggtcatactgaaacaggtggcagctggatttggcccattgcccacagtttactgactcctgctttaacctgtacttgtgaaaataagacatataacctctttgcttacatttcatttttgagtactttatcaacacgaactcatgaagatcagtggaagcatg

SEQ ID NO: 262027 - DNA, 1034 bp, Homo sapiens
gagtgagaactgtggccttggaccatgggagacctgcatttccaccacctgttctgggagtggggcccagtcagccccctttgcttaccttctgccctatattagagccccaggttctgtgcccttttcctatcatcgcaaaactcatgatgctccggctgctcagttccctcctccttgtggccgttgcctcaggctatggcccaccttcctctcgcccttccagccgcgttgtcaatggtgaggatgcggtcccctacagctggccctggcaggtttccctgcagtatgagaaaagtggaagcttctaccacacgtgtggcggtagcctcatcgcccccgactgggttgtgactgccggccactgcatctcgagctcctggacctaccaggtggtgttgggcgagtacgaccgtgctgtgaaggagggccccgagcaggtgatccccatcaactctggggacctctttgtgcatccactctggaaccgctcgtgtgtggcctgtggcaatgacatcgccctcatcaagctctcacgcagcgcccagctgggagacgccgtccagctcgcctcactccctcccgctggtgacatccttcccaacgagacaccctgctacatcaccggctggggccgtctctataccaacgggccactcccagacaagctgcaggaggccctgctgcccgtggtggactatgaacactgctccaggtggaactggtggggttcctccgtgaagaagaccatggtgtgtgctggaggggacatccgctccggctgcaacggtgactctggaggacccctcaactgccccacagaggatggtggctggcaggtccatggcgtgaccagctttgtttctgcctttggctgcaacacccgcaggaagcccacggtgttcactcgagtctccgccttcatcgactggattgaggagaccatagcaagccactagaaccaaggcccagctggcagtgctgatcgatcccacatcctgaataaagaataaagatctctcagaaaattccaa

SEQ ID NO: 262028 - DNA, 528 bp, Homo sapiens
ggcaggagttattgccacagccacacacgacgcagcgcccagctgggagacgccgtccagctcgcctcactccctcccgctggtgacatccttcccaacgagacaccctgctacatcaccggctggggccgtctctataccaacgggccactcccagacaagctgcaggaggccctgctgcccgtggtggactatgaacactgctccaggtggaactggtggggttcctccgtgaagaagaccatggtgtgtgctggaggggacatccgctccggctgcaacggtgactctggaggacccctcaactgccccacagaggatggtggctggcaggtccatggcgtgaccagctttgtttctgcctttggctgcaacacccgcaggaagcccacggtgttcactcgagtctccgccttcatcgactggattgaggagaccatagcaagccactagaaccaaggcccagctggcagtgctgatcgatcccacatcctgaataaagaataaagatctctcagaaaattccaa

SEQ ID NO: 262029 - DNA, 611 bp, Homo sapiens
gagtgagaactgtggccttggaccatgggagacctgcatttccaccacctgttctgggagtggggcccagtcagccccctttgcttaccttctgccctatattagagccccaggttctgtgcccttttcctatcatcgcaaaactcatgatgctccggctgctcagttccctcctccttgtggccgttgcctgctacatcaccggctggggccgtctctataccaacgggccactcccagacaagctgcaggaggccctgctgcccgtggtggactatgaacactgctccaggtggaactggtggggttcctccgtgaagaagaccatggtgtgtgctggaggggacatccgctccggctgcaacggtgactctggaggacccctcaactgccccacagaggatggtggctggcaggtccatggcgtgaccagctttgtttctgcctttggctgcaacacccgcaggaagcccacggtgttcactcgagtctccgccttcatcgactggattgaggagaccatagcaagccactagaaccaaggcccagctggcagtgctgatcgatcccacatcctgaataaagaataaagatctctcagaaaattccaa

SEQ ID NO: 262030 - DNA, 491 bp, Homo sapiens
  misc_feature (2)..(2): n is a, c, g, or t
  misc_feature (10)..(10): n is a, c, g, or t
  misc_feature (12)..(12): n is a, c, g, or t
gngcaggggncnacgagcggctgctcagttccctcctccttgtggccgttgcctcaggctatggcccaccttcctctcgcccttccagccgcgttgtcaatggtgaggatgcggtcccctacagctggccctggcaggtttccctgcagtatgagaaaagtggaagcttctaccacacgtgtggcggtagcctcatcgcccccgactgggttgtgactgccggccactgcatctcgagctcctggacctaccaggtggtgttgggcgagtacgaccgtgctgtgaaggagggccccgagcaggtgatccccatcaactctggggacctctttgtgcatccactctggaaccgctcgtgtgtggcctgtggcaatgacatcgccctcatcaagctctcaaccatagcaagccactagaaccaaggcccagctggcagtgctgatcgatcccacatcctgaataaagaataaagatctctcagaaaattccaa

SEQ ID NO: 262031 - DNA, 340 bp, Homo sapiens
  misc_feature (12)..(12): n is a, c, g, or t
aaaaagaaaaanaaaaaaacccccccccccacgggggggtgggtgggggcccctgggaaaaggggggcaccaaaccggctccggggttgccaacggtgactctggaggacccctcaactgccccacagaggatggtggctggcaggtccatggcgtgaccagctttgtttctgcctttggctgcaacacccgcaggaagcccacggtgttcactcgagtctccgccttcatcgactggattgaggagaccatagcaagccactagaaccaaggcccagctggcagtgctgatcgatcccacatcctgaataaagaataaagatctctcagaaaattccaa

SEQ ID NO: 262032 - DNA, 1290 bp, Homo sapiens
gagtgagaactgtggccttggaccatgggagacctgcatttccaccacctgttctgggagtggggcccagtcagccccctttgcttaccttctgccctatattagagccccaggttctgtgcccttttcctatcatcgcaaaactcatgatgctccggctgctcagttccctcctccttgtggccgttgcctcaggctatggcccaccttcctctcgcccttccagccgcgttgtcaatggtgaggatgcggtcccctacagctggccctggcaggtttccctgcagtatgagaaaagtggaagcttctaccacacgtgtggcggtagcctcatcgcccccgactgggttgtgactgccggccactgcatctcgagctcctggacctaccaggtggtgttgggcgagtacgaccgtgctgtgaaggagggccccgagcaggtgatccccatcaactctggggacctctttgtgcatccactctggaaccgctcgtgtgtggcctgtggcaatgacatcgccctcatcaagctctcacgcagcgcccagctgggagacgccgtccagctcgcctcactccctcccgctggtgacatccttcccaacgagacaccctgctacatcaccggctggggccgtctctataccaacgggccactcccagacaagctgcaggaggccctgctgcccgtggtggactatgaacactgctccaggtggaactggtggggttcctccgtgaagaagaccatggtgtgtgctggaggggacatccgctccggctgcaacggtgactctggaggacccctcaactgccccacagaggatggtggctggcaggtccatggcgtgaccagctttgtttctgcctttggctgcaacacccgcaggaagcccacggtgttcactcgagtctccgccttcatcgactggattgaggagaccatagcaagccactagaaccaaggcccagctggcagtgctgatcgatcccacatcctgaataaagaataaagatctctcagaaaattccaaaaaaaaaagaaaaagacaacaacgacaaaaaaaacgttgtttgggccgcgccgtggcccctcgagaaaagttcttttagaacacatgcgttgggggcgggcgcgccccgttgcgtgagggcacctgggccacaagcgggtccagggaaatccggcccagcaccgggcggggtttcctccccataaaaaagccgcgcggaccggggctcgaaccactccgggggtcgagcctacggcctacggccagggcgatatac

SEQ ID NO: 262033 - DNA, 1224 bp, Homo sapiens
gagtgagaactgtggccttggaccatgggagacctgcatttccaccacctgttctgggagtggggcccagtcagccccctttgcttaccttctgccctatattagagccccaggttctgtgcccttttcctatcatcgcaaaactcatgatgctccggctgctcagttccctcctccttgtggccgttgcctcaggctatggcccaccttcctctcgcccttccagccgcgttgtcaatggtgaggatgcggtcccctacagctggccctggcaggtttccctgcagtatgagaaaagtggaagcttctaccacacgtgtggcggtagcctcatcgcccccgactgggttgtgactgccggccactgcatctcgagctcctggacctaccaggtggtgttgggcgagtacgaccgtgctgtgaaggagggccccgagcaggtgatccccatcaactctggggacctctttgtgcatccactctggaaccgctcgtgtgtggcctgtggcaatgacatcgccctcatcaagctctcacgcagcgcccagctgggagacgccgtccagctcgcctcactccctcccgctggtgacatccttcccaacgagacaccctgctacatcaccggctggggccgtctctataccaacgggccactcccagacaagctgcaggaggccctgctgcccgtggtggactatgaacactgctccaggtggaactggtggggttcctccgtgaagaagaccatggtgtgtgctggaggggacatccgctccggctgcaacggtgactctggaggacccctcaactgccccacagaggatggtggctggcaggtccatggcgtgaccagctttgtttctgcctttggctgcaacacccgcaggaagcccacggtgttcactcgagtctccgccttcatcgactggattgaggagaccatagcaagccactagaaccaaggcccagctggcagtgctgatcgatcccacatcctgaataaagaataaagatctctcagaaaattccaaaacaacacacaaacaaaaaaaaaaacaaaaccttgttgcggccgccgccttggcgccctcaggaaaaacgttttctaacacccctctccggtggggcgcgcgggggcccccgtatgggttagctgcgccaccggggccaacacgcggggtccccaaagggagaaccccggggccaggaacaaggcgcctg

SEQ ID NO: 262034 - DNA, 1416 bp, Homo sapiens
  misc_feature (1416)..(1416): n is a, c, g, or t
gagtgagaactgtggccttggaccatgggagacctgcatttccaccacctgttctgggagtggggcccagtcagccccctttgcttaccttctgccctatattagagccccaggttctgtgcccttttcctatcatcgcaaaactcatgatgctccggctgctcagttccctcctccttgtggccgttgcctcaggctatggcccaccttcctctcgcccttccagccgcgttgtcaatggtgaggatgcggtcccctacagctggccctggcaggtttccctgcagtatgagaaaagtggaagcttctaccacacgtgtggcggtagcctcatcgcccccgactgggttgtgactgccggccactgcatctcgagctcctggacctaccaggtggtgttgggcgagtacgaccgtgctgtgaaggagggccccgagcaggtgatccccatcaactctggggacctctttgtgcatccactctggaaccgctcgtgtgtggcctgtggcaatgacatcgccctcatcaagctctcacgcagcgcccagctgggagacgccgtccagctcgcctcactccctcccgctggtgacatccttcccaacgagacaccctgctacatcaccggctggggccgtctctataccaacgggccactcccagacaagctgcaggaggccctgctgcccgtggtggactatgaacactgctccaggtggaactggtggggttcctccgtgaagaagaccatggtgtgtgctggaggggacatccgctccggctgcaacggtgactctggaggacccctcaactgccccacagaggatggtggctggcaggtccatggcgtgaccagctttgtttctgcctttggctgcaacacccgcaggaagcccacggtgttcactcgagtctccgccttcatcgactggattgaggagaccatagcaagccactagaaccaaggcccagctggcagtgctgatcgatcccacatcctgaataaagaataaagatctctcagaaaattccaaaaaaaaaaaaaaaaaaaaaaaaaaaaaaagggggggggggcgccgcgggcccccgcgaagaaagtttttaaaacaccaatgcgcggtgggggcgcgcgggggccccaaaggaggaaagagggacacacggggcgccaaagagcgggtgttcccaggagggaacaccgcggggcgcacagcagacaaaggggcgggggattctctccacacacaaaataaaaaagcgcgcgcgggggggaacccgagggcggtctgggaacaaatcctccgaagagggggaggtcagagaaggggcaccaacacgggggggccctaatcacccggggaggccaaagggaggccccggaatatcaaaattaaggcgcccgggcccggggggcgn

SEQ ID NO: 262035 - DNA, 1171 bp, Homo sapiens
gagtgagaactgtggccttggaccatgggagacctgcatttccaccacctgttctgggagtggggcccagtcagccccctttgcttaccttctgccctatattagagccccaggttctgtgcccttttcctatcatcgcaaaactcatgatgctccggctgctcagttccctcctccttgtggccgttgcctcaggctatggcccaccttcctctcgcccttccagccgcgttgtcaatggtgaggatgcggtcccctacagctggccctggcaggtttccctgcagtatgagaaaagtggaagcttctaccacacgtgtggcggtagcctcatcgcccccgactgggttgtgactgccggccactgcatctcgagctcctggacctaccaggtggtgttgggcgagtacgaccgtgctgtgaaggagggccccgagcaggtgatccccatcaactctggggacctctttgtgcatccactctggaaccgctcgtgtgtggcctgtggcaatgacatcgccctcatcaagctctcacgcagcgcccagctgggagacgccgtccagctcgcctcactccctcccgctggtgacatccttcccaacgagacaccctgctacatcaccggctggggccgtctctataccaacgggccactcccagacaagctgcaggaggccctgctgcccgtggtggactatgaacactgctccaggtggaactggtggggttcctccgtgaagaagaccatggtgtgtgctggaggggacatccgctccggctgcaacggtgactctggaggacccctcaactgccccacagaggatggtggctggcaggtccatggcgtgaccagctttgtttctgcctttggctgcaacacccgcaggaagcccacggtgttcactcgagtctccgccttcatcgactggattgaggagaaactacagggcaacaaggcaccagagtcccggacttaggaccactgtgtgtgattcaccgtgaacactggcatattaaaggctctgagaagtcctgtaggaaaggacaatttgactttgtttgagctcatattttccaatcccatctgacctttagttcttcactgagtgcccactgggttatattctgggagccgaggccacagcagtgaacaaagcacacaaaaccc

SEQ ID NO: 262036 - DNA, 947 bp, Homo sapiens
tttttctagagatgaggtcttgctatgttgcccaggctggtctcaaactcccgggctcaagcgatcctcccgcctcggcctctcaaagcactaggattacagcctcaggctatggcccaccttcctctcgcccttccagccgcgttgtcaatggtgaggatgcggtcccctacagctggccctggcaggtttccctgcagtatgagaaaagtggaagcttctaccacacgtgtggcggtagcctcatcgcccccgactgggttgtgactgccggccactgcatctcgagctcctggacctaccaggtggtgttgggcgagtacgaccgtgctgtgaaggagggccccgagcaggtgatccccatcaactctggggacctctttgtgcatccactctggaaccgctcgtgtgtggcctgtggcaatgacatcgccctcatcaagctctcacgcagcgcccagctgggagacgccgtccagctcgcctcactccctcccgctggtgacatccttcccaacgagacaccctgctacatcaccggctggggccgtctctataccaacgggccactcccagacaagctgcaggaggccctgctgcccgtggtggactatgaacactgctccaggtggaactggtggggttcctccgtgaagaagaccatggtgtgtgctggaggggacatccgctccggctgcaacggtgactctggaggacccctcaactgccccacagaggatggtggctggcaggtccatggcgtgaccagctttgtttctgcctttggctgcaacacccgcaggaagcccacggtgttcactcgagtctccgccttcatcgactggattgaggagaccatagcaagccactagaaccaaggcccagctggcagtgctgatcgatcccacatcctgaataaagaataaagatctctcagaaaattccaa

SEQ ID NO: 262037 - DNA, 896 bp, Homo sapiens
  misc_feature (2)..(2): n is a, c, g, or t
  misc_feature (10)..(10): n is a, c, g, or t
  misc_feature (12)..(12): n is a, c, g, or t
gngcaggggncnacgagcggctgctcagttccctcctccttgtggccgttgcctcaggctatggcccaccttcctctcgcccttccagccgcgttgtcaatggtgaggatgcggtcccctacagctggccctggcaggtttccctgcagtatgagaaaagtggaagcttctaccacacgtgtggcggtagcctcatcgcccccgactgggttgtgactgccggccactgcatctcgagctcctggacctaccaggtggtgttgggcgagtacgaccgtgctgtgaaggagggccccgagcaggtgatccccatcaactctggggacctctttgtgcatccactctggaaccgctcgtgtgtggcctgtggcaatgacatcgccctcatcaagctctcacgcagcgcccagctgggagacgccgtccagctcgcctcactccctcccgctggtgacatccttcccaacgagacaccctgctacatcaccggctggggccgtctctataccaacgggccactcccagacaagctgcaggaggccctgctgcccgtggtggactatgaacactgctccaggtggaactggtggggttcctccgtgaagaagaccatggtgtgtgctggaggggacatccgctccggctgcaacggtgactctggaggacccctcaactgccccacagaggatggtggctggcaggtccatggcgtgaccagctttgtttctgcctttggctgcaacacccgcaggaagcccacggtgttcactcgagtctccgccttcatcgactggattgaggagaccatagcaagccactagaaccaaggcccagctggcagtgctgatcgatcccacatcctgaataaagaataaagatctctcagaaaattccaa

SEQ ID NO: 262038 - DNA, 377 bp, Homo sapiens
tcattacttcattatactctgttagctacaatatagatttgtttgctctaatagaaccccccaaaatgttattcagcatgccagaagtttccatacctctgatgtggaagtccaagctggcacagggacactcctccccaaaggggtcagagacctaggctctgtcttattctatcatactcaacacgtggcttccatttcatgatctaagacagctgctgcagttcctgcaatcaccttcacatccctgctcataggaagaagaaaagggagttcaggcccttctctttaaaggccattctgtggacgttgcatctgtcacttttcacatcccagtagccggaacttggtcatagaatcacacctagcttcaaaag

SEQ ID NO: 262039 - DNA, 205 bp, Homo sapiens
gttatcacgtaagttcattcatatatgtttatctctggggatggggggacaacttcactgtggacttaattctactggagatgagtgaccccattttaagacaacaggatcacaaattattatcacatatcagcagggcagacaatagctacgacctggggctgaaagcaggtaactctatttattctgcaaaaattctgtcttg

SEQ ID NO: 262040 - DNA, 409 bp, Homo sapiens
acatcagcagcactggggaacttgttagaaatgcatattttcaggcccaccccagacttactgagtgggaaactttgggatggagtccattattgtgtgttttagcaagccctgcaggccattctgatgcataccttttaagaagatgtacttcttccagccaagggaagattgaggaaactttggcagagaactgatagtggatattgatattgattgtagatacatgtctaagaaatgagtagagacataatttgaaggacagtatgaaaaacatcatatgtattgtcaaagtagaaagaatacaactaaacatgagaaactaaggaacagagacaggaaaaactagaattaaattattaattgttgtataggtaataggtagaagtcagagagtaccacttaaaac

SEQ ID NO: 262041 - DNA, 524 bp, Homo sapiens
ctgctgcacccatcacatccggctgctgctgctcgcatggcttcggggtatagaaggactcataactgccccaaatccccctcagcccccttcctaccatgtaccacatccgcattcactgctgtgcaggaatccccttactccttcctcacaacaccccaatggaagggcagctgttatcacctcatcttatggatgacaaaactgagacacagagtggactagaattttcccacatttcctggcgggcagagctgggactcgaactgaggtcaggctgctcccagagctcacgctaacctccaaaggcattcctcccccagggattttcaatgaggagggtggaggggtgccccggtcctcagctgcaggaggagggcttttgtctgggcacagacaatcccagacagactcttcagctccaagacatgacgatgggggtactgggaggctctcctgcatccagcgtccccattttacaaataaacaaaccgaggcccagaaaagggaagccaggcaccaga

SEQ ID NO: 262042 - DNA, 136 bp, Homo sapiens
ttgattcttatcaactcacatcagtttctgacattcagagatgtctgtgatcaaagctcatatgaagagaattctaaatgttgcatggcaaagaacccaagaactcctggcccaaaccgcatgcagctccccactc

SEQ ID NO: 262043 - DNA, 569 bp, Homo sapiens
gaattgttgagccctgaggttcgacatgaatcgtttatagtgtaactcatctccccaggtgaaggcatagagaagacagatgagtcttctgatctaggtttgtccaggtggaatttttgccaggctggtaagagaagaagacagattgacaaggaagctgatgaggctagccagagagtaactgtaatccagaatgatgtctattggagactttgcccaaagggaaaggaagtgaagatgggaggggatccaagtaaacgtggtgttctggtcaatgcagagaagggttatcatagtcatagtggaatgagccagatagaggaagaatgtggctgggaaaacaggatgcttaaacttgtagtttctggaggtggagcaatttcaggtttgacggtccagggaatgagtggctgtactgggttgagaacaagagtcactggacatgagaagtaagcgggaagccagggtatttaaaaagggacctgtgacttctgaagccttcctagcgaggcagggaatggcttggagaggaaggtccagccagtggcaaaggcctcagtgaacgaagg

SEQ ID NO: 262044 - DNA, 473 bp, Homo sapiens
tttttttttttggaacgaagtttcgctcgttgcccaggctggagcgcaatggcatgatctcagctcactgcaacctctgcctcccgggttcaagcaattctcctgcctcagcctcctgagtagctgggattacaggcgctcgccaccacgcccggctaatttttgtatatttagtagagaccgggtttcaccatgttgaccaggctggtcttgaacttctgacctcaggtgatccacccacctcggcctcccaaagtgctgagatgacaggcatgagccaccatacccggctgtcagtaggtacattaaatgcatttctgacttacaatagtttcgagttatgatgggtttttccagacataatttcactgtaagtcaaggcacatctgtacactgttaactagagactatctgagactccagtacccaccacaaggactagcacagagcaactgcccagtaaggatgggtta

SEQ ID NO: 262045 - DNA, 372 bp, Homo sapiens
gtctgcttttataatatttatgtggagtacaattattttaatagaaaatattctgacaggtcaccatctttcagaaactaagtcttttttttcctgcagatttctttgctttggctttttcccagtcactcacagggaggtatttaaatcgccacagaaaggggaaggtacctaaaatgatctgggagcctgcggtgactggtgagaactaacaggcggaggccgtgtgcgagggttgatgacgtctgacagactgtacctgtgcctttagcgtgtccacaggaagggcatctgcattcaccagcgcagggtgtgagagtgccacagagaagcagaaaaacattgctgaataaaatgaagatcattccaaca

SEQ ID NO: 262046 - DNA, 272 bp, Homo sapiens
caggtgcccccagggatcccgcttgttgtctgcaggccaaacaaccagccagggagcagggaaggctttggagcaccaatcaccacgtgcatttacttcctttccacatgtgccctcgacaactatgaattaggcacccacaaggcactggaggagggtggttaacaagacagatgcaaccccggcccccatgaacttacagccaggcgcggaagaaaagtaagtatcccattcagatcattaaagctgtgatgagagataaaaaaaaaaaa

SEQ ID NO: 262047 - DNA, 580 bp, Homo sapiens
tgtgactcagtgatgggccagtggaaacggctgttcccacagttggacagaacgaggtttgtgtcctggtgttgctcacagacgtctcaaccagacggagtccggactccaccacgtggcaataacgagaagatggcagcttcccgcctgggaatggagaactcgagtggccacccaggatgacaggcagcctccccacccaagggggatccttaagcagttggagtgggtcctggggccagcccagggctggcacggggttcgcatttcacttctgggccatggcaagctctggttcagagccttagctcggcagcagcccctctgcaccaagtcacttggcccctgccacagcatcacagcctggagcccaactggatgagcccagctcatgcttctgaagcacggctattctgacagccctggtcttggtgctcatcacttgcttctcactgtgctttacaggcagaatggggacaagagctttaagttctatcattgtgattcttttttttctgctgcagtcccttatatgtagcctccgaccaaatacaacttttgcctttgtgctattgctgga

SEQ ID NO: 262048 - DNA, 417 bp, Homo sapiens
ctctactgcaagcaaggctgtagacaggttgtagtgacctagcctgcaaaaatgagctccagacacccctgagcaaggttaaaagaaaaaaaacaaattcctttactgtctctcctgtactgaactattagttatgactatgtttgccaatgcttatatttagtaaaatttataaattcctgtttttctttcaacgtagctggaaggtcactagctatacaaggccacaagttatgccaagtcaacagttatgccataaattacatgacttgtaatttatgtaattaccgcctttgttttgctcttgtatactagcctatataagctaaactctgtctttgtttggggctcaggtttttaaatgtgaatccactgagccagtgcgtaccttaaaataaatatcctcctatattcacc

SEQ ID NO: 262049 - DNA, 797 bp, Homo sapiens
  misc_feature (377)..(377): n is a, c, g, or t
  misc_feature (386)..(386): n is a, c, g, or t
  misc_feature (410)..(410): n is a, c, g, or t
  misc_feature (421)..(421): n is a, c, g, or t
  misc_feature (437)..(437): n is a, c, g, or t
  misc_feature (489)..(489): n is a, c, g, or t
  misc_feature (524)..(524): n is a, c, g, or t
  misc_feature (739)..(739): n is a, c, g, or t
  misc_feature (745)..(746): n is a, c, g, or t
gatgtgggaaggcagctgaactcggcgcctggaaagatggaggcagcggagacagaggcggaagctgcagccctagaggtcctggctgaggtggcaggcatcttggaacctgtaggcctgcaggaggaggcagaactgccagccaagatcctggttgagtttgtggtggactctcagaagaaagacaagctgctctgcagccagcttcaggtagcggatttcctgcagaacatcctggctcaggaggacactggtgtgtccttcaaggctgttggtctacaacctgctggagatgtaaatttgccatgacttcctggaggacagcagcatggagaaagatcctagaaaaggcctctgacttccctcacctcccaacnatcattacnggaaagactgtgaactcctgagtncagcttgattnctgactacatcccagnaagctctggcatctgtggattaaaatccctggatctctctcagttgtgtatntgtcatcttcatatgctggcaggaacaactattantacagatactcagaagccaataacatgacaggagctgggactggtttgaacacagggtgtgcagatggggaggggggtactggccttgggcctcctatgatgcagacatggtgaattttaattcaaggaagagggagaatgttttaggcaggtggttatatgtgggaagaataatttattcatggatccaatgtttgtggagtcctttctttgtncaaggnnctgcggtgaacaaattttaagtggagtcatgaggttaggatgaagctattt

SEQ ID NO: 262050 - DNA, 758 bp, Homo sapiens
gatgtgggaaggcagctgaactcggcgcctggaaagatggaggcagcggagacagaggcggaagctgcagccctagaggtcctggctgaggtggcaggcatcttggaacctgtaggcctgcaggaggaggcagaactgccagccaagatcctggttgagtttgtggtggactctcagaagaaagacaagctgctctgcagccagcttcaggtagcggatttcctgcagaacatcctggctcaggaggacactgctaagggtctcgaccccttggcttctgaagacacgagccgacagaaggcaattgcagctaaggaacaatggaaagagctgaaggccacctacagggagcacgtagaggccatcaaaattggcctcaccaaggccctgactcagatggaggaagcccagaggaaacggacacaactccgggaagcctttgagcagctccaggccaagaaacaaatggccatggagaaacgcagagcagtccagaaccagtggcagctacaacaggagaagcatctgcagcatctggcggaggtttctgcagaggtgagggagcgtaagacagggactcagcaggagcttgacggggtgtttcagaaacttggaaacctgaagcagcaggcagaaccaggagcggacaagctgcagaggtatcagaccttcctccaggttctgtatacctgcaggataggtgtgtcctggagtgatgtgtagaaaatatcaaatgataaccagagcgattaccacgg

SEQ ID NO: 262051 - DNA, 832 bp, Homo sapiens
  misc_feature (524)..(524): n is a, c, g, or t
  misc_feature (559)..(559): n is a, c, g, or t
  misc_feature (774)..(774): n is a, c, g, or t
  misc_feature (780)..(781): n is a, c, g, or t
gatgtgggaaggcagctgaactcggcgcctggaaagatggaggcagcggagacagaggcggaagctgcagccctagaggtcctggctgaggtggcaggcatcttggaacctgtaggcctgcaggaggaggcagaactgccagccaagatcctggttgagtttgtggtggactctcagaagaaagacaagctgctctgcagccagcttcaggtagcggatttcctgcagaacatcctggctcaggaggacactgctaagggtctcgaccccttggcttctgaagacacgagccgacagaaggcaattgcagctgaggcagagaatcttccagatgataaaccccagcagcggacttgaccccaggagcagagtacaggagacaccatggggagagaccctggtgtgtccttcaaggctgttggtctacaacctgctggagatgtaaatttgccatgacttcctggaggacagcaagctctggcatctgtggattaaaatccctggatctctctcagttgtgtatntgtcatcttcatatgctggcaggaacaactattantacagatactcagaagccaataacatgacaggagctgggactggtttgaacacagggtgtgcagatggggaggggggtactggccttgggcctcctatgatgcagacatggtgaattttaattcaaggaagagggagaatgttttaggcaggtggttatatgtgggaagaataatttattcatggatccaatgtttgtggagtcctttctttgtncaaggnnctgcggtgaacaaattttaagtggagtcatgaggttaggatgaagctattt

SEQ ID NO: 262052 - DNA, 267 bp, Homo sapiens
aaaccaagacggtgaggaaagtgacctctggttgtcctcacagttagaaatgctatggcaacatccacaagttaccttatgtggtctatatttttaaaaagaattcctgaaaagctaataaataatccactccttatttagcatatgatcaaggactatctatacaaatagccgaccagcagtgtttggtgctgccctgtctatggagtagccattcctttattcatttactgtcttaataaacttgtttccactttatagactcct

SEQ ID NO: 262053 - DNA, 327 bp, Homo sapiens
tatttattcatcagcatccccttcaactaaatataagtgtgggcaaagaacagttacagacatggacaggcactcgtttctctagaattattaagaatcactggactgtgaaatatcagtgtttcaaaatttctgatttctcctgtgaggtacttttcatattttattttgataactgaatgcaaatgagcttcagggaaccctttctcacctgtgttctttgcatgctggtacaactgagtctgtttattaaggactattaacaaatacatagcccagtttagaattatacaaatcaactacattaggggagttgccaaaaaaaaa

SEQ ID NO: 262054 - DNA, 436 bp, Homo sapiens
atgtgtcatgcatacctgtgagggagtgtgtgagtgtgcgcacaggcgtaagagtgtgtgctttgagtgtgctgatgagtgtgagggtgtgagcctgtggggggttgcatggggccatgcctggggaggttgtgtatgtgtgagcacatggtgggatgtgactgtgtgcaggccacacaggttactgggggggtaggagcctagaaagagatgaatctggggtgaggggctgtgtgtccacagttctcgggctcctaagataccccaaagttgggcagagaccagttcatggagggtcttgaaagccaggcagaggaatctgggctttaacctcaggagccatagacagcatctaagcagttgtaacctggcaaacactgagtttcagaaggcccccagtatagaccagaaaacctctctctggcttgagtggaaa

SEQ ID NO: 262055 - DNA, 458 bp, Homo sapiens
gagtgatcctcaaaattatagcacattgtttcttaaaagaaataaaaatttaaaaacaaaacagatttgctcaagcctactgattctgaattttaaggataaaaccctgatgtccgacacatgtaacatatttcaaaagagggtatcatgcacattaaagtttgaaagccactcattattgccatctagagtcacctctcaggtttcagatgtgctagctcatgtacccagattcttaggaagctttgatctagcagaatattcagtcaggttttgtgtaggtgcattttgatgacagtaggaaccagtttcagtcaactctgggtggttggttgttgtttttcttacttaagactggccacaatataccccactttgaaatactttatattccatcatcagccaaaagaatatccttatgacataactacttatgacatactactaagtattgtata

SEQ ID NO: 262056 - DNA, 427 bp, Homo sapiens
tcccaaagtgctgagattacaggcgtgagccaccgtgcccggcccgccttggagatttaaaaacaaaaacaaaagcaaagtatttgctgtcctgagttgttggtgagagtgaggacaatccccgtcctccccctttcattccctaatgaagaccctgacccagggggaagaaaaaaattcaagcaccatataaatattttatacataagatttcagtgctccacatcttgtcccacgggaaagtcttcaggggccataacatgcatggagctgtcatctgctataacaacgccttcttctggaatacctcgtgaatgacctgcctgaggcaatcctgattgtgcccaaatagacatggataatactatacatgctgctccataacacaatatttcatggatgtcttcccaattaaatatataaaaat

SEQ ID NO: 262057 - DNA, 443 bp, Homo sapiens
taaatgaaataagctggcaaatcaaattcctcagtcctaagcaacttttaatatagcagttaaattagaactagtatccagaagagatcataaagaaaataaactctagagcaaaaattaaataataattaaacacaaaactttctaacagatgactaacataatggtatttaagctaactctgctatttttctagaacatttagaataaattctgaagctccaagaagctaagatcctatcaccaaactgtgactcagctgtcctgcccacagaatgtttgaagttaccaataaagcactctctcttccccacctgtttttataacaagttcctaagaatcttcagaaataactctttgctgacttttctctcctcagagactttaagaaaagctccttttctatccctgatctagttatctcttctgtgtacaatcttaaa

SEQ ID NO: 262058 - DNA, 514 bp, Homo sapiens
gccatcctcatattctggtcctacttcattattctcaataccatggtgcccatttccctctatgtcagtgttgaaataataagattgggcaacagtttatatatcaactgggatcggaagatgttttatgcaccaaggaacacaccagcacaggtgatacttatgacaaggatggacagagggtgacggtctctgagacagtttatgagacctggtttatcacatgctacagtctggtctacacttccctccctgtcctgtgcatgagtctgtttgatcagtaacccataaggaagctcctaggcagcctggcagcagacctggtgaggggagaagcctctactctgatggagatgggaccttctatggagagaccctgagcctccctccttaccctcgggtgcttccaggatgtgaatgagacatggagcctccatttcccagagctgtatgagccaggccagcacaacctctatttcaacaagaaagaatttgtgaagtgtttaatgcatgg

SEQ ID NO: 262059 - DNA, 454 bp, Homo sapiens
tcccagctgcctcccccatctcaagctccagtcctccctcccagctacccacaagcctagttgctccctttcataactccccaattctaactccctccaagtccttcccagcatcccgaacttctcccagcttccttccactacccagatccttgcctagagagtaggacttcaggaagggtctgtggtcactgctgtgttctctggttccacttctccagtaacccataaggaagctcctaggcagcctggcagcagacctggtgaggggagaagcctctactctgatggagatgggaccttctatggagagaccctgagcctccctccttaccctcgggtgcttccaggatgtgaatgagacatggagcctccatttcccagagctgtatgagccaggccagcacaacctctatttcaacaagaaagaatttgtgaagtgtttaatgcatgg

SEQ ID NO: 262060 - DNA, 346 bp, Homo sapiens
tagtggctatccacttgggaaggatatcccagtctcacatcccagatgacagtggtctgcctagtccaggaattcactgctggagatgacttaacttcagagaacattgccccagaccaatacttcaccattggagatgacttcacctcctgcactggagattactttaccttgtacgcttagcttccccaacaatgccaatgggctgcccctcctaaggcactaacaaatatgaaatgggatatttattgtgtttcttcctttgatattatttctttgatattaggaattctagtatgttttctgagctcactttttgctacacaatgatcctagtatataagat

SEQ ID NO: 262061 - DNA, 440 bp, Homo sapiens
agcaagaaaagaaatgcaaattaaaaccacagtagggcaccattacatatacaagctcattggcaaaaacttaagtctggaaataccaagcgtgggtgagaaagtggagcagttggaactctctacaaagcttctgagagtgcaaaccagcactgctgctctggaaggcagctcagcatcatctgccaaggttgagggtgtgtatcccctatggcacagcagttcctccgtgacgtgtgtactcacagacacttccatatatgtacaccagcataacgtgtgcaagaatcttcggtggcatgtttgacataaccccaatccagaacccaagtatttactgcaagtaaaaacacataaataaattgtggcatattcatgggatccaatattacacatcaatggacataaataaaattctttcattctaaacagaataacaa

SEQ ID NO: 262062 - DNA, 436 bp, Homo sapiens
ggaggtgcgttcattcatacttatgtaacaggagaaaatacggccatgaagttggtgttttccgggggcggtttttccattgtactcagtatgtgctgactgactcctgttacttccacatgtggggaaactggactgtaatttgtggtggtggggaattgcgttcgcgctttcttctggaggttgtagtgcaaaaagcagtttgtctaccaagtgatactttcagcttttacaaatgctgaacaatatccgtggtgtgttttcatgtcacctcctctcccttctttgttagaaaaaaatggaagagcgcgtggatgttttgagatgagaagaggtgcgttcaccaccttcacctccgtgtaggcttgttattaagggaaagggaacaaaggagtctcacttatgtaagatgaccttacatgagaagaagaaattc

SEQ ID NO: 262063 - DNA, 297 bp, Homo sapiens
tttcactctgcaccgtctgcacactctgccatctttaggcccaaaacgagccttctggaatcctcaggctttctaaatgctaaatatacagcattaatcggatcttgcatctctattgaataactaagacacctttatgttgaaatgcagattctccattgaaaggcaaatctttcatttcgaatgtttgaatgagactgggtttgtatttataaaataagttgtatagaagagcatattctgggcctggagtgctttcatttgattgctcaataaatacattttcactcatccaaa

SEQ ID NO: 262064 - DNA, 337 bp, Homo sapiens
agatcattgttgtaggggctgtcctgtaaattgtgagttgcttagcggcatctttagcctcttcccactagatgtcattagcattccctgccccctctccccagctatgacaaccaaaagtgtctccaggcattgcaaatgtcccctggggggcagaatcacccccagttgagaaccatttcctggagtcttcataggccgagctggccaaggcaaactggaaaagatgagggaggaattaaattgatgtggcttatataaaagcttgctgcctgataggttctccaaagttgattggttggttgaataaataatggagccaggtagaagggaacat

SEQ ID NO: 262065 - DNA, 365 bp, Homo sapiens
ccagtcaaaaggcatacgcagagaaggtaaattcatctgtgggtctggtgagagtcactgaaaaaaatgtagtgcttgaggactgtccaaggagagccaattttcaactcatagcctgtgatgctgcgcccaaacaatgagaacagcacactgggcttcatccaaccacggccagagggaaaacagtgatcttgcagatgatgtcctcatcgatagcacagtgaccaagcggccctgcatggtgggggccccttaaaatggttccccttcccttgcaggcctggtcaggtggtgtttgtaaagcaaagggaacccttttagaaatttgccttgaattaaacgattgttgttcatgagaccaagaa

SEQ ID NO: 262066 - DNA, 459 bp, Homo sapiens
caacaaagaattagcagcaagagtgaagtactcttagaaatcaataagcaagaggcaaaagaaagaacaggcatttcacaagagaggaaacaaatatgcccaataaacacaggaagagatgctgatcctaattggtaatttaaaaaatgtaaaacaagaccataatgagatattttatacccatttgatgagcaaaaattaagaagtctaataattccaagtattagtgaggcagtgaatctataggatctcataaattgcatgtagaagcatcagtacaatcaatttcaaaagcaatacagtattaacttgtaaaaatgaacattggttcatattacccagcaattctactctcaagcatatccacccaagagatattcttgttcatctgaacctggaaatatggattaaaatgttcataaaagcgctgtttggaattgaataaaactggaagaaaca

SEQ ID NO: 262067 - DNA, 323 bp, Homo sapiens
gaggatctccataatagaatgcagaagactaaggaaaaagtcaatgaacttgaaaacagaacacgaatacctacataatctgaactatagagagaaaggaggattttattgtctctgaacagaggctcagggacaaataaaaaataacaaatccaacattcacattattgtaatctggaaagaagaggacaaagtggtctttgtgggataaaactttgaacaattaatagctgaaaatggttcaaatttgtcaaaagatataaaccagatttttaaagttcagtaaatgtcaatcaggataaacccaaagaaacccatagcaa

SEQ ID NO: 262068 - DNA, 533 bp, Homo sapiens
gtagacctatatgtattaactttgaaagaaatttatactgtattgatgatttttcaaaaaacaaattgcagaataatttctgtttctctgtttgggttttaatatatttgtgtgtgtgcatgtacccagcatatacagagaggatgggattgtgtttctgtttaaacatacagaaaatgaaaaaaatctgaaaatatgtcatgcaaaggggacacaaataccactagtcatggattagcaatatgaaatgagctttattggtataaagtaagtacttgaagtaataaaacatttatctctgccccttgagttgcctgacccattcttctgcctctaacaactgctaggagtgttcttccagcatccccagtgagctcagtctcttggaaagagtctgtggcacatacaactcacaggaccccacctcaacattataaaggaggagactcacatacctaccatgtggccctaaacaatctagatctgattaaatttcaaggtcaaccatatttctaagacttcaatgatgtaaa

SEQ ID NO: 262069 - DNA, 336 bp, Homo sapiens
acttctatactctcttcaagacccagttcaaacacccctctctccgtgaaccagttccaatccccccaagcagagttcgtcacttttgttataagtggtacctggaggaacccttggcatccaagtgttcaccaagagtcagccatcccctaacctcagctacaggccccagttttcgtgattctctcttctcttttcctctctcactctttgcaccaggcaatctcaccaggttttcccaactcatgtcctaaatattcttagatccacttatctttgcctcatggtcattgccagagctatcacctctccaggattcctgcaatggtccccaca

SEQ ID NO: 262070 - DNA, 1204 bp, Homo sapiens
  misc_feature (1204)..(1204): n is a, c, g, or t
caaagaggaaatggaggttttgcctgagccccctcctccaataaataggaaaaaagacaagagctatgctacagctatgggaccctttcttaggcaagaggcattaagtggggagctcttagcctgcctggtaatacaagattgacagggcaattgggtatataaacccatttcttttaacatttataaaaagttaagaaaaagcattagaggctgaaaccgcgtggccaaatgggtggtaggcagaaggaaatacttggcagcaaaggaagctcgcagacctggagccagcaagtgcttccaggaactcagcctgcacagaggcagcagtgacaaggagccaggcgcagcacaccagagctggcctgatagggaggggcaggaggcgtgcacgaaggtccgcccagcggcagcagggtgagggagcagcacagacaaaaggtggcacagacaaaaagcagcgcctgagcaagcgcaacatgaccgccgccccgggacccgccggctagactctctggctccgcgggtggcccatggcaaaatttcatgtgttccttgtatacaagcgacatcccagattataattctctgctaagatttaagtacaatttaagaatttaaaacacctctttctaataatggccactgttgcttttacactattcccctggcaaagcaagacagaaaaatttgcatttacaataccagctatcaatattgaaaggtcagcttgccgatttcattggaaagtgcttcctcaaggaatgctaaacagtgctgccatgtgtcagtatcatgtaaatcaagctttgttccccagtagaaaagaatttcctcattgcaaggttattcattttatggatgatattctactagcagccccagtggagccagtgcttttaagtttatatacctctgtcataaagaatgcacagctaagtggtttaatcattgcacctgaaaaagcacaaatgtcctctccttggaagtatcttgggtacatacttcctggtcagtaagacctcaaaaggttaaattaaatactagcaacttacacaccttaaatgattatcagaaattactaggtaattttaactggcttcaccccaccttgggcattcctacttataagctgcaaaacctgttttctatcttaaagggtaacacagccctggattctcccagatatttaacccctgcagcn

SEQ ID NO: 262071 - DNA, 359 bp, Homo sapiens
gaataaccacaaaagaaagcaatttttaacaaggaaacataaaggtaatagcagatattaatgaaatgggaggaaaaaatgagatgatccacattaaatcaaaagctgattatgtgaaaatagcaatataggctgggggctgtggctcacgctcgtaatcccagcactttgggaggccaaggccagaggatcacttgaggtcaggagtttgagactagcctggccagcatggtgaaaccctgcctctactaaaaatacaaaaattagctgggtgtggtggtgggcgcctataatcccagctattcaggaggctgagacaggagaatcacttgaacccgagaagcaggaaaaaaaaaaaa

SEQ ID NO: 262072 - DNA, 396 bp, Homo sapiens
cctgaaagcagagagctctgtagttgctcaggaactcgggaagagctaacatatttagagggtcttaaaggaaatagggctttttgactccttgaaggattaatttccttatgtagttttcacataaggtgttttctctaagaaagttcaatcaggagatacactagtcccccttgtcagtgaggatatgattcaagacctccagtgggtgcctgaaactgcaaatagtaccgaatcctatatatactgtgttttttcttgtacatacatacctatgataaagtttaatttagaaattaggcacagtaagagacttctgaacagcagtaactactaaagtagaataattattgtaacaatatactgtaggaaaagttatataaatgtggtctctct

SEQ ID NO: 262073 - DNA, 370 bp, Homo sapiens
ggagctcctgtgttcaagcaatcctcctgcctcggcctccctaaatgctaggattacaggcatgagccaccaggtccagcctaatactggacgactttccttctatcttggaagctctatttatggctcaatacatgcgatgatttaagttagatgacaaagctaaaatctaaagtagattttgtatgttctactgtaaaatttttaataatgttatattttagtgtggagtagaaaatcgtgttggttttgttttttacatgtcaaaatgaagctttttagttttgtaattatataatgttgcagccaagaatgtaggtgttttttttttttcctctcttttctttttttaaaagacaggatcttgcca

SEQ ID NO: 262074 - DNA, 444 bp, Homo sapiens
tgtccggaatgtggtaaatgtgatttggaaaaccaaagagacatgatggtggagaataaggagagttgtcagaaaggtttccctgcagataaacttttaaagatctcaacctgtggacgggaaatgtggggttggagcccccacacagagtccccactggcacagtggctcatgcctgtaatcccagcacttctagaggctgaggcgggtgtattgcttgagcccagaagtttgagagcagcctgggcaacgtggtgaaaccctgtctctacaaaaaatttaaaaaattagccaggcatgagggtacacacctgtagtcccagctactcagggggctgaggcgggaggattgcttgagcctgggaagtggaggctgcagtgagcctaggtggtgccactgcactccaacctgggggacagaggaggccctgtcccgagtgcggc

SEQ ID NO: 262075 - DNA, 395 bp, Homo sapiens
gtccagactggtgtttcctaggttttcttcttggattcttatagtttgaggtcttatatttaaatatttaacttgtttcaagttgatttttatatatggtgaaaggaaggggttcagttttaatcatctgtatatggctagccagctgtcccagcaccatttattgaataggaagtcctttcctcattgcttatttgtgctaactttgtcaaagattagatggctgtaggtgtggctttatttctgggttctctgtcctgttttattggtttatatgtctgttttgtatgtccatttttatttctgttatgtagcctattagtatagtttgaaatcaggtagtataatgtgtctgcctttgttctttttacttagaattgctatggctattcagg

SEQ ID NO: 262076 - DNA, 124 bp, Homo sapiens
tggagaaggccgggtaactgaagctggtagccagttcatgttgagaagcagaggactaggtctacactggcgccctctgcattcaggtcaagggccaaatgggaatgtgcagaaggcaagggga

SEQ ID NO: 262077 - DNA, 687 bp, Homo sapiens
gcaatatctaatccttatatgtcatcagtcatgattggcaaggcagtgttccctatccctacctaaatcaacgcatttaatccttacaacaactttctaagtaagtagtgttacttttcgcattttacagataaggaaactgaggcatatagaaattctgtaactcgtataaggttgcacattttaaaaggtcagagccaagattcaagtgcaggcagcctgcctcctgaatcttgaggctttctggaataaaaataccacagagcagttcaggctgcatttactagattcttgttagatgcagtcctagctgtccgtagaggcccacatatctcttggggttatgtctcagacctgtgcttctcgaaggaagggaggaaggactttatttatttatttttatttatttatttattttttgagacggagtctcactttgtcgcccaggctggagtgcagtggcaccatctcggctcaccgcaagctccgcctccgaggttcacaccattctcctgcctcagcctccaagtagctgggactacaggcgcccgccaccacgcccggctaattttttgtatttttagtagaggcgaggtttcaccgtgttagccaggatggtctctatctcctgacctcgtcatccgcccatctcggcctcctaaagtgctgggattataggcgtgtgcc

SEQ ID NO: 262078 - DNA, 438 bp, Homo sapiens
gtgcgagggcaaaggaatagaggaatggaaaattaaggtggtagagggctcttgggggcagtgatccactaaaaataaacctgtaataaagtatcccatgatgaagaaaaatttgagaaccactgctttgaaatgattaggttagtagtccagcaggaactgtggaatattctgaacagcacctgatacactattagcgttcaaaataaagttaaatcaccccttcaaaagcagcagtaacaatttttaaaataaccttataagttagtggctcttgagccacatttatacatttgccattttctcatgaatccagtccgtcttcagtgtccgccctggagcatatacacatagcaaatttacttggaactttggttagagtcactggtcttttcatgcagttttaataaacagtttccaaaaaatttaaactttttg

SEQ ID NO: 262079 - DNA, 745 bp, Homo sapiens
acatcctattctggggttagccagaaaaacctttgcctgcagttagctacatgaggatgccaaggacccagacggatagcaagggaggggtaaaaactgaaggcttaccgaaataaaggatatttgaggaagggagttgggatcctagaatattacgagttggaaagaaccataactctggtccaagttcatctcaatgctggaacctttccagaaaaagtattgtgtttttctaacatctgtctttacccattataaggatggttagtgccacatgttccatcaccaagtcccccggccatcaaatcttgactcatttcctggagtttctcactctcagatgagcctctgctattagcacacaagcacagtaaccggagtgcttgtaggatgctcagtaggatacccaggttacctgctcgtgctcagggctaccaaaggcacgtaaagttccttccacagatcctgggatgttgccatgatgacccctctgtgagatagtaacaaaaatgacaaagattccactggcttgtctgggactcttcttcattcatttattcagcaaacattcattggacacttaatatgggctaggcattgttctcggctcttgggacatgtcagcaaacaaaataaagatccgcaccttggcagagcttgcatccaaccaggaggagactagagaataaacattaaacaatacaaataaatagtatagtatattagaaggtaataggtactatta

SEQ ID NO: 262080 - DNA, 1211 bp, Homo sapiens
caattgttatatagcaattaagtaggaggcagcctttattcttagatgtgatgtgttatagtatctgcaatttatactcaaatactacagcaaaatatgtaaatattatgtataagcaaaccaaatgtgacaacatattaacaattgctgaatctagatagaacataactgttcattattcttttaagttttccaaatggatagtggctgtttttaatttatcattgtgggcagaaaaagcgactgacatacctgctttttgggttataaaaagaaaaaagcattacagctatccctgagtcttcaaaactttactctcataatcttcacacccatcaaatctagagatttctttctcacattaattttcagagataggttctgactttataaatggaagtttaatctattttactggatattatctccagttaattattccaatctaaataaggagtgaaaggtaatggacagtttttacaaatttcttacacccacagggccttcctctcacatgaatgtactaaatgtatccccaatgaaaaaaataaagcaatatttattgataaaatgctgtgtgccaaatactcttttaaaggttttatcttttattagcatttcatcctcacaaaaatactattaggtggtactgttattaccattttaaaaaccaaggcacaggggcatgttttgccaaacaccacataggcagaggtggaattatgagaattatattatttatatatatcataaagataggccaaggctggtctttcccatgttcattacattaacagaatcattttccgttacagtgctatataaagtgtggtccatgtgttgacactggcccacaaattgtttgcttctggtctctgcaaaagttatagataccaagagcaagtatttagaaatgtttgcagcaatctgacagagttaactcagttaaataccataataaaaaactggggcttttattttgtatgtctgtttttttcttttcatttttctggtaatctatttatttatttatttaagagacagagtcttgctctgttgcccaagctagagtgcagtggtgcgatctcagctcactgcaacctctgccacttaggttcatgcaattttcctgcctcagcctcctgagtagctgggattacaggtgtgagccactgtgcctggcccgcattttatttatttatttagagaca

SEQ ID NO: 262081 - DNA, 744 bp, Homo sapiens
gcagctccgccggcctcggcgccccctcgcgcccccgcttgctcccgggagccgctcctctgcctctgggccgtccggttgtggcaggttatggcaaacttgccctcaatctcgttccaggccacaataaagacgaatttgtgtttctcgcgctcgtcgaacacatggggccgcacagccacccagtccgactcgagcgtctcctccagcgcgaacgacatggtggctccggcttctcgccgcggggaagggccgccggcccggcccgcccgaggactccccgctggctgcgccgcgccccccgctcaccctcgccgggcgccttcagccatcttagtgcgccggccggctctcccggctcgttcgcctgtccctccgcgccccgaccgccgagctcctttgtggcgcggatcgagagaaggacaataagcgtcccgggagcaggtagttcacatggtcacctgcggccggatctgtttacaagctccgcgctgccgcagcgcctcgcggccgcccgccgccccccgcgcgaggccgtggagctgcgtctgcggcgctccggtggtgaggcgcgggtcccgcggggtcaggccggcgctgtatgcgtcccggtcgctcgcccaggtcaagatccccgcccccgcccctggtgctgctgcagaaagcccggagccggcctgactgatgaacccgtctcctaaactctgcgcctcagcatcgccacaatgttgccattcgactgct

SEQ ID NO: 262082 - DNA, 6323 bp, Homo sapiens
cacgaggcctcgtgccgcgtccatttgaacgtctcgcacgccttcctgccattagcactcgagcccgctgctgttgcccgttcttcctccggaatacgggagggagagggaatgataagctgctgcggcccaagagtcactgtgaaggaccccgccgctgccctcgggcctcctcggcccctgcgcctccggggagcagccggggctcgccgcgcctgacgcgtcccgagttatacagaaataatgttgatatttggaacccatgtcgaacttctatgaagaaaggacaacgatgattgcagcaagggatttgcaggaatttgttccttttggtcgagaccactgcaagcaccaccctaatgctttgaaccttcaacttcgccagctgcagccagcttctgaattatggtcttctgatggtgctgctggcttggtgggatcccttcaggaggttacaatccacgagaaacagaaggaaagctggcagttaaggaaaggagtaagtgaaattggagaagatgtggactatgatgaggaactctatgttgctggaaatatggtgatatggagcaaaggaagtaaaagccaggcattggcagtttataaagcatttacagttgacagtcctgttcagcaggcattgtggtgtgacttcattatatcacaggataagtctgaaaaggcctacagtagcaatgaagtagaaaaatgcatatgtatattgcaaagctcatgtattaacatgcatagcatagaaggaaaggattacatagcttcattaccatttcaggttgcaaatgtttggcccactaaatatggattgctgtttgaacgaagcgcttcttcacatgaagtacctccaggttcacccagagaacctttacctactatgttcagcatgctgcacccactagatgaaataactccacttgtttgtaaatctggaagtctttttggttcatcacgggtgcaatatgttgtagatcatgcaatgaaaattgttttcctcaatactgacccctctattgtaatgacttatgatgctgttcaaaatgtgcattctgtgtggactctccggagagtcaaatcagaggaagagaatgttgttttaaagttctctgaacaggggggaaccccacagaatgtggccactagcagctccctcacagcacatctcagaagcctctccaaaggagattcccctgtgacttcacctttccagaattactcctccattcacagccagagtcgctcaacctcatcacccagtctacattctcgctcaccttctatttccaacatggcagctctaagtcgtgctcattctcctgcgttaggagtgcactctttttcaggggtgcaaaggttcaacatttcaagccataatcagtctccaaagagacatagtatttctcattctccaaatagtaattctaatggctcctttcttgcaccagaaacggagccaattgttcctgaactgtgtattgaccatttgtggacagaaacgattactaatataagagagaaaaattcacaagcctcaaaagtgtttattacatctgacctatgtgggcaaaagttcctgtgctttttagtagagtcccagctccagttacgctgtgtaaagtttcaagagagtaatgataaaacccagctcatctttggttcagtgaccaacataccagcaaaggatgcagcaccagtggagaaaatagacaccatgctggtcttggaaggcagtggaaacctggtgctatacacaggagtggttcgggtgggaaaggtttttattcctggactgccagctccctctctgacgatgtccaacacaatgcctcggcccagtactccactagatggcgttagtactccaaagcctcttagtaaactccttggatcattggacgaggttgttctgttgtccccagttccagaactgagggattcttcaaaacttcatgattctctctataatgaggattgtactttccaacagcttggaacttacattcattctatcagagatcctgtccataacagagtcaccctggaactgagtaatggctccatggttaggatcactattcctgaaattgccacctctgagttagtacaaacgtgtttgcaagcaattaagtttatcctgccaaaagaaatagcagttcagatgcttgtcaagtggtacaatgtccacagtgctccaggaggacccagttatcactcagagtggaatttatttgtgacttgtctcatgaacatgatgggttataacacagaccgcttagcatggactagaaattttgactttgaaggatcactttctcctgtcattgcgcccaaaaaagcaaggccttccgagactggatctgatgatgactgggaatatttactaaattcagactaccaccagaatgttgagtctcatcttttgaacagatctttatgtctgagtccttcagaagcttcacagatgaaggatgaggatttttcacagaatctcagtctggattcttctacacttctctttactcacatacctgcaatttttttcgttcttcaccttgtgtatgaggagcttaagttgaatactctaatgggagaaggaatttgttcacttgttgaacttctcgttcagttggcaagggacttaaaattggggccttatgtagatcattactatagagactacccaacgcttgtcagaactactggacaagtgtgcacaattgatccaggtcaaacaggatttatgcatcatccatcattttttacgtctgagccaccaagtatttatcagtgggtgagttcttgtctgaagggtgaaggaatgccaccttatccttacctccctggaatctgtgaaagaagcagacttgtagtcttgagtattgcactgtacatacttggtgatgagagcttggtttctgatgaatcctcacagtatttaaccagaataactatagccccccagaagttgcaagtagaacaagaggaaaacaggtttagtttcaggcattctacatctgtttctagtctagctgaaagattggttgtctggatgactaatgtaggattcactttaagagatttggaaactcttccctttggaattgctcttcccatcagagatgcaatttatcactgtcgtgagcagcctgcctcagactggccagaagctgtctgtctcttgattggacgtcaggatctttccaagcaggcctgcgaaggaaacttacccaaagggaagtctgtgctctcatcagatgttccttcaggaacagaaactgaggaggaagatgacggcatgaatgacatgaatcacgaggtcatgtcattaatatggagtgaagatttaagggtgcaggatgtgcgaaggcttcttcagagtgcgcatcctgtccgtgtcaacgtagtgcagtacccagagctcagtgaccacgagttcatcgaggaaaaggaaaacagattgctccaattgtgtcagcgaactatggctcttcctgtaggacgaggaatgtttaccttgttttcgtaccatcctgttccaacagagccattgcctattcctaaattgaatctgactgggcgtgcccctcctcggaacacaacagtagaccttaatagtggaaacatcgatgtgcctcccaacatgacaagctgggccagctttcataatggtgtggctgctggcctgaagatagctcctgcctcccagatcgactcagcttggattgtttacaataagcccaagcatgctgagttggccaatgagtatgctggctttctcatggctctgggtttgaatgggcaccttaccaagctggcgactctcaatatccatgactacttgaccaagggccatgaaatgacaagcattggactgctacttggtgtttctgctgcaaaactaggcaccatggatatgtctattactcggcttcttagcattcacattcctgctctcttacccccaacgtccacagagctggatgttcctcacaatgtccaagtggctgcagtggttggcattggccttgtatatcaagggacagctcacagacatactgcagaagtcctgttggctgagataggacggcctcctggtcctgaaatggaatactgcactgacagagagtcatactccttagctgctggcttggccctgggcatggtctgcttggggcatggcagcaatttgataggtatgtctgatctcaatgtgcctgagcagctctatcagtacatggttggaggacataggcgctttcaaacaggaatgcatagggagaaacataaatcaccaagttatcaaatcaaagaaggagataccataaatgtggatgtgacttgtccaggtgctactctagctttggctatgatctacttaaaaaccaataacagatctattgcagattggctccgagcccctgacaccatgtatttgttggactttgtgaagccagaatttctcttgcttaggacacttgctcgatgcctgattttgtgggatgatattttaccaaattccaagtgggttgacagcaatgttcctcaaattataagagaaaatagtatctctctcagtgaaatcgaattgccgtgctcagaggatttgaatttggaaactttgtcccaagcacatgtctacataattgcaggagcctgcttgtctctgggttttcgatttgctggctcagaaaacttatcagcatttaactgtttgcataaatttgccaaagattttatgacttatttgtccgcacctaatgcttctgttacaggtcctcataacctagaaacttgtctgagcgtggtgctgctgtctctcgccatggtcatggctggctcaggaaacctaaaggttttgcagctttgtcgcttcttacacatgaaaacgggtggtgaaatgaactatggttttcacttagcccaccacatggcccttggacttctatttttgggaggaggaaggtactctttgagcacatcaaattcttccattgccgctcttctctgtgccctttatccgcacttcccagctcacagcactgacaaccggtatcatctccaggctctccggcacctctatgtgctggccgcggagcccaggcttctagtgcctgtggatgtggacacaaacacgccctgctatgccctcttagaagttacctacaagggcactcagtggtatgaacaaaccaaagaagaattgatggctcctacccttcttccagaactccatcttttaaagcagattaaagtaaaaggcccaagatactgggaactgctcatagatttaagcaaaggaacacaacacttgaagtccatcctttccaaggatggggttttatatgttaaactccgggcgggtcagctctcctacaaagaagatccaatgggatggcaaagtttgttggctcagactgttgctaacaggaactctgaagcccgggctttcaagccagaaacaatctcagcattcacttctgatccagcacttctgtcatttgctgaatatttctgcaagccaactgtgaacatgggtcagaaacaggaaattctggatctcttttcttcagtactctatgaatgtgttacccaggagaccccagagatgttgcctgcatacatagcaatggatcaggctataagaagacttgggagaagagaaatgtctgagacttctgaactttggcagataaagttggtgttagagtttttcagctcccgaagccatcaggagcggctgcagaaccaccctaagcgggggctctttatgaactcggaattcctccctgttgtgaagtgcaccattgataataccctggaccagtggctacaagtcgggggtgatatgtgtgtgcacgcctacctcagcgggcagcccttggaggaatcacagctgagcatgctggcctgcttcctcgtctaccactctgtgccagctccacagcacctgccacctataggactagaagggagcacaagctttgctgaactgctcttcaaatttaagcagctaaaaatgccagtgcgagctttgctgagattggctcctttgcttcttggaaatccacagccaatggtgatgtgaccgtgtctggcggtgaacctaccctgaaacgtgacttctgcacaacaaacgtgaccaaacatcaaagctaaagcaatgtttataaagttttatggtataactagggggaaatgagctgcacaaacctcaatgtattttaaatctgttgctgtcatcattaacggtatatgacatataaaagcaagttaaaatttacttttgtaaataaagtttttggtttgtttcc

SEQ ID NO: 262083 - DNA, 691 bp, Homo sapiens
cacgaggcctcgtgccgcgtccatttgaacgtctcgcacgccttcctgccattagcactcgagcccgctgctgttgcccgttcttcctccggaatacgggagggagagggaatgataagctgctgcggcccaagagtcactgtgaaggaccccgccgctgccctcgggcctcctcggcccctgcgcctccggggagcagccggggctcgccgcgcctgacgcgtcccgagttatacagaaataatgttgatatttggaacccatgtcgaacttctatgaagaaaggacaacgatgattgcagcaagggatttgcaggaatttgttccttttggtcgagaccactgcaagcaccaccctaatgctttgaaccttcaacttcgccagctgcagccagcttctgaattatggtcttctgatggtgctgctggcttggtgggatcccttcaggaggttacaatccacgagaaacagaaggttccattgagtttcccattgtgtttttgaaatgtagagtgatataatctacttgtaatttaaggctactaagatgcaactgagagatcggtgtgatgccacttctagagtagagttaaggtgtggtaatttcaataaatgttgaaaataatgactttattacattgtcatagcgacttatttagataccctctataacttgtggttttatttatt

SEQ ID NO: 262084 - DNA, 6416 bp, Homo sapiens
tcaagggcacctttgcccacctgagtgaactggactgtgacaagccgcatgtggatcctgagaacttcaagctcctgggaaatgtgctggtgaccgcattggcaatccaggtgctttatagcatctcccaaggaagttagcaccttcttgccatgtgccttgactttggggttgcccatgatggaagaggcagaggacaggttgtcaaaactgtcgaagaacctctgggtccatgggtagacaaccaggagccttcccagggtttaacctccagcatcttccacattcaccatgccccacaagcttgtgataggcgtaccgagttatacagaaataatgttgatatttggaacccatgtcgaacttctatgaagaaaggacaacgatgattgcagcaagggatttgcaggaatttgttccttttggtcgagaccactgcaagcaccaccctaatgctttgaaccttcaacttcgccagctgcagccagcttctgaattatggtcttctgatggtgctgctggcttggtgggatcccttcaggaggttacaatccacgagaaacagaaggaaagctggcagttaaggaaaggagtaagtgaaattggagaagatgtggactatgatgaggaactctatgttgctggaaatatggtgatatggagcaaaggaagtaaaagccaggcattggcagtttataaagcatttacagttgacagtcctgttcagcaggcattgtggtgtgacttcattatatcacaggataagtctgaaaaggcctacagtagcaatgaagtagaaaaatgcatatgtatattgcaaagctcatgtattaacatgcatagcatagaaggaaaggattacatagcttcattaccatttcaggttgcaaatgtttggcccactaaatatggattgctgtttgaacgaagcgcttcttcacatgaagtacctccaggttcacccagagaacctttacctactatgttcagcatgctgcacccactagatgaaataactccacttgtttgtaaatctggaagtctttttggttcatcacgggtgcaatatgttgtagatcatgcaatgaaaattgttttcctcaatactgacccctctattgtaatgacttatgatgctgttcaaaatgtgcattctgtgtggactctccggagagtcaaatcagaggaagagaatgttgttttaaagttctctgaacaggggggaaccccacagaatgtggccactagcagctccctcacagcacatctcagaagcctctccaaaggagattcccctgtgacttcacctttccagaattactcctccattcacagccagagtcgctcaacctcatcacccagtctacattctcgctcaccttctatttccaacatggcagctctaagtcgtgctcattctcctgcgttaggagtgcactctttttcaggggtgcaaaggttcaacatttcaagccataatcagtctccaaagagacatagtatttctcattctccaaatagtaattctaatggctcctttcttgcaccagaaacggagccaattgttcctgaactgtgtattgaccatttgtggacagaaacgattactaatataagagagaaaaattcacaagcctcaaaagtgtttattacatctgacctatgtgggcaaaagttcctgtgctttttagtagagtcccagctccagttacgctgtgtaaagtttcaagagagtaatgataaaacccagctcatctttggttcagtgaccaacataccagcaaaggatgcagcaccagtggagaaaatagacaccatgctggtcttggaaggcagtggaaacctggtgctatacacaggagtggttcgggtgggaaaggtttttattcctggactgccagctccctctctgacgatgtccaacacaatgcctcggcccagtactccactagatggcgttagtactccaaagcctcttagtaaactccttggatcattggacgaggttgttctgttgtccccagttccagaactgagggattcttcaaaacttcatgattctctctataatgaggattgtactttccaacagcttggaacttacattcattctatcagagatcctgtccataacagagtcaccctggaactgagtaatggctccatggttaggatcactattcctgaaattgccacctctgagttagtacaaacgtgtttgcaagcaattaagtttatcctgccaaaagaaatagcagttcagatgcttgtcaagtggtacaatgtccacagtgctccaggaggacccagttatcactcagagtggaatttatttgtgacttgtctcatgaacatgatgggttataacacagaccgcttagcatggactagaaattttgactttgaaggatcactttctcctgtcattgcgcccaaaaaagcaaggccttccgagactggatctgatgatgactgggaatatttactaaattcagactaccaccagaatgttgagtctcatcttttgaacagatctttatgtctgagtccttcagaagcttcacagatgaaggatgaggatttttcacagaatctcagtctggattcttctacacttctctttactcacatacctgcaatttttttcgttcttcaccttgtgtatgaggagcttaagttgaatactctaatgggagaaggaatttgttcacttgttgaacttctcgttcagttggcaagggacttaaaattggggccttatgtagatcattactatagagactacccaacgcttgtcagaactactggacaagtgtgcacaattgatccaggtcaaacaggatttatgcatcatccatcattttttacgtctgagccaccaagtatttatcagtgggtgagttcttgtctgaagggtgaaggaatgccaccttatccttacctccctggaatctgtgaaagaagcagacttgtagtcttgagtattgcactgtacatacttggtgatgagagcttggtttctgatgaatcctcacagtatttaaccagaataactatagccccccagaagttgcaagtagaacaagaggaaaacaggtttagtttcaggcattctacatctgtttctagtctagctgaaagattggttgtctggatgactaatgtaggattcactttaagagatttggaaactcttccctttggaattgctcttcccatcagagatgcaatttatcactgtcgtgagcagcctgcctcagactggccagaagctgtctgtctcttgattggacgtcaggatctttccaagcaggcctgcgaaggaaacttacccaaagggaagtctgtgctctcatcagatgttccttcaggaacagaaactgaggaggaagatgacggcatgaatgacatgaatcacgaggtcatgtcattaatatggagtgaagatttaagggtgcaggatgtgcgaaggcttcttcagagtgcgcatcctgtccgtgtcaacgtagtgcagtacccagagctcagtgaccacgagttcatcgaggaaaaggaaaacagattgctccaattgtgtcagcgaactatggctcttcctgtaggacgaggaatgtttaccttgttttcgtaccatcctgttccaacagagccattgcctattcctaaattgaatctgactgggcgtgcccctcctcggaacacaacagtagaccttaatagtggaaacatcgatgtgcctcccaacatgacaagctgggccagctttcataatggtgtggctgctggcctgaagatagctcctgcctcccagatcgactcagcttggattgtttacaataagcccaagcatgctgagttggccaatgagtatgctggctttctcatggctctgggtttgaatgggcaccttaccaagctggcgactctcaatatccatgactacttgaccaagggccatgaaatgacaagcattggactgctacttggtgtttctgctgcaaaactaggcaccatggatatgtctattactcggcttcttagcattcacattcctgctctcttacccccaacgtccacagagctggatgttcctcacaatgtccaagtggctgcagtggttggcattggccttgtatatcaagggacagctcacagacatactgcagaagtcctgttggctgagataggacggcctcctggtcctgaaatggaatactgcactgacagagagtcatactccttagctgctggcttggccctgggcatggtctgcttggggcatggcagcaatttgataggtatgtctgatctcaatgtgcctgagcagctctatcagtacatggttggaggacataggcgctttcaaacaggaatgcatagggagaaacataaatcaccaagttatcaaatcaaagaaggagataccataaatgtggatgtgacttgtccaggtgctactctagctttggctatgatctacttaaaaaccaataacagatctattgcagattggctccgagcccctgacaccatgtatttgttggactttgtgaagccagaatttctcttgcttaggacacttgctcgatgcctgattttgtgggatgatattttaccaaattccaagtgggttgacagcaatgttcctcaaattataagagaaaatagtatctctctcagtgaaatcgaattgccgtgctcagaggatttgaatttggaaactttgtcccaagcacatgtctacataattgcaggagcctgcttgtctctgggttttcgatttgctggctcagaaaacttatcagcatttaactgtttgcataaatttgccaaagattttatgacttatttgtccgcacctaatgcttctgttacaggtcctcataacctagaaacttgtctgagcgtggtgctgctgtctctcgccatggtcatggctggctcaggaaacctaaaggttttgcagctttgtcgcttcttacacatgaaaacgggtggtgaaatgaactatggttttcacttagcccaccacatggcccttggacttctatttttgggaggaggaaggtactctttgagcacatcaaattcttccattgccgctcttctctgtgccctttatccgcacttcccagctcacagcactgacaaccggtatcatctccaggctctccggcacctctatgtgctggccgcggagcccaggcttctagtgcctgtggatgtggacacaaacacgccctgctatgccctcttagaagttacctacaagggcactcagtggtatgaacaaaccaaagaagaattgatggctcctacccttcttccagaactccatcttttaaagcagattaaagtaaaaggcccaagatactgggaactgctcatagatttaagcaaaggaacacaacacttgaagtccatcctttccaaggatggggttttatatgttaaactccgggcgggtcagctctcctacaaagaagatccaatgggatggcaaagtttgttggctcagactgttgctaacaggaactctgaagcccgggctttcaagccagaaacaatctcagcattcacttctgatccagcacttctgtcatttgctgaatatttctgcaagccaactgtgaacatgggtcagaaacaggaaattctggatctcttttcttcagtactctatgaatgtgttacccaggagaccccagagatgttgcctgcatacatagcaatggatcaggctataagaagacttgggagaagagaaatgtctgagacttctgaactttggcagataaagttggtgttagagtttttcagctcccgaagccatcaggagcggctgcagaaccaccctaagcgggggctctttatgaactcggaattcctccctgttgtgaagtgcaccattgataataccctggaccagtggctacaagtcgggggtgatatgtgtgtgcacgcctacctcagcgggcagcccttggaggaatcacagctgagcatgctggcctgcttcctcgtctaccactctgtgccagctccacagcacctgccacctataggactagaagggagcacaagctttgctgaactgctcttcaaatttaagcagctaaaaatgccagtgcgagctttgctgagattggctcctttgcttcttggaaatccacagccaatggtgatgtgaccgtgtctggcggtgaacctaccctgaaacgtgacttctgcacaacaaacgtgaccaaacatcaaagctaaagcaatgtttataaagttttatggtataactagggggaaatgagctgcacaaacctcaatgtattttaaatctgttgctgtcatcattaacggtatatgacatataaaagcaagttaaaatttacttttgtaaataaagtttttggtttgtttcc

SEQ ID NO: 262085 - DNA, 450 bp, Homo sapiens
atgggaagatgacgtcccctcccaggggccctgggacccaccgcacagctgagctggcccgagctgaagagttgttggagcagcagctggagctgtaccaggccctccttgaagggcaggagggagcctgggaggcccaagccctggtgctcaagatccagaagctgaaggaacagatgaggaggcaccatgggtgctgctcccaaaaccccaaagcaagcatggaagagcagaccaactccagaggaaatgggaagatgacgtcccctcccaggggccctgggacccaccgcacagctgagctggccggctctgcagtcttagtcccattcccctttgatctcacagcaggcagggcacccaggccttataggaattcaccctggaccatgccctaaaataacctcaccccaaatacaataaagggacgaagcacttatagataccaca

SEQ ID NO: 262086 - DNA, 311 bp, Homo sapiens
agctcacacacagagcataacacagttggctacgcaagtgaaaccgaaggcgggctgttccgggaatgctgggcagagactgttgatcgtgttctgagcttttaggaaatcagcacgaggaggcctctcctgaatagctgttagaagagaccatatcttccaggcctggtgtggtggtgcgcacctgtaatgccagcattttgagaggccgaggcgggaggatcccttgaacccaagaatttgaggctgcagtgaaccatgattatgccactgtggccctgatgacagagcaagaccctgtctctttaaaa

SEQ ID NO: 262087 - DNA, 930 bp, Homo sapiens
aaagtcctttttttcctgtttttccatgccatctctactttctacccctgttaaatatgagatgagatccgtaaatgagataaataaagaattttatcaacaagcccaacatggtgaaactttatctctacaaaaaaatagaaagattagccatgtgtggtggcatgtgcctgtcgttccagctactccagaggctgaggtgggaggattacctgagcccagggaagtcaaggctgcagtgaactgtgattacgccactgcactccagcctgggcaacacagtgagaccctgtctcaaaaaaacaataataacataaagtaaaataaaaggaagtcctagcttcctttatgaccattgaatatatgttactcaaatttatacttttggccagggagtgggagtagtggattcccaaaatcccttccagtctgaagtgtaatgattcctttttcccttgagagattacataggtttaaaatataagtctttttttaaagagtgataaaaatttgtggatcataaggaagtttataattttgtgcccatgttggagaatactagcatctgttaatattaatacagcccttttcaaccaccagcaccactattttagataaaattctgctgtgaataaaactttggattggccgggtgcggtggctcacgcctgtaatcccagcactttgggaggccaaggcaggtggatcacagggtcaggagatcgagaccatcctggctaacatggtgaaaccccatctctactaaaaaatacaaaaaattagccgggtgtggtggcgggcgcctgtagtcccagctacttgggaggctaaggcaggagaatggcatgaacttgggaggtggagcttgcagtgagccgagatcgtgccactgcactccagcctgggtgacagagcgagactccgtctcaa

SEQ ID NO: 262088 - DNA, 369 bp, Homo sapiens
aaagtcctttttttcctgtttttccatgccatctctactttctacccctgttaaatatgagatgagatccgtaaatgagataaataaagaattttatcaacaagcccaacatggtgaaactttatctctacaaaaaaatagaaagattagccatgtgtggtggcatgtgcctgtcgttccacttcagccccccaagtggctgcaactataggcgtgcaccactacacttggctaatttttgtatttttgatagagatggggcttccccatattgtccagcctggtctcaaactcctgagctcaagtaatttgcctgcctcggactcccgaagtgctgggattacaggtgtgagccactgcacctggcca

SEQ ID NO: 262089 - DNA, 144 bp, Homo sapiens
caccaacacattgagaggatccttgctggaaaggaacaggctgttcctaagccaaaatctggtgcttctcagaagaaaaagataacccaaaaggaactgaagaggaaaatttagggcaggaaatacaaagcacacaattaatgt

SEQ ID NO: 262090 - DNA, 970 bp, Homo sapiens
gaaaaaaagagcgctatggaccttgactagcagagtaatttcccctgttctgttgttcactttctcataaatgttcattagtaggtaaaaattgcaggggatgatataaactgatgcatctgttttgcaataacatatctaatcttctgctccaggagacgttcacagaatttgacagcaaaacctaatacatattcataaccaatatgctttgtaaccaagggaaattgaggcaagtacaacagaatgaagcatgagaaaccagcatgttaattttaaatttaattatagttataggggaaaaggctgcattttgatagtgtatactcattcagctgtcatggaacattaaagaaaaatcatgccaaatgtctgacaaaagaaatatcaattttggtgaagtggttgataaaactagcaggttatgaagaaaataaaattttgagattcaattatgagcaatttttcatgtagagaaaaaagcattgcaggattctaatgatctgaaataaaatcagacaacttcaaaattatggaaagttatctagtccatacaagataccttttaatggaatgtttcagcatgcttaaaggctatattccatttaaaattaggaaaaacaagttaatgtgatgcttattactttcttattactttcaataacctaaaaacatgtgttattagtaaccagcacacctagtctctacactgaagtgtacatattcaaagagcattgatcttgttgtcttgttcaaagtaattggtaaagaggaagtcaaactgttgctgtttgctgatgatatgactctatacctagaaaacactaaaggctactccaaaaagctcctggaactgataaaagaattcagcaaatttccagatacaaaattaatcagtagcacttctatacaccaaaagcaaccaagcagagaatcaaatcaagaacttaactccttttacaataactgc

SEQ ID NO: 262091 - DNA, 684 bp, Homo sapiens
cagacaaccagataacaaatgggaattacgtgtccattagggaggaaaaattattcagaaaactttaaaagttatgcaataatggttttcctcaagtgtttaagagaacataataattatattactctgaaacaaatgcattataccatgttttttttctcctcagataattaaataacttctgtcaatccccttactcaggtggttactgactccctaattgtgaatacatttctctctggctaataaccaacctactgtgtctggaatttattccttccagtgggttcctggtcttgctgacttcaagaatgaagctgtggacccttgcggtgagtgttacagttcataaagatgttgtgtccggagtttgttccttcagatgttcagatgtgtctggagtttcttccttctcgtgggttcgtgatcttgctgacttcaggagtggaactgcagacgtttgcagtgagtgttacagctcttaaaggtggcgtgtccagagttgtttgttcctcctggggggttcgtggtctcactgacttcaggagtgaagtcacagaccttctcagtgtcacagctcataaaggtagtgtggacccaaagagtgagcagcagcaagaattattgtgaagagagaaagaacaaagcttccactgcatggaaggggacccgagcaggttgctt

SEQ ID NO: 262092 - DNA, 301 bp, Homo sapiens
gctatggtctgaatatttgtgttcccccaaaattcttatgttgaaatcttcactacgaaggggatggaattaggaggtggggcatttgggaggtgattgggtcatgagagtggaaccctcgtgaatggtattagtgcctttataaaagaaactagagagacacccctcactccttctaccatggacacagaaagaagatgccagctatgaatcagaaagtgggccctcaccagacaccaaatctgtcttgatcttggactttttagcttccagaactgtgagaaatacatttctgcaattt

SEQ ID NO: 262093 - DNA, 434 bp, Homo sapiens
tggcagcccgttctgctcccgaatgccccggcttagtcagtctgggatgcggccctggacaccgggctttatgcagctctgaagtgatcccagcacacagcccgggtcaagctcagcgctcggcaaccataggcacccaacaacgggctgcagccatcagtaacaacggcagctccaacgcccagagaactcacggagcagacacacatcagatgaagacgcggaggcctgagcgctgggggtcgcccggggctgcacagcgggtcagaggccaaccctgggcggagccaggccacaccctccctcaaggattcacagtctccccaaagtaaccgcaacgagggaccctcccgtcaccaaacttcctttcagtcacttccgcttgtactaattctggcccaaccgttcattatatttttacaattcttaaaaaa

SEQ ID NO: 262094 - DNA, 104 bp, Homo sapiens
tttaggcaaatctcttaaaagctgggttataactttcaaacttataagcaggaaaaacgaagaaaaaaattaaactaaaggaagagaataaaggagaaaaaaac

SEQ ID NO: 262095 - DNA, 677 bp, Homo sapiens
aagagattcaaagtgcaggtgccatgaatgcctctttaatagctccatgtcgattgattttctgggctacacttcccagcattcaaattgctaaatgcatataaactactagtgaatatttattacctggatttgtgcttttgagtgatcttatgtatagttatgtgcttcagtgatccaacttggggtgcactccaaactttgataaattaaagaccctgcttattccttgagtaatgctacactgacaactgatttagtgaatgccactgtgaaaataataaacctcttggtgaatatatttagacatgtcttggaacctgtacacatcttaaccagggatgttacttggtctttctatgttcaggagtgtgtggagatagaaaatcatacaggattgtaattgttgcctgtgagactaacagaaaattcaagctagtgaagtacgcttatgcatggcacacttctcgccagcaattttaggaagttctacccacaacccatatgtcttttgatatgtgggttaccttggagagagaaaaagaaactctgaacacaagcatgaaatactttagaattttatctagagttggacttgtccgaaagcttttgtataaacttgcttgatgagcaactgttgtccactggtaccttcactgtacaatccacacacaaca

SEQ ID NO: 262096 - DNA, 425 bp, Homo sapiens
tattgactctctaaatgctatgtaatgaatcaactttatttttcttctttttttctgaagggtgtgaaaaatgtaagtcatagactatgttggcaggcctgaacatgggaagatagaaaattgaccgccatctacatacgacataattttctgcttcagcctgagatcccaagaaccactccccttcctatgccatgtagtaaaactcacatcacctcttttagttcatttaaaaggccttcctgtctgcataaagatgatttagtgtgtagcaaatcctgagattgttttaaagcactgtttaaagttcaaactcaacagctggattttttttccctctgctttgaagagagtcactatagttggaacaacttattcacgctagctctttgaaacacctgtgttccaggtgaagccaaaaaaaa

SEQ ID NO: 262097 - DNA, 688 bp, Homo sapiens
gagtttccaggatttttcacttagaagagtgaagattagaatttcagagcaccttctcttcagagtaaacaggcagggaattccctgggatgagactcttaaaatctataaccaagctcctcagatttaccttcaggcccattgcaagccttaatgtttcctgatacattgttatgaccctgccatttctatagcatctttcctgttctgaatccttaaccctctgattatttgtgtccttcatttgactctgatcacatatcaccctatttggagttgcttgggggcttgcacgcaaccaccacacactccttaacctggaagttaggtttctgctttgttgaaacagttctccaagtggtcaccaactccaaagacctgctctgagtctttactctcctccatttacctagggcaggcatttttagccttttaggatatgaccagaatgcagatatgcacatatataccatattacctacaatttgatcatctgttttttttaatcctttctcttaaaagtataaggaacaggtttttatttttttaattatttttatttttatttttatttttgagagggagtctcgctctgtcgcccaggctgcagtgcaatggcaccatctcggctcactgcaagctccgcctcccgggttcatgccattctcctgcctcagcctcccgagta

SEQ ID NO: 262098 - DNA, 239 bp, Homo sapiens
accaaagatggtggtaacaaagccactatgcagaagtttcaggaaggcaatttttggtttaaaaaaagaaagaactatctacaagtctaactgcccccaaaaagatactgggatgcctagaaagtggtgaattcacagtcactagaggttaagtatcagggaccctaaaagaattcctatatttgtgacgtcatactaaataatatccacagttcaaatcaattctaagattctatggt

SEQ ID NO: 262099 - DNA, 456 bp, Homo sapiens
caaaccagtttggagggtaactttgcagtgcagaaagttgaagatgtgcatgactcagtatatactcccaagtacatgatctagaactgcactgttcaatgcagtagccactggccatttgtggctattaaattaaaatgtattaaaattaaattacattcagttctccatttgcatgagccacatttcaagagctcagtagctactctgtgactagtgactactctattgggcagcacaatgaacatttctataattgtaaaatgttctattcaacagaagtgatatagaagaattctcatacacatggacaagaagatgtttataacagctttatttgtaataacagaatactggaaaccattcaaatgttaatacagtcattgataaacaaaatgtggtatgtttatttggaatactcgaatgaaaataaataaaactacatataccaacaag

SEQ ID NO: 262100 - DNA, 333 bp, Homo sapiens
aaatgtgactccagtgttggaggtggggctagtgggaggtacttgggtcatggcggtggatccttcatgaatggctttgtgctgtcctcccagtaatgagtgagttcccactctatgagttcacatgagatctggtggtttaaaagagcctcgcacatcctccctttctcttgttccctcttgccatgtgatacacaagatccccttttgccttccaccatgattgtaagcttcctgaggactcacgcaaagccaagcaggttgttggtgccatgctcgtacagcccacagaattgtgagccaaataaaccatttttctttatgaattaccca

SEQ ID NO: 262101 - DNA, 492 bp, Homo sapiens
cacctggctcagagacagagggaaacagttgggctgggcagccaggctggagccaccagccctcaacttccaccagcatttctgatcctcgctaggttccaggaaacaggcaggtattaacagtagccaattcagcagagaacaaatacctactcatggaaacacagaccagggaggaactgcaagaaataatcccagaggccactgtgcaaccccttggctttacagaaggggaccccgagcctcacgaggctgtgacagcttggccgcccagtccacctgttcttacttgtaagacaacaatctgcagacacatcaattccttcctaccttctcatatttcaaagagactagaacttgaaagggaaaaagtgggaagtaaaaagaaagtggatttgctccattatttattcattaatctatttctgaagcataaaccgtgagccatgcccgccctgaaataatatagtggtgaataaagaatgttaaaga

SEQ ID NO: 262102 - DNA, 312 bp, Homo sapiens
tcttacacagatagcaaatacacagctccttagtttgagcatttagggcctcctgccagtaagttcatgttcttgtcatgcagacctctgtgcaactgctgtttctgtgttgcccttagggtcctgagggccttgcctagaataatcctcatataattcctccgacaggaaagctgtgctttcttccatggctgcattctaaataacaaaggcatgatactatacatagagtaggaatttggacaccaaatcgggattctgtgtccctgtcttattcgacaaaagtgcacattactggggagatgggggcgg

SEQ ID NO: 262103 - DNA, 501 bp, Homo sapiens
ctatacttttcacttttttcatagaatccaagacaagaagaatctttcaagtgttgctaaccagaactgagcagatccaagtagcaatcgtagccaagccattagtccatgtatggagagaccagagagggcatccccacgtggtgatgcctcaagcttcaggagcactcgaccagagtcagtgtagcccttggcagctggtgaagcacaacctgggacaaatggaagctttagcaatgagccgataggtcaaggctaaccagaaagaatgcagctgggtaatgcaagctatcctatcttgtaattaaaagggttttctgtgcggttacctgacgtagttactaaatggcttgcatgaaataacatgcagcattctgcagttactgtgcaattaccttatatcatcaccctacagtcaaaagacaaaaagaaaattcagggtgaagcttttaaccgcaatttgtagcaaagatgtttggaataaaaacacattgcttgtta

SEQ ID NO: 262104 - DNA, 352 bp, Homo sapiens
tcctcctgaggtaatctcatatgtgaggcggaaatgaactggatacacacaggaaccaccgcgcgtctttgcatccaattattcttaaacaattgccccttctccttcggagcatcccttctaccaaccaggatctattgtctcagcacctactttgtgctcagatctttgccaggttctttgggggatacaagaccacggaaagccaggtacctgcgcgtgaacctagtgagactggtgcgttaatggaaggaagggagggcgcccattaaaattacttctcgtgctgcacttttttgtggaatgaaccaaaggcatccggagaagaatatagtattgcacgcctggactt

SEQ ID NO: 262105 - DNA, 366 bp, Homo sapiens
atgcctcaataaagcaacctaagaaaccctgcctgagtttccagcctgctggcccatcctgcagatttagaactgaaaactacatcaactaatttgcctgcattcccactttaccggccagccctacagctttcaaacttgccagcccctacagtcattactggcaacaaggaggtgaaatgtacaagtaaccatcgtagcagaactcagtctttaaaaaaggtttcagtggacctaagaaaaggaagttttaagagagaccatgggaagactgcacattcttgacaacccatccacctatcctgagaaagacattctgtacctattccaccttcagaaaataaacactgtcaattgtggctttta

SEQ ID NO: 262106 - DNA, 317 bp, Homo sapiens
agagcaatctctttgctcaggcttggatactgaacccatgcctggtaaaggctgtttctctgcagggataacaacaacacggaacatggaggttggccaagttcttttttcagctcattttcagcacactctcaattccctcctttgttgattcttacggtttttgtgtacaagtttacttttaatttgggtaccatatcataattcatctgtgaggcccctttaacctatgcacccacaaacacaagcaatgtttaaataaagaaagtaacaggccggatgtgatggctcacacctataatcccagaactttggga

SEQ ID NO: 262107 - DNA, 475 bp, Homo sapiens
gaaggttcaggggatccccaggctggaaggagcctggtttctaaataggacaccgatgccgaccatctttttcaagttaaactttggaaagttccatttgccatgcaaactacccttgccctggatgggttgccccaagagtgacccaggaaagtttaggtggtaaagttgcaaaatcaagtggcttcagggcccaggcagagatttcactttcagtgccctgggatgaaatctctggatgtccacgaggctgacctggacttcccggattgggaggccttgtggtcaaaagccgagtccagtcctgaacaccagatctaaatgttcaagaagactgtgcagatttacaggctaaatcagagtccctggtagctgtttccgacctctgtatggggcttttagagtgaactgtggtctcatccaggcgtttcccgaccattgcatcccacacagggcctcccttctgattttatcg

SEQ ID NO: 262108 - DNA, 387 bp, Homo sapiens
tttcctttttaaaaatgtctctttgggccctttgcccattttttacttgtttgttttcttgctccttaattgagttccttatatattttggacattaactattcatcagatgtatggtgatatggtttagctgtgtcctcacccaaatctcatcttgaattgtagctctcataattcccatgtgttgtaggagggacctggtgggagataattgaatcatggggttggtttccccatactgttctcatggcagtgaataattctcacgagatctgatgattttaaagggggtttcccctttcacttggctctcgttccttctcttgcctgctgccatgtaagacatgacttagctcctcatttgccttccaccgtaattgtgaggcc

SEQ ID NO: 262109 - DNA, 178 bp, Homo sapiens
actcattcaatcccttttccaacaatggagcttttagtcatcccaggtactgctgtacctgtacataaaacgggaatggccatttgcttctttcttatgtaggaactcatgctgtataaggactactctcctttccaaaacatccagtgtgtctgtatctaaggaaggcatcatggcc

SEQ ID NO: 262110 - DNA, 675 bp, Homo sapiens
ggcaaatcataaaccagaagtttaaagaaatagacatgaaaaggtccagaggatttaactttatagatgcaacatcttctaaagtcaaagattagataatatcgtgaatattgagccttggggcattcagtgtctactctaggtcttcaaaccaaaagcagtccacgtcaacagagtttacacaatgaggaaaagtttattcttaaaaacaagcatgacccaagaaattatttagctttttatctaatcccaaaatgaacttcacaaagctttagaacacggttttgctgtttaacatattgttgttttcagtaaggtccaccttatgaaagctgtgactcctttgaggtggtcaaattaaaattttgcagaaagcttacaaattatcacatgcaaagtgaggtacttaaaagggtcaactacataattaacttcacttccaactcagtcatacatgctaatgagatcttgggacaggatgaataaatgcaattttcagttaatcccaaaccacatcatgactatcaattgcaattttaaaaattactaagcattcttcaaaaacactgttctgaaagaatattagaaagatctgactcagctcccctggctagcctctcagtggaggtgctaatgagcagtgaaatggctaagaagggtctagaaagataaaat

SEQ ID NO: 262111 - DNA, 1239 bp, Homo sapiens
ccatgactatctttattcacactcttctctgagcctgaaatgctccactcctcctttccaacctcccaccctcacccctaccccattccctcctcacgccccctgccccctgccccgtgttcatgccctgtgctggctctgcctccacacctgcctgctgcctcccacagagcccgcaaggcaggaacccagaccctggcctcagcacaagctccagtgcagaccccagcacccactctgcctggtcctgctcttccagggcccttccctggtggccgtgtggtcaggctgcacccagtccttttggcctccactgtggacagctatgagagacgcaacaagggtgctgcccgagttatcgggaccctgttgggaactgtcaacaaacactctgtggaggtcaccaattgcttttcagtgtcatacaatgagtcagatgaagtggttgttgacatggaatttgctaagaacatgtatgaactgcataaaaaagtttctccaaatgagctcatcttggggtggtacgctgccggccatgacatcacagagcactctgtgctgatccatgagtactacagccgagaggcccccaaccccatccacctcactgtggacacaagtctccagaacggccatatgagcatcaaagcctatgtcagcactttaatgggtgtccctgggaggaccgtgggagtgttcacacctttgacagtgaaatatgcatactatgacactgaatgcatcagagttgacctgatcatgaagacctgctttagccccaacagagtggttggactctcaagtgacctgcagcaagtaggaggggcatcagctcacatccaggatgccctgagcatagtgttgcaatatgcagaggatatactatctgcaaaggtgtcagctgacaatacaatcaggaaggtgggccacttcctgatgagcctggttaaccaagtaccgaaaatagttcccgatgactttgagaccatgctccacagcaacatcaatgacctgttgatggtggcctacctggccaacctcacacagtcacagattgccctcaatgaaaaacgtgtaaacctgtgaagccaccccaagcagtacgcttgctggtctaagtcttaaccccaggactcagaagtgaaggaaaaatgggttttttgtggtcttgagtcacactgagacagtcaactgtgtgtgactctaataaacgtagcctaccttttgtaaattaaagaa

SEQ ID NO: 262112 - DNA, 5751 bp, Homo sapiens
  misc_feature (1857)..(1857): n is a, c, g, or t
  misc_feature (1887)..(1887): n is a, c, g, or t
  misc_feature (2054)..(2054): n is a, c, g, or t
gcacagccacagcctcctcgcctccccaaactcccagccaaggcgcgcggtggcgtcctcgcgccctcgctcgcgtccccgcccgccgcctgcgcaagccaggcatgaatgctgagacttgcgtctcttactgcgagtcgccggccgctgccatggacgcctactacagcccggtgtcgcagagtcgggagggctcgtcgccttttagggcatttcccggaggcgacaagttcggcacaactttcctgtcggccgccgccaaagcacagggattcggggacgccaagagccgggcccgttacggcgctgggcagcaggacctggcgacacccctggagagtggagctggggcgcggggctcctttaacaagttccagccccagccgtcgaccccgcagccccagccgccgccgcagccgcagccgcagcagcagcagccgcagccccagccgcccgcgcaaccgcatctttacttgcagcgaggcgcctgcaagacgcccccggacggcagcctcaaactccaggaaggcagcagcggccacagcgcggccttgcaggttccctgctacgctaaagagagctccctgggtgagccagagttaccccctgactctgacactgtggggatggacagcagctacctgagtgtcaaggaggctggggtgaaggggccccaggaccgggccagctcagacctccccagcccattggagaaggccgactcagagagcaacaagggcaagaagcggcggaaccggaccaccttcaccagctaccagctggaggagctggagaaggtcttccagaagacccactacccagacgtgtatgcgcgggaacagctggccatgaggacagacctcactgaggcccgcgtgcaggtctggttccagaaccgaagggccaagtggaggaagcgggagcgttttgggcagatgcagcaggttcgaacccacttctccactgcatatgagctgcccctcctcacccgagctgagaactacgcccagattcagaacccgtcctggctcggcaacaacggggctgcctcaccagtgccagcctgcgtggtcccctgcgacccggtgcctgcctgcatgtcccctcatgcccacccccctggctctggggccagcagcgtcaccgacttcctgagtgtgtctggggctggcagtcacgtgggccagacgcacatgggcagcctgtttggagcagccagcctcagcccaggcctcaatggctacgagctcaacggcgagccggaccgcaagacctcgagcatcgcggccctccgcatgaaggccaaggagcacagtgcggccatttcctgggccacatgacagggcacccctgccccgtccccacctcgggacaccatgggccacgcccatgttttccaggcccccagcctcccactcgactttcctcttaggaacctggcctgggccaggggcctgaccctcagcactttcagccgccccaagtctgaggccccgtggactgctgggagggagggggcagcaggcccctggcccctccctggcactgaggccctgacccctgctcccggccacaggcagtggagaaagccaggtggccacgtttttcagcttcgcatccatgataagctgaaagcgctttcttgctcccgcccactcctctgctctgcctagttgaccatgagtcaatgctagatttccatgcagacccagcagcctcaccagcccagtcttgtccatccttcccgctcctagtggggtcccctggtcaccaggccggtggctgtgtgtctgaagcacaggctgccctgcagagccagcctcctgccctcccatctttctctccctgaaagcacanggaatccgacctgctggggccaaggcgccngcctccacctccccccgaacagtgacgagtctgacagagcctggctgactgcatcctggctgtcccctaggctggatacacctggagagagtgggcagaggatgacaggagctggagccgaggacccctgctgccatctagcaatgccagtccccaggggagacacnggccagcccctcactggacactataggggaggagccagacctgagggaggctgagaacacagatgccacaagggctcccatggtgctagaagaaggaaaggtcctgggagagggggaggcatccgggtggggcgtgggcccgggcagtccccccgctctccggcctgcctggcatctggtacagcggggaggtctgggcagctttgttctccatccagagcccagtcaggttccctccaggaggatgcggaggggctcgtctcttccctgccctaccctggcccctccctggggctgctcagcagtgtcccggcatggaaggactcacaacttcggaacacataagctagagcttgggggccgggtggcagagggtcaaaagctgcgtgcaggctttgctagaggacgtgtggccatgctcggcctccaggccctgctatggcctcaaactgactgtcctccctgccatatctgtcagtgtcatcgctgcccagagccttccacggcagatgggggctctgtgtccctccaggcactaggaggtgttgctcttctccacacagctttccacactccgtccttacacttcttccacagggaccaggactctctgccctctctccagcctgcggaagggctcctggcctgggctcctcggtgtggctttgctattgcaaatggggctgtcaggatgccctcctgaaaccaggcttcctgcctccaggaagcggggctctgtgcctgcctgcccgacccatgtagcttgggtctggccctgagccccagccctcacctcagctgggagtacacagtaaccgtccagaggcaggcctgtcagaccccaggtggggggtccctccagcaggcagcgccccgcattgaagcgctcgccttttctaccttctcccttgattcctgtcatggagtagggccaggcccactatgctcagggtcgtggacacagaaaggcctcctgggttgggcggagggtaaacttggtgttgttgaatgagggtctctggggttgggggtgacagtctcccgcctgcctggtgttctcatctgctctagaaaccaggctgaggaagggtctggctgtggcctcccttaatgagtcagacctctttgtgaaccgtagctctaaaatggatcttatagaggtgaaagggtcttggacattgaattaaatgttcttggaggcttggctttaagtgtttcaaatatttgaggatttggagtgacttttgggaagtttttttctagttctgaggttcgctgaaatgacccagactcccccaaaatctagccagggaaaggaagaacttaaggctgggaacagtttccccatttctcccccctttccttctgaaatgctcatggctgaggaaggatgggggaggaaggaactttcaccttgggtctttctcacccatgagagaatcaggacaaagaggaggagagccaggtagctccagagtgggccaggagggagagcaagggaatcaggacaaagaggaggacagacaggtagctccagagcaggcagggagggagagtgagagctttaagggggctcttccgcagtggcccccggcactcagttcctccatgcgtctgctctctggctgggctagacccaagtcaggcaaatttcaacccaaaagcttgagaagaaaaggcgtctattagaagactctgtggctatggctgcctgtcccaacacacccaggaagtgtctaggattaaacatgccaatgtgaaacattcctgttcatctcgtcaaaggcagccacgtaccccaggcctgtcctctgtggcttggcccagcccttgggggccacctaaccacactaagtatgataggaccaccgagttgggaggaagcttagaaaccctctagttagtccagtcccttcacaacagagaagaccctggcccagagtggagacatgactgccctgacctgtatttgccctgagactaggctgagagaggagcctgggacgtgccacccagggtgtgagggcctgggcttcgttggcaccaggggcggccggtgctgcatggagctcccctctccaatgcctcatgggcattcactcagcagctcagttctccagaagagaaccttggggcccagtcccttccaagacaggtggctaggcccaaccttctgcactgcagagcagggggccactgccgtgtcagctcctaggatgactgagcaagtcagggcagctgcccaaggccatctggagctaaagctcatgaaggcaggtggagagaagcatctacctgccacgtggttcattgctatgcgaataagctaagagaggtgaggatttcctttggatacctgcctaagatctcaacagagatggcaacttaaaaatgaagtcgtgggtagccggcagatggatgggcagcctccccacactgacagcctccagtccctgctgggcacaggtctcagcatggcaaggcttgacactaaggtgctgctactgccctccagatgccagcactactcctggggcatgggagcgagggctctggggggcacacagagaggcttgtctccaaggctgaaatagcacttggaggacatgggcttttagaactttccttgaattcttttaactatacttgattctcagcgctcactaccgtgcctccagcttcgggaagcacggtggccaggttagctcaaagacactgcgatggggtaggtgcagcaagtgtggggtgggtccccagcacacacagctgtgatcacactggacccagctccgtgccccatctcctgtcatttcggctgggcagacgagggacgcttccatgaaaactacgtaccctgcttatgcagtcattccctccctgggctagacagtggggggccatcttcgagaacctgaaagacacgcgggggttcctggtctgtttcatggcccttactgtccagtgcaaaggcaaacaggcctagctgggggaggatggttggtaaactggcccccaggataatactctgtgactatccagttaaaaaataagaaggtgacaatgacccatcaaccccacttcacttctttcaggatgctgtagggaggaaaggtgcttccatgacctaacctcggcctctcctttcttccctcttcactcacacacatagagctaggcctttatactactgattttgaaggacagttttcaatgtctaatcatctgtttaggtgtgcagtggttgaaaaaagaaagctgagtgctagaaggaacatgaacctcaaccgttacttattgttctcattgtaagatattttaaccctgtataaatgcaacttttcctttagcttaatggcctggggtggaatattaaaaatatatattaaaaatacagtaaaaatccagaaaaatgtaaaaaaaaaaatgaggtcggttccataaagttttactgcctataccaccatgtaactacattatagcaaaatattaaaagaaacgttcttgccttttaaagtaagttattgcacttacatcttttttgggagaggaggaacacggatgggaaggagacgtaggggcccaggcatggggcaaaatggagtgcagaggtagccgggcactcccagaacaccctttgctggcccagcccaaactgtttggttgttgttatttgcaataaactccttctccttcctcc

SEQ ID NO: 262113 - DNA, 186 bp, Homo sapiens
aagataataggttttttttttaaagaaaagcttggtatccacaacacagaattgtagcaagatccaccagaacatgaagaacactgaagcatattaataaaatctacatctattatgcatccttagcataagatgtgtacttatctcatgatgcaaaacagaagtagagtgtttatatgttaatta

SEQ ID NO: 262114 - DNA, 368 bp, Homo sapiens
atttcttccccctctaattcttataaaaaaactcagtgatctctgtgcatcaaatattaaactgaagctcaacagatcatgattctggcttgtctctctctccagcctgtgggttaacaggtttgcaacatttgcagagaagacaccaaattctcaggagggcagagtttccaaaggtactggtcactcttgctctctttctcctgctcaaaattcagcactagagagtgttacaccattgcacctgcagaggagttcatctgactctagggactacagaggagagagatggacaaactaacaggcattcagaaaatgactaccacaatggggaagaaaatgaaagtcaaaccaaataagcaatggtc

SEQ ID NO: 262115 - DNA, 420 bp, Homo sapiens
ttgtcctcccaagggggacaagacttctccatgtccttccttcccactgggctggtttccaacccaccaccttcatgattcgtgaatgcaaagagaagaccacttagatcggtatgttttgcttccacttggcagccctaggtgctggaggctgcagctctgggtgaaggtgggccctggtctgtggggtatgggcatctgtgagcaccatctgcatgcagccccggaggtcaggtggcagagtctcccatgacaggttccagcagcagaagtcctaaggaagcagcttgtgtctcagatgaggctgtgtacctccgttgcctgtctaggctggaggaagggtgatggcacctttaactggtcccttccttacagatcactaagtgtaagaggccaagcctgcaaagaaaaaaagggaga

SEQ ID NO: 262116 - DNA, 517 bp, Homo sapiens
gcagtcttggtggctcaaatgatgggaataatgttggcattggcacctggattttcctagatggtgaacaactctttatgatttcctttccattttcatagaaattgaatttctaaaaaattaagtgtttgcaaaaataagatgtgtttatatgtgaaacagtttaggttctaggctcagaaaataataagcagattttttggggggcgaggggtaatttgattttattgcattaatatatagtaagcttattttcaaaatatcattcttcaggatcatgatttttcttataaactgtctaacaaactttgcccactttttattatcttgttttttccaatgcaaaagtaatgccttttgacaaaagtgaatgagcagtagaagttcccctccaacacctaaactcaaaacaaaataggaatctttaactgagttgagagaagttctgtgacttgtgactcccagccaatatggcattggtaataattagtaataaaatgaggtatatttgtctata

SEQ ID NO: 262117 - DNA, 683 bp, Homo sapiens
ccctggtctcttattctgtgattataaggatactaacctcatctaaacctaattaacttccaaagccccatctccaaataccatcatgttgggggttaaggcttcatttcgaggaggacacaaaccttcatttcatatactggacattgtgtgaaaaactgtagaagctacagagaagattcactctatcttctagcaggcagatggagtagaatcagaatatatccctccaaacaagaacttcatgaggaagaggatgaggtttagaattttcaaagtctagactcagctttgttctggtttccccaaactttgtgttatacgccaagagggacccaactaagggcctgacatgtttatcagggactctccttccttatgggctctcaaatctaatttttgtgtctgtaacaacttaaaggtgccagcagctccagtcagcttttcagctccttgtttgtttaggttcatagccttttaccttgtaaggcttaagaactgcaaaggtctcaaggaaaactatctcaaagagctgggctaactcctgggttcctctcttctctcgtcaggatctcaatccctcaattcgtagctatcttaatagatatacaccctaactttttgtctccctagctatttgacagtgcagaaagctctaccagcttctgttggtggcagcgtct

SEQ ID NO: 262118 - DNA, 641 bp, Homo sapiens
aaacagcccaggtatccatcagtagctgaatggatcaacaaatgatgatatatttacaccatggaatactaatcagcaataaaaaagcaaactacctttacacacaaacatgggtgagtctccaaaacatcatgttgagcaaaagaaaccccagggcaacatttataagatgatgaaaatgttctgtatcttgatttggatggtagtttcctgggtacataatttgtcaaacttcatcaacatgtaaatgtaagatccgtgcattttactatatttaaactatacctcttcaaaatttttaaaaatagtaatttgcaaataaaggagagatccaccacctgtctgtaatcaactgagtttctaggtagtttctagctcaattgtctgcagtggcggaaacatattacccttaaattatgggaaacttcaaagggacaaggtcctcttcaaagcaaataattctcattttccactgggctagctgatctttgtggagaccactctatcagaaaaagtatgtatgctgatgcactgatgtggggacagaggtttcagccagggcaacttggattgtggtcagcccagctagaaggaagccactggactgtcatagtggtctccaagaacaaaacaacttcctt

SEQ ID NO: 262119 - DNA, 693 bp, Homo sapiens
caacatagtctgaagacttttccactgacatgactttgctttaattgttaccctcacccaaggaactttcccagcaaaaaatctgccatcaaattctactcatccctgaagacctgtttaaatggcattgtctccattaaatcttctaccagagcctagtctgatgcttcatacctagtatgggctcagaatatatctggcgaaaagaattcagtcacttaggattggaacacttaatggtaagttaatagaaattgtacatgagaaattagtccaaaggtagatgaacacttaacttttactctatgaatacgaggtaaagaatgtattattcagggttccccagagaaacagaaccaatatataaagagattttattttaaagtattatctcacacaatgatagaggtggagaaatcccacaatctaagagatgcaggaaagacagtggtgttttttgaaggaaggcctgaaagctggagggccatggtatagaatccaacgtgggcctgaaggctgagaactaggagtgctgagaggagtagatccattccaagctcaaggagtcaggcagagagcaaattcaaacttcctctgcctttttgttctattcaggccctgaatggttttgataatgcccacccacactgggagagaacatctgctttactcagtccactgattcaaacacca

SEQ ID NO: 262120 - DNA, 388 bp, Homo sapiens
ttgcttgatgtcgcccactttcggagggagaaagcgaatgcaagccaaaagcttacaccagaatccccacccctcccccacccctcatggcccccaaacaaaagaattttccgctcctttcggagtccgctggagcagtttctgtgatttcttgcacgaaccaaatgcccgaggcttagcaaagcaaaaacccccttgaaggaaaaaaataaatacttaccactagtcgaatttctaatgagccaagactacaaagataaggtgtttaagagaaacagttgtagaaacagcttaatacattgacctaattagggtaattattttctgctgtttttattcatatgctgacaccttttggaggcaagaatagcttgaggcagccaagaat

SEQ ID NO: 262121 - DNA, 1073 bp, Homo sapiens
tgtagactgcttggttttatgtgttttaattaaatgtcatttccttgaattcattttaaggcttcttgcaagaatccttttcccagtacaattataatgacgaattggggctgagctcactaaaatattcaaatatatgtcctatatatgatagatttttcctatcaagttaaacaattccagggaagccactatttcttaggtacttgttcaaggtcacgatcatgcagcagtaaacaatgttcctgcatggagcttagattctagtggacacagattttgtcatgtccctcattatacttttgctaaattctgaccttacttatcattttgaaggcttcactcctgcatattgcttattggatgtgaaggttctgattgaaacatattgtatcattctttatagggtttctctgttgtgtgttctcttgacaactgtgacattttgggctctgcttgaaactggtcatattcatacaaaaataggttttcttcaatggaattcagataactataaaaactcagctcatgaattcttaaaacatgacattttataaatattctgtgctgtgtggattttctgaggaaaatgggaagtctaagtcttgaagagcacccctatcacactcatcatgattaatagattcatcaccatcatggactctctgatgaatctgaagacaacgaactcttactaaagcccttaccacacacaaaacatttgtatggtttctctccagtatggactctctgatgggcttgaagatgtgaagtctgactgaagctcttaccacacatgccacatttatagggtttctctcccgtgtggatcctctgatgaacatgaagatatgagttccagatgaagcctttcctacattcttcacatttgtatggtttctctcctgtgtggactctctgatgggcttgaagatgtgaactccaactgaagcctttcccacacacatcacatttgtagggattctctccagtatggacttgctgatggtcttggagatgcgaactctgactaaagcccttcccacatgtctcacatttgtatggcttctctc

SEQ ID NO: 262122 - DNA, 3182 bp, Homo sapiens
ttccgctccaggaaggcgaggtcggatctgagatatctcccagggaggttcacttccccggaactctgccttttcccagaaggaggaggggaaaaatgaccaagttccaggaggcagtgacattcaaggatgtggctgtggccttcactgaggaggagctggggctgctggactctgcccagaggaagctgtaccgagatgtgatgctggagaactttaggaacctggtttcagtgggacatcagtccttcaaaccagatatgatatcccagttggagagggaagaaaagctttggatgaaggagcttcaaacccaaagaggtaagcattcaggagacaggaatcaaaatgagatggcaactcttcacaaagcaggattaaggtgcttttcactgggagagctttcatgctggcaaatcaagagacacattgcgagcaaattagccagaagtcaagactccacgataaatattgaaggaaagagctctcagttccccaagcaccatgattccccctgtcaagtgggagcaggagaatctattcaagcttctgtggatgacaactgtctagtgaatcacataggggatcattccagtatcattgaaaatcaagaatttccaactgggaaagttccgaattcttggagtaaaatatatctgaatgagacacagaattatcagagaagttgtaagcagactcagatgaaaaacaaactatgtatatttgctccatatgttgacattttcagttgtatttcacaccaccatgatgataatatagtgcacaaaagagataaagttcatagcaatagtgattgtggtaaagataccctaaaggtatcacctcttacccagcgtagtattcacacaggacagaaaacctaccagggtaatgaatgtgaagaagccttcaatgatagctccagtcttgaacttcataaacaggtacacttgggaaagaagtctccagcgtgtagtacacatgagaaggacaccagttatagctcaggtattcctgttcaacaaagtgttcgtactgggaaaaaacgctattggtgtcatgaatgtggtaaaggtttcagtcagagctcaaatctgcaaactcatcagagagtccacacaggggagaaaccctatacatgccacgagtgtggtaagagctttaatcagagctcacatctttatgctcatttgcctattcacacaggagagaaaccctatagatgtgacagttgtgggaagggcttcagtcgtagcacagatcttaacattcattgcagagttcacactggagagaaaccttataaatgtgaggtgtgtgggaagggcttcactcagagatcacatcttcaggcccatgaaagaattcacactggagagaaaccatataaatgtggggattgtggtaaacgctttagttgtagctcaaatcttcatacccatcagagagtccacactgaagaaaaaccatacaaatgtgatgagtgtggtaagtgctttagtttgagctttaatcttcatagtcatcaacgagtccacacaggagaaaaaccatataaatgtgaagagtgtggtaagggttttagttcagcctcaagtttccagagccatcagagggtccatacaggagagaaaccatttcgatgcaacgtgtgtgggaaaggcttcagtcagagttcatactttcaagcacatcagagagtccacactggagaaaaaccatacaaatgtgaagtgtgtgggaagcgcttcaattggagcttgaatcttcacaatcatcagagagtccacaccggagagaaaccctacaaatgtgaagagtgtggtaagggtttcagtcaggcttcaaatcttcaagcccatcagagcgtccacactggggaaaaaccattcaagtgtgatgcatgtcagaagcgattcagtcaggcctcacaccttcaagcccatcagagagtccacaccggagagaaaccatataaatgtgacacttgtggtaagcccttcagccagaggtcaaatcttcaagtccatcagataattcacactggagagaaaccatttaaatgtgaggaatgtgggaaagaattcagttggagtgctggtctcagtgcccatcagagggtccacacaggagagaaaccctatacgtgtcagcagtgtgggaagggcttcagtcaggcctcacattttcacacacaccagagagtccacactggagagaggccttacatatgtgatgtctgttgtaagggcttcagtcagaggtcacatctcatctaccatcagagagtccacactggagggaatctgtagaaatgagaggtgtggttcagccttcagttagagctcacatctttgtctccgttgggaagtccatgctgatgattgtgaaaagttcctttaaaactagaagcttcaaagaatcttgacaggaaagaagtctctcaaatgctgtgttttagacttggttaggacatgaattctttacaaacgtcatatttcacagatgcgagaaaactttgttctgtaaatatgatcagtgtttatatcagagtaccaggtgtcccggttctcaagatgtaacacagcagaaaagtcttgtcggagtctgcacaggagagaggccttcctttaacaaaagtatgattgacagaaaaaatggatgtcaactaaaatgtaacctctatgtaaggaggtgtttttcaccactctatctctaccatgtagaattgtgcttggctcataatagggcccagcaattactgaagaaagtgaagaaaatacctataattaggacaaatacttgaaaattctagtctgttttctactctaaatttatattaatttatattcaaaaggaatcctgcaagtagccttaataacgttagtttcagtaagtactgaaaagtatataatactgccatccatactaacacaaatttggaaaaaagacatgaatggctcccatccttcagccttagttctttgtacagtgtatcatcagttgtgtacagtatgatttttagtgtcagtttatagactgaacaatactgtttttatctaatgtgaccctgcaatttacatgattagaatttttggacactaagctgtactgtaactctgaaagtgttaaaagtagttactgatgacaaaaagtttcttagtaaacttgaattgttaata

SEQ ID NO: 262123 - DNA, 1382 bp, Homo sapiens
ttccgctccaggaaggcgaggtcggatctgagatatctcccagggaggttcacttccccggaactctgccttttcccagaaggaggaggggaaaaatgaccaagttccaggaggcagtgacattcaaggatgtggctgtggccttcactgaggaggagctggggctgctggactctgcccagaggaagctgtaccgagatgtgatgctggagaactttaggaacctggtttcagtgggacatcagtccttcaaaccagatatgatatcccagttggagagggaagaaaagctttggatgaaggagcttcaaacccaaagaggtaagcattcagaaacctgaatagagtcaccttgtaataactgggaactcttcccctgaagacacctggttaattcacttgcaacctgtttccagatttgccagcaggacagctcttgatttgaaagggttttgcaactgcagcactactattttggactggccaattctctgttgggggcactgtcctgtgcactgtaggagattttgcagaattcctggatactacccacaaaatgccaatagcacccctctgtcaggtgtgacaaccatttccagacattgccaaatatcttctgggggcgaaatcacccatggttgagaaccagcaatttaaaaggacagaattttgcctgagcagaaagaccagaaaaacctatcctgttttcccagggattagaaaaccttttgtcttcaagagcaaagaaccattttaaaaggtccaaacccttaaacacctgagagcaaagagattctcaagggaactgaagttcagggtcagagagtgcctgtcctcacccactgcaaccaggttcttgaagttctccaccatgacatctcggtacagcttcctctgggtaagatcgagcagtcgcagttcctccctggagaagaccacagccacatccttgaatgtcacagcctcctacaatatcaaacacatgtaacctcaatcttacaaccaaccttcactagaagaagggtggcatcaagaaggaaaagagcaccacaaaaaagttgttatagattccaagagatctcagtcaattttcagctgttacagttttccctgtctcactatctcctacgctcatccccataaagcctgtagtttatcactgttttttgtttttttcttttttgagatggagtctcactctgtcacccctccagcctgggtgacaggggtgagacactgtcttaaaataaataaatttttagaattaaaataaatagatcataaagtgtttgaaaggatcagatgaatgaatatatgtcaagcacttagaagtgcctagcacaccatacatgctcaataaactcgaacaacgcatatcttta

SEQ ID NO: 262124 - DNA, 236 bp, Homo sapiens
gctcgactgtcacccaggctggagtgcagtggcgcaatcttggctcactgcaacctccgcttctccagcctgggtgacaggggtgagacactgtcttaaaataaataaatttttagaattaaaataaatagatcataaagtgtttgaaaggatcagatgaatgaatatatgtcaagcacttagaagtgcctagcacaccatacatgctcaataaactcgaacaacgcatatcttta

SEQ ID NO: 262125 - DNA, 1000 bp, Homo sapiens
ttccgctccaggaaggcgaggtcggatctgagatatctcccagggaggttcacttccccggaactctgccttttcccagaaggaggaggggaaaaatgaccaagttccaggaggcagtgacattcaaggatgtggctgtggccttcactgaggaggagctggggctgctggactctgcccagaggaagctgtaccgagatgtgatgctggagaactttaggaacctggtttcagtgggacatcagtccttcaaaccagatatgatatcccagttggagagggaagaaaagctttggatgaaggagcttcaaacccaaagaggtaagcattcagggtttctctgttgtgtgttctcttgacaactgtgacattttgggctctgcttgaaactggtcatattcatacaaaaataggttttcttcaatggaattcagataactataaaaactcagctcatgaattcttaaaacatgacattttataaatattctgtgctgtgtggattttctgaggaaaatgggaagtctaagtcttgaagagcacccctatcacactcatcatgattaatagattcatcaccatcatggactctctgatgaatctgaagacaacgaactcttactaaagcccttaccacacacaaaacatttgtatggtttctctccagtatggactctctgatgggcttgaagatgtgaagtctgactgaagctcttaccacacatgccacatttatagggtttctctcccgtgtggatcctctgatgaacatgaagatatgagttccagatgaagcctttcctacattcttcacatttgtatggtttctctcctgtgtggactctctgatgggcttgaagatgtgaactccaactgaagcctttcccacacacatcacatttgtagggattctctccagtatggacttgctgatggtcttggagatgcgaactctgactaaagcccttcccacatgtctcacatttgtatggcttctctc

SEQ ID NO: 262126 - DNA, 1425 bp, Homo sapiens
ttccgctccaggaaggcgaggtcggatctgagatatctcccagggaggttcacttccccggaactctgccttttcccagaaggaggaggggaaaaatgaccaagttccaggaggcagtgacattcaaggatgtggctgtggccttcactgaggaggagctggggctgctggactctgcccagaggaagctgtaccgagatgtgatgctggagaactttaggaacctggtttcagtgggacatcagtccttcaaaccagatatgatatcccagttggagagggaagaaaagctttggatgaaggagcttcaaacccaaagaggtaagcattcagaaacctgaatagagtcaccttgtaataactgggaactcttcccctgaagacacctggttaattcacttgcaacctgtttccagatttgccagcaggacagctcttgatttgaaagggttttgcaactgcagcactactattttggactggccaattctctgttgggggcactgtcctgtgcactgtaggagattttgcagaattcctggatactacccacaaaatgccaatagcacccctctgtcaggtgtgacaaccatttccagacattgccaaatatcttctgggggcgaaatcacccatggttgagaaccagcaatttaaaaggacagaattttgcctgagcagaaagaccagaaaaacctatcctgttttcccagggattagaaaaccttttgtcttcaagagcaaagaaccattttaaaaggtccaaacccttaaacacctgagagcaaagagattctcaagggaactgaagttcagggtcagagagtgcctgtcctcacccactgcaaccaggttcttgaagttctccaccatgacatctcggtacagcttcctctgggtaagatcgagcagtcgcagttcctccctggagaagaccacagccacatccttgaatgtcacagcctcctacaatatcaaacacatgtaacctcaatcttacaaccaaccttcactagaagaagggtggcatcaagaaggaaaagagcaccacaaaaaagttgttatagattccaagagatctcagtcaattttcagctgttacagttttccctgtctcactatctcctacgctcatccccataaagcctgtagtttatcactgttttttgtttttttcttttttgagatggagtctcactctgtcacccctgggaagcggaggttgcagtgagccaagatggcgccactgcactccagcctgggtgacaggggtgagacactgtcttaaaataaataaatttttagaattaaaataaatagatcataaagtgtttgaaaggatcagatgaatgaatatatgtcaagcacttagaagtgcctagcacaccatacatgctcaataaactcgaacaacgcatatcttta

SEQ ID NO: 262127 - DNA, 722 bp, Homo sapiens
tagttataggaccttgggcaaattccttaatctctcactaactgaatttcctcttctttatcattgtatctaaattataaggtgtatgagcctgacacagaaggatcacttcagcccaggagtttgacggtgcagtgagccatgattgtgccactgcacttcagcctgggcaacagagtgagaccctgtctcaatttttaaaaataaattttcaggctaggcacaggggctcacacctgtaatgccagcactttgggaggccgaggcgggcaaatcacttgaggccaggagtttgagaccagcctggctaagatgctgaaaccccgtctctactaaaaatacaaaaaaattagccaggcgtggtgatgtgcgtctgtaatcccagctactcaggaggctgaggcaggagaatcacttgaacctgggaagcggaggttgcagtgagccaagatggcgccactgcactccagcctgggtgacaggggtgagacactgtcttaaaataaataaatttttagaattaaaataaatagatcataaagtgtttgaaaggatcagatgaatgaatatatgtcaagcacttagaagtgcctagcacaccatacatgctcaataaactcgaacaacgcatatctttatcatctcttttgtcctattttgtgactacatacaacaggattccttggaactgaagatttatctctaaccaatccaaataatgt

SEQ ID NO: 262128 - DNA, 489 bp, Homo sapiens
gtgtaggctggtgctaaaacatgacccaggtctagaaagacacacaatccacccctaactcctttcctcgtctgccactccttatccccaggattacttgttcttttatgactgcttttctccttcaaagcttctcattgctagtttttatcagatttcaggtgattaaaaaagaagggcatactatgattgctgtgttcctcaggtacattcctgtgtttctctgaccttttggatcccctaacctaactgacttggtgaacaggttctgtgatggggaagggagatggacacccttctctaggagggctggcaaaaatacaccaatcacaaatagtcatctttgttgtgctttttgtttaagattgttttcctcttttgctatggtgggtgttgttcttcggatttttttttttttttggttgatagtattttaaaaccagtctacataacaactaaaaaatgtgggaaaatagctgtagttgaaaa

SEQ ID NO: 262129 - DNA, 751 bp, Homo sapiens
tttttttttttttttttgagacagactcttgctctgtcacacaggctggagtgcagtggtgcaatcttggctcactgcaactgcaatctctgcctcctgggctcaagcaatcctcccacctcagcctcccaagtagttgagactacagacacatgccaacaagccaagctaatcatacacactgtatgatttcatttacatgacgctcaaaaacaaaaacaaaagtggacttcgtatctattcttaagtgcagggactgcggggagggccttttggtgctgactacattttctttctcggtctggcactgggaactgcgcacacacgtgttaacagttcatcaagttgcatctgcttatctgcgcatggtattgtcagtaggcttggacctcggctgaagcaaaagcttattcgtcagtgggctgcaggacctgcagtccatgcaaaggaggtcactaccagctgaaccagagtggacaactaactgttcctcctcatgaaagcttcaaattggggtactctcacattgtatgcatacatccaaactagctgatgtctcccgcccccgcctcaacaagacactcattcaaccccagggaatgtaggaggtcgggttctggatcttactatctgacaacgagaagttgtttcctcataatgcggcatggctttcttatctgaaaatgagggcaggattaacagatttacctgtgattctctggtgaatttaataaaataactagcagttttt

SEQ ID NO: 262130 - DNA, 895 bp, Homo sapiens
  misc_feature (840)..(840): n is a, c, g, or t
  misc_feature (846)..(846): n is a, c, g, or t
  misc_feature (851)..(851): n is a, c, g, or t
  misc_feature (871)..(871): n is a, c, g, or t
  misc_feature (884)..(884): n is a, c, g, or t
atgctcctccttgctccccagatgctgagcctgctgctgctggcgctgcccgtcctggcgagcccggcctacgtggcccctgccccaggccaggccctgcagcaaacgggcattgttggggggcaggaggcccccaggagcaagtggccctggcaggtgagcctgagagtccgcggcccatactggatgcacttctgcgggggctccctcatccacccccagtgggtgctaaccgcggcgcactgcgtggaaccggacatcaaggatctggccgccctcagggtgcaactgcgggagcagcacctctactaccaggaccagctgctgccggtcagcaggatcatcgtgcacccacagttctacatcatccagaccggggcggacatcgccctgctggagctggaggagcccgtgaacatctccagccacatccacacggtcacgctgccccctgcctcggagaccttccccccggggatgccgtgctgggtcactggctggggcgacgtggacaataatgtgcacctgccgccgccatacccgctgaaggaggtggaagtccccgtagtggaaaaccacctttgcaacgcggaatatcacaccggcctccatacgggccacagctttcaaatcgtccgcgatgacatgctgtgtgcggggagcgaaaatcacgactcctgccagggtgactctggagggcccctggtctgcaaggtgaatggcacctaactgcaggcgggcgtggtcagctgggaggagagctgtgcccagcccaaccggcctggcatctacacccgtgtcacctactacttggactggatccaccactatgtccccaanaagccntgagncaggcctggggtgtccaccngggtcactggagngccagcccctc

SEQ ID NO: 262131 - DNA, 863 bp, Homo sapiens
agcgtttctgacaggagcggccataatggctgtgggaatcactcttagtcacctcagtgcctttctctcttcgttgcaagggacactcaagagtcgggtgcccagccaaggccaacacggcgcagtggcattctattcagcctgctgtggaaaaaagatggcggcgccctttgtgcccattatagctgagagtggagccttagctggagcaccatgggcacggccatcttagaggaaggcagcagccgtacggcagagaagatgctcatatccaggacaatttggaaaaataaacaaggtttgaagaagtcacggtgctggccaggaagcggtcacagagttgccaaaaccagtggtcactgaaagtgttagatttggggatagggcgggggttctgggctgggtaaggcttttgtgggttagattagactctgactgaatggacgaagccgagaacaggagtgatgctccattaaatgctaatacccacatggggcttgctattaaaaccactgccagtggggaaggggatgaggaggtgaaggtgcaactgtgttaatatctacatgtttccttccagaagtaaaggaagatgacagtggggcacttaagaatatgaaattattagaatgcgatcatcctactttgcaatgtttccagattttttaaaaagtcacacttaaaaaatattagttctatttttgcagatgttggcgttgtaactgtagaagatttaagtaaatattgtatttttggaaggcaacctagagccaatttaattttttcgttttctttgacacagcaattctaaaagctatctaggcaaatctgtcttaatattaaccacaacttttgtaatttac

SEQ ID NO: 262132 - DNA, 226 bp, Homo sapiens
agggtttgtttagagccactcccaaatcctcactcccacactcatccttgcagccagtttttgaggaagaggagaacgtgtaaccccaatgcaagcttcaccctgactgagaggtagtggttcttcctgtagggaatgaatttggtttgatttggggttttcctttgaagcccaaagaacttgctgttatgattcgttaaccatattgcaataaaagctggacata

SEQ ID NO: 262133 - DNA, 445 bp, Homo sapiens
gaaacggcagccagacttgactccaatgtacacacagactcaggtttcgccccgtcacctgttggctcctgaacaacactcctctttgtgaaacttacagcacccatttgaaacaagtttccagagaaaacacttcaagaaagtgtttgagaagtcacaagactcgagttgtaaaaacaaattccacacatagcctggcttataaggacacagactaacgggaaaggccgagcttttaaaaatggggctggaggaagcgagaaggaaaggatgtcaccgtactttgggaaaactcagccggccaattcttgatggggctgccagtgatggctgcagggggtcccctgggtcgtccccatccccgccgccgcagcagcagagacgcctcagagcgggcgtcggcgccccctgggccccgcaaactctgcgctccaggcggcggccg

SEQ ID NO: 262134 - DNA, 171 bp, Homo sapiens
aaaaactgtatcaatttaccctaagaattaaaaacaaaaatcattttttgcctattaaaagggccaattaatatttcttttcatctctgaagagaatacagaatacatatagtacacattcttaaaatgttttaatttggcagtgtgtctacataattttctcatgataca

SEQ ID NO: 262135 - DNA, 739 bp, Homo sapiens
ccacctccttcatatgtgccaatcctggaaaatggcatagtgggggaagttcacaaaataaagatatttcaggaaagcctcacataattgcctggcatttgaaggtactaagctttcagtagtctcttcctatcgttcccaccccccacatcatttttctagacctctttaaagcaccttatagcctcaaattccctacctgacatttatgtgtactaacaaacatgattttccccgaaggaaataaatatggtaattttatgctttttcttcaaatcatcaaaacatataatggtttatctctagcagagtaatgctattttaatctccaggagaagactctgaatatttggttgccaagttcacctattataaatacataatcaaaattgtgttcatcatgaaaataacaatgtatagattttaaatattacataatattataagagcataatatggagaaaacgcataaaaatatcgccctttaacttcatggtaaaacatgaacactttggatttaaaaaaaaatcacaaaacatttaaataagattatcttcctattgatcaccataatatgagctcagagaaagtaacagcctaaactggcaaaactattatcatgcaactcttctgtagctaatcagtaaataaagatagaattctaaatatgaatacagaataactgtaacaccttttattttacaaaatgttgtcaatttcattttattttagaatagtt

SEQ ID NO: 262136 - DNA, 539 bp, Homo sapiens
ccacctccttcatatgtgccaatcctggaaaatggcatagtgggggaagttcacaaaataaagatatttcaggaaagcctcacataattgcctggcatttgaaggtactaagctttcagtagtctcttcctatcgttcccaccccccacatcatttttctagacctctttaaagcaccttatagcctcaaattccctacctgacatttatgtgtactaacaaacatgattttccccgaaggaaataaatatggtaattttatgctttttcttcaaatcatcaaaacatataatggtttatctctagcagagtaatgctattttaatctccaggagaagactctgaatatttggttgccaagttcacctattataaatacataatcaaaattgtgttcatcatgaaaataacaatgtatagattttaaatattacataatattataagagcataatatggagaaaacgcataaaaatatcgccctttaacttcatggtaaaacatgaacactttggatttttcactggccgtcgttttac

SEQ ID NO: 262137 - DNA, 275 bp, Homo sapiens
ttcctcttgatacaccagagtgcttcttccctattttgggtcccaggcatcgatgctctggctttagtgtgcctgagactcatctggggaacttgttaggattcctgccctccaagctggaagtgcagattcagtctggaggggggcccggaagtctgcactttcatgagcatctcagggggtgccaactccctttgataagcatctccttggacgtccatggaccccaagctaggactcccgagtaagtttccttgacattgcatatccatatg

SEQ ID NO: 262138 - DNA, 419 bp, Homo sapiens
cagcatccatcttcgaggctttatgtaaggttctacaaatatccagggatagcagaagggcccagcctcagtcaaccacgaggcttagaacccaggaaaccattcactcattaaaaaccatgccagtgagcatacctagctcttccctagggtatagcaccttggaaagcaaataccacagacttagccaacctgagtaataatggataattctaatgtctgggtttaaccactgtcatatagggttacaccttcccaagcacacctcacaattcttttttttttttttttggctacatcagttatgtctaatatatctaatactcacatcagcctccttgggaactaaacagctcatcaaagagtagtgatggagaaatgggagccatcgtattaataaaataatattaacaacacca

SEQ ID NO: 262139 - DNA, 139 bp, Homo sapiens
gaaacggggaagggaaacaggaattcgatttttttacttgccaaatatttactgaccacatactatgatgatagcagtaataataatgggtaaaatgtattgagagctcagtataaaactatgttttttgcatatattt

SEQ ID NO: 262140 - DNA, 468 bp, Homo sapiens
ccattctaggtctttcccagatctaggagagattaaatgagagtctgacaccttttaggtctaaaaagaaacatttatcatctattctctctgaagcctgctaccttgagatttcatctacataaaaagaaccttggtttccacaacttcccttatctgaacgcaagcattactttctactgacttcaagtctttagagatagcttagctctttcaaccaatcagaaaatctttgaatccacccataagcccccacttcaaaatgccctgcattttcaggctgaaccaatgtataccttacgtgtattgatttatgtctttgcctgtagcttctgtctccctaaaatatataaaaccaagctgtaacctgaccaactcaggcacactttctcagaacttcctcgactctgttccccagactgtggtcactcacattggctcagaataaacctctttaaatattttaca

SEQ ID NO: 262141 - DNA, 444 bp, Homo sapiens
acaaaaatgccatgacttctaaaactaagatctgatctccaacttaaaaaccttctgtctctgttttgcctgcagagaagtataaattcctttggagaatgaagctgctttccaatgcttgctgtaatagccctctgcatctttctttcataacatccagtacaatttgaagttatatattgggtgattgtttgattaatgtttgtctttctgaaattttgaggtagcatgatcatataacttaaagtgtaaatgggaacacttttgaaagtaaaaggagatgttattaataattattccaggacaaaaaggagactggaacatgtggtcatcctacaggtgaagcagagaccaactctggtttacttgtcattgcagtcccagtgccagattccatacttggcacagagtagatgctcaataaataaacatgatgattgattt

SEQ ID NO: 262142 - DNA, 536 bp, Homo sapiens
agctcagtgggaaattggatgctttccaataaaatattattttaaggtgattttaaattttactgaaggaacagtaacttcttgcttattataatttaaatacagtagttgagctatttatgaagtaccctctttgtgaatggaatgatcaataccaccttcctaccaaagtctccattccgaatgctgtgcatcttgccggtgctgtgttgggagtggtgttgctggaaaatacggtctttgcatatttattaacacactttttgacttgtttactggcagacttgtaggtacaattttaaatgtaatcttttggaattttatgaactgagagttcactcttgtagtgtcattcaacctgtgctgcctcccctgacacagctgttgtggccggtcaggatacgtcctctttcacatctctaatggaatctaaatgtggtttgccttctctgtagagctcttcttcaccgaagcctggctctgattataagtgtgcaatatgtgatcactgtaaaaaaagaagtgtaaaatatagg

SEQ ID NO: 262143 - DNA, 610 bp, Homo sapiens
gcatttacttccttcgcatctggtgtagttaaatcctgaagagtattaaggcacaaacctaacccaacattggaatagataaaaaatgtcctctgaattaagtcctatatgacttcatgggtaatttcaatccagacatatgcagaaattttcaattattttttttttgagatggagtctcactctgtctcccaggctggagtgcaagtagcacaatctcaactcactgcaacctctgcctcctgggttcaagggattcttctgcctcagcctcccgagtagctgggactacaggtgcacaccaccacgcccggctaatttttgtatttttggtagagacggggtttcaccatgttggccaggctggtcttgaactcctgatctcaggtgattcacccaccttggcctcccaaagtgctgagattacagtcatgagccaccctgcctggcaagaaatttttcattctgttacacaaaatatttttatagctgtccccaattttaccttaaaattgtgaccactgcacaataggaatgctgtgtttgtaacattatctcctggttttgtggtcagcttgctactttaattcagtccaaggccctatattga

SEQ ID NO: 262144 - DNA, 424 bp, Homo sapiens
agaacagtctatgggttacttccctaggaatgaggaagatgaagagctagataacaatgctgggctggtatctgcctgatagtgctttgccaagactatggtttcttcctcttctgatcaaaaaagacacaggagtcagacaaatggggattaaaagacaactgagttgatgtgaaatgtaacaggcaacactatggacacagaaagtagattagaggctgcttaggacctaacgtggagggcagtaggggagcgacagctgaagggtatggagtttctccgtgccgatgaaaatgttctacagttgactgtggctatggctgcacatgtctgtgaatatcctagaaaccactggagggttcactttaaatgggcgaattgtatggtatatgaattatgtttcaataaagctcttacacagcta

SEQ ID NO: 262145 - DNA, 370 bp, Homo sapiens
cagagatcgcaccactgtactccagcctgggacagagtgagactccatctcaaaaaaacaataaaacaaacaaaaagtggttccctatatctctgtctgctggtattcatgcccccgtgtacctccgttcccttgtttgtgagctggacctagcaactcacttcaaacaaacagaatattgcagaagtggtgtgaaaaagcatgcaccctgctctgcctccatgcctgcccgcaagttttacaggagccggcccttgcggttgacctcaggagtgaaatattagcaaacctgcctgcctagcagacctaagccatattgtccagtatcagttttgatggtaataaaagtaatatttgtatttccatctgc

SEQ ID NO: 262146 - DNA, 624 bp, Homo sapiens
atgtctttggactagggcagaaaaaggaactaatcctgtgctcaagtctcccaattaacagtgaacatcaaagacaccaattttgaacatgagactgagttgttctgtttgtatgtttgtatctgcagggaaataggaaggagatgaaaactgtaaaaaagaactgctctttaaatatattctaattacttcaagacttgcaagaaattgaataagtgagataatgaaaatgaatgagtcaagtttggggttttctgtctggttttgatcaggaagtctaacttttggcatagaccttcaggaacttgtaaaaacattagttgattgttggttctctcaaaggccatctcctctagggaaaagttggtaatcagaagggcatccaaccttattctcaagagttcttgtccctgaaaggattctctggagcactgggctatccagaagggagaccatgatcctggagcttggagctcttaggcccgcttctcaatgaagcatgtgtgggatcacaaggaagatgttaccttttcatgtacctcgtcaggtatcatacccccatgtaacagaggcaattcatcttacccaccactgcctttgtgctttaagaacacataaagattt

SEQ ID NO: 262147 - DNA, 452 bp, Homo sapiens
agcaagaggacagtgatagggaataacttcaagtagctgtgtgtgtcccccagttctgcattattagggcgatgttccatgatcgtgagtcattgctgtgttccagagaccccctctctacatggctagaggctaaaggtcattatcaagagtgaatactgccaagtccagcagtgaaactgttctgtctgatactataaaggaggatacatgttattacatgtttatcaaaacccataaaatatacagtgccaaaacggaaccctcctgtgaactatagactgactatccttaatagtatgtcttcagcaaatgttgggttcatcagttgttacaaatgttccactaaactaagatgttaaaaatgggagaaattgaagatgaggagaggaaggtatatgccaattctctatttttcactcaatttttttccataaaccaaaaactgctca

SEQ ID NO: 262148 - DNA, 436 bp, Homo sapiens
  misc_feature (406)..(406): n is a, c, g, or t
  misc_feature (408)..(408): n is a, c, g, or t
aaatcatattccattatttcattatatggaagtacctcagtttattcgtctactgaagggtatcttggctgcttctggtttttggcagttatcatgttttggctgtcaacatttgcatgcaggtttttgcgaaacaagtcttcaaattagttgggcacatatataggagtgctattgccagctcatacggtaagactatattttgctttgtgaggaactgtcagtcttccaaagtgatttttacattatattttacatttgtaatgcaatgagatttttttgtcacaatctgcatgcccaggatggaatcatttacattttcatatcctgagattgatttttgtgtgtttgctgtaaagttctatgaatttcgacaaatacacaatgccatgtatccaccattatnanatagagaatagtttcgctgctcttaaga

SEQ ID NO: 262149 - DNA, 497 bp, Homo sapiens
aatcccagcactttgggaggccgagacgggtggatcatctgaggtcaggagttcgagaccagcctgaccaatatgatgaaaccccatctctactaaaaatacaaaaaagttagccgggcatggtggcatgtgactgtaatcgcagccacttgggaggctgaggcaggagaatcacttgaacctgggaggcggaggttgcagtgaactgagatcacgccattgcactccagcctgggcaacaagagcgaaactccatctccaaaaaaaaagagaattgtatactcaatgttaaacttggtggaacttagaaaatatatatgtatattggcttacttacttggaatccatttttggtcctgattttgcttattagtatgctatagtaagatgaagaatacttcaaagtttttatatccattttaatatattctgtcatctgccactaaggtggatatgaaactgagtatttttcatgggaataaaatgtggaaaacttg

SEQ ID NO: 262150 - DNA, 399 bp, Homo sapiens
taagcactcagcaattaacctagtcaatgatatgtgttgactgtgggtgtgacccaccatgtctgttgtgatttttaacttcagagtatcttaggaattatccagtccagctcattttatacttcaagaaactcaggaaaccaagattaggttaatcttctaaattcacagtactagctagaggcagccccttctgggacaggagtcctagtctgtttggtttcttttttttttaaacccaccatattgctaaaacagatagcaacaccagcttcctcatgcagtgcagtcatctactgtcaacacaggtcttggcttctttcccttcagcgtctcacccatctttcttaaggaggatccagatttctccaaatgttaccttcatatgggaccctattc

SEQ ID NO: 262151 - DNA, 876 bp, Homo sapiens
gcacccgtcaagctttccctgaacctgctggcctcgtctgaccctcccgaggcggcctcgtggctcctgtgtgaggtgtctggcttctcgccccccaacatcctcctgatgtggctggaggaccagcgtgaggtgaacacttctgggtttgcccccgcacgcccccctccacagcccgggagcaccacgttctgggcctggagtgtgctgcgtgtcccagccccgcccagccctcagccagccacctacacgtgtgtggtcagccacgaggactcccggactctgctcaacgccagccggagcctagaagtcagctacctggccatgacccccctgatccctcagagcaaggatgagaacagcgatgactacacgacctttgatgatgtgggcagcctgtggaccaccctgtccacgtttgtggccctcttcatcctcaccctcctctacagcggcattgtcactttcatcaaggtgaagtagccccagaagagcaggacgccctgtacctgcagagaagggaagcagcctctgtacctcatctgtggctaccagagagcagaaaggacccaccctggactcttctgtgtgcaggaagatgcgccagcccctgcccccggctcccctctgtccgccacagaacccagtcttctagaccagggggacgggcacccatcactccgcaggcgaatcagagcccccctgccccggccctaacccctgtgcctccttcccatgcttccccgagagccagctacacccctgccccggccctaacccccatgcctccttcctgtgcttcccccagagccagctagtcccacctgcagcccgctggcctccccataaacacactttggttcatttcacctgact

SEQ ID NO: 262152 - DNA, 276 bp, Homo sapiens
tggggaggttcacgtggtgaaaacaggtctctggccaacagtcatgactgtgccatcctggaggccgatcctccagccctagtcaataactgctgccctggcctacagtttgtaatctcatgggagacctggagacagaaccacccagccacgcatccccaaatccctttacctctaaaacctgtgggacaacaaatgtttattgcgttaaactttggggtgattgttatgcagccacagagttctaataaactgtcggacatagattactggcta

SEQ ID NO: 262153 - DNA, 677 bp, Homo sapiens
atgttaaaatatttaaatgaatctttatagaccaaataataaaatagatgtatcaaagagatcagagccctaaagagttcattttcaccactttttgagtacttacagaaattaagaacacataaaataatctgccttacattctaagaaatagacaaattgaaccctctcccccaatctctccatttaaatataggaaagagctatttgcagcaagactagaagtaaagtttgtctaggagcactgttgctaccagaaagaaccctaatgagagatgccatgtatttctgcagcagctgtttgtatgcagacctacttactccaaaatcatgcaagctcatcttaataggggtctgcttcgcaagcaggcagggtgaaattcacacatttggcttagatcactgtttacaaaggaaacacagctagtcattacatttaattagattgcaattatatgacagaatatcatacttacattttcatatatgttcaatgggtatctttgtctgctaaataagatttatatcttctacaccagctgtctttacttcaaagatggggatctttgggatgctggtatatgggaaagtatgttaaaagggagggaagcagacagcaaaagcaaactaagtctacttaactatttttgcctttaggccagccctgaggttagaag

SEQ ID NO: 262154 - DNA, 2082 bp, Homo sapiens
aaccaggtacaagctaatactcaacaatactgatgccttgttttttttgctctgtccggacagcaacgctgtagccaatttagatatgctataaatttaagaggttgccatggccacggtgcgcccattggccgctgggccccctacgtgcagcgccacgtcaccaaatctgaataaggatgcgcgaattacgcggcgaccagacaaagatgaggatccggaccgcttgaaagtgggggaaagtgccggcgcctccgccaccggggaaagccgctccgcagcgccgaggccagcagccacccgagatacctggggaagcccggaacaggcgccggggcgtgcggcccgtggcatgaggttgtgaacgccacccgccccccaccaccccactccgggcagcccagcgccaggccagagattgcccaaggactggaccggctgagtcttggtccggaccagactcgccctgcagctgctgagacaagaggcgaagggcagcggagggcccggcaggcccgagggccaggggcccaaagggagggcaaggcggccgaagccgccggggcgcggggctatgatggtgcactgcgccggttgcgagcggcccatcctcgaccgctttctgctgaacgtgctggaccgcgcgtggcacatcaaatgtgttcagtgctgcgagtgcaaaaccaacctctcggagaagtgcttctcgcgcgagggcaagctctactgcaaaaatgactttttcaggcgctttggcacgaaatgcgccggctgcgcgcaaggcatctcgcccagcgacctggtgcgcaaggcccggagcaaagtctttcacctcaactgtttcacctgcatggtgtgtaacaagcagctgtccaccggcgaggagctctacgtcatcgacgagaacaagttcgtgtgcaaagacgactacctgagctcatccagcctcaaggagggcagcctcaactcagtgtcatcctgtacggaccgcagtttgtccccggacctccaggacgcactgcaggacgaccccaaagagacggacaactcgacctcgtcggacaaggagacggccaacaacgagaacgaggagcagaactcgggcaccaagcggcgcggcccccgcaccaccatcaaggccaagcagctggagacgctcaaggctgccttcgccgccacgcccaagcccacgcgccacatccgcgagcagctggcgcaggagaccggcctcaacatgcgcgtcatccaggtgtggtttcagaaccgacggtccaaagaacgccggatgaaacagctgagcgccctaggcgcccggaggcacgccttcttccggagtccgcggcgcatgcgtccgctgggcggccgcttggacgagtctgagatgttggggtccaccccgtacacctactacggagactaccaaggcgactactacgcgccgggaagcaactacgacttcttcgcgcacggcccgccttcgcaggcgcagtccccggccgactccagcttcctggcggcctctggccccggctcgacgccgctgggagcgctggaaccgccgctcgccggcccgcacgccgcggacaaccccaggttcaccgacatgatctcgcacccggacacaccgagccccgagccaggcctgccgggcacgctgcaccccatgcccggcgaggtattcagcggcgggcccagcccgcccttcccaatgagcggcaccagcggctacagcggacccctgtcgcatcccaaccccgagctcaacgaagccgccgtgtggtaaggccgccgggccgcccccgcgctcggcccccgggggccccgccccgaagcagcctcctgaaaccaaaacgcccgacgcagacgcggtgggagacgtgggtgtccctcgggggttctctctcgggtccgcactcaactggcagctgctcctcggctgggcgccgaggggggccgacccccatctccaccccgcgggctctccaggagcctcagcccaccgccagtactctcccagcaaccgcgagcaatttcttgggaccaaagtcaatactccggagggtcaagagatttcgagcacgc

SEQ ID NO: 262155 - DNA, 422 bp, Homo sapiens
ggacacactgtgtaggtacaataaccaggaaggtgtgaggttggtgtaaggtagacatttagatcagtggactgcaatagaaagtccagatgtggacttttaaaaaaattgaggtgaaatttacataacatacaattagccattttgaagtgtctaactagtggcacttagtgcatttatgtgttgtgaaatcacaaggttagatgatttttgttttaaccaggtgcttaggtaattcaattagaaaaggaaaatcttctcaacaaatgatgctgaaacaagtagttagacagatggagagaacacaaatttcaacttctctctcacacacacatacaaattggagatcaatcatagatcaaagcataaaatcttaaactataaagcttgcaaaagaaaataaaggaaactatttcctcaga

SEQ ID NO: 262156 - DNA, 405 bp, Homo sapiens
tggggaccctgcctttcaagtcgtttgtgtgagggctgcgttggtggcccaactagccagggaagggctatggtatgcggggtcaggcgggaataggcaggaaatgtttgtgataagaggcttcgcctcttgcaagctcctctggtttccagacccagctgcaggataagggcccaggagctgagcagggagcctcagaggaggctgctgcaagagccagctcttgggatttcagcaggcagagttgcaatcagaggcccctggggtccctgaagaccatgcctggggatagaaacgaccctgggaacccagccagggctgccttcctttgggatcagggattttcaatcatacttcagagggccaaatcaatcccttaagaaaaataaaacaaaacaaacccca

SEQ ID NO: 262157 - DNA, 253 bp, Homo sapiens
agactcagatcccttctaactttgagacacggttttccagagaaactatgaatattgagaaaacagcagcctccaaagccgccaagacttgatattttcattacgcttggttacaagctcgttgaaaagtgtttccggttcatccttgaatctcttccaatctaagcacaatgctgtgcacatgagcaggtggctttgtagtctatagactcctcctagacttccttttcctagattttaagtcaaattttgc

SEQ ID NO: 262158 - DNA, 623 bp, Homo sapiens
  misc_feature (7)..(7): n is a, c, g, or t
  misc_feature (9)..(9): n is a, c, g, or t
  misc_feature (11)..(11): n is a, c, g, or t
  misc_feature (18)..(18): n is a, c, g, or t
  misc_feature (54)..(54): n is a, c, g, or t
  misc_feature (534)..(534): n is a, c, g, or t
  misc_feature (574)..(574): n is a, c, g, or t
actttgnananttgcggngtgagaagcctcttggccagaacttggggcaaggcncaaatctggtatgcagactccacaggtggggaagaaccaagctcttttctttcacagctgggaggtgggtagcctggggcaagttttcatgcccatctcggccaccaccacctggtaacagattcagggctgttgggtggggcacggtgggagtgagaccgactcttcaatttgcgtgggagctgggtgaggcctataactgctgggtgaggcctataactgctggctttcccccatgtccctgacaacctgcatgactcagcacaggcagccataatcctcctaggcacacaacttcagtgacctgggaatctcacccccatccctaacagcagcaagacccacccaaggagagtctgagctcagacacgcctacccctgcccccacctgatggttcttccctacacacactggtggctgaagacaaagggcttatactcttgggagttctagggccttacccaccaccagtacctctncatactaccacagctgatgctttctggaaagtgccacctnctgcaggaggtcaaacagcacaaaaatagagcattaaaccaccaaagta

SEQ ID NO: 262159 - DNA, 533 bp, Homo sapiens
tcacaataaaataggcaataacatatatataggcaataaacatatatgtttattgaaactataaacacatatactaacaatagttgcatgggtataacaggagcagacaaaccgtattcataaagaatagggcgaaaggtgaaatgcataaacacatattattgtggttggtaattgtgcacccagctttgttactgcagtcatctgaaatactgtgatgatgaacaagctgtcttttgatgagatcagtcaaaaaccatagtgagtcaccactgcatttgtagttgcccagagaactgaaatcttgagaaattttatcttttacaagtgcagatgtatgataaaggacatctgttcattgattaagtttcagtgtttttatatacatacacaatgtttacccagaaagtaaatgttgtggtaatgcattttcatggagttaaatttgcaaaaaatgaatacagtaaattagaactctccaaaaatttctacataattaaaaaatgctaacaatttaagatagtgaaaataaa

SEQ ID NO: 262160 - DNA, 466 bp, Homo sapiens
aaaaaggatgtatattctggtgttgtttggtaaaatattctgtgtttatggatcctgttgattaatgatgttattcagactttctatattttcctcattttttgtctaatattttgctaaaagaaggatgttaaagtccccaacagtaattgtggaattttttatttcttctttcagttctatcactttttgcttcatatatttgaatgttctcttgtttggtgtatatgcatttatgattattatatcttcttcatgtattgtccctcttatcattatgaaactttcctctttgtccatgttcattttctgagctctgaagtatactttgtcttacactaatacaaggtataattgctgcatttttaaaagttaatgtttgcatggcttatctttgtccatttcttttattttcaacctgcctacatcattatatttgaagtaaattttatgtagacaacatgta

SEQ ID NO: 262161 - DNA, 386 bp, Homo sapiens
agtggcaataataatattaggcaaacaaatttaagacaaaaagtatgaagatggacaggaagagaagcattggataatgataaaagttatccacaaaataacaggcatgagcctttacatatcgggtaaaataacatccaaatttaccaaaaaaaacactctacaaaatattagataaaagttattaaaatacagccatagtaggatacttttcctttctcagaatgtaaaaggtcaagccaaccaaagatgaatgaggccttaaaggatttaaataccagacttaaaagtttgtataggtataaaccttgtactctgacagaaaataaacatccatttcaaacagctacataacatttacaaaaactgatcatatttcatgttac

SEQ ID NO: 262162 - DNA, 681 bp, Homo sapiens
agtcactcttgcctggcaaagcccttgggtgagatctcgtgccagaacgctctttcagcctgggtgtccctgcctcgccctaccatgtgggcttagaggagaggcaacttggaggcaagcctgaaaaccacctctccatgaggagtgggaaaagccacaccctcgactcttccaagactcagggcttcgtagacaccagtggagtggaggagaagcagatgagggactgggtttcttggctcatctgtcagatgggaatttggggcataatagagcaggcatttggggcactaatagagcaggcattgctggtttccttctgcaagacaatgaacagctgagctggagtggttttaagggtcgctgaatgaatgctgtactgggtatgagacctgagtgccaatcctggcacctccccttagccacacactccttgggtaagtctcccattctgagtttcctaaggcagcctaagatttcacggacctggggacagacttctgccccaagacatactgaacacatggtcctcagaactcctttctcatcctcactgccaggagggggacctgcacaactcaggctgcctggaccctcccagcttgcacctaagattttggcgtcatggttgttaaaattgatattgcccttccatttgctccaaaagtttgaacagtaaat

SEQ ID NO: 262163 - DNA, 325 bp, Homo sapiens
tgcattcctgggatgccgttcacaggccttagcaagatcatctgacagccgcctgtgaggtcaacgaactttatacataattaaacactcccagttaggagaattcatttctttctccctgagaagcagagaaagaatacatgttgtgttgccctccattacggagtaaaagttgtgtggagtaatcaggctagtttcacatgatttaatgttgaaccgaataagaaagtgattgcatcctctactgggcctcacagaaaagtcaccacccacattgtttattcagactgggatcttggccatttggggtttaagccagaagaaa

SEQ ID NO: 262164 - DNA, 662 bp, Homo sapiens
aagagttggaccctcagatgaaatctgactgtaactgggccaaattgtaaaaccagctgcatttgatttgaactgtttatgctttgcctgatcatcaacctgaagagtgtaaaccaaaaattatatcctaagcccccaaccaactgaacagacagctgtctaggccgaggggaccccagagcaagctgaaaaactaaattccaggccatgatgggaaggaagggttggacgtacctcattatactctctcccttttaaagtttaggtataacagaccagcattaatattaaaatagagatcataagactgacaaaaacagactctttggtaagaagataccaaattccaactggtataatatcacatgacagataacagaccttgaagaaaattaaaatattttacctcaaaatatatttctttggcatattttgaaatggtcctgagaagccatcttttgagaaagaaattttgcatctgtagaggatctttattaatgcagctaggcttttcccagatctagcagagattaactaagagtctgacacctgtgaaattccaaaagagacgtttaccatctattctctctgaagcctgctatctgaggcttcatctatataacaagaatcacagcccacccccccttatctcaacccaagca

SEQ ID NO: 262165 - DNA, 381 bp, Homo sapiens
agagcttggcacattagaggaaagaataaaggccagtgtggttagtgagtaatagggagaggggtacagaataccactggagaagagggtgggagctattagtttggtgcaaaagtaattgtggtttttgtcattagtttcgcttttaatggcaaaaaccgcgattacttttgtaccagcctaatactccatgcagggccctgtgcatcagatacagagtttggattttattttatttttatttttgagacagagtctcgctctgttgctaggctggagtgcggtggcgcgatctcggctcactgcagcctccgcgtcccaggagaatcgcttgaacccgggaggcactccagcctggcaacagagtgagactccgtctcc

SEQ ID NO: 262166 - DNA, 342 bp, Homo sapiens
tctatttaggttcaaattttaaaatattatgtttttatataatctatatctttatataaaaacccacaaagaaatgcatcaacatattactagttgttatatttaggtggtggaattatgggtgactgttttcttctgtacactaaaagaagcatttttttaatattaagaaaacaaatataaaaataagctacaaggaagaatgaataattactctttgtgtttctctgtggaatgaattagttggacaaaaaaggtgggtaatgggagtgagagggggatgactacaatctgcctaacatgccccagctgaatgtttgttttaataaatttgttacttga

SEQ ID NO: 262167 - DNA, 130 bp, Homo sapiens
ccccatgtaggcaaaaggagacacctaaaacatggtccctgcctttgagaagttcggtgtggttcccccagcagccactttccccgctttttgctcacaaaatctgtttgttgcagatgaaaataggcct

SEQ ID NO: 262168 - DNA, 692 bp, Homo sapiens
cttgacaaaaggttttgagcagtttatttttatgcctgagacaggatcctaaatattttcaagactataaagaatccactaggatgctatatagcaattaaaatttcaaagacttcacaatggcagctataagagtaactaaaatcaaataataataaagtgttccatttactcagaaagaagcacaactggtgtaaacaatgttaacgactcaaagattgggatcaaaagttttgagtgcctttaatgtcatatccactattaagtgtccatttcgctctcaagtaaaccttgttagaaatcacaacctaggatggttttttgaattctaatggatatcaggattgagaaaagaggattttgaagttttgcttgttgttcctgtcttttaaacaggtaagggtttgtttgcttgtttgttgttttggtatctgggcagggggcagggtcaagagatagtcaataggtagtcagtaggagtcttggaaagcaatctacttttgctaaccgacaggacaagaaatggcaatgttctattttatagacagtttctgtggcaccgagttaatctgctgcctgcatgtttcaaagggagacacaaagcagagcaatggattctctgggacaaaccagacacttaaaatttaactcacgctgtggctgcaacatcctctgagggtcccttcttctgg

SEQ ID NO: 262169 - DNA, 216 bp, Homo sapiens
caatcacctccacccatcccctcctgcccaagctctggcttaggatagataaagcttctcctttttctgtttgcatggaatcttctttacctccattatcataattcagtgactgcaatcttctcgaagacaaggaatactctttcaacacaatgaatgagcactagaccttacttagagagcacaaactataaaccatagtctgtctggaggcca

SEQ ID NO: 262170 - DNA, 367 bp, Homo sapiens
gaggttcagaatgcatctttaaattgatatgttttctgtaaatctaaaattacccaaataaaatgtccacttaaaaaatcaatgtaggccaggtgcggtggttcacccctgtaatcccagcactttgggaggctgaggtgggtggatcacctgaggtcaggagtttgacaccagcctggccaacatcgtgaaatcctgtgtactaaaaatgcaaaagttactcaggtgtggtggtgcgcccctgtaatcccagctacttgggaggctaacgtgggagaattgcttgaaaccaggagacaaaggctgcaatgagccaagatcgcaccactgcactccagcctgagtgacagagcgagacaacatgtca

SEQ ID NO: 262171 - DNA, 367 bp, Homo sapiens
ctccaatgttaactttgctaaggtgtctttaagaccagagaacaaggaagagtcggcagtagtaccctggaaatgctaaatgaaacactcttccttatgttcttcagaagctaaacttttactacataaagttcgagatgaggcagcagagtgatcataaacaatagctttgctgagctcttcaacccacataattttctagcaaataaaagatgtagaagacctgtgtgagaggaatattctactttaaaacgatgtggcctgaaaattgaggaataagtgagatatcctttttaatactcccttagtactccagtctttttaaaaagcaaagaagtaacaaggcaggatgaaatacaagagagca

SEQ ID NO: 262172 - DNA, 251 bp, Homo sapiens
tctgtggtggagtcgttggcagaggatggctggatgtacatcagacccatttcttcttcctgggcccacaagtaaactgcatttcccaggcctcttgtagccaggtggagccatgtgactagttctggccaatggtatgtgagtagaggtttctctttctttactccgtcagctgctgaggacagggaaacctcgaaggctgtgttaaagacgctggaaccacatgctaataaaaatgagcatctatgaaa

SEQ ID NO: 262173 - DNA, 393 bp, Homo sapiens
gaattcgtttatgtgcatgagttagctgagggacaactgatttgcattatgctcagctgggattggcttcaatctgcaagtcgcatccagatccattcctcatgtctcccacggtcctgaaaccaacaagctctcaggagaagttgatggtgactgaaattctgaaaatatgcagtcagcacttttgtcttcatggaaagtgaacacatttggaaatattggctcagcattgcagctataccctttagacaggaaacacactttccagttctccttgacagagaggctgaagatagagtgggaagaaaaatgttgatatttaaaactaaagtaaaaaagctacagaagcttctactatttcagataagtaaaataattcatgcaaggtgatac

SEQ ID NO: 262174 - DNA, 418 bp, Homo sapiens
ataatttttgaataatgtaatatatagatatgagctgctgtattagggttctccagagaaacagaaccaataggagatatatatatataaaatacatttctataaaatatatataatatatattctatatatagaatatatagattctatatatatatagatttctatagaatatatataaatttctataaatatatatatagaatatatatggaaagagatttattataaggaattgacccacatgattatgcaggttaacaagcagccagatctgcagtctacaccagaagagccaatgccataacactcccagtccaaaggcctgagatccaagacagccaaagctataattccagtccacaggccaacaggctctagacccaggagccaatctttcagtttaagacggaaggca

SEQ ID NO: 262175 - DNA, 374 bp, Homo sapiens
cagggagcagagagaaaagtagactccccaatgcctcgcagtaaatgaggacgcctggcgcctgcggcgaggtcaactgaggtcagacgagcttatctctcctgtcccgggaattaagggcatcctggggacagctgcagagcaggaggctccccgtgccctcctcttcctaagcaagtcaggatcccaagaggcgcgtgcggggaggcccctccgaagggctgctggcttgtgtcttccaccagcgcaaagggaagctatcggttgcttctgcagtgaggcaagctcagccggacgcccagaagagagacgaggtgtcgctgtcggggtgtctgcctgcctctttaggatcaattattagcgtacagatccta

SEQ ID NO: 262176 - DNA, 681 bp, Homo sapiens
acagactggaacagcctcacatttcggctttagaacaaatcccacaattgttcagctttccggtccccttcagatcaagcagaagatatgttttgattttcatgcttgtattttaaacaataattttctaccccagcgtggtagtcaatgaggagagaggggaagaatgcgcacatgatgctacacgtttctgttgttgctgttattattggtggctttgaggagagctgctcccatttgggggtttataccaactgtggattatggctttgtcattaagatttgatctttgttaaatgaaaaactgtttattgtataaaactcaggtttgtggacgaaaagttgttttttttcttcagttaattaaattgttcctcaagtttgtttaaggacttaaaatcaaacacaaccatgtgtaaactgctaaatgaggctcctaaaatgagaggcctcaactctttaagtgtggagctagaaatgtaaataagtccacagggcagactggtgattatgataaaagctaccatttactgagcatctgtctactaggctcagctctatgctaagtctacatgttatctgtcaaagtggtatcatccccatttaatagctgaggaaacagaggcttagaaaggctgggtaacttgaccagggtcatgcaactagtctgcggtggagcca

SEQ ID NO: 262177 - DNA, 832 bp, Homo sapiens
tgatgtcctcatcagatgagagcactatcttacatcttagtcatgaaaatagcatcgaagatctccagtatgtgaagatagataaagaggaaaactcaggcacagagtttggggacactgatatgaagtacttactatatgaggatgagaaggatttcaaggattatgtaaacttgggccccctgggagtgaagcttatgagtgtggagagcaagaaaatgcccattcattttcaagagaaggaaattccagtcaaactctataaagatgtcaggagcccagaaagccacatcacatataagatgatgaagtcttttctctaagacggaaagctgcaaaggaaacacaacttttccttataaatgttctttgggaactgaagtatatccgttgcccattttacttacactttggctcatttttaaaccagctgttatttctaaaggtcatatttacatttaaaatcaaaggtattcagctattcatttacttgcatggtatgagtgaccaaaacggaagcacgctttgtatttctacactgaagtattcagaagcatgacagtgggttcaaggtagtctctgaggttccttttcacacacaaaaaattcactgattaatctgtgattccagtatgaaatagttccattagaaatgtttctaagaaaaacttagaagtttgcatagcattgtctacacatctttccctctgaggatgctcaatgtgatagacagccagtctataatgcaagccaattctccgtagtttaaccctgtgtattagtctgttctcatgctgctaataaagacataattgaaactgggtaatttata

SEQ ID NO: 262178 - DNA, 754 bp, Homo sapiens
cagtcctcccacctcagcctcctgaagcactgggatcacagatccagcctatcttttaggattgagacctgttaaacttgcaaatgaaggggtactttcaagctgttggtgatgtttacaccttcctgagaaagaggagcttgggttcttgggttcaggtaggaggtggagacattgattattcactcctccccttctcgtgtacaccctcccccaccccattttttattaattaaagattaattgccactcagaatgtctgttgacaagaaagttttaccactgaagctgttagaattccagcccaaaacaaagaaagaaatctagagttagcctgtatgacctcctcccagataaatggactacaagggtgaaacttttttaaacactggggatagcttggaggtgtttttgaagttccccactgggatgctgtcctggtttgggaccatctggtctagagatgacaaaagtgggttcccagcctgaagtttgctctgggctagcatttagggtacctcagtggagttcagtgggaaatttgtgaaacctaggccagctgtggagctggtataggagtctttaccctaagagcagagggtttaaggttcctagagcggatcagctggtcaagttttgtgaatagattctatgatgtcaaggctccttcagccctgacatttgtgctgtgtccaccatctggtgtcttcttgctttacgtttcaagtctttgtatccatggtggtgggattta

SEQ ID NO: 262179 - DNA, 812 bp, Homo sapiens
cagtcctcccacctcagcctcctgaagcactgggatcacagatccagcctatcttttaggattgagacctgttaaacttgcaaatgaaggggtactttcaagctgttggtgatgtttacaccttcctgagaaagaggagcttgggttcttgggttcaggtaggaggtggagacattgattattcactcctccccttctcgtgtacaccctcccccacctaaaaaaaagttataggagattttctctgtcaaactatcaaactgatgaatttgtttcccattttttattaattaaagattaattgccactcagaatgtctgttgacaagaaagttttaccactgaagctgttagaattccagcccaaaacaaagaaagaaatctagagttagcctgtatgacctcctcccagataaatggactacaagggtgaaacttttttaaacactggggatagcttggaggtgtttttgaagttccccactgggatgctgtcctggtttgggaccatctggtctagagatgacaaaagtgggttcccagcctgaagtttgctctgggctagcatttagggtacctcagtggagttcagtgggaaatttgtgaaacctaggccagctgtggagctggtataggagtctttaccctaagagcagagggtttaaggttcctagagcggatcagctggtcaagttttgtgaatagattctatgatgtcaaggctccttcagccctgacatttgtgctgtgtccaccatctggtgtcttcttgctttacgtttcaagtctttgtatccatggtggtgggattta

SEQ ID NO: 262180 - DNA, 983 bp, Homo sapiens
  misc_feature (794)..(794): n is a, c, g, or t
  misc_feature (799)..(800): n is a, c, g, or t
  misc_feature (803)..(803): n is a, c, g, or t
  misc_feature (806)..(806): n is a, c, g, or t
  misc_feature (815)..(816): n is a, c, g, or t
  misc_feature (824)..(824): n is a, c, g, or t
tgggtctttgctcttttggggtctttgctcttttggggtctttgctcaagactatttcatcttacacggccttctcccgtctcatcctgattctgcgtgccctacatgtgaacaacgatcgggcaaaagtgatcctgaagccagacaagactactattacagaaccacaccacatctggcccactctgactgacgaagaatggatcaaggtcgaggtgcagctcaaggatctgatcttggctgactacggcaagaaaaacaatgtgaacgtggcatcactgacacaatcagaaattcgagacatcatcctgggtatggagatctcggcaccgtcacagcagcggcagcagatcgctgagatcgagaagcagaccaaggaacaatcgcagctgacggcaacacagactcgcactgtcaacaagcatggcgatgagatcatcacctccaccaccagcaactatgagacccagactttctcatccaagactgagtggagggtcagggccatctctgctgccaacctgcacctaaggaccaatcacatctatgtttcatctgacgacatcaaggagactggctacacctacatccttcccaagaatgtgcttaagaagttcatctgcatatctgaccttcgggcccaaattgcaggatacctatatggggtgagcccaccagataacccccaggtgaaggagatccgctgcattgtgatggtgccgcagtggggcactcaccagaccgtgcacctgcctggccagctgccccagcatgagtacctcaaggagatgganccttnngtnggntcccactcnnccaatgantccggcgtttcacccggttgtacaaccaggcaaatatggtggaaccctttggtggggacgcctttctcctggggtcgccggcttgacgagggttagggcccagggtatggggcggaccacggggaccgggctgctctagagggaggtggtcgtttttgc

SEQ ID NO: 262181 - DNA, 613 bp, Homo sapiens
  misc_feature (6)..(6): n is a, c, g, or t
ccccgnactagcccgacaggaagcgaggaggtacctcacagggccagggtggagaactagcaggaggccgtcagcagaggggtgggaacttacagcaggagcccaggagctagtgcagggaccagagggtgacaatgaaggctgacatcatggagaggcagacccagcactgggagtacgcgagtgggagtggagagtacccccagcatccccaaatggcaaagaggccttgacagctttgtaacctgcccaaaggcctgccccagcatgagtacctcaaggagatggaacccttaggttggatccacactcagcccaatgagtccccgcagttatcaccccaggatgtcaccacccatgccaagatcatggctgacaacccatcttgggatggcgagaagaccattatcatcacatgcagcttcacgccaggctcctgtacactgacggcctacaagctgacccccagtggctacgaatggggccgccagaacacagacaagggcaacaaccccaagggctacctgccttcacactatgagagggtgcagatgctgctgtcggaccgttgctagtcggggactgtcgggctagtcggggactgtcgggctag

SEQ ID NO: 262182 - DNA, 1694 bp, Homo sapiens
atcgtacaatgcgcaatcttggcaaatttattcaaaccctttagacttcggtctctcacagtgcgacgccgggagcccatcacacgctgaggtctgtcagaggccccagaaacagcctcggaaatggaggaggcggggctcaccccgaccacacccccttgcgttcaaagcctttccgcctatgggcccgcctcctcggcgcagtgtgcaactctaattggtcgtctcactaatccatctgagcacctcggcgccgactggatcaactgctgaactcgggttgcgcacttcccggcgctgggaacgcggagcggacgcagtctggccgccattgcgctgcggggaaagcggcctcttgtgtgagggcctgtgggattctccggatatggccggagtgtttccttatcgagggccgggtaacccggtgcctggccctctagccccgctaccggactacatgtcggaggagaagctgcaggagaaagctcgaaaatggcagcaattgcaggccaagcgctatgcagaaaagcggaagtttgggtttgtggatgcccagaaggaagacatgcccccagaacatgtcaggaagatcattcgagaccatggagacatgaccaacaggaagttccgccatgacaaaagggtttacttgggtgccctaaagtacatgccccacgcagtcctcaaactcctggagaacatgcctatgccttgggagcagattcgggatgtgcctgtgctgtaccacatcactggagccatttccttcgtcaatgagattccctgggtcattgaacctgtctacatctcccagtgggggtcaatgtggattatgatgcgccgagaaaaaagagataggaggcatttcaagaggatgcgttttcccccttttgatgatgaggagccgcccttggactatgctgacaacatcctagatgttgagccactggaggccattcagctagagctggaccctgaggaggacgcccctgtgttggactggttctatgaccaccagccgttgagggacagcaggaagtatgtaaatggctccacttaccagcgctggcagttcacactacctatgatgtcaccacccatgccaagatcatggctgacaacccatcttgggatggcgagaagaccattatcatcacatgcagcttcacgccaggctcctgtacactgacggcctacaagctgacccccagtggctacgaatggggccgccagaacacagacaagggcaacaaccccaagggctacctgccttcacactatgagagggtgcagatgctgctgtcggaccgtttccttggcttcttcatggtccctgcccagtcctcgtggaactacaacttcatgggtgttcggcatgaccccaacatgaaatatgagctacagctggcgaaccccaaagagttctaccacgaggtgcacaggccctctcacttcctcaactttgctctcctgcaggagggggaggtttactctgcggatcgggaggacctgtatgcctgaccgtttccctgcctcctgcttcagcctcccgaggccgaagcctcagcccctccagacaggccgctgacattcagcagtttggcctctttccctctgtctgtgcttgtgttgttgacctcctgatggcttgtcatcctgaataaaatataataataaattttgtataaatagga

SEQ ID NO: 262183 - DNA, 7566 bp, Homo sapiens
atcgtacaatgcgcaatcttggcaaatttattcaaaccctttagacttcggtctctcacagtgcgacgccgggagcccatcacacgctgaggtctgtcagaggccccagaaacagcctcggaaatggaggaggcggggctcaccccgaccacacccccttgcgttcaaagcctttccgcctatgggcccgcctcctcggcgcagtgtgcaactctaattggtcgtctcactaatccatctgagcacctcggcgccgactggatcaactgctgaactcgggttgcgcacttcccggcgctgggaacgcggagcggacgcagtctggccgccattgcgctgcggggaaagcggcctcttgtgtgagggcctgtgggattctccggatatggccggagtgtttccttatcgagggccgggtaacccggtgcctggccctctagccccgctaccggactacatgtcggaggagaagctgcaggagaaagctcgaaaatggcagcaattgcaggccaagcgctatgcagaaaagcggaagtttgggtttgtggatgcccagaaggaagacatgcccccagaacatgtcaggaagatcattcgagaccatggagacatgaccaacaggaagttccgccatgacaaaagggtttacttgggtgccctaaagtacatgccccacgcagtcctcaaactcctggagaacatgcctatgccttgggagcagattcgggatgtgcctgtgctgtaccacatcactggagccatttccttcgtcaatgagattccctgggtcattgaacctgtctacatctcccagtgggggtcaatgtggattatgatgcgccgagaaaaaagagataggaggcatttcaagaggatgcgttttcccccttttgatgatgaggagccgcccttggactatgctgacaacatcctagatgttgagccactggaggccattcagctagagctggaccctgaggaggacgcccctgtgttggactggttctatgaccaccagccgttgagggacagcaggaagtatgtaaatggctccacttaccagcgctggcagttcacactacctatgatgtcgactctctaccgcctggctaatcagctcctgacagacttggtggatgacaactacttctacctgtttgatttgaaggccttctttacgtccaaggcactcaatatggccattcctggaggccccaaatttgaacctcttgttcgagacatcaacctacaggatgaagactggaatgaattcaatgatattaacaagattatcatccggcagcctatccgcactgagtacaagattgcttttccttacttgtacaacaatcttccacaccatgtccacctcacctggtaccatactcccaatgttgtattcatcaaaactgaggatcctgacttgccagctttctactttgaccctttgatcaacccaatctcccataggcactcagtcaagagccaggaaccattgccggatgatgatgaggaatttgagctcccggagtttgtggagcccttcctgaaggacacacccctctatacagacaatacagccaatggcattgccctgctctgggccccgcggcccttcaacctacgctctggtcgcacccgtcgggccctggacataccccttgtcaagaactggtatcgggagcattgtcctgccgggcagcctgtgaaagtgagggtctcctaccagaagctgcttaagtactatgtgctgaatgccctgaagcatcggccccctaaggctcaaaagaagaggtatttgttccgctccttcaaagccaccaaattctttcagtccacaaagctggactgggtggaggttgggctccaggtttgccgccagggctacaacatgctcaaccttctcattcaccgcaaaaacctcaactacctgcacctggactacaacttcaacctcaagcctgtgaaaacgctcaccaccaaggaaagaaagaaatctcgttttgggaatgctttccacctgtgtcgggaagttctgcgtttgactaagctggtggtggatagtcacgtgcagtatcggctgggcaatgtggatgccttccagctggcagatggattgcagtatatatttgcccatgttgggcagttgacgggcatgtatcgatacaaatacaagctgatgcgacagattcgcatgtgcaaggacctgaagcatctcatctattatcgtttcaacacgggccctgtagggaagggtcctggctgtggcttctgggctgccggttggcgagtctggctctttttcatgcgtggcattacccctttattagagcgatggcttggcaacctcctggcccggcagtttgaaggtcgacactcaaagggggtggcaaagacagtaacaaagcagcgagtggagtcacattttgaccttgagctgcgggcagctgtgatgcatgatattctggacatgatgcctgaggggatcaagcagaacaaggcccggacaatcctgcagcacctcagtgaagcctggcgctgctggaaagccaacattccctggaaggtccctgggctgccgacgcccatagagaatatgatccttcgatacgtgaaggccaaggctgactggtggaccaacactgcccactacaaccgagaacggatccgccgaggggccactgtggacaagactgtttgtaaaaagaatctgggccgcctcacccggctctatctgaaggcagaacaggagcggcagcacaactacctgaaggacgggccttacatcacagcggaggaagcagtggcagtatataccaccacagtgcattggttggaaagccgcaggttttcacccatcccattccccccactctcctataagcatgacaccaagttgctcatcttggcattggagcggctcaaggaagcttatagtgtgaagtctcggttgaaccagtctcagagggaggagctaggtctgatcgagcaggcctacgataacccccacgaggcgctgtcccgcatcaagcgtcacctcctcacacagagagccttcaaagaggtgggcattgagttcatggatctgtatagccacctcgttccagtatatgatgttgagcccctggagaagataactgatgcttacctggaccagtacctgtggtatgaagccgacaagcgccgcctgttcccaccctggattaagcctgcagacacagaaccacctccgctgcttgtttacaagtggtgtcaaggcatcaataacctgcaggacgtgtgggagacgagtgaaggcgagtgcaatgtcatgctggaatcccgctttgagaagatgtatgagaagatcgacttgactctgctcaacaggctgctgcgcctcatcgtggaccacaacatagccgactacatgacagccaagaacaacgtcgtcatcaactataaggacatgaaccatacgaattcatatgggatcatcagaggcctgcagtttgcctcattcatcgtgcagtattatggcctggtgatggatttgcttgtattgggattgcaccgggccagtgagatggctgggccccctcagatgccaaatgactttctcagtttccaggacatagccactgaggctgcccaccccatccgtctcttctgcagatacattgatcgcatccatatttttttcaggttcacagcagatgaggctcgggacctgattcaacgttacctgacagagcaccctgaccccaataatgaaaacatcgttggctataataacaagaagtgctggccccgagatgcccgcatgcgcctcatgaaacatgatgttaacttaggccgggcggtattctgggacatcaagaaccgcttgccacggtcagtgactacagttcagtgggagaacagcttcgtgtctgtgtacagtaaggacaaccccaacctgctgttcaacatgtgtggcttcgagtgccgcatcctgcctaagtgccgcaccagctatgaggagttcacccacaaggacggggtctggaacctgcagaatgaggttactaaggagcgcacagctcagtgtttcctgcgtgtggacgatgagtcaatgcagcgcttccacaaccgcgtgcgtcagattctcatggcctctgggtccaccaccttcaccaagattgtgaataagtggaatacagctctcattggccttatgacatactttcgggaggctgtggtgaacacccaagagctcttggacttactggtgaagtgtgagaacaaaatccagacacgtatcaagattggactcaactccaagatgccaagtcggttccccccggttgtgttctacacccctaaggagttgggtggactcggcatgctctcaatgggccatgtgctcatcccccaatccgacctcaggtggtccaaacagacagatgtaggtatcacacactttcgttcaggaatgagccatgaagaagaccagctcattcccaacttgtaccgctacatacagccatgggagagcgagttcattgattctcagcgggtctgggctgagtacgcactcaagaggcaagaggccattgctcagaacagacgcctgactttagaagacctagaagattcatgggatcgtggcattcctcgaatcaataccctcttccagaaggaccggcacacactggcttatgataagggctggcgtgtcagaactgactttaagcagtatcaggttttgaagcagaatccgttctggtggacacaccagcggcatgatgggaagctctggaacctgaacaactaccgtacagacatgatccaggccctgggcggtgtggaaggcattctggaacacacactctttaagggcacttacttccctacctgggaggggcttttctgggagaaggccagtggctttgaggaatctatgaagtggaagaagctaactaatgctcagcgatcaggactgaaccagattcccaatcgtagattcaccctctggtggtccccgaccattaatcgagccaatgtatatgtaggctttcaggtgcagctagacctgacgggtatcttcatgcacggcaagatccccacgctgaagatctctctcatccagatcttccgagctcacttgtggcagaagatccatgagagcattgttatggacttatgtcaggtgtttgaccaggaacttgatgcactggaaattgagacagtacaaaaggagacaatccatccccgaaagtcatataagatgaactcttcctgtgcagatatcctgctctttgcctcctataagtggaatgtctcccggccctcattgctggctgactccaaggatgtgatggacagcaccaccacccagaaatactggattgacatccagttgcgctggggggactatgattcccacgacattgagcgctacgcccgggccaagttcctggactacaccaccgacaacatgagtatctacccttcgcccacaggtgtactcatcgccattgacctggcctataacttgcacagtgcctatggaaactggttcccaggcagcaagcctctcatacaacaggccatggccaagatcatgaaggcaaaccctgccctgtatgtgttacgtgaacggatccgcaaggggctacagctctattcatctgaacccactgagccttatttgtcttctcagaactatggtgagctcttctccaaccagattatctggtttgtggatgacaccaacgtctacagagtgactattcacaagacctttgaagggaacttgacaaccaagcccatcaacggagccatcttcatcttcaacccacgcacagggcagctgttcctcaagataatccacacgtccgtgtgggcgggacagaagcgtttggggcagttggctaagtggaagacagctgaggaggtggccgccctgatccgatctctgcctgtggaggagcagcccaagcagatcattgtcaccaggaagggcatgctggacccactggaggtgcacttactggacttccccaatattgtcatcaaaggatcggagctccaactccctttccaggcgtgtctcaaggtggaaaaattcggggatctcatccttaaagccactgagccccagatggttctcttcaacctctatgacgactggctcaagactatttcatcttacacggccttctcccgtctcatcctgattctgcgtgccctacatgtgaacaacgatcgggcaaaagtgatcctgaagccagacaagactactattacagaaccacaccacatctggcccactctgactgacgaagaatggatcaaggtcgaggtgcagctcaaggatctgatcttggctgactacggcaagaaaaacaatgtgaacgtggcatcactgacacaatcagaaattcgagacatcatcctgggtatggagatctcggcaccgtcacagcagcggcagcagatcgctgagatcgagaagcagaccaaggaacaatcgcagctgacggcaacacagactcgcactgtcaacaagcatggcgatgagatcatcacctccaccaccagcaactatgagacccagactttctcatccaagactgagtggagggtcagggccatctctgctgccaacctgcacctaaggaccaatcacatctatgtttcatctgacgacatcaaggagactggctacacctacatccttcccaagaatgtgcttaagaagttcatctgcatatctgaccttcgggcccaaattgcaggatacctatatggggtgagcccaccagataacccccaggtgaaggagatccgctgcattgtgatggtgccgcagtggggcactcaccagaccgtgcacctgcctggccagctgccccagcatgagtacctcaaggagatggaacccttaggttggatccacactcagcccaatgagtccccgcagttatcaccccaggatgtcaccacccatgccaagatcatggctgacaacccatcttgggatggcgagaagaccattatcatcacatgcagcttcacgccaggctcctgtacactgacggcctacaagctgacccccagtggctacgaatggggccgccagaacacagacaagggcaacaaccccaagggctacctgccttcacactatgagagggtgcagatgctgctgtcggaccgtttccttggcttcttcatggtccctgcccagtcctcgtggaactacaacttcatgggtgttcggcatgaccccaacatgaaatatgagctacagctggcgaaccccaaagagttctaccacgaggtgcacaggccctctcacttcctcaactttgctctcctgcaggagggggaggtttactctgcggatcgggaggacctgtatgcctgaccgtttccctgcctcctgcttcagcctcccgaggccgaagcctcagcccctccagacaggccgctgacattcagcagtttggcctctttccctctgtctgtgcttgtgttgttgacctcctgatggcttgtcatcctgaataaaatataataataaattttgtataaatagga

SEQ ID NO: 262184 - DNA, 674 bp, Homo sapiens
  misc_feature (48)..(48): n is a, c, g, or t
  misc_feature (136)..(136): n is a, c, g, or t
  misc_feature (188)..(188): n is a, c, g, or t
tgaaactgagtctttctctgttgccccagctggagtacaatggcacgnatcttggctcaccacagcctccgcctcccgggttgaagtgattctcctgcttcagcctcccaagtagctgggactacaggcgcgcacncaccatgcctggctagtttttgaaattttagtagagatggggtttcactgtnattggccaggctggtcttgaactcctgacctcaggtgatccacactcctcggcctcccaaagtactgggattaccagcgtgagtcaccgtgcccagcctcactggacttaactttctcagatcttttttcatgtatacatttagacagggctctttccagggacctatttggagagcagctatgactgtgtccttactgctcctttaaattcacatgggcgatcttagttcctggtttttgccttaaggtttctcatttacccttttgttttagatgttgaggtcccagagtttttttttctttttacccctctactgccatacctacattcctctgtatgtatattatacatatatgccccacctctgcccaggtttctattgttgtttaaatgcattgctaacttgtattcttaacttctgcttgggatcgtagggccctgtagggacaaggtagagagcctggccaaggtagagagcctgcca

SEQ ID NO: 262185 - DNA, 205 bp, Homo sapiens
  misc_feature (42)..(42): n is a, c, g, or t
gaaggtgcacacgcagtgtgctgtcccgcttggatctgacgnaatcttggaagtgttagtgcacctccgtttcacacttcctgtagaagcagctcttgtggattgtctggggcgtgagtataggctgtcctgtcctaccaagttacaccctttccattgaggcagaagtgaccaaggggaagggatccttgtaatataacccaca

SEQ ID NO: 262186 - DNA, 8155 bp, Homo sapiens
atcgtacaatgcgcaatcttggcaaatttattcaaaccctttagacttcggtctctcacagtgcgacgccgggagcccatcacacgctgaggtctgtcagaggccccagaaacagcctcggaaatggaggaggcggggctcaccccgaccacacccccttgcgttcaaagcctttccgcctatgggcccgcctcctcggcgcagtgtgcaactctaattggtcgtctcactaatccatctgagcacctcggcgccgactggatcaactgctgaactcgggttgcgcacttcccggcgctgggaacgcggagcggacgcagtctggccgccattgcgctgcggggaaagcggcctcttgtgtgagggcctgtggggtgcgtggcaggcgtttaaggccgggctgcgggaggcgtggtcgggtcgggccgagtgaccgaaggggttaggccgggcggggctggatgcactgtgtggcgggactgcaggccggggtccccggacgcctttctgctgcgcttcttgtgggcccgggcctgtggttagtgaatttttctatcccgccgctccccagattctccggatatggccggagtgtttccttatcgagggccgggtaacccggtgcctggccctctagccccgctaccggactacatgtcggaggagaagctgcaggagaaagctcgaaaatggcagcaattgcaggccaagcgctatgcagaaaagcggaagtttgggtttgtggatgcccagaaggaagacatgcccccagaacatgtcaggaagatcattcgagaccatggagacatgaccaacaggaagttccgccatgacaaaagggtttacttgggtgccctaaagtacatgccccacgcagtcctcaaactcctggagaacatgcctatgccttgggagcagattcgggatgtgcctgtgctgtaccacatcactggagccatttccttcgtcaatgagattccctgggtcattgaacctgtctacatctcccagtgggggtcaatgtggattatgatgcgccgagaaaaaagagataggaggcatttcaagaggatgcgttttcccccttttgatgatgaggagccgcccttggactatgctgacaacatcctagatgttgagccactggaggccattcagctagagctggaccctgaggaggacgcccctgtgttggactggttctatgaccaccagccgttgagggacagcaggaagtatgtaaatggctccacttaccagcgctggcagttcacactacctatgatgtcgactctctaccgcctggctaatcagctcctgacagacttggtggatgacaactacttctacctgtttgatttgaaggccttctttacgtccaaggcactcaatatggccattcctggaggccccaaatttgaacctcttgttcgagacatcaacctacaggatgaagactggaatgaattcaatgatattaacaagattatcatccggcagcctatccgcactgagtacaagattgcttttccttacttgtacaacaatcttccacaccatgtccacctcacctggtaccatactcccaatgttgtattcatcaaaactgaggatcctgacttgccagctttctactttgaccctttgatcaacccaatctcccataggcactcagtcaagagccaggaaccattgccggatgatgatgaggaatttgagctcccggagtttgtggagcccttcctgaaggacacacccctctatacagacaatacagccaatggcattgccctgctctgggccccgcggcccttcaacctacgctctggtcgcacccgtcgggccctggacataccccttgtcaagaactggtatcgggagcattgtcctgccgggcagcctgtgaaagtgagggtctcctaccagaagctgcttaagtactatgtgctgaatgccctgaagcatcggccccctaaggctcaaaagaagaggtatttgttccgctccttcaaagccaccaaattctttcagtccacaaagctggactgggtggaggttgggctccaggtttgccgccagggctacaacatgctcaaccttctcattcaccgcaaaaacctcaactacctgcacctggactacaacttcaacctcaagcctgtgaaaacgctcaccaccaaggaaagaaagaaatctcgttttgggaatgctttccacctgtgtcgggaagttctgcgtttgactaagctggtggtggatagtcacgtgcagtatcggctgggcaatgtggatgccttccagctggcagatggattgcagtatatatttgcccatgttgggcagttgacgggcatgtatcgatacaaatacaagctgatgcgacagattcgcatgtgcaaggacctgaagcatctcatctattatcgtttcaacacgggccctgtagggaagggtcctggctgtggcttctgggctgccggttggcgagtctggctctttttcatgcgtggcattacccctttattagagcgatggcttggcaacctcctggcccggcagtttgaaggtgagtggttttctctgtgtccaacttctcctgttattgcttcaaaagtacctgcccctgtttgagtctgttccctgctcttgtatgagcactcttcctactggattgcctttaggtccagttctgaaatgagtctgacctagtattctatttcttgggcttccttctggggccttgagaggcagtcatgcatttgcaggagtggaaattcctcagaagcatagttgtgaatgtttaaggtagctcgtctttttgcatatgctgggcacagggacgctttgttaatacctaattttattaataaccataatgagtgaggagcatgaaggtagagacccttattgaaagcaaggaatcttccttgtaatccccttgggacactctacttccaggtcgacactcaaagggggtggcaaagacagtaacaaagcagcgagtggagtcacattttgaccttgagctgcgggcagctgtgatgcatgatattctggacatgatgcctgaggggatcaagcagaacaaggcccggacaatcctgcagcacctcagtgaagcctggcgctgctggaaagccaacattccctggaaggtccctgggctgccgacgcccatagagaatatgatccttcgatacgtgaaggccaaggctgactggtggaccaacactgcccactacaaccgagaacggatccgccgaggggccactgtggacaagactgtttgtaaaaagaatctgggccgcctcacccggctctatctgaaggcagaacaggagcggcagcacaactacctgaaggacgggccttacatcacagcggaggaagcagtggcagtatataccaccacagtgcattggttggaaagccgcaggttttcacccatcccattccccccactctcctataagcatgacaccaagttgctcatcttggcattggagcggctcaaggaagcttatagtgtgaagtctcggttgaaccagtctcagagggaggagctaggtctgatcgagcaggcctacgataacccccacgaggcgctgtcccgcatcaagcgtcacctcctcacacagagagccttcaaagaggtgggcattgagttcatggatctgtatagccacctcgttccagtatatgatgttgagcccctggagaagataactgatgcttacctggaccagtacctgtggtatgaagccgacaagcgccgcctgttcccaccctggattaagcctgcagacacagaaccacctccgctgcttgtttacaagtggtgtcaaggcatcaataacctgcaggacgtgtgggagacgagtgaaggcgagtgcaatgtcatgctggaatcccgctttgagaagatgtatgagaagatcgacttgactctgctcaacaggctgctgcgcctcatcgtggaccacaacatagccgactacatgacagccaagaacaacgtcgtcatcaactataaggacatgaaccatacgaattcatatgggatcatcagaggcctgcagtttgcctcattcatcgtgcagtattatggcctggtgatggatttgcttgtattgggattgcaccgggccagtgagatggctgggccccctcagatgccaaatgactttctcagtttccaggacatagccactgaggctgcccaccccatccgtctcttctgcagatacattgatcgcatccatatttttttcaggttcacagcagatgaggctcgggacctgattcaacgttacctgacagagcaccctgaccccaataatgaaaacatcgttggctataataacaagaagtgctggccccgagatgcccgcatgcgcctcatgaaacatgatgttaacttaggccgggcggtattctgggacatcaagaaccgcttgccacggtcagtgactacagttcagtgggagaacagcttcgtgtctgtgtacagtaaggacaaccccaacctgctgttcaacatgtgtggcttcgagtgccgcatcctgcctaagtgccgcaccagctatgaggagttcacccacaaggacggggtctggaacctgcagaatgaggttactaaggagcgcacagctcagtgtttcctgcgtgtggacgatgagtcaatgcagcgcttccacaaccgcgtgcgtcagattctcatggcctctgggtccaccaccttcaccaagattgtgaataagtggaatacagctctcattggccttatgacatactttcgggaggctgtggtgaacacccaagagctcttggacttactggtgaagtgtgagaacaaaatccagacacgtatcaagattggactcaactccaagatgccaagtcggttccccccggttgtgttctacacccctaaggagttgggtggactcggcatgctctcaatgggccatgtgctcatcccccaatccgacctcaggtggtccaaacagacagatgtaggtatcacacactttcgttcaggaatgagccatgaagaagaccagctcattcccaacttgtaccgctacatacagccatgggagagcgagttcattgattctcagcgggtctgggctgagtacgcactcaagaggcaagaggccattgctcagaacagacgcctgactttagaagacctagaagattcatgggatcgtggcattcctcgaatcaataccctcttccagaaggaccggcacacactggcttatgataagggctggcgtgtcagaactgactttaagcagtatcaggttttgaagcagaatccgttctggtggacacaccagcggcatgatgggaagctctggaacctgaacaactaccgtacagacatgatccaggccctgggcggtgtggaaggcattctggaacacacactctttaagggcacttacttccctacctgggaggggcttttctgggagaaggccagtggctttgaggaatctatgaagtggaagaagctaactaatgctcagcgatcaggactgaaccagattcccaatcgtagattcaccctctggtggtccccgaccattaatcgagccaatgtatatgtaggctttcaggtgcagctagacctgacgggtatcttcatgcacggcaagatccccacgctgaagatctctctcatccagatcttccgagctcacttgtggcagaagatccatgagagcattgttatggacttatgtcaggtgtttgaccaggaacttgatgcactggaaattgagacagtacaaaaggagacaatccatccccgaaagtcatataagatgaactcttcctgtgcagatatcctgctctttgcctcctataagtggaatgtctcccggccctcattgctggctgactccaaggatgtgatggacagcaccaccacccagaaatactggattgacatccagttgcgctggggggactatgattcccacgacattgagcgctacgcccgggccaagttcctggactacaccaccgacaacatgagtatctacccttcgcccacaggtgtactcatcgccattgacctggcctataacttgcacagtgcctatggaaactggttcccaggcagcaagcctctcatacaacaggccatggccaagatcatgaaggcaaaccctgccctgtatgtgttacgtgaacggatccgcaaggggctacagctctattcatctgaacccactgagccttatttgtcttctcagaactatggtgagctcttctccaaccagattatctggtttgtggatgacaccaacgtctacagagtgactattcacaagacctttgaagggaacttgacaaccaagcccatcaacggagccatcttcatcttcaacccacgcacagggcagctgttcctcaagataatccacacgtccgtgtgggcgggacagaagcgtttggggcagttggctaagtggaagacagctgaggaggtggccgccctgatccgatctctgcctgtggaggagcagcccaagcagatcattgtcaccaggaagggcatgctggacccactggaggtgcacttactggacttccccaatattgtcatcaaaggatcggagctccaactccctttccaggcgtgtctcaaggtggaaaaattcggggatctcatccttaaagccactgagccccagatggttctcttcaacctctatgacgactggctcaagactatttcatcttacacggccttctcccgtctcatcctgattctgcgtgccctacatgtgaacaacgatcgggcaaaagtgatcctgaagccagacaagactactattacagaaccacaccacatctggcccactctgactgacgaagaatggatcaaggtcgaggtgcagctcaaggatctgatcttggctgactacggcaagaaaaacaatgtgaacgtggcatcactgacacaatcagaaattcgagacatcatcctgggtatggagatctcggcaccgtcacagcagcggcagcagatcgctgagatcgagaagcagaccaaggaacaatcgcagctgacggcaacacagactcgcactgtcaacaagcatggcgatgagatcatcacctccaccaccagcaactatgagacccagactttctcatccaagactgagtggagggtcagggccatctctgctgccaacctgcacctaaggaccaatcacatctatgtttcatctgacgacatcaaggagactggctacacctacatccttcccaagaatgtgcttaagaagttcatctgcatatctgaccttcgggcccaaattgcaggatacctatatggggtgagcccaccagataacccccaggtgaaggagatccgctgcattgtgatggtgccgcagtggggcactcaccagaccgtgcacctgcctggccagctgccccagcatgagtacctcaaggagatggaacccttaggttggatccacactcagcccaatgagtccccgcagttatcaccccaggatgtcaccacccatgccaagatcatggctgacaacccatcttgggatggcgagaagaccattatcatcacatgcagcttcacgccaggctcctgtacactgacggcctacaagctgacccccagtggctacgaatggggccgccagaacacagacaagggcaacaaccccaagggctacctgccttcacactatgagagggtgcagatgctgctgtcggaccgtttccttggcttcttcatggtccctgcccagtcctcgtggaactacaacttcatgggtgttcggcatgaccccaacatgaaatatgagctacagctggcgaaccccaaagagttctaccacgaggtgcacaggccctctcacttcctcaactttgctctcctgcaggagggggaggtttactctgcggatcgggaggacctgtatgcctgaccgtttccctgcctcctgcttcagcctcccgaggccgaagcctcagcccctccagacaggccgctgacattcagcagtttggcctctttccctctgtctgtgcttgtgttgttgacctcctgatggcttgtcatcctgaataaaatataataataaattttgtataaatagga

SEQ ID NO: 262187 - DNA, 8270 bp, Homo sapiens
atcgtacaatgcgcaatcttggcaaatttattcaaaccctttagacttcggtctctcacagtgcgacgccgggagcccatcacacgctgaggtctgtcagaggccccagaaacagcctcggaaatggaggaggcggggctcaccccgaccacacccccttgcgttcaaagcctttccgcctatgggcccgcctcctcggcgcagtgtgcaactctaattggtcgtctcactaatccatctgagcacctcggcgccgactggatcaactgctgaactcgggttgcgcacttcccggcgctgggaacgcggagcggacgcagtctggccgccattgcgctgcggggaaagcggcctcttgtgtgagggcctgtggggtgcgtggcaggcgtttaaggccgggctgcgggaggcgtggtcgggtcgggccgagtgaccgaaggggttaggccgggcggggctggatgcactgtgtggcgggactgcaggccggggtccccggacgcctttctgctgcgcttcttgtgggcccgggcctgtggttagtgaatttttctatcccgccgctccccagattctccggatatggccggagtgtttccttatcgagggccgggtaacccggtgcctggccctctagccccgctaccggactacatgtcggaggagaagctgcaggagaaagctcgaaaatggcagcaattgcaggccaagcgctatgcagaaaagcggaagtttgggtttgtggatgcccagaaggaagacatgcccccagaacatgtcaggaagatcattcgagaccatggagacatgaccaacaggaagttccgccatgacaaaagggtttacttgggtgccctaaagtacatgccccacgcagtcctcaaactcctggagaacatgcctatgccttgggagcagattcgggatgtgcctgtgctgtaccacatcactggagccatttccttcgtcaatgagattccctgggtcattgaacctgtctacatctcccagtgggggtcaatgtggattatgatgcgccgagaaaaaagagataggaggcatttcaagaggatgcgttttcccccttttgatgatgaggagccgcccttggactatgctgacaacatcctagatgttgagccactggaggccattcagctagagctggaccctgaggaggacgcccctgtgttggactggttctatgaccaccagccgttgagggacagcaggaagtatgtaaatggctccacttaccagcgctggcagttcacactacctatgatgtcgactctctaccgcctggctaatcagctcctgacagacttggtggatgacaactacttctacctgtttgatttgaaggccttctttacgtccaaggcactcaatatggccattcctggaggccccaaatttgaacctcttgttcgagacatcaacctacaggatgaagactggaatgaattcaatgatattaacaagattatcatccggcagcctatccgcactgagtacaagattgcttttccttacttgtacaacaatcttccacaccatgtccacctcacctggtaccatactcccaatgttgtattcatcaaaactgaggatcctgacttgccagctttctactttgaccctttgatcaacccaatctcccataggcactcagtcaagagccaggaaccattgccggatgatgatgaggaatttgagctcccggagtttgtggagcccttcctgaaggacacacccctctatacagacaatacagccaatggcattgccctgctctgggccccgcggcccttcaacctacgctctggtcgcacccgtcgggccctggacataccccttgtcaagaactggtatcgggagcattgtcctgccgggcagcctgtgaaagtgagggtctcctaccagaagctgcttaagtactatgtgctgaatgccctgaagcatcggccccctaaggctcaaaagaagaggtatttgttccgctccttcaaagccaccaaattctttcagtccacaaagctggactgggtggaggttgggctccaggtttgccgccagggctacaacatgctcaaccttctcattcaccgcaaaaacctcaactacctgcacctggactacaacttcaacctcaagcctgtgaaaacgctcaccaccaaggaaagaaagaaatctcgttttgggaatgctttccacctgtgtcgggaagttctgcgtttgactaagctggtggtggatagtcacgtgcagtatcggctgggcaatgtggatgccttccagctggcagatggattgcagtatatatttgcccatgttgggcagttgacgggcatgtatcgatacaaatacaagctgatgcgacagattcgcatgtgcaaggacctgaagcatctcatctattatcgtttcaacacgggccctgtagggaagggtcctggctgtggcttctgggctgccggttggcgagtctggctctttttcatgcgtggcattacccctttattagagcgatggcttggcaacctcctggcccggcagtttgaaggtgagtggttttctctgtgtccaacttctcctgttattgcttcaaaagtacctgcccctgtttgagtctgttccctgctcttgtatgagcactcttcctactggattgcctttaggtccagttctgaaatgagtctgacctagtattctatttcttgggcttccttctggggccttgagaggcagtcatgcatttgcaggagtggaaattcctcagaagcatagttgtgaatgtttaaggtagctcgtctttttgcatatgctgggcacagggacgctttgttaatacctaattttattaataaccataatgagtgaggagcatgaaggtagagacccttattgaaagcaaggaatcttccttgtaatccccttgggacactctacttccaggtcgacactcaaagggggtggcaaagacagtaacaaagcagcgagtggagtcacattttgaccttgagctgcgggcagctgtgatgcatgatattctggacatgatgcctgaggggatcaagcagaacaaggcccggacaatcctgcagcacctcagtgaagcctggcgctgctggaaagccaacattccctggaaggtccctgggctgccgacgcccatagagaatatgatccttcgatacgtgaaggccaaggctgactggtggaccaacactgcccactacaaccgagaacggatccgccgaggggccactgtggacaagactgtttgtaaaaagaatctgggccgcctcacccggctctatctgaaggcagaacaggagcggcagcacaactacctgaaggacgggccttacatcacagcggaggaagcagtggcagtatataccaccacagtgcattggttggaaagccgcaggttttcacccatcccattccccccactctcctataagcatgacaccaagttgctcatcttggcattggagcggctcaaggaagcttatagtgtgaagtctcggttgaaccagtctcagagggaggagctaggtctgatcgagcaggcctacgataacccccacgaggcgctgtcccgcatcaagcgtcacctcctcacacagagagccttcaaagaggtgagtgaggcctcccaagttttctttttggttctaccaaaggtagcagttgcctttggttctaccaaaggtagcagttggtggattggtgtgaaccagcctccttgtcccacaggtgggcattgagttcatggatctgtatagccacctcgttccagtatatgatgttgagcccctggagaagataactgatgcttacctggaccagtacctgtggtatgaagccgacaagcgccgcctgttcccaccctggattaagcctgcagacacagaaccacctccgctgcttgtttacaagtggtgtcaaggcatcaataacctgcaggacgtgtgggagacgagtgaaggcgagtgcaatgtcatgctggaatcccgctttgagaagatgtatgagaagatcgacttgactctgctcaacaggctgctgcgcctcatcgtggaccacaacatagccgactacatgacagccaagaacaacgtcgtcatcaactataaggacatgaaccatacgaattcatatgggatcatcagaggcctgcagtttgcctcattcatcgtgcagtattatggcctggtgatggatttgcttgtattgggattgcaccgggccagtgagatggctgggccccctcagatgccaaatgactttctcagtttccaggacatagccactgaggctgcccaccccatccgtctcttctgcagatacattgatcgcatccatatttttttcaggttcacagcagatgaggctcgggacctgattcaacgttacctgacagagcaccctgaccccaataatgaaaacatcgttggctataataacaagaagtgctggccccgagatgcccgcatgcgcctcatgaaacatgatgttaacttaggccgggcggtattctgggacatcaagaaccgcttgccacggtcagtgactacagttcagtgggagaacagcttcgtgtctgtgtacagtaaggacaaccccaacctgctgttcaacatgtgtggcttcgagtgccgcatcctgcctaagtgccgcaccagctatgaggagttcacccacaaggacggggtctggaacctgcagaatgaggttactaaggagcgcacagctcagtgtttcctgcgtgtggacgatgagtcaatgcagcgcttccacaaccgcgtgcgtcagattctcatggcctctgggtccaccaccttcaccaagattgtgaataagtggaatacagctctcattggccttatgacatactttcgggaggctgtggtgaacacccaagagctcttggacttactggtgaagtgtgagaacaaaatccagacacgtatcaagattggactcaactccaagatgccaagtcggttccccccggttgtgttctacacccctaaggagttgggtggactcggcatgctctcaatgggccatgtgctcatcccccaatccgacctcaggtggtccaaacagacagatgtaggtatcacacactttcgttcaggaatgagccatgaagaagaccagctcattcccaacttgtaccgctacatacagccatgggagagcgagttcattgattctcagcgggtctgggctgagtacgcactcaagaggcaagaggccattgctcagaacagacgcctgactttagaagacctagaagattcatgggatcgtggcattcctcgaatcaataccctcttccagaaggaccggcacacactggcttatgataagggctggcgtgtcagaactgactttaagcagtatcaggttttgaagcagaatccgttctggtggacacaccagcggcatgatgggaagctctggaacctgaacaactaccgtacagacatgatccaggccctgggcggtgtggaaggcattctggaacacacactctttaagggcacttacttccctacctgggaggggcttttctgggagaaggccagtggctttgaggaatctatgaagtggaagaagctaactaatgctcagcgatcaggactgaaccagattcccaatcgtagattcaccctctggtggtccccgaccattaatcgagccaatgtatatgtaggctttcaggtgcagctagacctgacgggtatcttcatgcacggcaagatccccacgctgaagatctctctcatccagatcttccgagctcacttgtggcagaagatccatgagagcattgttatggacttatgtcaggtgtttgaccaggaacttgatgcactggaaattgagacagtacaaaaggagacaatccatccccgaaagtcatataagatgaactcttcctgtgcagatatcctgctctttgcctcctataagtggaatgtctcccggccctcattgctggctgactccaaggatgtgatggacagcaccaccacccagaaatactggattgacatccagttgcgctggggggactatgattcccacgacattgagcgctacgcccgggccaagttcctggactacaccaccgacaacatgagtatctacccttcgcccacaggtgtactcatcgccattgacctggcctataacttgcacagtgcctatggaaactggttcccaggcagcaagcctctcatacaacaggccatggccaagatcatgaaggcaaaccctgccctgtatgtgttacgtgaacggatccgcaaggggctacagctctattcatctgaacccactgagccttatttgtcttctcagaactatggtgagctcttctccaaccagattatctggtttgtggatgacaccaacgtctacagagtgactattcacaagacctttgaagggaacttgacaaccaagcccatcaacggagccatcttcatcttcaacccacgcacagggcagctgttcctcaagataatccacacgtccgtgtgggcgggacagaagcgtttggggcagttggctaagtggaagacagctgaggaggtggccgccctgatccgatctctgcctgtggaggagcagcccaagcagatcattgtcaccaggaagggcatgctggacccactggaggtgcacttactggacttccccaatattgtcatcaaaggatcggagctccaactccctttccaggcgtgtctcaaggtggaaaaattcggggatctcatccttaaagccactgagccccagatggttctcttcaacctctatgacgactggctcaagactatttcatcttacacggccttctcccgtctcatcctgattctgcgtgccctacatgtgaacaacgatcgggcaaaagtgatcctgaagccagacaagactactattacagaaccacaccacatctggcccactctgactgacgaagaatggatcaaggtcgaggtgcagctcaaggatctgatcttggctgactacggcaagaaaaacaatgtgaacgtggcatcactgacacaatcagaaattcgagacatcatcctgggtatggagatctcggcaccgtcacagcagcggcagcagatcgctgagatcgagaagcagaccaaggaacaatcgcagctgacggcaacacagactcgcactgtcaacaagcatggcgatgagatcatcacctccaccaccagcaactatgagacccagactttctcatccaagactgagtggagggtcagggccatctctgctgccaacctgcacctaaggaccaatcacatctatgtttcatctgacgacatcaaggagactggctacacctacatccttcccaagaatgtgcttaagaagttcatctgcatatctgaccttcgggcccaaattgcaggatacctatatggggtgagcccaccagataacccccaggtgaaggagatccgctgcattgtgatggtgccgcagtggggcactcaccagaccgtgcacctgcctggccagctgccccagcatgagtacctcaaggagatggaacccttaggttggatccacactcagcccaatgagtccccgcagttatcaccccaggatgtcaccacccatgccaagatcatggctgacaacccatcttgggatggcgagaagaccattatcatcacatgcagcttcacgccaggctcctgtacactgacggcctacaagctgacccccagtggctacgaatggggccgccagaacacagacaagggcaacaaccccaagggctacctgccttcacactatgagagggtgcagatgctgctgtcggaccgtttccttggcttcttcatggtccctgcccagtcctcgtggaactacaacttcatgggtgttcggcatgaccccaacatgaaatatgagctacagctggcgaaccccaaagagttctaccacgaggtgcacaggccctctcacttcctcaactttgctctcctgcaggagggggaggtttactctgcggatcgggaggacctgtatgcctgaccgtttccctgcctcctgcttcagcctcccgaggccgaagcctcagcccctccagacaggccgctgacattcagcagtttggcctctttccctctgtctgtgcttgtgttgttgacctcctgatggcttgtcatcctgaataaaatataataataaattttgtataaatagga

SEQ ID NO: 262188 - DNA, 8320 bp, Homo sapiens
atcgtacaatgcgcaatcttggcaaatttattcaaaccctttagacttcggtctctcacagtgcgacgccgggagcccatcacacgctgaggtctgtcagaggccccagaaacagcctcggaaatggaggaggcggggctcaccccgaccacacccccttgcgttcaaagcctttccgcctatgggcccgcctcctcggcgcagtgtgcaactctaattggtcgtctcactaatccatctgagcacctcggcgccgactggatcaactgctgaactcgggttgcgcacttcccggcgctgggaacgcggagcggacgcagtctggccgccattgcgctgcggggaaagcggcctcttgtgtgagggcctgtggggtgcgtggcaggcgtttaaggccgggctgcgggaggcgtggtcgggtcgggccgagtgaccgaaggggttaggccgggcggggctggatgcactgtgtggcgggactgcaggccggggtccccggacgcctttctgctgcgcttcttgtgggcccgggcctgtggttagtgaatttttctatcccgccgctccccagattctccggatatggccggagtgtttccttatcgagggccgggtaacccggtgcctggccctctagccccgctaccggactacatgtcggaggagaagctgcaggagaaagctcgaaaatggcagcaattgcaggccaagcgctatgcagaaaagcggaagtttgggtttgtggatgcccagaaggaagacatgcccccagaacatgtcaggaagatcattcgagaccatggagacatgaccaacaggaagttccgccatgacaaaagggtttacttgggtgccctaaagtacatgccccacgcagtcctcaaactcctggagaacatgcctatgccttgggagcagattcgggatgtgcctgtgctgtaccacatcactggagccatttccttcgtcaatgagattccctgggtcattgaacctgtctacatctcccagtgggggtcaatgtggattatgatgcgccgagaaaaaagagataggaggcatttcaagaggatgcgttttcccccttttgatgatgaggagccgcccttggactatgctgacaacatcctagatgttgagccactggaggccattcagctagagctggaccctgaggaggacgcccctgtgttggactggttctatgaccaccagccgttgagggacagcaggaagtatgtaaatggctccacttaccagcgctggcagttcacactacctatgatgtcgactctctaccgcctggctaatcagctcctgacagacttggtggatgacaactacttctacctgtttgatttgaaggccttctttacgtccaaggcactcaatatggccattcctggaggccccaaatttgaacctcttgttcgagacatcaacctacaggatgaagactggaatgaattcaatgatattaacaagattatcatccggcagcctatccgcactgagtacaagattgcttttccttacttgtacaacaatcttccacaccatgtccacctcacctggtaccatactcccaatgttgtattcatcaaaactgaggatcctgacttgccagctttctactttgaccctttgatcaacccaatctcccataggcactcagtcaagagccaggaaccattgccggatgatgatgaggaatttgagctcccggagtttgtggagcccttcctgaaggacacacccctctatacagacaatacagccaatggcattgccctgctctgggccccgcggcccttcaacctacgctctggtcgcacccgtcgggccctggacataccccttgtcaagaactggtatcgggagcattgtcctgccgggcagcctgtgaaagtgagggtctcctaccagaagctgcttaagtactatgtgctgaatgccctgaagcatcggccccctaaggctcaaaagaagaggtatttgttccgctccttcaaagccaccaaattctttcagtccacaaagctggactgggtggaggttgggctccaggtttgccgccagggctacaacatgctcaaccttctcattcaccgcaaaaacctcaactacctgcacctggactacaacttcaacctcaagcctgtgaaaacgctcaccaccaaggaaagaaagaaatctcgttttgggaatgctttccacctgtgtcgggaagttctgcgtttgactaagctggtggtggatagtcacgtgcagtatcggctgggcaatgtggatgccttccagctggcagatggattgcagtatatatttgcccatgttgggcagttgacgggcatgtatcgatacaaatacaagctgatgcgacagattcgcatgtgcaaggacctgaagcatctcatctattatcgtttcaacacgggccctgtagggaagggtcctggctgtggcttctgggctgccggttggcgagtctggctctttttcatgcgtggcattacccctttattagagcgatggcttggcaacctcctggcccggcagtttgaaggtgagtggttttctctgtgtccaacttctcctgttattgcttcaaaagtacctgcccctgtttgagtctgttccctgctcttgtatgagcactcttcctactggattgcctttaggtccagttctgaaatgagtctgacctagtattctatttcttgggcttccttctggggccttgagaggcagtcatgcatttgcaggagtggaaattcctcagaagcatagttgtgaatgtttaaggtagctcgtctttttgcatatgctgggcacagggacgctttgttaatacctaattttattaataaccataatgagtgaggagcatgaaggtagagacccttattgaaagcaaggaatcttccttgtaatccccttgggacactctacttccaggtcgacactcaaagggggtggcaaagacagtaacaaagcagcgagtggagtcacattttgaccttgagctgcgggcagctgtgatgcatgatattctggacatgatgcctgaggggatcaagcagaacaaggcccggacaatcctgcagcacctcagtgaagcctggcgctgctggaaagccaacattccctggaaggtccctgggctgccgacgcccatagagaatatgatccttcgatacgtgaaggccaaggctgactggtggaccaacactgcccactacaaccgagaacggatccgccgaggggccactgtggacaagactgtttgtaaaaagaatctgggccgcctcacccggctctatctgaaggcagaacaggagcggcagcacaactacctgaaggacgggccttacatcacagcggaggaagcagtggcagtatataccaccacagtgcattggttggaaagccgcaggttttcacccatcccattccccccactctcctataagcatgacaccaagttgctcatcttggcattggagcggctcaaggaagcttatagtgtgaagtctcggttgaaccagtctcagagggaggagctaggtctgatcgagcaggcctacgataacccccacgaggcgctgtcccgcatcaagcgtcacctcctcacacagagagccttcaaagaggtgggcattgagttcatggatctgtatagccacctcgttccagtatatgatgttgagcccctggagaagataactgatgcttacctggaccagtacctgtggtatgaagccgacaagcgccgcctgttcccaccctggattaagcctgcagacacagaaccacctccgctgcttgtttacaagtggtgtcaaggcatcaataacctgcaggacgtgtgggagacgagtgaaggcgagtgcaatgtcatgctggaatcccgctttgagaagatgtatgagaagatcgacttgactctgctcaacaggctgctgcgcctcatcgtggaccacaacatagccgactacatgacagccaagaacaacgtcgtcatcaactataaggacatgaaccatacgaattcatatgggatcatcagaggcctgcagtttgcctcattcatcgtgcagtattatggcctggtgatggatttgcttgtattgggattgcaccgggccagtgagatggctgggccccctcagatgccaaatgactttctcagtttccaggacatagccactgaggctgcccaccccatccgtctcttctgcagatacattgatcgcatccatatttttttcaggttcacagcagatgaggctcgggacctgattcaacgttacctgacagagcaccctgaccccaataatgaaaacatcgttggctataataacaagaagtgctggccccgagatgcccgcatgcgcctcatgaaacatgatgttaacttaggccgggcggtattctgggacatcaagaaccgcttgccacggtcagtgactacagttcagtgggagaacagcttcgtgtctgtgtacagtaaggacaaccccaacctgctgttcaacatgtgtggcttcgagtgccgcatcctgcctaagtgccgcaccagctatgaggagttcacccacaaggacggggtctggaacctgcagaatgaggttactaaggagcgcacagctcagtgtttcctgcgtgtggacgatgagtcaatgcagcgcttccacaaccgcgtgcgtcagattctcatggcctctgggtccaccaccttcaccaagattgtgaataagtggaatacagctctcattggccttatgacatactttcgggaggctgtggtgaacacccaagagctcttggacttactggtgaagtgtgagaacaaaatccagacacgtatcaagattggactcaactccaagatgccaagtcggttccccccggttgtgttctacacccctaaggagttgggtggactcggcatgctctcaatgggccatgtgctcatcccccaatccgacctcaggtggtccaaacagacagatgtaggtatcacacactttcgttcaggaatgagccatgaagaagaccagctcattcccaacttgtaccgctacatacagccatgggagagcgagttcattgattctcagcgggtctgggctgagtacgcactcaagaggcaagaggccattgctcagaacagacgcctgactttagaagacctagaagattcatgggatcgtggcattcctcgaatcaataccctcttccagaaggaccggcacacactggcttatgataagggctggcgtgtcagaactgactttaagcagtatcaggttttgaagcagaatccgttctggtggacacaccagcggcatgatgggaagctctggaacctgaacaactaccgtacagacatgatccaggccctgggcggtgtggaaggcattctggaacacacactctttaagggcacttacttccctacctgggaggggcttttctggtgaggattctcctctcttagagggacctgtcacaaccctttgagctcatctcttgtatgcctctgtgatttcctgtggtgtttcccagacagccacctccaggaggttagcagtgtgctgggaaatggcaggatatcacctcacctgcttctcttgctccccagggagaaggccagtggctttgaggaatctatgaagtggaagaagctaactaatgctcagcgatcaggactgaaccagattcccaatcgtagattcaccctctggtggtccccgaccattaatcgagccaatgtatatgtaggctttcaggtgcagctagacctgacgggtatcttcatgcacggcaagatccccacgctgaagatctctctcatccagatcttccgagctcacttgtggcagaagatccatgagagcattgttatggacttatgtcaggtgtttgaccaggaacttgatgcactggaaattgagacagtacaaaaggagacaatccatccccgaaagtcatataagatgaactcttcctgtgcagatatcctgctctttgcctcctataagtggaatgtctcccggccctcattgctggctgactccaaggatgtgatggacagcaccaccacccagaaatactggattgacatccagttgcgctggggggactatgattcccacgacattgagcgctacgcccgggccaagttcctggactacaccaccgacaacatgagtatctacccttcgcccacaggtgtactcatcgccattgacctggcctataacttgcacagtgcctatggaaactggttcccaggcagcaagcctctcatacaacaggccatggccaagatcatgaaggcaaaccctgccctgtatgtgttacgtgaacggatccgcaaggggctacagctctattcatctgaacccactgagccttatttgtcttctcagaactatggtgagctcttctccaaccagattatctggtttgtggatgacaccaacgtctacagagtgactattcacaagacctttgaagggaacttgacaaccaagcccatcaacggagccatcttcatcttcaacccacgcacagggcagctgttcctcaagataatccacacgtccgtgtgggcgggacagaagcgtttggggcagttggctaagtggaagacagctgaggaggtggccgccctgatccgatctctgcctgtggaggagcagcccaagcagatcattgtcaccaggaagggcatgctggacccactggaggtgcacttactggacttccccaatattgtcatcaaaggatcggagctccaactccctttccaggcgtgtctcaaggtggaaaaattcggggatctcatccttaaagccactgagccccagatggttctcttcaacctctatgacgactggctcaagactatttcatcttacacggccttctcccgtctcatcctgattctgcgtgccctacatgtgaacaacgatcgggcaaaagtgatcctgaagccagacaagactactattacagaaccacaccacatctggcccactctgactgacgaagaatggatcaaggtcgaggtgcagctcaaggatctgatcttggctgactacggcaagaaaaacaatgtgaacgtggcatcactgacacaatcagaaattcgagacatcatcctgggtatggagatctcggcaccgtcacagcagcggcagcagatcgctgagatcgagaagcagaccaaggaacaatcgcagctgacggcaacacagactcgcactgtcaacaagcatggcgatgagatcatcacctccaccaccagcaactatgagacccagactttctcatccaagactgagtggagggtcagggccatctctgctgccaacctgcacctaaggaccaatcacatctatgtttcatctgacgacatcaaggagactggctacacctacatccttcccaagaatgtgcttaagaagttcatctgcatatctgaccttcgggcccaaattgcaggatacctatatggggtgagcccaccagataacccccaggtgaaggagatccgctgcattgtgatggtgccgcagtggggcactcaccagaccgtgcacctgcctggccagctgccccagcatgagtacctcaaggagatggaacccttaggttggatccacactcagcccaatgagtccccgcagttatcaccccaggatgtcaccacccatgccaagatcatggctgacaacccatcttgggatggcgagaagaccattatcatcacatgcagcttcacgccaggctcctgtacactgacggcctacaagctgacccccagtggctacgaatggggccgccagaacacagacaagggcaacaaccccaagggctacctgccttcacactatgagagggtgcagatgctgctgtcggaccgtttccttggcttcttcatggtccctgcccagtcctcgtggaactacaacttcatgggtgttcggcatgaccccaacatgaaatatgagctacagctggcgaaccccaaagagttctaccacgaggtgcacaggccctctcacttcctcaactttgctctcctgcaggagggggaggtttactctgcggatcgggaggacctgtatgcctgaccgtttccctgcctcctgcttcagcctcccgaggccgaagcctcagcccctccagacaggccgctgacattcagcagtttggcctctttccctctgtctgtgcttgtgttgttgacctcctgatggcttgtcatcctgaataaaatataataataaattttgtataaatagga

SEQ ID NO: 262189 - DNA, 8333 bp, Homo sapiens
atcgtacaatgcgcaatcttggcaaatttattcaaaccctttagacttcggtctctcacagtgcgacgccgggagcccatcacacgctgaggtctgtcagaggccccagaaacagcctcggaaatggaggaggcggggctcaccccgaccacacccccttgcgttcaaagcctttccgcctatgggcccgcctcctcggcgcagtgtgcaactctaattggtcgtctcactaatccatctgagcacctcggcgccgactggatcaactgctgaactcgggttgcgcacttcccggcgctgggaacgcggagcggacgcagtctggccgccattgcgctgcggggaaagcggcctcttgtgtgagggcctgtggggtgcgtggcaggcgtttaaggccgggctgcgggaggcgtggtcgggtcgggccgagtgaccgaaggggttaggccgggcggggctggatgcactgtgtggcgggactgcaggccggggtccccggacgcctttctgctgcgcttcttgtgggcccgggcctgtggttagtgaatttttctatcccgccgctccccagattctccggatatggccggagtgtttccttatcgagggccgggtaacccggtgcctggccctctagccccgctaccggactacatgtcggaggagaagctgcaggagaaagctcgaaaatggcagcaattgcaggccaagcgctatgcagaaaagcggaagtttgggtttgtggatgcccagaaggaagacatgcccccagaacatgtcaggaagatcattcgagaccatggagacatgaccaacaggaagttccgccatgacaaaagggtttacttgggtgccctaaagtacatgccccacgcagtcctcaaactcctggagaacatgcctatgccttgggagcagattcgggatgtgcctgtgctgtaccacatcactggagccatttccttcgtcaatgagattccctgggtcattgaacctgtctacatctcccagtgggggtcaatgtggattatgatgcgccgagaaaaaagagataggaggcatttcaagaggatgcgttttcccccttttgatgatgaggagccgcccttggactatgctgacaacatcctagatgttgagccactggaggccattcagctagagctggaccctgaggaggacgcccctgtgttggactggttctatgaccaccagccgttgagggacagcaggaagtatgtaaatggctccacttaccagcgctggcagttcacactacctatgatgtcgactctctaccgcctggctaatcagctcctgacagacttggtggatgacaactacttctacctgtttgatttgaaggccttctttacgtccaaggcactcaatatggccattcctggaggccccaaatttgaacctcttgttcgagacatcaacctacaggatgaagactggaatgaattcaatgatattaacaagattatcatccggcagcctatccgcactgagtacaagattgcttttccttacttgtacaacaatcttccacaccatgtccacctcacctggtaccatactcccaatgttgtattcatcaaaactgaggatcctgacttgccagctttctactttgaccctttgatcaacccaatctcccataggcactcagtcaagagccaggaaccattgccggatgatgatgaggaatttgagctcccggagtttgtggagcccttcctgaaggacacacccctctatacagacaatacagccaatggcattgccctgctctgggccccgcggcccttcaacctacgctctggtcgcacccgtcgggccctggacataccccttgtcaagaactggtatcgggagcattgtcctgccgggcagcctgtgaaagtgagggtctcctaccagaagctgcttaagtactatgtgctgaatgccctgaagcatcggccccctaaggctcaaaagaagaggtatttgttccgctccttcaaagccaccaaattctttcagtccacaaagctggactgggtggaggttgggctccaggtttgccgccagggctacaacatgctcaaccttctcattcaccgcaaaaacctcaactacctgcacctggactacaacttcaacctcaagcctgtgaaaacgctcaccaccaaggaaagaaagaaatctcgttttgggaatgctttccacctgtgtcgggaagttctgcgtttgactaagctggtggtggatagtcacgtgcagtatcggctgggcaatgtggatgccttccagctggcagatggattgcagtatatatttgcccatgttgggcagttgacgggcatgtatcgatacaaatacaagctgatgcgacagattcgcatgtgcaaggacctgaagcatctcatctattatcgtttcaacacgggccctgtagggaagggtcctggctgtggcttctgggctgccggttggcgagtctggctctttttcatgcgtggcattacccctttattagagcgatggcttggcaacctcctggcccggcagtttgaaggtgagtggttttctctgtgtccaacttctcctgttattgcttcaaaagtacctgcccctgtttgagtctgttccctgctcttgtatgagcactcttcctactggattgcctttaggtccagttctgaaatgagtctgacctagtattctatttcttgggcttccttctggggccttgagaggcagtcatgcatttgcaggagtggaaattcctcagaagcatagttgtgaatgtttaaggtagctcgtctttttgcatatgctgggcacagggacgctttgttaatacctaattttattaataaccataatgagtgaggagcatgaaggtagagacccttattgaaagcaaggaatcttccttgtaatccccttgggacactctacttccaggtcgacactcaaagggggtggcaaagacagtaacaaagcagcgagtggagtcacattttgaccttgagctgcgggcagctgtgatgcatgatattctggacatgatgcctgaggggatcaagcagaacaaggcccggacaatcctgcagcacctcagtgaagcctggcgctgctggaaagccaacattccctggaaggtccctgggctgccgacgcccatagagaatatgatccttcgatacgtgaaggccaaggctgactggtggaccaacactgcccactacaaccgagaacggatccgccgaggggccactgtggacaagactgtttgtaaaaagaatctgggccgcctcacccggctctatctgaaggcagaacaggagcggcagcacaactacctgaaggacgggccttacatcacagcggaggaagcagtggcagtatataccaccacagtgcattggttggaaagccgcaggttttcacccatcccattccccccactctcctataagcatgacaccaagttgctcatcttggcattggagcggctcaaggaagcttatagtgtgaagtctcggttgaaccagtctcagagggaggagctaggtctgatcgagcaggcctacgataacccccacgaggcgctgtcccgcatcaagcgtcacctcctcacacagagagccttcaaagaggtgggcattgagttcatggatctgtatagccacctcgttccagtatatgatgttgagcccctggagaagataactgatgcttacctggaccagtacctgtggtatgaagccgacaagcgccgcctgttcccaccctggattaagcctgcagacacagaaccacctccgctgcttgtttacaagtggtgtcaaggcatcaataacctgcaggacgtgtgggagacgagtgaaggcgagtgcaatgtcatgctggaatcccgctttgagaagatgtatgagaagatcgacttgactctgctcaacaggctgctgcgcctcatcgtggaccacaacatagccgactacatgacagccaagaacaacgtcgtcatcaactataaggacatgaaccatacgaattcatatgggatcatcagaggcctgcagtttgcctcattcatcgtgcagtattatggcctggtgatggatttgcttgtattgggattgcaccgggccagtgagatggctgggccccctcagatgccaaatgactttctcagtttccaggacatagccactgaggctgcccaccccatccgtctcttctgcagatacattgatcgcatccatatttttttcaggttcacagcagatgaggctcgggacctgattcaacgttacctgacagagcaccctgaccccaataatgaaaacatcgttggctataataacaagaagtgctggccccgagatgcccgcatgcgcctcatgaaacatgatgttaacttgtgagtctaggttggggctgtgtgagctggaaggacataagctaagggcccagagagggcatacctgaggctgcgtcctgggtgggagaggcgtggctgtgtcaggatgtcatcagttggcctttgaagggaagttccttccaagaaactgctgtgaccatgtgttctctgtgggcagaggccgggcggtattctgggacatcaagaaccgcttgccacggtcagtgactacagttcagtgggagaacagcttcgtgtctgtgtacagtaaggacaaccccaacctgctgttcaacatgtgtggcttcgagtgccgcatcctgcctaagtgccgcaccagctatgaggagttcacccacaaggacggggtctggaacctgcagaatgaggttactaaggagcgcacagctcagtgtttcctgcgtgtggacgatgagtcaatgcagcgcttccacaaccgcgtgcgtcagattctcatggcctctgggtccaccaccttcaccaagattgtgaataagtggaatacagctctcattggccttatgacatactttcgggaggctgtggtgaacacccaagagctcttggacttactggtgaagtgtgagaacaaaatccagacacgtatcaagattggactcaactccaagatgccaagtcggttccccccggttgtgttctacacccctaaggagttgggtggactcggcatgctctcaatgggccatgtgctcatcccccaatccgacctcaggtggtccaaacagacagatgtaggtatcacacactttcgttcaggaatgagccatgaagaagaccagctcattcccaacttgtaccgctacatacagccatgggagagcgagttcattgattctcagcgggtctgggctgagtacgcactcaagaggcaagaggccattgctcagaacagacgcctgactttagaagacctagaagattcatgggatcgtggcattcctcgaatcaataccctcttccagaaggaccggcacacactggcttatgataagggctggcgtgtcagaactgactttaagcagtatcaggttttgaagcagaatccgttctggtggacacaccagcggcatgatgggaagctctggaacctgaacaactaccgtacagacatgatccaggccctgggcggtgtggaaggcattctggaacacacactctttaagggcacttacttccctacctgggaggggcttttctgggagaaggccagtggctttgaggaatctatgaagtggaagaagctaactaatgctcagcgatcaggactgaaccagattcccaatcgtagattcaccctctggtggtccccgaccattaatcgagccaatgtatatgtaggctttcaggtgcagctagacctgacgggtatcttcatgcacggcaagatccccacgctgaagatctctctcatccagatcttccgagctcacttgtggcagaagatccatgagagcattgttatggacttatgtcaggtgtttgaccaggaacttgatgcactggaaattgagacagtacaaaaggagacaatccatccccgaaagtcatataagatgaactcttcctgtgcagatatcctgctctttgcctcctataagtggaatgtctcccggccctcattgctggctgactccaaggatgtgatggacagcaccaccacccagaaatactggattgacatccagttgcgctggggggactatgattcccacgacattgagcgctacgcccgggccaagttcctggactacaccaccgacaacatgagtatctacccttcgcccacaggtgtactcatcgccattgacctggcctataacttgcacagtgcctatggaaactggttcccaggcagcaagcctctcatacaacaggccatggccaagatcatgaaggcaaaccctgccctgtatgtgttacgtgaacggatccgcaaggggctacagctctattcatctgaacccactgagccttatttgtcttctcagaactatggtgagctcttctccaaccagattatctggtttgtggatgacaccaacgtctacagagtgactattcacaagacctttgaagggaacttgacaaccaagcccatcaacggagccatcttcatcttcaacccacgcacagggcagctgttcctcaagataatccacacgtccgtgtgggcgggacagaagcgtttggggcagttggctaagtggaagacagctgaggaggtggccgccctgatccgatctctgcctgtggaggagcagcccaagcagatcattgtcaccaggaagggcatgctggacccactggaggtgcacttactggacttccccaatattgtcatcaaaggatcggagctccaactccctttccaggcgtgtctcaaggtggaaaaattcggggatctcatccttaaagccactgagccccagatggttctcttcaacctctatgacgactggctcaagactatttcatcttacacggccttctcccgtctcatcctgattctgcgtgccctacatgtgaacaacgatcgggcaaaagtgatcctgaagccagacaagactactattacagaaccacaccacatctggcccactctgactgacgaagaatggatcaaggtcgaggtgcagctcaaggatctgatcttggctgactacggcaagaaaaacaatgtgaacgtggcatcactgacacaatcagaaattcgagacatcatcctgggtatggagatctcggcaccgtcacagcagcggcagcagatcgctgagatcgagaagcagaccaaggaacaatcgcagctgacggcaacacagactcgcactgtcaacaagcatggcgatgagatcatcacctccaccaccagcaactatgagacccagactttctcatccaagactgagtggagggtcagggccatctctgctgccaacctgcacctaaggaccaatcacatctatgtttcatctgacgacatcaaggagactggctacacctacatccttcccaagaatgtgcttaagaagttcatctgcatatctgaccttcgggcccaaattgcaggatacctatatggggtgagcccaccagataacccccaggtgaaggagatccgctgcattgtgatggtgccgcagtggggcactcaccagaccgtgcacctgcctggccagctgccccagcatgagtacctcaaggagatggaacccttaggttggatccacactcagcccaatgagtccccgcagttatcaccccaggatgtcaccacccatgccaagatcatggctgacaacccatcttgggatggcgagaagaccattatcatcacatgcagcttcacgccaggctcctgtacactgacggcctacaagctgacccccagtggctacgaatggggccgccagaacacagacaagggcaacaaccccaagggctacctgccttcacactatgagagggtgcagatgctgctgtcggaccgtttccttggcttcttcatggtccctgcccagtcctcgtggaactacaacttcatgggtgttcggcatgaccccaacatgaaatatgagctacagctggcgaaccccaaagagttctaccacgaggtgcacaggccctctcacttcctcaactttgctctcctgcaggagggggaggtttactctgcggatcgggaggacctgtatgcctgaccgtttccctgcctcctgcttcagcctcccgaggccgaagcctcagcccctccagacaggccgctgacattcagcagtttggcctctttccctctgtctgtgcttgtgttgttgacctcctgatggcttgtcatcctgaataaaatataataataaattttgtataaatagga

SEQ ID NO: 262190 - DNA, 5355 bp, Homo sapiens
tccgataggcggaattgttcacgagggaggccctgtagggaagggtcctggctgtggcttctgggctgccggttggcgagtctggctctttttcatgcgtggcattacccctttattagagcgatggcttggcaacctcctggcccggcagtttgaaggtcgacactcaaagggggtggcaaagacagtaacaaagcagcgagtggagtcacattttgaccttgagctgcgggcagctgtgatgcatgatattctggacatgatgcctgaggggatcaagcagaacaaggcccggacaatcctgcagcacctcagtgaagcctggcgctgctggaaagccaacattccctggaaggtccctgggctgccgacgcccatagagaatatgatccttcgatacgtgaaggccaaggctgactggtggaccaacactgcccactacaaccgagaacggatccgccgaggggccactgtggacaagactgtttgtaaaaagaatctgggccgcctcacccggctctatctgaaggcagaacaggagcggcagcacaactacctgaaggacgggccttacatcacagcggaggaagcagtggcagtatataccaccacagtgcattggttggaaagccgcaggttttcacccatcccattccccccactctcctataagcatgacaccaagttgctcatcttggcattggagcggctcaaggaagcttatagtgtgaagtctcggttgaaccagtctcagagggaggagctaggtctgatcgagcaggcctacgataacccccacgaggcgctgtcccgcatcaagcgtcacctcctcacacagagagccttcaaagaggtgggcattgagttcatggatctgtatagccacctcgttccagtatatgatgttgagcccctggagaagataactgatgcttacctggaccagtacctgtggtatgaagccgacaagcgccgcctgttcccaccctggattaagcctgcagacacagaaccacctccgctgcttgtttacaagtggtgtcaaggcatcaataacctgcaggacgtgtgggagacgagtgaaggcgagtgcaatgtcatgctggaatcccgctttgagaagatgtatgagaagatcgacttgactctgctcaacaggctgctgcgcctcatcgtggaccacaacatagccgactacatgacagccaagaacaacgtcgtcatcaactataaggacatgaaccatacgaattcatatgggatcatcagaggcctgcagtttgcctcattcatcgtgcagtattatggcctggtgatggatttgcttgtattgggattgcaccgggccagtgagatggctgggccccctcagatgccaaatgactttctcagtttccaggacatagccactgaggctgcccaccccatccgtctcttctgcagatacattgatcgcatccatatttttttcaggttcacagcagatgaggctcgggacctgattcaacgttacctgacagagcaccctgaccccaataatgaaaacatcgttggctataataacaagaagtgctggccccgagatgcccgcatgcgcctcatgaaacatgatgttaacttaggccgggcggtattctgggacatcaagaaccgcttgccacggtcagtgactacagttcagtgggagaacagcttcgtgtctgtgtacagtaaggacaaccccaacctgctgttcaacatgtgtggcttcgagtgccgcatcctgcctaagtgccgcaccagctatgaggagttcacccacaaggacggggtctggaacctgcagaatgaggttactaaggagcgcacagctcagtgtttcctgcgtgtggacgatgagtcaatgcagcgcttccacaaccgcgtgcgtcagattctcatggcctctgggtccaccaccttcaccaagattgtgaataagtggaatacagctctcattggccttatgacatactttcgggaggctgtggtgaacacccaagagctcttggacttactggtgaagtgtgagaacaaaatccagacacgtatcaagattggactcaactccaagatgccaagtcggttccccccggttgtgttctacacccctaaggagttgggtggactcggcatgctctcaatgggccatgtgctcatcccccaatccgacctcaggtggtccaaacagacagatgtaggtatcacacactttcgttcaggaatgagccatgaagaagaccagctcattcccaacttgtaccgctacatacagccatgggagagcgagttcattgattctcagcgggtctgggctgagtacgcactcaagaggcaagaggccattgctcagaacagacgcctgactttagaagacctagaagattcatgggatcgtggcattcctcgaatcaataccctcttccagaaggaccggcacacactggcttatgataagggctggcgtgtcagaactgactttaagcagtatcaggttttgaagcagaatccgttctggtggacacaccagcggcatgatgggaagctctggaacctgaacaactaccgtacagacatgatccaggccctgggcggtgtggaaggcattctggaacacacactctttaagggcacttacttccctacctgggaggggcttttctgggagaaggccagtggctttgaggaatctatgaagtggaagaagctaactaatgctcagcgatcaggactgaaccagattcccaatcgtagattcaccctctggtggtccccgaccattaatcgagccaatgtatatgtaggctttcaggtgcagctagacctgacgggtatcttcatgcacggcaagatccccacgctgaagatctctctcatccagatcttccgagctcacttgtggcagaagatccatgagagcattgttatggacttatgtcaggtgtttgaccaggaacttgatgcactggaaattgagacagtacaaaaggagacaatccatccccgaaagtcatataagatgaactcttcctgtgcagatatcctgctctttgcctcctataagtggaatgtctcccggccctcattgctggctgactccaaggatgtgatggacagcaccaccacccagaaatactggattgacatccagttgcgctggggggactatgattcccacgacattgagcgctacgcccgggccaagttcctggactacaccaccgacaacatgagtatctacccttcgcccacaggtgtactcatcgccattgacctggcctataacttgcacagtgcctatggaaactggttcccaggcagcaagcctctcatacaacaggccatggccaagatcatgaaggcaaaccctgccctgtatgtgttacgtgaacggatccgcaaggggctacagctctattcatctgaacccactgagccttatttgtcttctcagaactatggtgagctcttctccaaccagattatctggtttgtggatgacaccaacgtctacagagtgactattcacaagacctttgaagggaacttgacaaccaagcccatcaacggagccatcttcatcttcaacccacgcacagggcagctgttcctcaagataatccacacgtccgtgtgggcgggacagaagcgtttggggcagttggctaagtggaagacagctgaggaggtggccgccctgatccgatctctgcctgtggaggagcagcccaagcagatcattgtcaccaggaagggcatgctggacccactggaggtgcacttactggacttccccaatattgtcatcaaaggatcggagctccaactccctttccaggcgtgtctcaaggtggaaaaattcggggatctcatccttaaagccactgagccccagatggttctcttcaacctctatgacgactggctcaagactatttcatcttacacggccttctcccgtctcatcctgattctgcgtgccctacatgtgaacaacgatcgggcaaaagtgatcctgaagccagacaagactactattacagaaccacaccacatctggcccactctgactgacgaagaatggatcaaggtcgaggtgcagctcaaggatctgatcttggctgactacggcaagaaaaacaatgtgaacgtggcatcactgacacaatcagaaattcgagacatcatcctgggtatggagatctcggcaccgtcacagcagcggcagcagatcgctgagatcgagaagcagaccaaggaacaatcgcagctgacggcaacacagactcgcactgtcaacaagcatggcgatgagatcatcacctccaccaccagcaactatgagacccagactttctcatccaagactgagtggagggtcagggccatctctgctgccaacctgcacctaaggaccaatcacatctatgtttcatctgacgacatcaaggagactggctacacctacatccttcccaagaatgtgcttaagaagttcatctgcatatctgaccttcgggcccaaattgcaggatacctatatggggtgagcccaccagataacccccaggtgaaggagatccgctgcattgtgatggtgccgcagtggggcactcaccagaccgtgcacctgcctggccagctgccccagcatgagtacctcaaggagatggaacccttaggttggatccacactcagcccaatgagtccccgcagttatcaccccaggatgtcaccacccatgccaagatcatggctgacaacccatcttgggatggcgagaagaccattatcatcacatgcagcttcacgccaggctcctgtacactgacggcctacaagctgacccccagtggctacgaatggggccgccagaacacagacaagggcaacaaccccaagggctacctgccttcacactatgagagggtgcagatgctgctgtcggaccgtttccttggcttcttcatggtccctgcccagtcctcgtggaactacaacttcatgggtgttcggcatgaccccaacatgaaatatgagctacagctggcgaaccccaaagagttctaccacgaggtgcacaggccctctcacttcctcaactttgctctcctgcaggagggggaggtttactctgcggatcgggaggacctgtatgcctgaccgtttccctgcctcctgcttcagcctcccgaggccgaagcctcagcccctccagacaggccgctgacattcagcagtttggcctctttccctctgtctgtgcttgtgttgttgacctcctgatggcttgtcatcctgaataaaatataataataaattttgtataaatagga

SEQ ID NO: 262191 - DNA, 5670 bp, Homo sapiens
tctagaggatcccagacctcggcaccgttccccctttattagagcgatggcttggcaacctcctggcccggcagtttgaaggtgagtggttttctctgtgtccaacttctcctgttattgcttcaaaagtacctgcccctgtttgagtctgttccctgctcttgtatgagcactcttcctactggattgcctttaggtccagttctgaaatgagtctgacctagtattctatttcttgggcttccttctggggccttgagaggcagtcatgcatttgcaggagtggaaattcctcagaagcatagttgtgaatgtttaaggtagctcgtctttttgcatatgctgggcacagggacgctttgttaatacctaattttattaataaccataatgagtgaggagcatgaaggtagagacccttattgaaagcaaggaatcttccttgtaatccccttgggacactctacttccaggtcgacactcaaagggggtggcaaagacagtaacaaagcagcgagtggagtcacattttgaccttgagctgcgggcagctgtgatgcatgatattctggacatgatgcctgaggggatcaagcagaacaaggcccggacaatcctgcagcacctcagtgaagcctggcgctgctggaaagccaacattccctggaaggtccctgggctgccgacgcccatagagaatatgatccttcgatacgtgaaggccaaggctgactggtggaccaacactgcccactacaaccgagaacggatccgccgaggggccactgtggacaagactgtttgtaaaaagaatctgggccgcctcacccggctctatctgaaggcagaacaggagcggcagcacaactacctgaaggacgggccttacatcacagcggaggaagcagtggcagtatataccaccacagtgcattggttggaaagccgcaggttttcacccatcccattccccccactctcctataagcatgacaccaagttgctcatcttggcattggagcggctcaaggaagcttatagtgtgaagtctcggttgaaccagtctcagagggaggagctaggtctgatcgagcaggcctacgataacccccacgaggcgctgtcccgcatcaagcgtcacctcctcacacagagagccttcaaagaggtgggcattgagttcatggatctgtatagccacctcgttccagtatatgatgttgagcccctggagaagataactgatgcttacctggaccagtacctgtggtatgaagccgacaagcgccgcctgttcccaccctggattaagcctgcagacacagaaccacctccgctgcttgtttacaagtggtgtcaaggcatcaataacctgcaggacgtgtgggagacgagtgaaggcgagtgcaatgtcatgctggaatcccgctttgagaagatgtatgagaagatcgacttgactctgctcaacaggctgctgcgcctcatcgtggaccacaacatagccgactacatgacagccaagaacaacgtcgtcatcaactataaggacatgaaccatacgaattcatatgggatcatcagaggcctgcagtttgcctcattcatcgtgcagtattatggcctggtgatggatttgcttgtattgggattgcaccgggccagtgagatggctgggccccctcagatgccaaatgactttctcagtttccaggacatagccactgaggctgcccaccccatccgtctcttctgcagatacattgatcgcatccatatttttttcaggttcacagcagatgaggctcgggacctgattcaacgttacctgacagagcaccctgaccccaataatgaaaacatcgttggctataataacaagaagtgctggccccgagatgcccgcatgcgcctcatgaaacatgatgttaacttaggccgggcggtattctgggacatcaagaaccgcttgccacggtcagtgactacagttcagtgggagaacagcttcgtgtctgtgtacagtaaggacaaccccaacctgctgttcaacatgtgtggcttcgagtgccgcatcctgcctaagtgccgcaccagctatgaggagttcacccacaaggacggggtctggaacctgcagaatgaggttactaaggagcgcacagctcagtgtttcctgcgtgtggacgatgagtcaatgcagcgcttccacaaccgcgtgcgtcagattctcatggcctctgggtccaccaccttcaccaagattgtgaataagtggaatacagctctcattggccttatgacatactttcgggaggctgtggtgaacacccaagagctcttggacttactggtgaagtgtgagaacaaaatccagacacgtatcaagattggactcaactccaagatgccaagtcggttccccccggttgtgttctacacccctaaggagttgggtggactcggcatgctctcaatgggccatgtgctcatcccccaatccgacctcaggtggtccaaacagacagatgtaggtatcacacactttcgttcaggaatgagccatgaagaagaccagctcattcccaacttgtaccgctacatacagccatgggagagcgagttcattgattctcagcgggtctgggctgagtacgcactcaagaggcaagaggccattgctcagaacagacgcctgactttagaagacctagaagattcatgggatcgtggcattcctcgaatcaataccctcttccagaaggaccggcacacactggcttatgataagggctggcgtgtcagaactgactttaagcagtatcaggttttgaagcagaatccgttctggtggacacaccagcggcatgatgggaagctctggaacctgaacaactaccgtacagacatgatccaggccctgggcggtgtggaaggcattctggaacacacactctttaagggcacttacttccctacctgggaggggcttttctgggagaaggccagtggctttgaggaatctatgaagtggaagaagctaactaatgctcagcgatcaggactgaaccagattcccaatcgtagattcaccctctggtggtccccgaccattaatcgagccaatgtatatgtaggctttcaggtgcagctagacctgacgggtatcttcatgcacggcaagatccccacgctgaagatctctctcatccagatcttccgagctcacttgtggcagaagatccatgagagcattgttatggacttatgtcaggtgtttgaccaggaacttgatgcactggaaattgagacagtacaaaaggagacaatccatccccgaaagtcatataagatgaactcttcctgtgcagatatcctgctctttgcctcctataagtggaatgtctcccggccctcattgctggctgactccaaggatgtgatggacagcaccaccacccagaaatactggattgacatccagttgcgctggggggactatgattcccacgacattgagcgctacgcccgggccaagttcctggactacaccaccgacaacatgagtatctacccttcgcccacaggtgtactcatcgccattgacctggcctataacttgcacagtgcctatggaaactggttcccaggcagcaagcctctcatacaacaggccatggccaagatcatgaaggcaaaccctgccctgtatgtgttacgtgaacggatccgcaaggggctacagctctattcatctgaacccactgagccttatttgtcttctcagaactatggtgagctcttctccaaccagattatctggtttgtggatgacaccaacgtctacagagtgactattcacaagacctttgaagggaacttgacaaccaagcccatcaacggagccatcttcatcttcaacccacgcacagggcagctgttcctcaagataatccacacgtccgtgtgggcgggacagaagcgtttggggcagttggctaagtggaagacagctgaggaggtggccgccctgatccgatctctgcctgtggaggagcagcccaagcagatcattgtcaccaggaagggcatgctggacccactggaggtgcacttactggacttccccaatattgtcatcaaaggatcggagctccaactccctttccaggcgtgtctcaaggtggaaaaattcggggatctcatccttaaagccactgagccccagatggttctcttcaacctctatgacgactggctcaagactatttcatcttacacggccttctcccgtctcatcctgattctgcgtgccctacatgtgaacaacgatcgggcaaaagtgatcctgaagccagacaagactactattacagaaccacaccacatctggcccactctgactgacgaagaatggatcaaggtcgaggtgcagctcaaggatctgatcttggctgactacggcaagaaaaacaatgtgaacgtggcatcactgacacaatcagaaattcgagacatcatcctgggtatggagatctcggcaccgtcacagcagcggcagcagatcgctgagatcgagaagcagaccaaggaacaatcgcagctgacggcaacacagactcgcactgtcaacaagcatggcgatgagatcatcacctccaccaccagcaactatgagacccagactttctcatccaagactgagtggagggtcagggccatctctgctgccaacctgcacctaaggaccaatcacatctatgtttcatctgacgacatcaaggagactggctacacctacatccttcccaagaatgtgcttaagaagttcatctgcatatctgaccttcgggcccaaattgcaggatacctatatggggtgagcccaccagataacccccaggtgaaggagatccgctgcattgtgatggtgccgcagtggggcactcaccagaccgtgcacctgcctggccagctgccccagcatgagtacctcaaggagatggaacccttaggttggatccacactcagcccaatgagtccccgcagttatcaccccaggatgtcaccacccatgccaagatcatggctgacaacccatcttgggatggcgagaagaccattatcatcacatgcagcttcacgccaggctcctgtacactgacggcctacaagctgacccccagtggctacgaatggggccgccagaacacagacaagggcaacaaccccaagggctacctgccttcacactatgagagggtgcagatgctgctgtcggaccgtttccttggcttcttcatggtccctgcccagtcctcgtggaactacaacttcatgggtgttcggcatgaccccaacatgaaatatgagctacagctggcgaaccccaaagagttctaccacgaggtgcacaggccctctcacttcctcaactttgctctcctgcaggagggggaggtttactctgcggatcgggaggacctgtatgcctgaccgtttccctgcctcctgcttcagcctcccgaggccgaagcctcagcccctccagacaggccgctgacattcagcagtttggcctctttccctctgtctgtgcttgtgttgttgacctcctgatggcttgtcatcctgaataaaatataataataaattttgtataaatagga

SEQ ID NO: 262192 - DNA, 8492 bp, Homo sapiens
atcgtacaatgcgcaatcttggcaaatttattcaaaccctttagacttcggtctctcacagtgcgacgccgggagcccatcacacgctgaggtctgtcagaggccccagaaacagcctcggaaatggaggaggcggggctcaccccgaccacacccccttgcgttcaaagcctttccgcctatgggcccgcctcctcggcgcagtgtgcaactctaattggtcgtctcactaatccatctgagcacctcggcgccgactggatcaactgctgaactcgggttgcgcacttcccggcgctgggaacgcggagcggacgcagtctggccgccattgcgctgcggggaaagcggcctcttgtgtgagggcctgtggggtgcgtggcaggcgtttaaggccgggctgcgggaggcgtggtcgggtcgggccgagtgaccgaaggggttaggccgggcggggctggatgcactgtgtggcgggactgcaggccggggtccccggacgcctttctgctgcgcttcttgtgggcccgggcctgtggttagtgaatttttctatcccgccgctccccagattctccggatatggccggagtgtttccttatcgagggccgggtaacccggtgcctggccctctagccccgctaccggactacatgtcggaggagaagctgcaggagaaagctcgaaaatggcagcaattgcaggccaagcgctatgcagaaaagcggaagtttgggtttgtggatgcccagaaggaagacatgcccccagaacatgtcaggaagatcattcgagaccatggagacatgaccaacaggaagttccgccatgacaaaagggtttacttgggtgccctaaagtacatgccccacgcagtcctcaaactcctggagaacatgcctatgccttgggagcagattcgggatgtgcctgtgctgtaccacatcactggagccatttccttcgtcaatgagattccctgggtcattgaacctgtctacatctcccagtgggggtcaatgtggattatgatgcgccgagaaaaaagagataggaggcatttcaagaggatgcgttttcccccttttgatgatgaggagccgcccttggactatgctgacaacatcctagatgttgagccactggaggccattcagctagagctggaccctgaggaggacgcccctgtgttggactggttctatgaccaccagccgttgagggacagcaggaagtatgtaaatggctccacttaccagcgctggcagttcacactacctatgatgtcgactctctaccgcctggctaatcagctcctgacagacttggtggatgacaactacttctacctgtttgatttgaaggccttctttacgtccaaggcactcaatatggccattcctggaggccccaaatttgaacctcttgttcgagacatcaacctacaggatgaagactggaatgaattcaatgatattaacaagattatcatccggcagcctatccgcactgagtacaagattgcttttccttacttgtacaacaatcttccacaccatgtccacctcacctggtaccatactcccaatgttgtattcatcaaaactgaggatcctgacttgccagctttctactttgaccctttgatcaacccaatctcccataggcactcagtcaagagccaggaaccattgccggatgatgatgaggaatttgagctcccggagtttgtggagcccttcctgaaggacacacccctctatacagacaatacagccaatggcattgccctgctctgggccccgcggcccttcaacctacgctctggtcgcacccgtcgggccctggacataccccttgtcaagaactggtatcgggagcattgtcctgccgggcagcctgtgaaagtgagggtctcctaccagaagctgcttaagtactatgtgctgaatgccctgaagcatcggccccctaaggctcaaaagaagaggtatttgttccgctccttcaaagccaccaaattctttcagtccacaaagctggactgggtggaggttgggctccaggtttgccgccagggctacaacatgctcaaccttctcattcaccgcaaaaacctcaactacctgcacctggactacaacttcaacctcaagcctgtgaaaacgctcaccaccaaggaaagaaagaaatctcgttttgggaatgctttccacctgtgtcgggaagttctgcgtttgactaagctggtggtggatagtcacgtgcagtatcggctgggcaatgtggatgccttccagctggcagatggattgcagtatatatttgcccatgttgggcagttgacgggcatgtatcgatacaaatacaagctgatgcgacagattcgcatgtgcaaggacctgaagcatctcatctattatcgtttcaacacgggccctgtagggaagggtcctggctgtggcttctgggctgccggttggcgagtctggctctttttcatgcgtggcattacccctttattagagcgatggcttggcaacctcctggcccggcagtttgaaggtgagtggttttctctgtgtccaacttctcctgttattgcttcaaaagtacctgcccctgtttgagtctgttccctgctcttgtatgagcactcttcctactggattgcctttaggtccagttctgaaatgagtctgacctagtattctatttcttgggcttccttctggggccttgagaggcagtcatgcatttgcaggagtggaaattcctcagaagcatagttgtgaatgtttaaggtagctcgtctttttgcatatgctgggcacagggacgctttgttaatacctaattttattaataaccataatgagtgaggagcatgaaggtagagacccttattgaaagcaaggaatcttccttgtaatccccttgggacactctacttccaggtcgacactcaaagggggtggcaaagacagtaacaaagcagcgagtggagtcacattttgaccttgagctgcgggcagctgtgatgcatgatattctggacatgatgcctgaggggatcaagcagaacaaggcccggacaatcctgcagcacctcagtgaagcctggcgctgctggaaagccaacattccctggaaggtccctgggctgccgacgcccatagagaatatgatccttcgatacgtgaaggccaaggctgactggtggaccaacactgcccactacaaccgagaacggatccgccgaggggccactgtggacaagactgtttgtaaaaagaatctgggccgcctcacccggctctatctgaaggcagaacaggagcggcagcacaactacctgaaggacgggccttacatcacagcggaggaagcagtggcagtatataccaccacagtgcattggttggaaagccgcaggttttcacccatcccattccccccactctcctataagcatgacaccaagttgctcatcttggcattggagcggctcaaggaagcttatagtgtgaagtctcggttgaaccagtctcagagggaggagctaggtctgatcgagcaggcctacgataacccccacgaggcgctgtcccgcatcaagcgtcacctcctcacacagagagccttcaaagaggtgggcattgagttcatggatctgtatagccacctcgttccagtatatgatgttgagcccctggagaagataactgatgcttacctggaccagtacctgtggtatgaagccgacaagcgccgcctgttcccaccctggattaagcctgcagacacagaaccacctccgctgcttgtttacaagtggtgtcaaggcatcaataacctgcaggacgtgtgggagacgagtgaaggcgagtgcaatgtcatgctggaatcccgctttgagaagatgtatgagaagatcgacttgactctgctcaacaggctgctgcgcctcatcgtggaccacaacatagccgactacatgacagccaagaacaacgtcgtcatcaactataaggacatgaaccatacgaattcatatgggatcatcagaggcctgcagtttgcctcattcatcgtgcagtattatggcctggtgatggatttgcttgtattgggattgcaccgggccagtgagatggctgggccccctcagatgccaaatgactttctcagtttccaggacatagccactgaggctgcccaccccatccgtctcttctgcagatacattgatcgcatccatatttttttcaggttcacagcagatgaggctcgggacctgattcaacgttacctgacagagcaccctgaccccaataatgaaaacatcgttggctataataacaagaagtgctggccccgagatgcccgcatgcgcctcatgaaacatgatgttaacttgtgagtctaggttggggctgtgtgagctggaaggacataagctaagggcccagagagggcatacctgaggctgcgtcctgggtgggagaggcgtggctgtgtcaggatgtcatcagttggcctttgaagggaagttccttccaagaaactgctgtgaccatgtgttctctgtgggcagaggccgggcggtattctgggacatcaagaaccgcttgccacggtcagtgactacagttcagtgggagaacagcttcgtgtctgtgtacagtaaggacaaccccaacctgctgttcaacatgtgtggcttcgagtgccgcatcctgcctaagtgccgcaccagctatgaggagttcacccacaaggacggggtctggaacctgcagaatgaggtacagcctgggcggggctgggagtgacatgaacgcgcctgcacttcctgggtcagtcaccggagtcttgttgggtggaaagacttgaatggtgggcacagttggctcttgcttctgtgggagttcctcggacatgttaaccttgactttgtggtttaggttactaaggagcgcacagctcagtgtttcctgcgtgtggacgatgagtcaatgcagcgcttccacaaccgcgtgcgtcagattctcatggcctctgggtccaccaccttcaccaagattgtgaataagtggaatacagctctcattggccttatgacatactttcgggaggctgtggtgaacacccaagagctcttggacttactggtgaagtgtgagaacaaaatccagacacgtatcaagattggactcaactccaagatgccaagtcggttccccccggttgtgttctacacccctaaggagttgggtggactcggcatgctctcaatgggccatgtgctcatcccccaatccgacctcaggtggtccaaacagacagatgtaggtatcacacactttcgttcaggaatgagccatgaagaagaccagctcattcccaacttgtaccgctacatacagccatgggagagcgagttcattgattctcagcgggtctgggctgagtacgcactcaagaggcaagaggccattgctcagaacagacgcctgactttagaagacctagaagattcatgggatcgtggcattcctcgaatcaataccctcttccagaaggaccggcacacactggcttatgataagggctggcgtgtcagaactgactttaagcagtatcaggttttgaagcagaatccgttctggtggacacaccagcggcatgatgggaagctctggaacctgaacaactaccgtacagacatgatccaggccctgggcggtgtggaaggcattctggaacacacactctttaagggcacttacttccctacctgggaggggcttttctgggagaaggccagtggctttgaggaatctatgaagtggaagaagctaactaatgctcagcgatcaggactgaaccagattcccaatcgtagattcaccctctggtggtccccgaccattaatcgagccaatgtatatgtaggctttcaggtgcagctagacctgacgggtatcttcatgcacggcaagatccccacgctgaagatctctctcatccagatcttccgagctcacttgtggcagaagatccatgagagcattgttatggacttatgtcaggtgtttgaccaggaacttgatgcactggaaattgagacagtacaaaaggagacaatccatccccgaaagtcatataagatgaactcttcctgtgcagatatcctgctctttgcctcctataagtggaatgtctcccggccctcattgctggctgactccaaggatgtgatggacagcaccaccacccagaaatactggattgacatccagttgcgctggggggactatgattcccacgacattgagcgctacgcccgggccaagttcctggactacaccaccgacaacatgagtatctacccttcgcccacaggtgtactcatcgccattgacctggcctataacttgcacagtgcctatggaaactggttcccaggcagcaagcctctcatacaacaggccatggccaagatcatgaaggcaaaccctgccctgtatgtgttacgtgaacggatccgcaaggggctacagctctattcatctgaacccactgagccttatttgtcttctcagaactatggtgagctcttctccaaccagattatctggtttgtggatgacaccaacgtctacagagtgactattcacaagacctttgaagggaacttgacaaccaagcccatcaacggagccatcttcatcttcaacccacgcacagggcagctgttcctcaagataatccacacgtccgtgtgggcgggacagaagcgtttggggcagttggctaagtggaagacagctgaggaggtggccgccctgatccgatctctgcctgtggaggagcagcccaagcagatcattgtcaccaggaagggcatgctggacccactggaggtgcacttactggacttccccaatattgtcatcaaaggatcggagctccaactccctttccaggcgtgtctcaaggtggaaaaattcggggatctcatccttaaagccactgagccccagatggttctcttcaacctctatgacgactggctcaagactatttcatcttacacggccttctcccgtctcatcctgattctgcgtgccctacatgtgaacaacgatcgggcaaaagtgatcctgaagccagacaagactactattacagaaccacaccacatctggcccactctgactgacgaagaatggatcaaggtcgaggtgcagctcaaggatctgatcttggctgactacggcaagaaaaacaatgtgaacgtggcatcactgacacaatcagaaattcgagacatcatcctgggtatggagatctcggcaccgtcacagcagcggcagcagatcgctgagatcgagaagcagaccaaggaacaatcgcagctgacggcaacacagactcgcactgtcaacaagcatggcgatgagatcatcacctccaccaccagcaactatgagacccagactttctcatccaagactgagtggagggtcagggccatctctgctgccaacctgcacctaaggaccaatcacatctatgtttcatctgacgacatcaaggagactggctacacctacatccttcccaagaatgtgcttaagaagttcatctgcatatctgaccttcgggcccaaattgcaggatacctatatggggtgagcccaccagataacccccaggtgaaggagatccgctgcattgtgatggtgccgcagtggggcactcaccagaccgtgcacctgcctggccagctgccccagcatgagtacctcaaggagatggaacccttaggttggatccacactcagcccaatgagtccccgcagttatcaccccaggatgtcaccacccatgccaagatcatggctgacaacccatcttgggatggcgagaagaccattatcatcacatgcagcttcacgccaggctcctgtacactgacggcctacaagctgacccccagtggctacgaatggggccgccagaacacagacaagggcaacaaccccaagggctacctgccttcacactatgagagggtgcagatgctgctgtcggaccgtttccttggcttcttcatggtccctgcccagtcctcgtggaactacaacttcatgggtgttcggcatgaccccaacatgaaatatgagctacagctggcgaaccccaaagagttctaccacgaggtgcacaggccctctcacttcctcaactttgctctcctgcaggagggggaggtttactctgcggatcgggaggacctgtatgcctgaccgtttccctgcctcctgcttcagcctcccgaggccgaagcctcagcccctccagacaggccgctgacattcagcagtttggcctctttccctctgtctgtgcttgtgttgttgacctcctgatggcttgtcatcctgaataaaatataataataaattttgtataaatagga

SEQ ID NO: 262193 - DNA, 4553 bp, Homo sapiens
cgactcttgagatccccatgttacctcctcacacagagagccttcaaagaggtgggcattgagttcatggatctgtatagccacctcgttccagtatatgatgttgagcccctggagaagataactgatgcttacctggaccagtacctgtggtatgaagccgacaagcgccgcctgttcccaccctggattaagcctgcagacacagaaccacctccgctgcttgtttacaagtggtgtcaaggcatcaataacctgcaggacgtgtgggagacgagtgaaggcgagtgcaatgtcatgctggaatcccgctttgagaagatgtatgagaagatcgacttgactctgctcaacaggctgctgcgcctcatcgtggaccacaacatagccgactacatgacagccaagaacaacgtcgtcatcaactataaggacatgaaccatacgaattcatatgggatcatcagaggcctgcagtttgcctcattcatcgtgcagtattatggcctggtgatggatttgcttgtattgggattgcaccgggccagtgagatggctgggccccctcagatgccaaatgactttctcagtttccaggacatagccactgaggctgcccaccccatccgtctcttctgcagatacattgatcgcatccatatttttttcaggttcacagcagatgaggctcgggacctgattcaacgttacctgacagagcaccctgaccccaataatgaaaacatcgttggctataataacaagaagtgctggccccgagatgcccgcatgcgcctcatgaaacatgatgttaacttaggccgggcggtattctgggacatcaagaaccgcttgccacggtcagtgactacagttcagtgggagaacagcttcgtgtctgtgtacagtaaggacaaccccaacctgctgttcaacatgtgtggcttcgagtgccgcatcctgcctaagtgccgcaccagctatgaggagttcacccacaaggacggggtctggaacctgcagaatgaggttactaaggagcgcacagctcagtgtttcctgcgtgtggacgatgagtcaatgcagcgcttccacaaccgcgtgcgtcagattctcatggcctctgggtccaccaccttcaccaagattgtgaataagtggaatacagctctcattggccttatgacatactttcgggaggctgtggtgaacacccaagagctcttggacttactggtgaagtgtgagaacaaaatccagacacgtatcaagattggactcaactccaagatgccaagtcggttccccccggttgtgttctacacccctaaggagttgggtggactcggcatgctctcaatgggccatgtgctcatcccccaatccgacctcaggtggtccaaacagacagatgtaggtatcacacactttcgttcaggaatgagccatgaagaagaccagctcattcccaacttgtaccgctacatacagccatgggagagcgagttcattgattctcagcgggtctgggctgagtacgcactcaagaggcaagaggccattgctcagaacagacgcctgactttagaagacctagaagattcatgggatcgtggcattcctcgaatcaataccctcttccagaaggaccggcacacactggcttatgataagggctggcgtgtcagaactgactttaagcagtatcaggttttgaagcagaatccgttctggtggacacaccagcggcatgatgggaagctctggaacctgaacaactaccgtacagacatgatccaggccctgggcggtgtggaaggcattctggaacacacactctttaagggcacttacttccctacctgggaggggcttttctgggagaaggccagtggctttgaggaatctatgaagtggaagaagctaactaatgctcagcgatcaggactgaaccagattcccaatcgtagattcaccctctggtggtccccgaccattaatcgagccaatgtatatgtaggctttcaggtgcagctagacctgacgggtatcttcatgcacggcaagatccccacgctgaagatctctctcatccagatcttccgagctcacttgtggcagaagatccatgagagcattgttatggacttatgtcaggtgtttgaccaggaacttgatgcactggaaattgagacagtacaaaaggagacaatccatccccgaaagtcatataagatgaactcttcctgtgcagatatcctgctctttgcctcctataagtggaatgtctcccggccctcattgctggctgactccaaggatgtgatggacagcaccaccacccagaaatactggattgacatccagttgcgctggggggactatgattcccacgacattgagcgctacgcccgggccaagttcctggactacaccaccgacaacatgagtatctacccttcgcccacaggtgtactcatcgccattgacctggcctataacttgcacagtgcctatggaaactggttcccaggcagcaagcctctcatacaacaggccatggccaagatcatgaaggcaaaccctgccctgtatgtgttacgtgaacggatccgcaaggggctacagctctattcatctgaacccactgagccttatttgtcttctcagaactatggtgagctcttctccaaccagattatctggtttgtggatgacaccaacgtctacagagtgactattcacaagacctttgaagggaacttgacaaccaagcccatcaacggagccatcttcatcttcaacccacgcacagggcagctgttcctcaagataatccacacgtccgtgtgggcgggacagaagcgtttggggcagttggctaagtggaagacagctgaggaggtggccgccctgatccgatctctgcctgtggaggagcagcccaagcagatcattgtcaccaggaagggcatgctggacccactggaggtgcacttactggacttccccaatattgtcatcaaaggatcggagctccaactccctttccaggcgtgtctcaaggtggaaaaattcggggatctcatccttaaagccactgagccccagatggttctcttcaacctctatgacgactggctcaagactatttcatcttacacggccttctcccgtctcatcctgattctgcgtgccctacatgtgaacaacgatcgggcaaaagtgatcctgaagccagacaagactactattacagaaccacaccacatctggcccactctgactgacgaagaatggatcaaggtcgaggtgcagctcaaggatctgatcttggctgactacggcaagaaaaacaatgtgaacgtggcatcactgacacaatcagaaattcgagacatcatcctgggtatggagatctcggcaccgtcacagcagcggcagcagatcgctgagatcgagaagcagaccaaggaacaatcgcagctgacggcaacacagactcgcactgtcaacaagcatggcgatgagatcatcacctccaccaccagcaactatgagacccagactttctcatccaagactgagtggagggtcagggccatctctgctgccaacctgcacctaaggaccaatcacatctatgtttcatctgacgacatcaaggagactggctacacctacatccttcccaagaatgtgcttaagaagttcatctgcatatctgaccttcgggcccaaattgcaggatacctatatggggtgagcccaccagataacccccaggtgaaggagatccgctgcattgtgatggtgccgcagtggggcactcaccagaccgtgcacctgcctggccagctgccccagcatgagtacctcaaggagatggaacccttaggttggatccacactcagcccaatgagtccccgcagttatcaccccaggatgtcaccacccatgccaagatcatggctgacaacccatcttgggatggcgagaagaccattatcatcacatgcagcttcacgccaggctcctgtacactgacggcctacaagctgacccccagtggctacgaatggggccgccagaacacagacaagggcaacaaccccaagggctacctgccttcacactatgagagggtgcagatgctgctgtcggaccgtttccttggcttcttcatggtccctgcccagtcctcgtggaactacaacttcatgggtgttcggcatgaccccaacatgaaatatgagctacagctggcgaaccccaaagagttctaccacgaggtgcacaggccctctcacttcctcaactttgctctcctgcaggagggggaggtttactctgcggatcgggaggacctgtatgcctgaccgtttccctgcctcctgcttcagcctcccgaggccgaagcctcagcccctccagacaggccgctgacattcagcagtttggcctctttccctctgtctgtgcttgtgttgttgacctcctgatggcttgtcatcctgaataaaatataataataaattttgtataaatagga

SEQ ID NO: 262194 - DNA, 9246 bp, Homo sapiens
atcgtacaatgcgcaatcttggcaaatttattcaaaccctttagacttcggtctctcacagtgcgacgccgggagcccatcacacgctgaggtctgtcagaggccccagaaacagcctcggaaatggaggaggcggggctcaccccgaccacacccccttgcgttcaaagcctttccgcctatgggcccgcctcctcggcgcagtgtgcaactctaattggtcgtctcactaatccatctgagcacctcggcgccgactggatcaactgctgaactcgggttgcgcacttcccggcgctgggaacgcggagcggacgcagtctggccgccattgcgctgcggggaaagcggcctcttgtgtgagggcctgtggggtgcgtggcaggcgtttaaggccgggctgcgggaggcgtggtcgggtcgggccgagtgaccgaaggggttaggccgggcggggctggatgcactgtgtggcgggactgcaggccggggtccccggacgcctttctgctgcgcttcttgtgggcccgggcctgtggttagtgaatttttctatcccgccgctccccagattctccggatatggccggagtgtttccttatcgagggccgggtaacccggtgcctggccctctagccccgctaccggactacatgtcggaggagaagctgcaggagaaagctcgaaaatggcagcaattgcaggccaagcgctatgcagaaaagcggaagtttgggtttgtggatgcccagaaggaagacatgcccccagaacatgtcaggaagatcattcgagaccatggagacatgaccaacaggaagttccgccatgacaaaagggtttacttgggtgccctaaagtacatgccccacgcagtcctcaaactcctggagaacatgcctatgccttgggagcagattcgggatgtgcctgtgctgtaccacatcactggagccatttccttcgtcaatgagattccctgggtcattgaacctgtctacatctcccagtgggggtcaatgtggattatgatgcgccgagaaaaaagagataggaggcatttcaagaggatgcgttttcccccttttgatgatgaggagccgcccttggactatgctgacaacatcctagatgttgagccactggaggccattcagctagagctggaccctgaggaggacgcccctgtgttggactggttctatgaccaccagccgttgagggacagcaggaagtatgtaaatggctccacttaccagcgctggcagttcacactacctatgatgtcgactctctaccgcctggctaatcagctcctgacagacttggtggatgacaactacttctacctgtttgatttgaaggccttctttacgtccaaggcactcaatatggccattcctggaggccccaaatttgaacctcttgttcgagacatcaacctacaggatgaagactggaatgaattcaatgatattaacaagattatcatccggcagcctatccgcactgagtacaagattgcttttccttacttgtacaacaatcttccacaccatgtccacctcacctggtaccatactcccaatgttgtattcatcaaaactgaggatcctgacttgccagctttctactttgaccctttgatcaacccaatctcccataggcactcagtcaagagccaggaaccattgccggatgatgatgaggaatttgagctcccggagtttgtggagcccttcctgaaggacacacccctctatacagacaatacagccaatggcattgccctgctctgggccccgcggcccttcaacctacgctctggtcgcacccgtcgggccctggacataccccttgtcaagaactggtatcgggagcattgtcctgccgggcagcctgtgaaagtgagggtctcctaccagaagctgcttaagtactatgtgctgaatgccctgaagcatcggccccctaaggctcaaaagaagaggtatttgttccgctccttcaaagccaccaaattctttcagtccacaaagctggactgggtggaggttgggctccaggtttgccgccagggctacaacatgctcaaccttctcattcaccgcaaaaacctcaactacctgcacctggactacaacttcaacctcaagcctgtgaaaacgctcaccaccaaggaaagaaagaaatctcgttttgggaatgctttccacctgtgtcgggaagttctgcgtttgactaagctggtggtggatagtcacgtgcagtatcggctgggcaatgtggatgccttccagctggcagatggattgcagtatatatttgcccatgttgggcagttgacgggcatgtatcgatacaaatacaagctgatgcgacagattcgcatgtgcaaggacctgaagcatctcatctattatcgtttcaacacgggccctgtagggaagggtcctggctgtggcttctgggctgccggttggcgagtctggctctttttcatgcgtggcattacccctttattagagcgatggcttggcaacctcctggcccggcagtttgaaggtgagtggttttctctgtgtccaacttctcctgttattgcttcaaaagtacctgcccctgtttgagtctgttccctgctcttgtatgagcactcttcctactggattgcctttaggtccagttctgaaatgagtctgacctagtattctatttcttgggcttccttctggggccttgagaggcagtcatgcatttgcaggagtggaaattcctcagaagcatagttgtgaatgtttaaggtagctcgtctttttgcatatgctgggcacagggacgctttgttaatacctaattttattaataaccataatgagtgaggagcatgaaggtagagacccttattgaaagcaaggaatcttccttgtaatccccttgggacactctacttccaggtcgacactcaaagggggtggcaaagacagtaacaaagcagcgagtggagtcacattttgaccttgagctgcgggcagctgtgatgcatgatattctggacatgatgcctgaggggatcaagcagaacaaggcccggacaatcctgcagcacctcagtgaagcctggcgctgctggaaagccaacattccctggaaggtccctgggctgccgacgcccatagagaatatgatccttcgatacgtgaaggccaaggctgactggtggaccaacactgcccactacaaccgagaacggatccgccgaggggccactgtggacaagactgtttgtaaaaagaatctgggccgcctcacccggctctatctgaaggcagaacaggagcggcagcacaactacctgaaggacgggccttacatcacagcggaggaagcagtggcagtatataccaccacagtgcattggttggaaagccgcaggttttcacccatcccattccccccactctcctataagcatgacaccaagttgctcatcttggcattggagcggctcaaggaagcttatagtgtgaagtctcggttgaaccagtctcagagggaggagctaggtctgatcgagcaggcctacgataacccccacgaggcgctgtcccgcatcaagcgtcacctcctcacacagagagccttcaaagaggtgggcattgagttcatggatctgtatagccacctcgttccagtatatgatgttgagcccctggagaagataactgatgcttacctggaccagtacctgtggtatgaagccgacaagcgccgcctgttcccaccctggattaagcctgcagacacagaaccacctccgctgcttgtttacaagtggtgtcaaggcatcaataacctgcaggacgtgtgggagacgagtgaaggcgagtgcaatgtcatgctggaatcccgctttgagaagatgtatgagaagatcgacttgactctgctcaacaggctgctgcgcctcatcgtggaccacaacatagccgactacatgacagccaagaacaacgtcgtcatcaactataaggacatgaaccatacgaattcatatgggatcatcagaggcctgcagtttgcctcattcatcgtgcagtattatggcctggtgatggatttgcttgtattgggattgcaccgggccagtgagatggctgggccccctcagatgccaaatgactttctcagtttccaggacatagccactgaggctgcccaccccatccgtctcttctgcagatacattgatcgcatccatatttttttcaggttcacagcagatgaggctcgggacctgattcaacgttacctgacagagcaccctgaccccaataatgaaaacatcgttggctataataacaagaagtgctggccccgagatgcccgcatgcgcctcatgaaacatgatgttaacttaggccgggcggtattctgggacatcaagaaccgcttgccacggtcagtgactacagttcagtgggagaacagcttcgtgtctgtgtacagtaaggacaaccccaacctgctgttcaacatgtgtggcttcgagtgccgcatcctgcctaagtgccgcaccagctatgaggagttcacccacaaggacggggtctggaacctgcagaatgaggttactaaggagcgcacagctcagtgtttcctgcgtgtggacgatgagtcaatgcagcgcttccacaaccgcgtgcgtcagattctcatggcctctgggtccaccaccttcaccaagattgtgaataagtggaatacagctctcattggccttatgacatactttcgggaggctgtggtgaacacccaagagctcttggacttactggtgaagtgtgagaacaaaatccagacacgtatcaagattggactcaactccaagatgccaagtcggttccccccggttgtgttctacacccctaaggagttgggtggactcggcatgctctcaatgggccatgtgctcatcccccaatccgacctcaggtggtccaaacagacagatgtaggtatcacacactttcgttcaggaatgagccatgaagaagaccagctcattcccaacttgtaccgctacatacagccatgggagagcgagttcattgattctcagcgggtctgggctgagtacgcactcaagaggcaagaggccattgctcagaacagacgcctgactttagaagacctagaagattcatgggatcgtggcattcctcgaatcaataccctcttccagaaggaccggcacacactggcttatgataagggctggcgtgtcagaactgactttaagcagtatcaggttttgaagcagaatccgttctggtggacacaccagcggcatgatgggaagctctggaacctgaacaactaccgtacagacatgatccaggccctgggcggtgtggaaggcattctggaacacacactctttaagggcacttacttccctacctgggaggggcttttctgggagaaggccagtggctttgaggaatctatgaagtggaagaagctaactaatgctcagcgatcaggactgaaccagattcccaatcgtagattcaccctctggtggtccccgaccattaatcgagccaatgtatatgtaggctttcaggtgcagctagacctgacgggtatcttcatgcacggcaagatccccacgctgaagatctctctcatccagatcttccgagctcacttgtggcagaagatccatgagagcattgttatggacttatgtcaggtgtttgaccaggaacttgatgcactggaaattgagacagtacaaaaggagacaatccatccccgaaagtcatataagatgaactcttcctgtgcagatatcctgctctttgcctcctataagtggaatgtctcccggccctcattgctggctgactccaaggatgtgatggacagcaccaccacccagaaatactggattgacatccagttgcgctggggggactatgattcccacgacattgagcgctacgcccgggccaagttcctggactacaccaccgacaacatgagtatctacccttcgcccacaggtgtactcatcgccattgacctggcctataacttgcacagtgcctatggaaactggttcccaggcagcaagcctctcatacaacaggccatggccaagatcatgaaggcaaaccctgccctgtatgtgttacgtgaacggatccgcaaggggctacagctctattcatctgaacccactgagccttatttgtcttctcagaactatggtgagctcttctccaaccagattatctggtttgtggatgacaccaacgtctacagagtgactattcacaagacctttgaagggaacttgacaaccaagcccatcaacggagccatcttcatcttcaacccacgcacagggcagctgttcctcaagataatccacacgtccgtgtgggcgggacagaagcgtttggggcagttggctaagtggaagacagctgaggaggtggccgccctgatccgatctctgcctgtggaggagcagcccaagcagatcattgtcaccaggaagggcatgctggacccactggaggtgcacttactggacttccccaatattgtcatcaaaggatcggagctccaactccctttccaggcgtgtctcaaggtggaaaaattcggggatctcatccttaaagccactgagccccagatggttctcttcaacctctatgacgactggctcaagactatttcatcttacacggccttctcccgtctcatcctgattctgcgtgccctacatgtgaacaacgatcgggcaaaagtgatcctgaagccagacaagactactattacagaaccacaccacatctggcccactctgactgacgaagaatggatcaaggtcgaggtgcagctcaaggatctgatcttggctgactacggcaagaaaaacaatgtgaacgtggcatcactgacacaatcagaaattcgagacatcatcctgggtatggagatctcggcaccgtcacagcagcggcagcagatcgctgagatcgagaagcagaccaaggaacaatcgcagctgacggcaacacagactcgcactgtcaacaagcatggcgatgagatcatcacctccaccaccagcaactatgagacccagactttctcatccaagactgagtggagggtcagggccatctctgctgccaacctgcacctaaggaccaatcacatctatgtttcatctgacgacatcaaggagactggctacacctacatccttcccaagaatgtgcttaagaagttcatctgcatatctgaccttcgggcccaaattgcaggatacctatatggggtgagcccaccagataacccccaggtgaaggagatccgctgcattgtgatggtgccgcagtggggcactcaccagaccgtgcacctgcctggccagctgccccagcatgagtacctcaaggagatggaacccttaggttggatccacactcagcccaatgagtccccgcagttatcaccccaggatgtcaccacccatgccaagatcatggctgacaacccatcttgggatggcgagaagaccattatcatcacatgcagcttcacgccaggctcctgtacactgacggcctacaagctgacccccagtggctacgaatggggccgccagaacacagacaagggcaacaaccccaagggctacctgccttcacactatgagagggtgcagatgctgctgtcggaccgtttccttggcttcttcatggtccctgcccagtcctcgtggaactacaacttcatgggtgttcggcatgaccccaacatgaaatatgagctacagctggcgaaccccaaagagttctaccacgaggtgcacaggccctctcacttcctcaactttgctctcctgcaggagggggaggtttactctgcggatcgggaggacctgtatgcctgaccgtttccctgcctcctgcttcagcctcccgaggccgaagcctcagcccctccagacaggccgctgacattcagcagtttggcctctttccctctgtctgtgcttgtgttgttgacctcctgatggcttgtcatcctgaataaaatataataataaattttgtataaataggaaaaaaacaaaaaaaaaaaaaaaaaaaaaaaaaaaaaaaacgggggcggcgcgccctcaaaaatttcccccaagggggccccaaagttacgcgaccccagttttcttgtgacaagagggggccccaaataaggaggacggccggtatatataataggccacagagcatgggcccggcgcgatataacaacaggtggaggagtgggaaaaccgcggctcaccccggagacctctgaggaagaggagaacccctcaacacgctggggggagccgagcccaaatatggggagcacaacctatcccaaccacgacatttttacaacggcactctaacagggataacattatctcgaatctttcacaacgcggtgttaaatacggggtgctaacacctcagtcgcggcaatatatcacgctagcgacacgctcgttgaaaaacgttttggcgccatcaccccggagcgtaactaagtagctgcgagcacacatttattctacgaaggagcgcctatcgttgtataataaaagggggggagacgcggggaggaggcaccggaggcgaggaagggagctgggcagagcgcaggcagcccagaggaggacgacgacgagggaggagcgaggaggcgcgtccgggagcggagacacgcgcggacgaggtgcagggtgtggcgagaaaggagagggtaggcggagagaaggcccgctaccggagggcgaagcagggacgggcacgggagtgcgatggagcagagagcgagcgtatagtggggagcttaggacagagagcagcaaaataggacggacgacgacgaagaagatgaagtagagaggcgtgaggaggggagagggaaagagtcatgcaagaggagagagcgatgagattggaaggtggaggagacggggagggcggatgagcaagggcagagattgagaagaagagcagagattgaaagagacgaagtgagtagtggataagagcagtagacgggaacagatggaaaagacgagaggaggagttgagagagacggaatgagacagggacgcggggctccgcggtccgggcgagtggggtgacgggcgctagcacgc

SEQ ID NO: 262195 - DNA, 4208 bp, Homo sapiens
taatcgagctcggtccggattgcgattcttgaccacaacatagccgactacatgacagccaagaacaacgtcgtcatcaactataaggacatgaaccatacgaattcatatgggatcatcagaggcctgcagtttgcctcattcatcgtgcagtattatggcctggtgatggatttgcttgtattgggattgcaccgggccagtgagatggctgggccccctcagatgccaaatgactttctcagtttccaggacatagccactgaggctgcccaccccatccgtctcttctgcagatacattgatcgcatccatatttttttcaggttcacagcagatgaggctcgggacctgattcaacgttacctgacagagcaccctgaccccaataatgaaaacatcgttggctataataacaagaagtgctggccccgagatgcccgcatgcgcctcatgaaacatgatgttaacttaggccgggcggtattctgggacatcaagaaccgcttgccacggtcagtgactacagttcagtgggagaacagcttcgtgtctgtgtacagtaaggacaaccccaacctgctgttcaacatgtgtggcttcgagtgccgcatcctgcctaagtgccgcaccagctatgaggagttcacccacaaggacggggtctggaacctgcagaatgaggttactaaggagcgcacagctcagtgtttcctgcgtgtggacgatgagtcaatgcagcgcttccacaaccgcgtgcgtcagattctcatggcctctgggtccaccaccttcaccaagattgtgaataagtggaatacagctctcattggccttatgacatactttcgggaggctgtggtgaacacccaagagctcttggacttactggtgaagtgtgagaacaaaatccagacacgtatcaagattggactcaactccaagatgccaagtcggttccccccggttgtgttctacacccctaaggagttgggtggactcggcatgctctcaatgggccatgtgctcatcccccaatccgacctcaggtggtccaaacagacagatgtaggtatcacacactttcgttcaggaatgagccatgaagaagaccagctcattcccaacttgtaccgctacatacagccatgggagagcgagttcattgattctcagcgggtctgggctgagtacgcactcaagaggcaagaggccattgctcagaacagacgcctgactttagaagacctagaagattcatgggatcgtggcattcctcgaatcaataccctcttccagaaggaccggcacacactggcttatgataagggctggcgtgtcagaactgactttaagcagtatcaggttttgaagcagaatccgttctggtggacacaccagcggcatgatgggaagctctggaacctgaacaactaccgtacagacatgatccaggccctgggcggtgtggaaggcattctggaacacacactctttaagggcacttacttccctacctgggaggggcttttctgggagaaggccagtggctttgaggaatctatgaagtggaagaagctaactaatgctcagcgatcaggactgaaccagattcccaatcgtagattcaccctctggtggtccccgaccattaatcgagccaatgtatatgtaggctttcaggtgcagctagacctgacgggtatcttcatgcacggcaagatccccacgctgaagatctctctcatccagatcttccgagctcacttgtggcagaagatccatgagagcattgttatggacttatgtcaggtgtttgaccaggaacttgatgcactggaaattgagacagtacaaaaggagacaatccatccccgaaagtcatataagatgaactcttcctgtgcagatatcctgctctttgcctcctataagtggaatgtctcccggccctcattgctggctgactccaaggatgtgatggacagcaccaccacccagaaatactggattgacatccagttgcgctggggggactatgattcccacgacattgagcgctacgcccgggccaagttcctggactacaccaccgacaacatgagtatctacccttcgcccacaggtgtactcatcgccattgacctggcctataacttgcacagtgcctatggaaactggttcccaggcagcaagcctctcatacaacaggccatggccaagatcatgaaggcaaaccctgccctgtatgtgttacgtgaacggatccgcaaggggctacagctctattcatctgaacccactgagccttatttgtcttctcagaactatggtgagctcttctccaaccagattatctggtttgtggatgacaccaacgtctacagagtgactattcacaagacctttgaagggaacttgacaaccaagcccatcaacggagccatcttcatcttcaacccacgcacagggcagctgttcctcaagataatccacacgtccgtgtgggcgggacagaagcgtttggggcagttggctaagtggaagacagctgaggaggtggccgccctgatccgatctctgcctgtggaggagcagcccaagcagatcattgtcaccaggaagggcatgctggacccactggaggtgcacttactggacttccccaatattgtcatcaaaggatcggagctccaactccctttccaggcgtgtctcaaggtggaaaaattcggggatctcatccttaaagccactgagccccagatggttctcttcaacctctatgacgactggctcaagactatttcatcttacacggccttctcccgtctcatcctgattctgcgtgccctacatgtgaacaacgatcgggcaaaagtgatcctgaagccagacaagactactattacagaaccacaccacatctggcccactctgactgacgaagaatggatcaaggtcgaggtgcagctcaaggatctgatcttggctgactacggcaagaaaaacaatgtgaacgtggcatcactgacacaatcagaaattcgagacatcatcctgggtatggagatctcggcaccgtcacagcagcggcagcagatcgctgagatcgagaagcagaccaaggaacaatcgcagctgacggcaacacagactcgcactgtcaacaagcatggcgatgagatcatcacctccaccaccagcaactatgagacccagactttctcatccaagactgagtggagggtcagggccatctctgctgccaacctgcacctaaggaccaatcacatctatgtttcatctgacgacatcaaggagactggctacacctacatccttcccaagaatgtgcttaagaagttcatctgcatatctgaccttcgggcccaaattgcaggatacctatatggggtgagcccaccagataacccccaggtgaaggagatccgctgcattgtgatggtgccgcagtggggcactcaccagaccgtgcacctgcctggccagctgccccagcatgagtacctcaaggagatggaacccttaggttggatccacactcagcccaatgagtccccgcagttatcaccccaggatgtcaccacccatgccaagatcatggctgacaacccatcttgggatggcgagaagaccattatcatcacatgcagcttcacgccaggctcctgtacactgacggcctacaagctgacccccagtggctacgaatggggccgccagaacacagacaagggcaacaaccccaagggctacctgccttcacactatgagagggtgcagatgctgctgtcggaccgtttccttggcttcttcatggtccctgcccagtcctcgtggaactacaacttcatgggtgttcggcatgaccccaacatgaaatatgagctacagctggcgaaccccaaagagttctaccacgaggtgcacaggccctctcacttcctcaactttgctctcctgcaggagggggaggtttactctgcggatcgggaggacctgtatgcctgaccgtttccctgcctcctgcttcagcctcccgaggccgaagcctcagcccctccagacaggccgctgacattcagcagtttggcctctttccctctgtctgtgcttgtgttgttgacctcctgatggcttgtcatcctgaataaaatataataataaattttgtataaatagga

SEQ ID NO: 262196 - DNA, 8215 bp, Homo sapiens
atcgtacaatgcgcaatcttggcaaatttattcaaaccctttagacttcggtctctcacagtgcgacgccgggagcccatcacacgctgaggtctgtcagaggccccagaaacagcctcggaaatggaggaggcggggctcaccccgaccacacccccttgcgttcaaagcctttccgcctatgggcccgcctcctcggcgcagtgtgcaactctaattggtcgtctcactaatccatctgagcacctcggcgccgactggatcaactgctgaactcgggttgcgcacttcccggcgctgggaacgcggagcggacgcagtctggccgccattgcgctgcggggaaagcggcctcttgtgtgagggcctgtggggtgcgtggcaggcgtttaaggccgggctgcgggaggcgtggtcgggtcgggccgagtgaccgaaggggttaggccgggcggggctggatgcactgtgtggcgggactgcaggccggggtccccggacgcctttctgctgcgcttcttgtgggcccgggcctgtggttagtgaatttttctatcccgccgctccccagattctccggatatggccggagtgtttccttatcgagggccgggtaacccggtgcctggccctctagccccgctaccggactacatgtcggaggagaagctgcaggagaaagctcgaaaatggcagcaattgcaggccaagcgctatgcagaaaagcggaagtttgggtttgtggatgcccagaaggaagacatgcccccagaacatgtcaggaagatcattcgagaccatggagacatgaccaacaggaagttccgccatgacaaaagggtttacttgggtgccctaaagtacatgccccacgcagtcctcaaactcctggagaacatgcctatgccttgggagcagattcgggatgtgcctgtgctgtaccacatcactggagccatttccttcgtcaatgagattccctgggtcattgaacctgtctacatctcccagtgggggtcaatgtggattatgatgcgccgagaaaaaagagataggaggcatttcaagaggatgcgttttcccccttttgatgatgaggagccgcccttggactatgctgacaacatcctagatgttgagccactggaggccattcagctagagctggaccctgaggaggacgcccctgtgttggactggttctatgaccaccagccgttgagggacagcaggaagtatgtaaatggctccacttaccagcgctggcagttcacactacctatgatgtcgactctctaccgcctggctaatcagctcctgacagacttggtggatgacaactacttctacctgtttgatttgaaggccttctttacgtccaaggcactcaatatggccattcctggaggccccaaatttgaacctcttgttcgagacatcaacctacaggatgaagactggaatgaattcaatgatattaacaagattatcatccggcagcctatccgcactgagtacaagattgcttttccttacttgtacaacaatcttccacaccatgtccacctcacctggtaccatactcccaatgttgtattcatcaaaactgaggatcctgacttgccagctttctactttgaccctttgatcaacccaatctcccataggcactcagtcaagagccaggaaccattgccggatgatgatgaggaatttgagctcccggagtttgtggagcccttcctgaaggacacacccctctatacagacaatacagccaatggcattgccctgctctgggccccgcggcccttcaacctacgctctggtcgcacccgtcgggccctggacataccccttgtcaagaactggtatcgggagcattgtcctgccgggcagcctgtgaaagtgagggtctcctaccagaagctgcttaagtactatgtgctgaatgccctgaagcatcggccccctaaggctcaaaagaagaggtatttgttccgctccttcaaagccaccaaattctttcagtccacaaagctggactgggtggaggttgggctccaggtttgccgccagggctacaacatgctcaaccttctcattcaccgcaaaaacctcaactacctgcacctggactacaacttcaacctcaagcctgtgaaaacgctcaccaccaaggaaagaaagaaatctcgttttgggaatgctttccacctgtgtcgggaagttctgcgtttgactaagctggtggtggatagtcacgtgcagtatcggctgggcaatgtggatgccttccagctggcagatggattgcagtatatatttgcccatgttgggcagttgacgggcatgtatcgatacaaatacaagctgatgcgacagattcgcatgtgcaaggacctgaagcatctcatctattatcgtttcaacacgggccctgtagggaagggtcctggctgtggcttctgggctgccggttggcgagtctggctctttttcatgcgtggcattacccctttattagagcgatggcttggcaacctcctggcccggcagtttgaaggtcgacactcaaagggggtggcaaagacagtaacaaagcagcgagtggagtcacattttgaccttgagctgcgggcagctgtgatgcatgatattctggacatgatgcctgaggggatcaagcagaacaaggcccggacaatcctgcagcacctcagtgaagcctggcgctgctggaaagccaacattccctggaaggtccctgggctgccgacgcccatagagaatatgatccttcgatacgtgaaggccaaggctgactggtggaccaacactgcccactacaaccgagaacggatccgccgaggggccactgtggacaagactgtttgtaaaaagaatctgggccgcctcacccggctctatctgaaggcagaacaggagcggcagcacaactacctgaaggacgggccttacatcacagcggaggaagcagtggcagtatataccaccacagtgcattggttggaaagccgcaggttttcacccatcccattccccccactctcctataagcatgacaccaagttgctcatcttggcattggagcggctcaaggaagcttatagtgtgaagtctcggttgaaccagtctcagagggaggagctaggtctgatcgagcaggcctacgataacccccacgaggcgctgtcccgcatcaagcgtcacctcctcacacagagagccttcaaagaggtgagtgaggcctcccaagttttctttttggttctaccaaaggtagcagttgcctttggttctaccaaaggtagcagttggtggattggtgtgaaccagcctccttgtcccacaggtgggcattgagttcatggatctgtatagccacctcgttccagtatatgatgttgagcccctggagaagataactgatgcttacctggaccagtacctgtggtatgaagccgacaagcgccgcctgttcccaccctggattaagcctgcagacacagaaccacctccgctgcttgtttacaagtggtgtcaaggcatcaataacctgcaggacgtgtgggagacgagtgaaggcgagtgcaatgtcatgctggaatcccgctttgagaagatgtatgagaagatcgacttgactctgctcaacaggctgctgcgcctcatcgtggaccacaacatagccgactacatgacagccaagaacaacgtcgtcatcaactataaggacatgaaccatacgaattcatatgggatcatcagaggcctgcagtttgcctcattcatcgtgcagtattatggcctggtgatggatttgcttgtattgggattgcaccgggccagtgagatggctgggccccctcagatgccaaatgactttctcagtttccaggacatagccactgaggctgcccaccccatccgtctcttctgcagatacattgatcgcatccatatttttttcaggttcacagcagatgaggctcgggacctgattcaacgttacctgacagagcaccctgaccccaataatgaaaacatcgttggctataataacaagaagtgctggccccgagatgcccgcatgcgcctcatgaaacatgatgttaacttgtgagtctaggttggggctgtgtgagctggaaggacataagctaagggcccagagagggcatacctgaggctgcgtcctgggtgggagaggcgtggctgtgtcaggatgtcatcagttggcctttgaagggaagttccttccaagaaactgctgtgaccatgtgttctctgtgggcagaggccgggcggtattctgggacatcaagaaccgcttgccacggtcagtgactacagttcagtgggagaacagcttcgtgtctgtgtacagtaaggacaaccccaacctgctgttcaacatgtgtggcttcgagtgccgcatcctgcctaagtgccgcaccagctatgaggagttcacccacaaggacggggtctggaacctgcagaatgaggtacagcctgggcggggctgggagtgacatgaacgcgcctgcacttcctgggtcagtcaccggagtcttgttgggtggaaagacttgaatggtgggcacagttggctcttgcttctgtgggagttcctcggacatgttaaccttgactttgtggtttaggttactaaggagcgcacagctcagtgtttcctgcgtgtggacgatgagtcaatgcagcgcttccacaaccgcgtgcgtcagattctcatggcctctgggtccaccaccttcaccaagattgtgaataagtggaatacagctctcattggccttatgacatactttcgggaggctgtggtgaacacccaagagctcttggacttactggtgaagtgtgagaacaaaatccagacacgtatcaagattggactcaactccaagatgccaagtcggttccccccggttgtgttctacacccctaaggagttgggtggactcggcatgctctcaatgggccatgtgctcatcccccaatccgacctcaggtggtccaaacagacagatgtaggtatcacacactttcgttcaggaatgagccatgaagaagaccagctcattcccaacttgtaccgctacatacagccatgggagagcgagttcattgattctcagcgggtctgggctgagtacgcactcaagaggcaagaggccattgctcagaacagacgcctgactttagaagacctagaagattcatgggatcgtggcattcctcgaatcaataccctcttccagaaggaccggcacacactggcttatgataagggctggcgtgtcagaactgactttaagcagtatcaggttttgaagcagaatccgttctggtggacacaccagcggcatgatgggaagctctggaacctgaacaactaccgtacagacatgatccaggccctgggcggtgtggaaggcattctggaacacacactctttaagggcacttacttccctacctgggaggggcttttctgggagaaggccagtggctttgaggaatctatgaagtggaagaagctaactaatgctcagcgatcaggactgaaccagattcccaatcgtagattcaccctctggtggtccccgaccattaatcgagccaatgtatatgtaggctttcaggtgcagctagacctgacgggtatcttcatgcacggcaagatccccacgctgaagatctctctcatccagatcttccgagctcacttgtggcagaagatccatgagagcattgttatggacttatgtcaggtgtttgaccaggaacttgatgcactggaaattgagacagtacaaaaggagacaatccatccccgaaagtcatataagatgaactcttcctgtgcagatatcctgctctttgcctcctataagtggaatgtctcccggccctcattgctggctgactccaaggatgtgatggacagcaccaccacccagaaatactggattgacatccagttgcgctggggggactatgattcccacgacattgagcgctacgcccgggccaagttcctggactacaccaccgacaacatgagtatctacccttcgcccacaggtgtactcatcgccattgacctggcctataacttgcacagtgcctatggaaactggttcccaggcagcaagcctctcatacaacaggccatggccaagatcatgaaggcaaaccctgccctgtatgtgttacgtgaacggatccgcaaggggctacagctctattcatctgaacccactgagccttatttgtcttctcagaactatggtgagctcttctccaaccagattatctggtttgtggatgacaccaacgtctacagagtgactattcacaagacctttgaagggaacttgacaaccaagcccatcaacggagccatcttcatcttcaacccacgcacagggcagctgttcctcaagataatccacacgtccgtgtgggcgggacagaagcgtttggggcagttggctaagtggaagacagctgaggaggtggccgccctgatccgatctctgcctgtggaggagcagcccaagcagatcattgtcaccaggaagggcatgctggacccactggaggtgcacttactggacttccccaatattgtcatcaaaggatcggagctccaactccctttccaggcgtgtctcaaggtggaaaaattcggggatctcatccttaaagccactgagccccagatggttctcttcaacctctatgacgactggctcaagactatttcatcttacacggccttctcccgtctcatcctgattctgcgtgccctacatgtgaacaacgatcgggcaaaagtgatcctgaagccagacaagactactattacagaaccacaccacatctggcccactctgactgacgaagaatggatcaaggtcgaggtgcagctcaaggatctgatcttggctgactacggcaagaaaaacaatgtgaacgtggcatcactgacacaatcagaaattcgagacatcatcctgggtatggagatctcggcaccgtcacagcagcggcagcagatcgctgagatcgagaagcagaccaaggaacaatcgcagctgacggcaacacagactcgcactgtcaacaagcatggcgatgagatcatcacctccaccaccagcaactatgagacccagactttctcatccaagactgagtggagggtcagggccatctctgctgccaacctgcacctaaggaccaatcacatctatgtttcatctgacgacatcaaggagactggctacacctacatccttcccaagaatgtgcttaagaagttcatctgcatatctgaccttcgggcccaaattgcaggatacctatatggggtgagcccaccagataacccccaggtgaaggagatccgctgcattgtgatggtgccgcagtggggcactcaccagaccgtgcacctgcctggccagctgccccagcatgagtacctcaaggagatggaacccttaggttggatccacactcagcccaatgagtccccgcagttatcaccccaggatgtcaccacccatgccaagatcatggctgacaacccatcttgggatggcgagaagaccattatcatcacatgcagcttcacgccaggctcctgtacactgacggcctacaagctgacccccagtggctacgaatggggccgccagaacacagacaagggcaacaaccccaagggctacctgccttcacactatgagagggtgcagatgctgctgtcggaccgtttccttggcttcttcatggtccctgcccagtcctcgtggaactacaacttcatgggtgttcggcatgaccccaacatgaaatatgagctacagctggcgaaccccaaagagttctaccacgaggtgcacaggccctctcacttcctcaactttgctctcctgcaggagggggaggtttactctgcggatcgggaggacctgtatgcctgaccgtttccctgcctcctgcttcagcctcccgaggccgaagcctcagcccctccagacaggccgctgacattcagcagtttggcctctttccctctgtctgtgcttgtgttgttgacctcctgatggcttgtcatcctgaataaaatataataataaattttgtataaatagga

SEQ ID NO: 262197 - DNA, 4150 bp, Homo sapiens
tagaggctggggttaaatcggacgaggaggacatgaaccatacgaattcatatgggatcatcagaggcctgcagtttgcctcattcatcgtgcagtattatggcctggtgatggatttgcttgtattgggattgcaccgggccagtgagatggctgggccccctcagatgccaaatgactttctcagtttccaggacatagccactgaggctgcccaccccatccgtctcttctgcagatacattgatcgcatccatatttttttcaggttcacagcagatgaggctcgggacctgattcaacgttacctgacagagcaccctgaccccaataatgaaaacatcgttggctataataacaagaagtgctggccccgagatgcccgcatgcgcctcatgaaacatgatgttaacttaggccgggcggtattctgggacatcaagaaccgcttgccacggtcagtgactacagttcagtgggagaacagcttcgtgtctgtgtacagtaaggacaaccccaacctgctgttcaacatgtgtggcttcgagtgccgcatcctgcctaagtgccgcaccagctatgaggagttcacccacaaggacggggtctggaacctgcagaatgaggttactaaggagcgcacagctcagtgtttcctgcgtgtggacgatgagtcaatgcagcgcttccacaaccgcgtgcgtcagattctcatggcctctgggtccaccaccttcaccaagattgtgaataagtggaatacagctctcattggccttatgacatactttcgggaggctgtggtgaacacccaagagctcttggacttactggtgaagtgtgagaacaaaatccagacacgtatcaagattggactcaactccaagatgccaagtcggttccccccggttgtgttctacacccctaaggagttgggtggactcggcatgctctcaatgggccatgtgctcatcccccaatccgacctcaggtggtccaaacagacagatgtaggtatcacacactttcgttcaggaatgagccatgaagaagaccagctcattcccaacttgtaccgctacatacagccatgggagagcgagttcattgattctcagcgggtctgggctgagtacgcactcaagaggcaagaggccattgctcagaacagacgcctgactttagaagacctagaagattcatgggatcgtggcattcctcgaatcaataccctcttccagaaggaccggcacacactggcttatgataagggctggcgtgtcagaactgactttaagcagtatcaggttttgaagcagaatccgttctggtggacacaccagcggcatgatgggaagctctggaacctgaacaactaccgtacagacatgatccaggccctgggcggtgtggaaggcattctggaacacacactctttaagggcacttacttccctacctgggaggggcttttctgggagaaggccagtggctttgaggaatctatgaagtggaagaagctaactaatgctcagcgatcaggactgaaccagattcccaatcgtagattcaccctctggtggtccccgaccattaatcgagccaatgtatatgtaggctttcaggtgcagctagacctgacgggtatcttcatgcacggcaagatccccacgctgaagatctctctcatccagatcttccgagctcacttgtggcagaagatccatgagagcattgttatggacttatgtcaggtgtttgaccaggaacttgatgcactggaaattgagacagtacaaaaggagacaatccatccccgaaagtcatataagatgaactcttcctgtgcagatatcctgctctttgcctcctataagtggaatgtctcccggccctcattgctggctgactccaaggatgtgatggacagcaccaccacccagaaatactggattgacatccagttgcgctggggggactatgattcccacgacattgagcgctacgcccgggccaagttcctggactacaccaccgacaacatgagtatctacccttcgcccacaggtgtactcatcgccattgacctggcctataacttgcacagtgcctatggaaactggttcccaggcagcaagcctctcatacaacaggccatggccaagatcatgaaggcaaaccctgccctgtatgtgttacgtgaacggatccgcaaggggctacagctctattcatctgaacccactgagccttatttgtcttctcagaactatggtgagctcttctccaaccagattatctggtttgtggatgacaccaacgtctacagagtgactattcacaagacctttgaagggaacttgacaaccaagcccatcaacggagccatcttcatcttcaacccacgcacagggcagctgttcctcaagataatccacacgtccgtgtgggcgggacagaagcgtttggggcagttggctaagtggaagacagctgaggaggtggccgccctgatccgatctctgcctgtggaggagcagcccaagcagatcattgtcaccaggaagggcatgctggacccactggaggtgcacttactggacttccccaatattgtcatcaaaggatcggagctccaactccctttccaggcgtgtctcaaggtggaaaaattcggggatctcatccttaaagccactgagccccagatggttctcttcaacctctatgacgactggctcaagactatttcatcttacacggccttctcccgtctcatcctgattctgcgtgccctacatgtgaacaacgatcgggcaaaagtgatcctgaagccagacaagactactattacagaaccacaccacatctggcccactctgactgacgaagaatggatcaaggtcgaggtgcagctcaaggatctgatcttggctgactacggcaagaaaaacaatgtgaacgtggcatcactgacacaatcagaaattcgagacatcatcctgggtatggagatctcggcaccgtcacagcagcggcagcagatcgctgagatcgagaagcagaccaaggaacaatcgcagctgacggcaacacagactcgcactgtcaacaagcatggcgatgagatcatcacctccaccaccagcaactatgagacccagactttctcatccaagactgagtggagggtcagggccatctctgctgccaacctgcacctaaggaccaatcacatctatgtttcatctgacgacatcaaggagactggctacacctacatccttcccaagaatgtgcttaagaagttcatctgcatatctgaccttcgggcccaaattgcaggatacctatatggggtgagcccaccagataacccccaggtgaaggagatccgctgcattgtgatggtgccgcagtggggcactcaccagaccgtgcacctgcctggccagctgccccagcatgagtacctcaaggagatggaacccttaggttggatccacactcagcccaatgagtccccgcagttatcaccccaggatgtcaccacccatgccaagatcatggctgacaacccatcttgggatggcgagaagaccattatcatcacatgcagcttcacgccaggctcctgtacactgacggcctacaagctgacccccagtggctacgaatggggccgccagaacacagacaagggcaacaaccccaagggctacctgccttcacactatgagagggtgcagatgctgctgtcggaccgtttccttggcttcttcatggtccctgcccagtcctcgtggaactacaacttcatgggtgttcggcatgaccccaacatgaaatatgagctacagctggcgaaccccaaagagttctaccacgaggtgcacaggccctctcacttcctcaactttgctctcctgcaggagggggaggtttactctgcggatcgggaggacctgtatgcctgaccgtttccctgcctcctgcttcagcctcccgaggccgaagcctcagcccctccagacaggccgctgacattcagcagtttggcctctttccctctgtctgtgcttgtgttgttgacctcctgatggcttgtcatcctgaataaaatataataataaattttgtataaatagga

SEQ ID NO: 262198 - DNA, 8352 bp, Homo sapiens
atcgtacaatgcgcaatcttggcaaatttattcaaaccctttagacttcggtctctcacagtgcgacgccgggagcccatcacacgctgaggtctgtcagaggccccagaaacagcctcggaaatggaggaggcggggctcaccccgaccacacccccttgcgttcaaagcctttccgcctatgggcccgcctcctcggcgcagtgtgcaactctaattggtcgtctcactaatccatctgagcacctcggcgccgactggatcaactgctgaactcgggttgcgcacttcccggcgctgggaacgcggagcggacgcagtctggccgccattgcgctgcggggaaagcggcctcttgtgtgagggcctgtggggtgcgtggcaggcgtttaaggccgggctgcgggaggcgtggtcgggtcgggccgagtgaccgaaggggttaggccgggcggggctggatgcactgtgtggcgggactgcaggccggggtccccggacgcctttctgctgcgcttcttgtgggcccgggcctgtggttagtgaatttttctatcccgccgctccccagattctccggatatggccggagtgtttccttatcgagggccgggtaacccggtgcctggccctctagccccgctaccggactacatgtcggaggagaagctgcaggagaaagctcgaaaatggcagcaattgcaggccaagcgctatgcagaaaagcggaagtttgggtttgtggatgcccagaaggaagacatgcccccagaacatgtcaggaagatcattcgagaccatggagacatgaccaacaggaagttccgccatgacaaaagggtttacttgggtgccctaaagtacatgccccacgcagtcctcaaactcctggagaacatgcctatgccttgggagcagattcgggatgtgcctgtgctgtaccacatcactggagccatttccttcgtcaatgagattccctgggtcattgaacctgtctacatctcccagtgggggtcaatgtggattatgatgcgccgagaaaaaagagataggaggcatttcaagaggatgcgttttcccccttttgatgatgaggagccgcccttggactatgctgacaacatcctagatgttgagccactggaggccattcagctagagctggaccctgaggaggacgcccctgtgttggactggttctatgaccaccagccgttgagggacagcaggaagtatgtaaatggctccacttaccagcgctggcagttcacactacctatgatgtcgactctctaccgcctggctaatcagctcctgacagacttggtggatgacaactacttctacctgtttgatttgaaggccttctttacgtccaaggcactcaatatggccattcctggaggccccaaatttgaacctcttgttcgagacatcaacctacaggatgaagactggaatgaattcaatgatattaacaagattatcatccggcagcctatccgcactgagtacaagattgcttttccttacttgtacaacaatcttccacaccatgtccacctcacctggtaccatactcccaatgttgtattcatcaaaactgaggatcctgacttgccagctttctactttgaccctttgatcaacccaatctcccataggcactcagtcaagagccaggaaccattgccggatgatgatgaggaatttgagctcccggagtttgtggagcccttcctgaaggacacacccctctatacagacaatacagccaatggcattgccctgctctgggccccgcggcccttcaacctacgctctggtcgcacccgtcgggccctggacataccccttgtcaagaactggtatcgggagcattgtcctgccgggcagcctgtgaaagtgagggtctcctaccagaagctgcttaagtactatgtgctgaatgccctgaagcatcggccccctaaggctcaaaagaagaggtatttgttccgctccttcaaagccaccaaattctttcagtccacaaagctggactgggtggaggttgggctccaggtttgccgccagggctacaacatgctcaaccttctcattcaccgcaaaaacctcaactacctgcacctggactacaacttcaacctcaagcctgtgaaaacgctcaccaccaaggaaagaaagaaatctcgttttgggaatgctttccacctgtgtcgggaagttctgcgtttgactaagctggtggtggatagtcacgtgcagtatcggctgggcaatgtggatgccttccagctggcagatggattgcagtatatatttgcccatgttgggcagttgacgggcatgtatcgatacaaatacaagctgatgcgacagattcgcatgtgcaaggacctgaagcatctcatctattatcgtttcaacacgggccctgtagggaagggtcctggctgtggcttctgggctgccggttggcgagtctggctctttttcatgcgtggcattacccctttattagagcgatggcttggcaacctcctggcccggcagtttgaaggtgagtggttttctctgtgtccaacttctcctgttattgcttcaaaagtacctgcccctgtttgagtctgttccctgctcttgtatgagcactcttcctactggattgcctttaggtccagttctgaaatgagtctgacctagtattctatttcttgggcttccttctggggccttgagaggcagtcatgcatttgcaggagtggaaattcctcagaagcatagttgtgaatgtttaaggtagctcgtctttttgcatatgctgggcacagggacgctttgttaatacctaattttattaataaccataatgagtgaggagcatgaaggtagagacccttattgaaagcaaggaatcttccttgtaatccccttgggacactctacttccaggtcgacactcaaagggggtggcaaagacagtaacaaagcagcgagtggagtcacattttgaccttgagctgcgggcagctgtgatgcatgatattctggacatgatgcctgaggggatcaagcagaacaaggcccggacaatcctgcagcacctcagtgaagcctggcgctgctggaaagccaacattccctggaaggtccctgggctgccgacgcccatagagaatatgatccttcgatacgtgaaggccaaggctgactggtggaccaacactgcccactacaaccgagaacggatccgccgaggggccactgtggacaagactgtttgtaaaaagaatctgggccgcctcacccggctctatctgaaggcagaacaggagcggcagcacaactacctgaaggacgggccttacatcacagcggaggaagcagtggcagtatataccaccacagtgcattggttggaaagccgcaggttttcacccatcccattccccccactctcctataagcatgacaccaagttgctcatcttggcattggagcggctcaaggaagcttatagtgtgaagtctcggttgaaccagtctcagagggaggagctaggtctgatcgagcaggcctacgataacccccacgaggcgctgtcccgcatcaagcgtcacctcctcacacagagagccttcaaagaggtgggcattgagttcatggatctgtatagccacctcgttccagtatatgatgttgagcccctggagaagataactgatgcttacctggaccagtacctgtggtatgaagccgacaagcgccgcctgttcccaccctggattaagcctgcagacacagaaccacctccgctgcttgtttacaagtggtgtcaaggcatcaataacctgcaggacgtgtgggagacgagtgaaggcgagtgcaatgtcatgctggaatcccgctttgagaagatgtatgagaagatcgacttgactctgctcaacaggctgctgcgcctcatcgtggaccacaacatagccgactacatgacagccaagaacaacgtcgtcatcaactataaggacatgaaccatacgaattcatatgggatcatcagaggcctgcagtttgcctcattcatcgtgcagtattatggcctggtgatggatttgcttgtattgggattgcaccgggccagtgagatggctgggccccctcagatgccaaatgactttctcagtttccaggacatagccactgaggctgcccaccccatccgtctcttctgcagatacattgatcgcatccatatttttttcaggttcacagcagatgaggctcgggacctgattcaacgttacctgacagagcaccctgaccccaataatgaaaacatcgttggctataataacaagaagtgctggccccgagatgcccgcatgcgcctcatgaaacatgatgttaacttaggccgggcggtattctgggacatcaagaaccgcttgccacggtcagtgactacagttcagtgggagaacagcttcgtgtctgtgtacagtaaggacaaccccaacctgctgttcaacatgtgtggcttcgagtgccgcatcctgcctaagtgccgcaccagctatgaggagttcacccacaaggacggggtctggaacctgcagaatgaggttactaaggagcgcacagctcagtgtttcctgcgtgtggacgatgagtcaatgcagcgcttccacaaccgcgtgcgtcagattctcatggcctctgggtccaccaccttcaccaagattgtgaataagtggaatacagctctcattggccttatgacatactttcgggaggctgtggtgaacacccaagagctcttggacttactggtgaagtgtgagaacaaaatccagacacgtatcaagattggactcaactccaagatgccaagtcggttccccccggttgtgttctacacccctaaggagttgggtggactcggcatgctctcaatgggccatgtgctcatcccccaatccgacctcaggtggtccaaacagacagatgtaggtatcacacactttcgttcaggaatgagccatgaagaagaccagctcattcccaacttgtaccgctacatacagccatgggagagcgagttcattgattctcagcgggtctgggctgagtacgcactcaagaggcaagaggccattgctcagaacagacgcctgactttagaagacctagaagattcatgggatcgtggcattcctcgaatcaataccctcttccagaaggaccggcacacactggcttatgataagggctggcgtgtcagaactgactttaagcagtatcaggttttgaagcagaatccgttctggtggacacaccagcggcatgatgggaagctctggaacctgaacaactaccgtacagacatgatccaggccctgggcggtgtggaaggcattctggaacacacactctttaagggcacttacttccctacctgggaggggcttttctgggagaaggccagtggctttgaggaatctatgaagtggaagaagctaactaatgctcagcgatcaggactgaaccagattcccaatcgtagattcaccctctggtggtccccgaccattaatcgagccaatgtatatgtaggctttcaggtgcagctagacctgacgggtatcttcatgcacggcaagatccccacgctgaagatctctctcatccagatcttccgagctcacttgtggcagaagatccatgagagcattgttatggacttatgtcaggtgtttgaccaggaacttgatgcactggaaattgagacagtacaaaaggagacaatccatccccgaaagtcatataagatgaactcttcctgtgcagatatcctgctctttgcctcctataagtggaatgtctcccggccctcattgctggctgactccaaggatgtgatggacagcaccaccacccagaaatactggattgacatccagttgcgctggggggactatgattcccacgacattgagcgctacgcccgggccaagttcctggactacaccaccgacaacatgagtatctacccttcgcccacaggtgtactcatcgccattgacctggcctataacttgcacagtgcctatggaaactggttcccaggcagcaagcctctcatacaacaggccatggccaagatcatgaaggcaaaccctgccctgtatgtgttacgtgaacggatccgcaaggggctacagctctattcatctgaacccactgagccttatttgtcttctcagaactatggtgagctcttctccaaccagattatctggtttgtggatgacaccaacgtctacagagtgactattcacaagacctttgaagggaacttgacaaccaagcccatcaacggagccatcttcatcttcaacccacgcacagggcagctgttcctcaagataatccacacgtccgtgtgggcgggacagaagcgtttggggcagttggctaagtggaagacagctgaggaggtggccgccctgatccgatctctgcctgtggaggagcagcccaagcagatcattgtcaccaggaagggcatgctggacccactggaggtgcacttactggacttccccaatattgtcatcaaaggatcggagctccaactccctttccaggcgtgtctcaaggtggaaaaattcggggatctcatccttaaagccactgagccccagatggttctcttcaacctctatgacgactggctcaagactatttcatcttacacggccttctcccgtctcatcctgattctgcgtgccctacatgtgaacaacgatcgggcaaaagtgatcctgaagccagacaagactactattacagaaccacaccacatctggcccactctgactgacgaagaatggatcaaggtcgaggtgcagctcaaggatctgatcttggctgactacggcaagaaaaacaatgtgaacgtggcatcactgacacaatcagaaattcgagacatcatcctgggtatggagatctcggcaccgtcacagcagcggcagcagatcgctgagatcgagaagcagaccaaggaacaatcgcagctgacggcaacacagactcgcactgtcaacaagcatggcgatgagatcatcacctccaccaccagcaactatgagacccagactttctcatccaagactgagtggagggtcagggccatctctgctgccaacctgcacctaaggaccaatcacatctatgtttcatctgacgacatcaaggagactggctacacctacatccttcccaagaatgtgcttaagaagttcatctgcatatctgaccttcgggcccaaattgcaggatacctatatggggtgagcccaccagataacccccaggtgaaggagatccgctgcattgtgatggtgccgcagtggggcactcaccagaccgtgcacctgcctggccagctgccccagcatgagtacctcaaggagatggaacccttaggttggatccacactcagcccaatgagtccccgcagttatcaccccaggatgtcaccacccatgccaagatcatggctgacaacccatcttgggatggcgagaagaccattatcatcacatgcagcttcacgccaggctcctgtacactgacggcctacaagctgacccccagtggctacgaatggggccgccagaacacagacaagggcaacaaccccaagggctacctgccttcacactatgagagggtgcagatgctgctgtcggaccgtttccttggcttcttcatggtccctgcccagtcctcgtggaactacaacttcatgggtgttcggcatgaccccaacatgaaatatgagctacagctggcgaaccccaaagagttctaccacgaggtgcacaggccctctcacttcctcaactttgctctcctgcaggagggggaggtttactctgcggatcgggaggacctgtatgcctgaccgtttccctgcctcctgcttcagcctcccgaggccgaagcctcagcccctccagacaggccgctgacattcagcagtttggcctctttccctctgtctgtgcttgtgttgttgacctcctgatggcttgtcatcctgaataaaatataataataaattttgtataaataggagtgcctacctggtcaaaaacacggaagtcctacagctttccgcccttgtggctcggcttggggcaaggcgactttggcctcgagcaagcttatccaagcctccagaattctagcctacttgtccaattcgccctatagcgaggccgtatatcaattaaattggccgccgctttaccaacggggggactgggatgaaa

SEQ ID NO: 262199 - DNA, 8249 bp, Homo sapiens
atcgtacaatgcgcaatcttggcaaatttattcaaaccctttagacttcggtctctcacagtgcgacgccgggagcccatcacacgctgaggtctgtcagaggccccagaaacagcctcggaaatggaggaggcggggctcaccccgaccacacccccttgcgttcaaagcctttccgcctatgggcccgcctcctcggcgcagtgtgcaactctaattggtcgtctcactaatccatctgagcacctcggcgccgactggatcaactgctgaactcgggttgcgcacttcccggcgctgggaacgcggagcggacgcagtctggccgccattgcgctgcggggaaagcggcctcttgtgtgagggcctgtggggtgcgtggcaggcgtttaaggccgggctgcgggaggcgtggtcgggtcgggccgagtgaccgaaggggttaggccgggcggggctggatgcactgtgtggcgggactgcaggccggggtccccggacgcctttctgctgcgcttcttgtgggcccgggcctgtggttagtgaatttttctatcccgccgctccccagattctccggatatggccggagtgtttccttatcgagggccgggtaacccggtgcctggccctctagccccgctaccggactacatgtcggaggagaagctgcaggagaaagctcgaaaatggcagcaattgcaggccaagcgctatgcagaaaagcggaagtttgggtttgtggatgcccagaaggaagacatgcccccagaacatgtcaggaagatcattcgagaccatggagacatgaccaacaggaagttccgccatgacaaaagggtttacttgggtgccctaaagtacatgccccacgcagtcctcaaactcctggagaacatgcctatgccttgggagcagattcgggatgtgcctgtgctgtaccacatcactggagccatttccttcgtcaatgagattccctgggtcattgaacctgtctacatctcccagtgggggtcaatgtggattatgatgcgccgagaaaaaagagataggaggcatttcaagaggatgcgttttcccccttttgatgatgaggagccgcccttggactatgctgacaacatcctagatgttgagccactggaggccattcagctagagctggaccctgaggaggacgcccctgtgttggactggttctatgaccaccagccgttgagggacagcaggaagtatgtaaatggctccacttaccagcgctggcagttcacactacctatgatgtcgactctctaccgcctggctaatcagctcctgacagacttggtggatgacaactacttctacctgtttgatttgaaggccttctttacgtccaaggcactcaatatggccattcctggaggccccaaatttgaacctcttgttcgagacatcaacctacaggatgaagactggaatgaattcaatgatattaacaagattatcatccggcagcctatccgcactgagtacaagattgcttttccttacttgtacaacaatcttccacaccatgtccacctcacctggtaccatactcccaatgttgtattcatcaaaactgaggatcctgacttgccagctttctactttgaccctttgatcaacccaatctcccataggcactcagtcaagagccaggaaccattgccggatgatgatgaggaatttgagctcccggagtttgtggagcccttcctgaaggacacacccctctatacagacaatacagccaatggcattgccctgctctgggccccgcggcccttcaacctacgctctggtcgcacccgtcgggccctggacataccccttgtcaagaactggtatcgggagcattgtcctgccgggcagcctgtgaaagtgagggtctcctaccagaagctgcttaagtactatgtgctgaatgccctgaagcatcggccccctaaggctcaaaagaagaggtatttgttccgctccttcaaagccaccaaattctttcagtccacaaagctggactgggtggaggttgggctccaggtttgccgccagggctacaacatgctcaaccttctcattcaccgcaaaaacctcaactacctgcacctggactacaacttcaacctcaagcctgtgaaaacgctcaccaccaaggaaagaaagaaatctcgttttgggaatgctttccacctgtgtcgggaagttctgcgtttgactaagctggtggtggatagtcacgtgcagtatcggctgggcaatgtggatgccttccagctggcagatggattgcagtatatatttgcccatgttgggcagttgacgggcatgtatcgatacaaatacaagctgatgcgacagattcgcatgtgcaaggacctgaagcatctcatctattatcgtttcaacacgggccctgtagggaagggtcctggctgtggcttctgggctgccggttggcgagtctggctctttttcatgcgtggcattacccctttattagagcgatggcttggcaacctcctggcccggcagtttgaaggtgagtggttttctctgtgtccaacttctcctgttattgcttcaaaagtacctgcccctgtttgagtctgttccctgctcttgtatgagcactcttcctactggattgcctttaggtccagttctgaaatgagtctgacctagtattctatttcttgggcttccttctggggccttgagaggcagtcatgcatttgcaggagtggaaattcctcagaagcatagttgtgaatgtttaaggtagctcgtctttttgcatatgctgggcacagggacgctttgttaatacctaattttattaataaccataatgagtgaggagcatgaaggtagagacccttattgaaagcaaggaatcttccttgtaatccccttgggacactctacttccaggtcgacactcaaagggggtggcaaagacagtaacaaagcagcgagtggagtcacattttgaccttgagctgcgggcagctgtgatgcatgatattctggacatgatgcctgaggggatcaagcagaacaaggcccggacaatcctgcagcacctcagtgaagcctggcgctgctggaaagccaacattccctggaaggtccctgggctgccgacgcccatagagaatatgatccttcgatacgtgaaggccaaggctgactggtggaccaacactgcccactacaaccgagaacggatccgccgaggggccactgtggacaagactgtttgtaaaaagaatctgggccgcctcacccggctctatctgaaggcagaacaggagcggcagcacaactacctgaaggacgggccttacatcacagcggaggaagcagtggcagtatataccaccacagtgcattggttggaaagccgcaggttttcacccatcccattccccccactctcctataagcatgacaccaagttgctcatcttggcattggagcggctcaaggaagcttatagtgtgaagtctcggttgaaccagtctcagagggaggagctaggtctgatcgagcaggcctacgataacccccacgaggcgctgtcccgcatcaagcgtcacctcctcacacagagagccttcaaagaggtgggcattgagttcatggatctgtatagccacctcgttccagtatatgatgttgagcccctggagaagataactgatgcttacctggaccagtacctgtggtatgaagccgacaagcgccgcctgttcccaccctggattaagcctgcagacacagaaccacctccgctgcttgtttacaagtggtgtcaaggcatcaataacctgcaggacgtgtgggagacgagtgaaggcgagtgcaatgtcatgctggaatcccgctttgagaagatgtatgagaagatcgacttgactctgctcaacaggctgctgcgcctcatcgtggaccacaacatagccgactacatgacagccaagaacaacgtcgtcatcaactataaggacatgaaccatacgaattcatatgggatcatcagaggcctgcagtttgcctcattcatcgtgcagtattatggcctggtgatggatttgcttgtattgggattgcaccgggccagtgagatggctgggccccctcagatgccaaatgactttctcagtttccaggacatagccactgaggctgcccaccccatccgtctcttctgcagatacattgatcgcatccatatttttttcaggttcacagcagatgaggctcgggacctgattcaacgttacctgacagagcaccctgaccccaataatgaaaacatcgttggctataataacaagaagtgctggccccgagatgcccgcatgcgcctcatgaaacatgatgttaacttaggccgggcggtattctgggacatcaagaaccgcttgccacggtcagtgactacagttcagtgggagaacagcttcgtgtctgtgtacagtaaggacaaccccaacctgctgttcaacatgtgtggcttcgagtgccgcatcctgcctaagtgccgcaccagctatgaggagttcacccacaaggacggggtctggaacctgcagaatgaggttactaaggagcgcacagctcagtgtttcctgcgtgtggacgatgagtcaatgcagcgcttccacaaccgcgtgcgtcagattctcatggcctctgggtccaccaccttcaccaagattgtgaataagtggaatacagctctcattggccttatgacatactttcgggaggctgtggtgaacacccaagagctcttggacttactggtgaagtgtgagaacaaaatccagacacgtatcaagattggactcaactccaagatgccaagtcggttccccccggttgtgttctacacccctaaggagttgggtggactcggcatgctctcaatgggccatgtgctcatcccccaatccgacctcaggtggtccaaacagacagatgtaggtatcacacactttcgttcaggaatgagccatgaagaagaccagctcattcccaacttgtaccgctacatacagccatgggagagcgagttcattgattctcagcgggtctgggctgagtacgcactcaagaggcaagaggccattgctcagaacagacgcctgactttagaagacctagaagattcatgggatcgtggcattcctcgaatcaataccctcttccagaaggaccggcacacactggcttatgataagggctggcgtgtcagaactgactttaagcagtatcaggttttgaagcagaatccgttctggtggacacaccagcggcatgatgggaagctctggaacctgaacaactaccgtacagacatgatccaggccctgggcggtgtggaaggcattctggaacacacactctttaagggcacttacttccctacctgggaggggcttttctgggagaaggccagtggctttgaggaatctatgaagtggaagaagctaactaatgctcagcgatcaggactgaaccagattcccaatcgtagattcaccctctggtggtccccgaccattaatcgagccaatgtatatgtaggctttcaggtgcagctagacctgacgggtatcttcatgcacggcaagatccccacgctgaagatctctctcatccagatcttccgagctcacttgtggcagaagatccatgagagcattgttatggacttatgtcaggtgtttgaccaggaacttgatgcactggaaattgagacagtacaaaaggagacaatccatccccgaaagtcatataagatgaactcttcctgtgcagatatcctgctctttgcctcctataagtggaatgtctcccggccctcattgctggctgactccaaggatgtgatggacagcaccaccacccagaaatactggattgacatccagttgcgctggggggactatgattcccacgacattgagcgctacgcccgggccaagttcctggactacaccaccgacaacatgagtatctacccttcgcccacaggtgtactcatcgccattgacctggcctataacttgcacagtgcctatggaaactggttcccaggcagcaagcctctcatacaacaggccatggccaagatcatgaaggcaaaccctgccctgtatgtgttacgtgaacggatccgcaaggggctacagctctattcatctgaacccactgagccttatttgtcttctcagaactatggtgagctcttctccaaccagattatctggtttgtggatgacaccaacgtctacagagtgactattcacaagacctttgaagggaacttgacaaccaagcccatcaacggagccatcttcatcttcaacccacgcacagggcagctgttcctcaagataatccacacgtccgtgtgggcgggacagaagcgtttggggcagttggctaagtggaagacagctgaggaggtggccgccctgatccgatctctgcctgtggaggagcagcccaagcagatcattgtcaccaggaagggcatgctggacccactggaggtgcacttactggacttccccaatattgtcatcaaaggatcggagctccaactccctttccaggcgtgtctcaaggtggaaaaattcggggatctcatccttaaagccactgagccccagatggttctcttcaacctctatgacgactggctcaagactatttcatcttacacggccttctcccgtctcatcctgattctgcgtgccctacatgtgaacaacgatcgggcaaaagtgatcctgaagccagacaagactactattacagaaccacaccacatctggcccactctgactgacgaagaatggatcaaggtcgaggtgcagctcaaggatctgatcttggctgactacggcaagaaaaacaatgtgaacgtggcatcactgacacaatcagaaattcgagacatcatcctgggtatggagatctcggcaccgtcacagcagcggcagcagatcgctgagatcgagaagcagaccaaggaacaatcgcagctgacggcaacacagactcgcactgtcaacaagcatggcgatgagatcatcacctccaccaccagcaactatgagacccagactttctcatccaagactgagtggagggtcagggccatctctgctgccaacctgcacctaaggaccaatcacatctatgtttcatctgacgacatcaaggagactggctacacctacatccttcccaagaatgtgcttaagaagttcatctgcatatctgaccttcgggcccaaattgcaggatacctatatggggtgagcccaccagataacccccaggtgaaggagatccgctgcattgtgatggtgccgcagtggggcactcaccagaccgtgcacctgcctggccagctgccccagcatgagtacctcaaggtaatggggagtgatggagcctgggagtgtggaaaagctggtgcgattcctgtctgtggatgggattcagctctgtactcctctttacctataggagatggaacccttaggttggatccacactcagcccaatgagtccccgcagttatcaccccaggatgtcaccacccatgccaagatcatggctgacaacccatcttgggatggcgagaagaccattatcatcacatgcagcttcacgccaggctcctgtacactgacggcctacaagctgacccccagtggctacgaatggggccgccagaacacagacaagggcaacaaccccaagggctacctgccttcacactatgagagggtgcagatgctgctgtcggaccgtttccttggcttcttcatggtccctgcccagtcctcgtggaactacaacttcatgggtgttcggcatgaccccaacatgaaatatgagctacagctggcgaaccccaaagagttctaccacgaggtgcacaggccctctcacttcctcaactttgctctcctgcaggagggggaggtttactctgcggatcgggaggacctgtatgcctgaccgtttccctgcctcctgcttcagcctcccgaggccgaagcctcagcccctccagacaggccgctgacattcagcagtttggcctctttccctctgtctgtgcttgtgttgttgacctcctgatggcttgtcatcctgaataaaatataataataaattttgtataaatagga

SEQ ID NO: 262200 - DNA, 8144 bp, Homo sapiens
atcgtacaatgcgcaatcttggcaaatttattcaaaccctttagacttcggtctctcacagtgcgacgccgggagcccatcacacgctgaggtctgtcagaggccccagaaacagcctcggaaatggaggaggcggggctcaccccgaccacacccccttgcgttcaaagcctttccgcctatgggcccgcctcctcggcgcagtgtgcaactctaattggtcgtctcactaatccatctgagcacctcggcgccgactggatcaactgctgaactcgggttgcgcacttcccggcgctgggaacgcggagcggacgcagtctggccgccattgcgctgcggggaaagcggcctcttgtgtgagggcctgtggggtgcgtggcaggcgtttaaggccgggctgcgggaggcgtggtcgggtcgggccgagtgaccgaaggggttaggccgggcggggctggatgcactgtgtggcgggactgcaggccggggtccccggacgcctttctgctgcgcttcttgtgggcccgggcctgtggttagtgaatttttctatcccgccgctccccagattctccggatatggccggagtgtttccttatcgagggccgggtaacccggtgcctggccctctagccccgctaccggactacatgtcggaggagaagctgcaggagaaagctcgaaaatggcagcaattgcaggccaagcgctatgcagaaaagcggaagtttgggtttgtggatgcccagaaggaagacatgcccccagaacatgtcaggaagatcattcgagaccatggagacatgaccaacaggaagttccgccatgacaaaagggtttacttgggtgccctaaagtacatgccccacgcagtcctcaaactcctggagaacatgcctatgccttgggagcagattcgggatgtgcctgtgctgtaccacatcactggagccatttccttcgtcaatgagattccctgggtcattgaacctgtctacatctcccagtgggggtcaatgtggattatgatgcgccgagaaaaaagagataggaggcatttcaagaggatgcgttttcccccttttgatgatgaggagccgcccttggactatgctgacaacatcctagatgttgagccactggaggccattcagctagagctggaccctgaggaggacgcccctgtgttggactggttctatgaccaccagccgttgagggacagcaggaagtatgtaaatggctccacttaccagcgctggcagttcacactacctatgatgtcgactctctaccgcctggctaatcagctcctgacagacttggtggatgacaactacttctacctgtttgatttgaaggccttctttacgtccaaggcactcaatatggccattcctggaggccccaaatttgaacctcttgttcgagacatcaacctacaggatgaagactggaatgaattcaatgatattaacaagattatcatccggcagcctatccgcactgagtacaagattgcttttccttacttgtacaacaatcttccacaccatgtccacctcacctggtaccatactcccaatgttgtattcatcaaaactgaggatcctgacttgccagctttctactttgaccctttgatcaacccaatctcccataggcactcagtcaagagccaggaaccattgccggatgatgatgaggaatttgagctcccggagtttgtggagcccttcctgaaggacacacccctctatacagacaatacagccaatggcattgccctgctctgggccccgcggcccttcaacctacgctctggtcgcacccgtcgggccctggacataccccttgtcaagaactggtatcgggagcattgtcctgccgggcagcctgtgaaagtgagggtctcctaccagaagctgcttaagtactatgtgctgaatgccctgaagcatcggccccctaaggctcaaaagaagaggtatttgttccgctccttcaaagccaccaaattctttcagtccacaaagctggactgggtggaggttgggctccaggtttgccgccagggctacaacatgctcaaccttctcattcaccgcaaaaacctcaactacctgcacctggactacaacttcaacctcaagcctgtgaaaacgctcaccaccaaggaaagaaagaaatctcgttttgggaatgctttccacctgtgtcgggaagttctgcgtttgactaagctggtggtggatagtcacgtgcagtatcggctgggcaatgtggatgccttccagctggcagatggattgcagtatatatttgcccatgttgggcagttgacgggcatgtatcgatacaaatacaagctgatgcgacagattcgcatgtgcaaggacctgaagcatctcatctattatcgtttcaacacgggccctgtagggaagggtcctggctgtggcttctgggctgccggttggcgagtctggctctttttcatgcgtggcattacccctttattagagcgatggcttggcaacctcctggcccggcagtttgaaggtgagtggttttctctgtgtccaacttctcctgttattgcttcaaaagtacctgcccctgtttgagtctgttccctgctcttgtatgagcactcttcctactggattgcctttaggtccagttctgaaatgagtctgacctagtattctatttcttgggcttccttctggggccttgagaggcagtcatgcatttgcaggagtggaaattcctcagaagcatagttgtgaatgtttaaggtagctcgtctttttgcatatgctgggcacagggacgctttgttaatacctaattttattaataaccataatgagtgaggagcatgaaggtagagacccttattgaaagcaaggaatcttccttgtaatccccttgggacactctacttccaggtcgacactcaaagggggtggcaaagacagtaacaaagcagcgagtggagtcacattttgaccttgagctgcgggcagctgtgatgcatgatattctggacatgatgcctgaggggatcaagcagaacaaggcccggacaatcctgcagcacctcagtgaagcctggcgctgctggaaagccaacattccctggaaggtccctgggctgccgacgcccatagagaatatgatccttcgatacgtgaaggccaaggctgactggtggaccaacactgcccactacaaccgagaacggatccgccgaggggccactgtggacaagactgtttgtaaaaagaatctgggccgcctcacccggctctatctgaaggcagaacaggagcggcagcacaactacctgaaggacgggccttacatcacagcggaggaagcagtggcagtatataccaccacagtgcattggttggaaagccgcaggttttcacccatcccattccccccactctcctataagcatgacaccaagttgctcatcttggcattggagcggctcaaggaagcttatagtgtgaagtctcggttgaaccagtctcagagggaggagctaggtctgatcgagcaggcctacgataacccccacgaggcgctgtcccgcatcaagcgtcacctcctcacacagagagccttcaaagaggtgggcattgagttcatggatctgtatagccacctcgttccagtatatgatgttgagcccctggagaagataactgatgcttacctggaccagtacctgtggtatgaagccgacaagcgccgcctgttcccaccctggattaagcctgcagacacagaaccacctccgctgcttgtttacaagtggtgtcaaggcatcaataacctgcaggacgtgtgggagacgagtgaaggcgagtgcaatgtcatgctggaatcccgctttgagaagatgtatgagaagatcgacttgactctgctcaacaggctgctgcgcctcatcgtggaccacaacatagccgactacatgacagccaagaacaacgtcgtcatcaactataaggacatgaaccatacgaattcatatgggatcatcagaggcctgcagtttgcctcattcatcgtgcagtattatggcctggtgatggatttgcttgtattgggattgcaccgggccagtgagatggctgggccccctcagatgccaaatgactttctcagtttccaggacatagccactgaggctgcccaccccatccgtctcttctgcagatacattgatcgcatccatatttttttcaggttcacagcagatgaggctcgggacctgattcaacgttacctgacagagcaccctgaccccaataatgaaaacatcgttggctataataacaagaagtgctggccccgagatgcccgcatgcgcctcatgaaacatgatgttaacttaggccgggcggtattctgggacatcaagaaccgcttgccacggtcagtgactacagttcagtgggagaacagcttcgtgtctgtgtacagtaaggacaaccccaacctgctgttcaacatgtgtggcttcgagtgccgcatcctgcctaagtgccgcaccagctatgaggagttcacccacaaggacggggtctggaacctgcagaatgaggttactaaggagcgcacagctcagtgtttcctgcgtgtggacgatgagtcaatgcagcgcttccacaaccgcgtgcgtcagattctcatggcctctgggtccaccaccttcaccaagattgtgaataagtggaatacagctctcattggccttatgacatactttcgggaggctgtggtgaacacccaagagctcttggacttactggtgaagtgtgagaacaaaatccagacacgtatcaagattggactcaactccaagatgccaagtcggttccccccggttgtgttctacacccctaaggagttgggtggactcggcatgctctcaatgggccatgtgctcatcccccaatccgacctcaggtggtccaaacagacagatgtaggtatcacacactttcgttcaggaatgagccatgaagaagaccagctcattcccaacttgtaccgctacatacagccatgggagagcgagttcattgattctcagcgggtctgggctgagtacgcactcaagaggcaagaggccattgctcagaacagacgcctgactttagaagacctagaagattcatgggatcgtggcattcctcgaatcaataccctcttccagaaggaccggcacacactggcttatgataagggctggcgtgtcagaactgactttaagcagtatcaggttttgaagcagaatccgttctggtggacacaccagcggcatgatgggaagctctggaacctgaacaactaccgtacagacatgatccaggccctgggcggtgtggaaggcattctggaacacacactctttaagggcacttacttccctacctgggaggggcttttctgggagaaggccagtggctttgaggaatctatgaagtggaagaagctaactaatgctcagcgatcaggactgaaccagattcccaatcgtagattcaccctctggtggtccccgaccattaatcgagccaatgtatatgtaggctttcaggtgcagctagacctgacgggtatcttcatgcacggcaagatccccacgctgaagatctctctcatccagatcttccgagctcacttgtggcagaagatccatgagagcattgttatggacttatgtcaggtgtttgaccaggaacttgatgcactggaaattgagacagtacaaaaggagacaatccatccccgaaagtcatataagatgaactcttcctgtgcagatatcctgctctttgcctcctataagtggaatgtctcccggccctcattgctggctgactccaaggatgtgatggacagcaccaccacccagaaatactggattgacatccagttgcgctggggggactatgattcccacgacattgagcgctacgcccgggccaagttcctggactacaccaccgacaacatgagtatctacccttcgcccacaggtgtactcatcgccattgacctggcctataacttgcacagtgcctatggaaactggttcccaggcagcaagcctctcatacaacaggccatggccaagatcatgaaggcaaaccctgccctgtatgtgttacgtgaacggatccgcaaggggctacagctctattcatctgaacccactgagccttatttgtcttctcagaactatggtgagctcttctccaaccagattatctggtttgtggatgacaccaacgtctacagagtgactattcacaagacctttgaagggaacttgacaaccaagcccatcaacggagccatcttcatcttcaacccacgcacagggcagctgttcctcaagataatccacacgtccgtgtgggcgggacagaagcgtttggggcagttggctaagtggaagacagctgaggaggtggccgccctgatccgatctctgcctgtggaggagcagcccaagcagatcattgtcaccaggaagggcatgctggacccactggaggtgcacttactggacttccccaatattgtcatcaaaggatcggagctccaactccctttccaggcgtgtctcaaggtggaaaaattcggggatctcatccttaaagccactgagccccagatggttctcttcaacctctatgacgactggctcaagactatttcatcttacacggccttctcccgtctcatcctgattctgcgtgccctacatgtgaacaacgatcgggcaaaagtgatcctgaagccagacaagactactattacagaaccacaccacatctggcccactctgactgacgaagaatggatcaaggtcgaggtgcagctcaaggatctgatcttggctgactacggcaagaaaaacaatgtgaacgtggcatcactgacacaatcagaaattcgagacatcatcctgggtatggagatctcggcaccgtcacagcagcggcagcagatcgctgagatcgagaagcagaccaaggaacaatcgcagctgacggcaacacagactcgcactgtcaacaagcatggcgatgagatcatcacctccaccaccagcaactatgagacccagactttctcatccaagactgagtggagggtcagggccatctctgctgccaacctgcacctaaggaccaatcacatctatgtttcatctgacgacatcaaggagactggctacacctacatccttcccaagaatgtgcttaagaagttcatctgcatatctgaccttcgggcccaaattgcaggatacctatatggggtgagcccaccagataacccccaggtgaaggagatccgctgcattgtgatggtgccgcagtggggcactcaccagaccgtgcacctgcctggccagctgccccagcatgagtacctcaaggagatggaacccttaggttggatccacactcagcccaatgagtccccgcagttatcaccccaggatgtcaccacccatgccaagatcatggctgacaacccatcttgggatggcgagaagaccattatcatcacatgcagcttcacgccaggctcctgtacactgacggcctacaagctgacccccagtggctacgaatggggccgccagaacacagacaagggcaacaaccccaagggctacctgccttcacactatgagagggtgcagatgctgctgtcggaccgtttccttggcttcttcatggtccctgcccagtcctcgtggaactacaacttcatgggtgttcggcatgaccccaacatgaaatatgagctacagctggcgaaccccaaagagttctaccacgaggtgcacaggccctctcacttcctcaactttgctctcctgcaggagggggaggtttactctgcggatcgggaggacctgtatgcctgaccgtttccctgcctcctgcttcagcctcccgaggccgaagcctcagcccctccagacaggccgctgacattcagcagctcgcccctaagttgcagctcgcccctgagttagcagctcgcccctaagttagcagctcgcccctgagttagcagctcgcctgag

SEQ ID NO: 262201 - DNA, 3070 bp, Homo sapiens
atgccgcagtatcgtaatccctttgaaaaaggtgatctttacataaagcttgtctgggttgatccagttgttttcaggaaactgccagaacacgcctgactttagaagacctagaagattcatgggatcgtggcattcctcgaatcaataccctcttccagaaggaccggcacacactggcttatgataagggctggcgtgtcagaactgactttaagcagtatcaggttttgaagcagaatccgttctggtggacacaccagcggcatgatgggaagctctggaacctgaacaactaccgtacagacatgatccaggccctgggcggtgtggaaggcattctggaacacacactctttaagggcacttacttccctacctgggaggggcttttctgggagaaggccagtggctttgaggaatctatgaagtggaagaagctaactaatgctcagcgatcaggactgaaccagattcccaatcgtagattcaccctctggtggtccccgaccattaatcgagccaatgtatatgtaggctttcaggtgcagctagacctgacgggtatcttcatgcacggcaagatccccacgctgaagatctctctcatccagatcttccgagctcacttgtggcagaagatccatgagagcattgttatggacttatgtcaggtgtttgaccaggaacttgatgcactggaaattgagacagtacaaaaggagacaatccatccccgaaagtcatataagatgaactcttcctgtgcagatatcctgctctttgcctcctataagtggaatgtctcccggccctcattgctggctgactccaaggatgtgatggacagcaccaccacccagaaatactggattgacatccagttgcgctggggggactatgattcccacgacattgagcgctacgcccgggccaagttcctggactacaccaccgacaacatgagtatctacccttcgcccacaggtgtactcatcgccattgacctggcctataacttgcacagtgcctatggaaactggttcccaggcagcaagcctctcatacaacaggccatggccaagatcatgaaggcaaaccctgccctgtatgtgttacgtgaacggatccgcaaggggctacagctctattcatctgaacccactgagccttatttgtcttctcagaactatggtgagctcttctccaaccagattatctggtttgtggatgacaccaacgtctacagagtgactattcacaagacctttgaagggaacttgacaaccaagcccatcaacggagccatcttcatcttcaacccacgcacagggcagctgttcctcaagataatccacacgtccgtgtgggcgggacagaagcgtttggggcagttggctaagtggaagacagctgaggaggtggccgccctgatccgatctctgcctgtggaggagcagcccaagcagatcattgtcaccaggaagggcatgctggacccactggaggtgcacttactggacttccccaatattgtcatcaaaggatcggagctccaactccctttccaggcgtgtctcaaggtggaaaaattcggggatctcatccttaaagccactgagccccagatggttctcttcaacctctatgacgactggctcaagactatttcatcttacacggccttctcccgtctcatcctgattctgcgtgccctacatgtgaacaacgatcgggcaaaagtgatcctgaagccagacaagactactattacagaaccacaccacatctggcccactctgactgacgaagaatggatcaaggtcgaggtgcagctcaaggatctgatcttggctgactacggcaagaaaaacaatgtgaacgtggcatcactgacacaatcagaaattcgagacatcatcctgggtatggagatctcggcaccgtcacagcagcggcagcagatcgctgagatcgagaagcagaccaaggaacaatcgcagctgacggcaacacagactcgcactgtcaacaagcatggcgatgagatcatcacctccaccaccagcaactatgagacccagactttctcatccaagactgagtggagggtcagggccatctctgctgccaacctgcacctaaggaccaatcacatctatgtttcatctgacgacatcaaggagactggctacacctacatccttcccaagaatgtgcttaagaagttcatctgcatatctgaccttcgggcccaaattgcaggatacctatatggggtgagcccaccagataacccccaggtgaaggagatccgctgcattgtgatggtgccgcagtggggcactcaccagaccgtgcacctgcctggccagctgccccagcatgagtacctcaaggagatggaacccttaggttggatccacactcagcccaatgagtccccgcagttatcaccccaggatgtcaccacccatgccaagatcatggctgacaacccatcttgggatggcgagaagaccattatcatcacatgcagcttcacgccaggctcctgtacactgacggcctacaagctgacccccagtggctacgaatggggccgccagaacacagacaagggcaacaaccccaagggctacctgccttcacactatgagagggtgcagatgctgctgtcggaccgtttccttggcttcttcatggtccctgcccagtcctcgtggaactacaacttcatgggtgttcggcatgaccccaacatgaaatatgagctacagctggcgaaccccaaagagttctaccacgaggtgcacaggccctctcacttcctcaactttgctctcctgcaggagggggaggtttactctgcggatcgggaggacctgtatgcctgaccgtttccctgcctcctgcttcagcctcccgaggccgaagcctcagcccctccagacaggccgctgacattcagcagtttggcctctttccctctgtctgtgcttgtgttgttgacctcctgatggcttgtcatcctgaataaaatataataataaattttgtataaatagga

SEQ ID NO: 262202 - DNA, 3065 bp, Homo sapiens
  misc_feature (10)..(10): n is a, c, g, or t
  misc_feature (24)..(24): n is a, c, g, or t
acctgaaagncggaggttgcagtnagcccagattgcaccattgcactccagcccgggagaaagatcaagaggccattgctcagaacacgcctgactttagaagacctagaagattcatgggatcgtggcattcctcgaatcaataccctcttccagaaggaccggcacacactggcttatgataagggctggcgtgtcagaactgactttaagcagtatcaggttttgaagcagaatccgttctggtggacacaccagcggcatgatgggaagctctggaacctgaacaactaccgtacagacatgatccaggccctgggcggtgtggaaggcattctggaacacacactctttaagggcacttacttccctacctgggaggggcttttctgggagaaggccagtggctttgaggaatctatgaagtggaagaagctaactaatgctcagcgatcaggactgaaccagattcccaatcgtagattcaccctctggtggtccccgaccattaatcgagccaatgtatatgtaggctttcaggtgcagctagacctgacgggtatcttcatgcacggcaagatccccacgctgaagatctctctcatccagatcttccgagctcacttgtggcagaagatccatgagagcattgttatggacttatgtcaggtgtttgaccaggaacttgatgcactggaaattgagacagtacaaaaggagacaatccatccccgaaagtcatataagatgaactcttcctgtgcagatatcctgctctttgcctcctataagtggaatgtctcccggccctcattgctggctgactccaaggatgtgatggacagcaccaccacccagaaatactggattgacatccagttgcgctggggggactatgattcccacgacattgagcgctacgcccgggccaagttcctggactacaccaccgacaacatgagtatctacccttcgcccacaggtgtactcatcgccattgacctggcctataacttgcacagtgcctatggaaactggttcccaggcagcaagcctctcatacaacaggccatggccaagatcatgaaggcaaaccctgccctgtatgtgttacgtgaacggatccgcaaggggctacagctctattcatctgaacccactgagccttatttgtcttctcagaactatggtgagctcttctccaaccagattatctggtttgtggatgacaccaacgtctacagagtgactattcacaagacctttgaagggaacttgacaaccaagcccatcaacggagccatcttcatcttcaacccacgcacagggcagctgttcctcaagataatccacacgtccgtgtgggcgggacagaagcgtttggggcagttggctaagtggaagacagctgaggaggtggccgccctgatccgatctctgcctgtggaggagcagcccaagcagatcattgtcaccaggaagggcatgctggacccactggaggtgcacttactggacttccccaatattgtcatcaaaggatcggagctccaactccctttccaggcgtgtctcaaggtggaaaaattcggggatctcatccttaaagccactgagccccagatggttctcttcaacctctatgacgactggctcaagactatttcatcttacacggccttctcccgtctcatcctgattctgcgtgccctacatgtgaacaacgatcgggcaaaagtgatcctgaagccagacaagactactattacagaaccacaccacatctggcccactctgactgacgaagaatggatcaaggtcgaggtgcagctcaaggatctgatcttggctgactacggcaagaaaaacaatgtgaacgtggcatcactgacacaatcagaaattcgagacatcatcctgggtatggagatctcggcaccgtcacagcagcggcagcagatcgctgagatcgagaagcagaccaaggaacaatcgcagctgacggcaacacagactcgcactgtcaacaagcatggcgatgagatcatcacctccaccaccagcaactatgagacccagactttctcatccaagactgagtggagggtcagggccatctctgctgccaacctgcacctaaggaccaatcacatctatgtttcatctgacgacatcaaggagactggctacacctacatccttcccaagaatgtgcttaagaagttcatctgcatatctgaccttcgggcccaaattgcaggatacctatatggggtgagcccaccagataacccccaggtgaaggagatccgctgcattgtgatggtgccgcagtggggcactcaccagaccgtgcacctgcctggccagctgccccagcatgagtacctcaaggagatggaacccttaggttggatccacactcagcccaatgagtccccgcagttatcaccccaggatgtcaccacccatgccaagatcatggctgacaacccatcttgggatggcgagaagaccattatcatcacatgcagcttcacgccaggctcctgtacactgacggcctacaagctgacccccagtggctacgaatggggccgccagaacacagacaagggcaacaaccccaagggctacctgccttcacactatgagagggtgcagatgctgctgtcggaccgtttccttggcttcttcatggtccctgcccagtcctcgtggaactacaacttcatgggtgttcggcatgaccccaacatgaaatatgagctacagctggcgaaccccaaagagttctaccacgaggtgcacaggccctctcacttcctcaactttgctctcctgcaggagggggaggtttactctgcggatcgggaggacctgtatgcctgaccgtttccctgcctcctgcttcagcctcccgaggccgaagcctcagcccctccagacaggccgctgacattcagcagtttggcctctttccctctgtctgtgcttgtgttgttgacctcctgatggcttgtcatcctgaataaaatataataataaattttgtataaatagga

SEQ ID NO: 262203 - DNA, 7966 bp, Homo sapiens
atcgtacaatgcgcaatcttggcaaatttattcaaaccctttagacttcggtctctcacagtgcgacgccgggagcccatcacacgctgaggtctgtcagaggccccagaaacagcctcggaaatggaggaggcggggctcaccccgaccacacccccttgcgttcaaagcctttccgcctatgggcccgcctcctcggcgcagtgtgcaactctaattggtcgtctcactaatccatctgagcacctcggcgccgactggatcaactgctgaactcgggttgcgcacttcccggcgctgggaacgcggagcggacgcagtctggccgccattgcgctgcggggaaagcggcctcttgtgtgagggcctgtggggtgcgtggcaggcgtttaaggccgggctgcgggaggcgtggtcgggtcgggccgagtgaccgaaggggttaggccgggcggggctggatgcactgtgtggcgggactgcaggccggggtccccggacgcctttctgctgcgcttcttgtgggcccgggcctgtggttagtgaatttttctatcccgccgctccccagattctccggatatggccggagtgtttccttatcgagggccgggtaacccggtgcctggccctctagccccgctaccggactacatgtcggaggagaagctgcaggagaaagctcgaaaatggcagcaattgcaggccaagcgctatgcagaaaagcggaagtttgggtttgtggatgcccagaaggaagacatgcccccagaacatgtcaggaagatcattcgagaccatggagacatgaccaacaggaagttccgccatgacaaaagggtttacttgggtgccctaaagtacatgccccacgcagtcctcaaactcctggagaacatgcctatgccttgggagcagattcgggatgtgcctgtgctgtaccacatcactggagccatttccttcgtcaatgagattccctgggtcattgaacctgtctacatctcccagtgggggtcaatgtggattatgatgcgccgagaaaaaagagataggaggcatttcaagaggatgcgttttcccccttttgatgatgaggagccgcccttggactatgctgacaacatcctagatgttgagccactggaggccattcagctagagctggaccctgaggaggacgcccctgtgttggactggttctatgaccaccagccgttgagggacagcaggaagtatgtaaatggctccacttaccagcgctggcagttcacactacctatgatgtcgactctctaccgcctggctaatcagctcctgacagacttggtggatgacaactacttctacctgtttgatttgaaggccttctttacgtccaaggcactcaatatggccattcctggaggccccaaatttgaacctcttgttcgagacatcaacctacaggatgaagactggaatgaattcaatgatattaacaagattatcatccggcagcctatccgcactgagtacaagattgcttttccttacttgtacaacaatcttccacaccatgtccacctcacctggtaccatactcccaatgttgtattcatcaaaactgaggatcctgacttgccagctttctactttgaccctttgatcaacccaatctcccataggcactcagtcaagagccaggaaccattgccggatgatgatgaggaatttgagctcccggagtttgtggagcccttcctgaaggacacacccctctatacagacaatacagccaatggcattgccctgctctgggccccgcggcccttcaacctacgctctggtcgcacccgtcgggccctggacataccccttgtcaagaactggtatcgggagcattgtcctgccgggcagcctgtgaaagtgagggtctcctaccagaagctgcttaagtactatgtgctgaatgccctgaagcatcggccccctaaggctcaaaagaagaggtatttgttccgctccttcaaagccaccaaattctttcagtccacaaagctggactgggtggaggttgggctccaggtttgccgccagggctacaacatgctcaaccttctcattcaccgcaaaaacctcaactacctgcacctggactacaacttcaacctcaagcctgtgaaaacgctcaccaccaaggaaagaaagaaatctcgttttgggaatgctttccacctgtgtcgggaagttctgcgtttgactaagctggtggtggatagtcacgtgcagtatcggctgggcaatgtggatgccttccagctggcagatggattgcagtatatatttgcccatgttgggcagttgacgggcatgtatcgatacaaatacaagctgatgcgacagattcgcatgtgcaaggacctgaagcatctcatctattatcgtttcaacacgggccctgtagggaagggtcctggctgtggcttctgggctgccggttggcgagtctggctctttttcatgcgtggcattacccctttattagagcgatggcttggcaacctcctggcccggcagtttgaaggtgagtggttttctctgtgtccaacttctcctgttattgcttcaaaagtacctgcccctgtttgagtctgttccctgctcttgtatgagcactcttcctactggattgcctttaggtccagttctgaaatgagtctgacctagtattctatttcttgggcttccttctggggccttgagaggcagtcatgcatttgcaggagtggaaattcctcagaagcatagttgtgaatgtttaaggtagctcgtctttttgcatatgctgggcacagggacgctttgttaatacctaattttattaataaccataatgagtgaggagcatgaaggtagagacccttattgaaagcaaggaatcttccttgtaatccccttgggacactctacttccaggtcgacactcaaagggggtggcaaagacagtaacaaagcagcgagtggagtcacattttgaccttgagctgcgggcagctgtgatgcatgatattctggacatgatgcctgaggggatcaagcagaacaaggcccggacaatcctgcagcacctcagtgaagcctggcgctgctggaaagccaacattccctggaaggtccctgggctgccgacgcccatagagaatatgatccttcgatacgtgaaggccaaggctgactggtggaccaacactgcccactacaaccgagaacggatccgccgaggggccactgtggacaagactgtttgtaaaaagaatctgggccgcctcacccggctctatctgaaggcagaacaggagcggcagcacaactacctgaaggacgggccttacatcacagcggaggaagcagtggcagtatataccaccacagtgcattggttggaaagccgcaggttttcacccatcccattccccccactctcctataagcatgacaccaagttgctcatcttggcattggagcggctcaaggaagcttatagtgtgaagtctcggttgaaccagtctcagagggaggagctaggtctgatcgagcaggcctacgataacccccacgaggcgctgtcccgcatcaagcgtcacctcctcacacagagagccttcaaagaggtgggcattgagttcatggatctgtatagccacctcgttccagtatatgatgttgagcccctggagaagataactgatgcttacctggaccagtacctgtggtatgaagccgacaagcgccgcctgttcccaccctggattaagcctgcagacacagaaccacctccgctgcttgtttacaagtggtgtcaaggcatcaataacctgcaggacgtgtgggagacgagtgaaggcgagtgcaatgtcatgctggaatcccgctttgagaagatgtatgagaagatcgacttgactctgctcaacaggctgctgcgcctcatcgtggaccacaacatagccgactacatgacagccaagaacaacgtcgtcatcaactataaggacatgaaccatacgaattcatatgggatcatcagaggcctgcagtttgcctcattcatcgtgcagtattatggcctggtgatggatttgcttgtattgggattgcaccgggccagtgagatggctgggccccctcagatgccaaatgactttctcagtttccaggacatagccactgaggctgcccaccccatccgtctcttctgcagatacattgatcgcatccatatttttttcaggttcacagcagatgaggctcgggacctgattcaacgttacctgacagagcaccctgaccccaataatgaaaacatcgttggctataataacaagaagtgctggccccgagatgcccgcatgcgcctcatgaaacatgatgttaacttaggccgggcggtattctgggacatcaagaaccgcttgccacggtcagtgactacagttcagtgggagaacagcttcgtgtctgtgtacagtaaggacaaccccaacctgctgttcaacatgtgtggcttcgagtgccgcatcctgcctaagtgccgcaccagctatgaggagttcacccacaaggacggggtctggaacctgcagaatgaggttactaaggagcgcacagctcagtgtttcctgcgtgtggacgatgagtcaatgcagcgcttccacaaccgcgtgcgtcagattctcatggcctctgggtccaccaccttcaccaagattgtgaataagtggaatacagctctcattggccttatgacatactttcgggaggctgtggtgaacacccaagagctcttggacttactggtgaagtgtgagaacaaaatccagacacgtatcaagattggactcaactccaagatgccaagtcggttccccccggttgtgttctacacccctaaggagttgggtggactcggcatgctctcaatgggccatgtgctcatcccccaatccgacctcaggtggtccaaacagacagatgtaggtatcacacactttcgttcaggaatgagccatgaagaagaccagctcattcccaacttgtaccgctacatacagccatgggagagcgagttcattgattctcagcgggtctgggctgagtacgcactcaagaggcaagaggccattgctcagaacagacgcctgactttagaagacctagaagattcatgggatcgtggcattcctcgaatcaataccctcttccagaaggaccggcacacactggcttatgataagggctggcgtgtcagaactgactttaagcagtatcaggttttgaagcagaatccgttctggtggacacaccagcggcatgatgggaagctctggaacctgaacaactaccgtacagacatgatccaggccctgggcggtgtggaaggcattctggaacacacactctttaagggcacttacttccctacctgggaggggcttttctgggagaaggccagtggctttgaggaatctatgaagtggaagaagctaactaatgctcagcgatcaggactgaaccagattcccaatcgtagattcaccctctggtggtccccgaccattaatcgagccaatgtatatgtaggctttcaggtgcagctagacctgacgggtatcttcatgcacggcaagatccccacgctgaagatctctctcatccagatcttccgagctcacttgtggcagaagatccatgagagcattgttatggacttatgtcaggtgtttgaccaggaacttgatgcactggaaattgagacagtacaaaaggagacaatccatccccgaaagtcatataagatgaactcttcctgtgcagatatcctgctctttgcctcctataagtggaatgtctcccggccctcattgctggctgactccaaggatgtgatggacagcaccaccacccagaaatactggattgacatccagttgcgctggggggactatgattcccacgacattgagcgctacgcccgggccaagttcctggactacaccaccgacaacatgagtatctacccttcgcccacaggtgtactcatcgccattgacctggcctataacttgcacagtgcctatggaaactggttcccaggcagcaagcctctcatacaacaggccatggccaagatcatgaaggcaaaccctgccctgtatgtgttacgtgaacggatccgcaaggggctacagctctattcatctgaacccactgagccttatttgtcttctcagaactatggtgagctcttctccaaccagattatctggtttgtggatgacaccaacgtctacagagtgactattcacaagacctttgaagggaacttgacaaccaagcccatcaacggagccatcttcatcttcaacccacgcacagggcagctgttcctcaagataatccacacgtccgtgtgggcgggacagaagcgtttggggcagttggctaagtggaagacagctgaggaggtggccgccctgatccgatctctgcctgtggaggagcagcccaagcagatcattgtcaccaggaagggcatgctggacccactggaggtgcacttactggacttccccaatattgtcatcaaaggatcggagctccaactccctttccaggcgtgtctcaaggtggaaaaattcggggatctcatccttaaagccactgagccccagatggttctcttcaacctctatgacgactggctcaagactatttcatcttacacggccttctcccgtctcatcctgattctgcgtgccctacatgtgaacaacgatcgggcaaaagtgatcctgaagccagacaagactactattacagaaccacaccacatctggcccactctgactgacgaagaatggatcaaggtcgaggtgcagctcaaggatctgatcttggctgactacggcaagaaaaacaatgtgaacgtggcatcactgacacaatcagaaattcgagacatcatcctgggtatggagatctcggcaccgtcacagcagcggcagcagatcgctgagatcgagaagcagaccaaggaacaatcgcagctgacggcaacacagactcgcactgtcaacaagcatggcgatgagatcatcacctccaccaccagcaactatgagacccagactttctcatccaagactgagtggagggtcagggccatctctgctgccaacctgcacctaaggaccaatcacatctatgtttcatctgacgacatcaaggagactggctacacctacatccttcccaagaatgtgcttaagaagttcatctgcatatctgaccttcgggcccaaattgcaggatacctatatggggtgagcccaccagataacccccaggtgaaggagatccgctgcattgtgatggtgccgcagtggggcactcaccagaccgtgcacctgcctggccagctgccccagcatgagtacctcaaggagatggaacccttaggttggatccacactcagcccaatgagtccccgcagttatcaccccaggatgtcaccacccatgccaagatcatggctgacaacccatcttgggatggcgagaagaccattatcatcacatgcagcttcacgccaggctcctgtacactgacggcctacaagctgacccccagtggctacgaatggggccgccagaacacagacaagggcaacaaccccaagggctacctgccttcacactatgagagggtgcagatgctgctgtcggaccgtttccttggcttcttcatggtccctgcccagtcctcgtggaactacaacttcatgggtgttcggcatgaccccaacatgaaatatgagctacagctggcgaaccccaaagagttctaccacgaggtgcacaggccctctcacttcctcaactttgctctcgatccgcagagtaatcatcccagctggtgtaatta

SEQ ID NO: 262204 - DNA, 7955 bp, Homo sapiens
atcgtacaatgcgcaatcttggcaaatttattcaaaccctttagacttcggtctctcacagtgcgacgccgggagcccatcacacgctgaggtctgtcagaggccccagaaacagcctcggaaatggaggaggcggggctcaccccgaccacacccccttgcgttcaaagcctttccgcctatgggcccgcctcctcggcgcagtgtgcaactctaattggtcgtctcactaatccatctgagcacctcggcgccgactggatcaactgctgaactcgggttgcgcacttcccggcgctgggaacgcggagcggacgcagtctggccgccattgcgctgcggggaaagcggcctcttgtgtgagggcctgtggggtgcgtggcaggcgtttaaggccgggctgcgggaggcgtggtcgggtcgggccgagtgaccgaaggggttaggccgggcggggctggatgcactgtgtggcgggactgcaggccggggtccccggacgcctttctgctgcgcttcttgtgggcccgggcctgtggttagtgaatttttctatcccgccgctccccagattctccggatatggccggagtgtttccttatcgagggccgggtaacccggtgcctggccctctagccccgctaccggactacatgtcggaggagaagctgcaggagaaagctcgaaaatggcagcaattgcaggccaagcgctatgcagaaaagcggaagtttgggtttgtggatgcccagaaggaagacatgcccccagaacatgtcaggaagatcattcgagaccatggagacatgaccaacaggaagttccgccatgacaaaagggtttacttgggtgccctaaagtacatgccccacgcagtcctcaaactcctggagaacatgcctatgccttgggagcagattcgggatgtgcctgtgctgtaccacatcactggagccatttccttcgtcaatgagattccctgggtcattgaacctgtctacatctcccagtgggggtcaatgtggattatgatgcgccgagaaaaaagagataggaggcatttcaagaggatgcgttttcccccttttgatgatgaggagccgcccttggactatgctgacaacatcctagatgttgagccactggaggccattcagctagagctggaccctgaggaggacgcccctgtgttggactggttctatgaccaccagccgttgagggacagcaggaagtatgtaaatggctccacttaccagcgctggcagttcacactacctatgatgtcgactctctaccgcctggctaatcagctcctgacagacttggtggatgacaactacttctacctgtttgatttgaaggccttctttacgtccaaggcactcaatatggccattcctggaggccccaaatttgaacctcttgttcgagacatcaacctacaggatgaagactggaatgaattcaatgatattaacaagattatcatccggcagcctatccgcactgagtacaagattgcttttccttacttgtacaacaatcttccacaccatgtccacctcacctggtaccatactcccaatgttgtattcatcaaaactgaggatcctgacttgccagctttctactttgaccctttgatcaacccaatctcccataggcactcagtcaagagccaggaaccattgccggatgatgatgaggaatttgagctcccggagtttgtggagcccttcctgaaggacacacccctctatacagacaatacagccaatggcattgccctgctctgggccccgcggcccttcaacctacgctctggtcgcacccgtcgggccctggacataccccttgtcaagaactggtatcgggagcattgtcctgccgggcagcctgtgaaagtgagggtctcctaccagaagctgcttaagtactatgtgctgaatgccctgaagcatcggccccctaaggctcaaaagaagaggtatttgttccgctccttcaaagccaccaaattctttcagtccacaaagctggactgggtggaggttgggctccaggtttgccgccagggctacaacatgctcaaccttctcattcaccgcaaaaacctcaactacctgcacctggactacaacttcaacctcaagcctgtgaaaacgctcaccaccaaggaaagaaagaaatctcgttttgggaatgctttccacctgtgtcgggaagttctgcgtttgactaagctggtggtggatagtcacgtgcagtatcggctgggcaatgtggatgccttccagctggcagatggattgcagtatatatttgcccatgttgggcagttgacgggcatgtatcgatacaaatacaagctgatgcgacagattcgcatgtgcaaggacctgaagcatctcatctattatcgtttcaacacgggccctgtagggaagggtcctggctgtggcttctgggctgccggttggcgagtctggctctttttcatgcgtggcattacccctttattagagcgatggcttggcaacctcctggcccggcagtttgaaggtgagtggttttctctgtgtccaacttctcctgttattgcttcaaaagtacctgcccctgtttgagtctgttccctgctcttgtatgagcactcttcctactggattgcctttaggtccagttctgaaatgagtctgacctagtattctatttcttgggcttccttctggggccttgagaggcagtcatgcatttgcaggagtggaaattcctcagaagcatagttgtgaatgtttaaggtagctcgtctttttgcatatgctgggcacagggacgctttgttaatacctaattttattaataaccataatgagtgaggagcatgaaggtagagacccttattgaaagcaaggaatcttccttgtaatccccttgggacactctacttccaggtcgacactcaaagggggtggcaaagacagtaacaaagcagcgagtggagtcacattttgaccttgagctgcgggcagctgtgatgcatgatattctggacatgatgcctgaggggatcaagcagaacaaggcccggacaatcctgcagcacctcagtgaagcctggcgctgctggaaagccaacattccctggaaggtccctgggctgccgacgcccatagagaatatgatccttcgatacgtgaaggccaaggctgactggtggaccaacactgcccactacaaccgagaacggatccgccgaggggccactgtggacaagactgtttgtaaaaagaatctgggccgcctcacccggctctatctgaaggcagaacaggagcggcagcacaactacctgaaggacgggccttacatcacagcggaggaagcagtggcagtatataccaccacagtgcattggttggaaagccgcaggttttcacccatcccattccccccactctcctataagcatgacaccaagttgctcatcttggcattggagcggctcaaggaagcttatagtgtgaagtctcggttgaaccagtctcagagggaggagctaggtctgatcgagcaggcctacgataacccccacgaggcgctgtcccgcatcaagcgtcacctcctcacacagagagccttcaaagaggtgggcattgagttcatggatctgtatagccacctcgttccagtatatgatgttgagcccctggagaagataactgatgcttacctggaccagtacctgtggtatgaagccgacaagcgccgcctgttcccaccctggattaagcctgcagacacagaaccacctccgctgcttgtttacaagtggtgtcaaggcatcaataacctgcaggacgtgtgggagacgagtgaaggcgagtgcaatgtcatgctggaatcccgctttgagaagatgtatgagaagatcgacttgactctgctcaacaggctgctgcgcctcatcgtggaccacaacatagccgactacatgacagccaagaacaacgtcgtcatcaactataaggacatgaaccatacgaattcatatgggatcatcagaggcctgcagtttgcctcattcatcgtgcagtattatggcctggtgatggatttgcttgtattgggattgcaccgggccagtgagatggctgggccccctcagatgccaaatgactttctcagtttccaggacatagccactgaggctgcccaccccatccgtctcttctgcagatacattgatcgcatccatatttttttcaggttcacagcagatgaggctcgggacctgattcaacgttacctgacagagcaccctgaccccaataatgaaaacatcgttggctataataacaagaagtgctggccccgagatgcccgcatgcgcctcatgaaacatgatgttaacttaggccgggcggtattctgggacatcaagaaccgcttgccacggtcagtgactacagttcagtgggagaacagcttcgtgtctgtgtacagtaaggacaaccccaacctgctgttcaacatgtgtggcttcgagtgccgcatcctgcctaagtgccgcaccagctatgaggagttcacccacaaggacggggtctggaacctgcagaatgaggttactaaggagcgcacagctcagtgtttcctgcgtgtggacgatgagtcaatgcagcgcttccacaaccgcgtgcgtcagattctcatggcctctgggtccaccaccttcaccaagattgtgaataagtggaatacagctctcattggccttatgacatactttcgggaggctgtggtgaacacccaagagctcttggacttactggtgaagtgtgagaacaaaatccagacacgtatcaagattggactcaactccaagatgccaagtcggttccccccggttgtgttctacacccctaaggagttgggtggactcggcatgctctcaatgggccatgtgctcatcccccaatccgacctcaggtggtccaaacagacagatgtaggtatcacacactttcgttcaggaatgagccatgaagaagaccagctcattcccaacttgtaccgctacatacagccatgggagagcgagttcattgattctcagcgggtctgggctgagtacgcactcaagaggcaagaggccattgctcagaacagacgcctgactttagaagacctagaagattcatgggatcgtggcattcctcgaatcaataccctcttccagaaggaccggcacacactggcttatgataagggctggcgtgtcagaactgactttaagcagtatcaggttttgaagcagaatccgttctggtggacacaccagcggcatgatgggaagctctggaacctgaacaactaccgtacagacatgatccaggccctgggcggtgtggaaggcattctggaacacacactctttaagggcacttacttccctacctgggaggggcttttctgggagaaggccagtggctttgaggaatctatgaagtggaagaagctaactaatgctcagcgatcaggactgaaccagattcccaatcgtagattcaccctctggtggtccccgaccattaatcgagccaatgtatatgtaggctttcaggtgcagctagacctgacgggtatcttcatgcacggcaagatccccacgctgaagatctctctcatccagatcttccgagctcacttgtggcagaagatccatgagagcattgttatggacttatgtcaggtgtttgaccaggaacttgatgcactggaaattgagacagtacaaaaggagacaatccatccccgaaagtcatataagatgaactcttcctgtgcagatatcctgctctttgcctcctataagtggaatgtctcccggccctcattgctggctgactccaaggatgtgatggacagcaccaccacccagaaatactggattgacatccagttgcgctggggggactatgattcccacgacattgagcgctacgcccgggccaagttcctggactacaccaccgacaacatgagtatctacccttcgcccacaggtgtactcatcgccattgacctggcctataacttgcacagtgcctatggaaactggttcccaggcagcaagcctctcatacaacaggccatggccaagatcatgaaggcaaaccctgccctgtatgtgttacgtgaacggatccgcaaggggctacagctctattcatctgaacccactgagccttatttgtcttctcagaactatggtgagctcttctccaaccagattatctggtttgtggatgacaccaacgtctacagagtgactattcacaagacctttgaagggaacttgacaaccaagcccatcaacggagccatcttcatcttcaacccacgcacagggcagctgttcctcaagataatccacacgtccgtgtgggcgggacagaagcgtttggggcagttggctaagtggaagacagctgaggaggtggccgccctgatccgatctctgcctgtggaggagcagcccaagcagatcattgtcaccaggaagggcatgctggacccactggaggtgcacttactggacttccccaatattgtcatcaaaggatcggagctccaactccctttccaggcgtgtctcaaggtggaaaaattcggggatctcatccttaaagccactgagccccagatggttctcttcaacctctatgacgactggctcaagactatttcatcttacacggccttctcccgtctcatcctgattctgcgtgccctacatgtgaacaacgatcgggcaaaagtgatcctgaagccagacaagactactattacagaaccacaccacatctggcccactctgactgacgaagaatggatcaaggtcgaggtgcagctcaaggatctgatcttggctgactacggcaagaaaaacaatgtgaacgtggcatcactgacacaatcagaaattcgagacatcatcctgggtatggagatctcggcaccgtcacagcagcggcagcagatcgctgagatcgagaagcagaccaaggaacaatcgcagctgacggcaacacagactcgcactgtcaacaagcatggcgatgagatcatcacctccaccaccagcaactatgagacccagactttctcatccaagactgagtggagggtcagggccatctctgctgccaacctgcacctaaggaccaatcacatctatgtttcatctgacgacatcaaggagactggctacacctacatccttcccaagaatgtgcttaagaagttcatctgcatatctgaccttcgggcccaaattgcaggatacctatatggggtgagcccaccagataacccccaggtgaaggagatccgctgcattgtgatggtgccgcagtggggcactcaccagaccgtgcacctgcctggccagctgccccagcatgagtacctcaaggagatggaacccttaggttggatccacactcagcccaatgagtccccgcagttatcaccccaggatgtcaccacccatgccaagatcatggctgacaacccatcttgggatggcgagaagaccattatcatcacatgcagcttcacgccaggctcctgtacactgacggcctacaagctgacccccagtggctacgaatggggccgccagaacacagacaagggcaacaaccccaagggctacctgccttcacactatgagagggtgcagatgctgctgtcggaccgtttccttggcttcttcatggtccctgcccagtcctcgtggaactacaacttcatgggtgttcggcatgaccccaacatgaaatatgagctacagctggcgaaccccaaagagttctaccacgaggtgcacaggccctctcacttcctcaactttgctctacagggtaccgcagctcgaaattcg

SEQ ID NO: 262205 - DNA, 2905 bp, Homo sapiens
  misc_feature (110)..(110): n is a, c, g, or t
  misc_feature (217)..(217): n is a, c, g, or t
aaggatctgtgggcccagttttcttaccccttcaatgtcctgatcattgaatttatattagagcttctttaatagatattcctttttattgatttcatctagagtgggcnactgcatgccagcagagaacatctggatcaaaaacacgatacgagattattagtaagggattttgatccagatgttctctgctggcatgcacttacttccctacctnggaggggcttttctgggagaaggccagtggctttgaggaatctatgaagtggaagaagctaactaatgctcagcgatcaggactgaaccagattcccaatcgtagattcaccctctggtggtccccgaccattaatcgagccaatgtatatgtaggctttcaggtgcagctagacctgacgggtatcttcatgcacggcaagatccccacgctgaagatctctctcatccagatcttccgagctcacttgtggcagaagatccatgagagcattgttatggacttatgtcaggtgtttgaccaggaacttgatgcactggaaattgagacagtacaaaaggagacaatccatccccgaaagtcatataagatgaactcttcctgtgcagatatcctgctctttgcctcctataagtggaatgtctcccggccctcattgctggctgactccaaggatgtgatggacagcaccaccacccagaaatactggattgacatccagttgcgctggggggactatgattcccacgacattgagcgctacgcccgggccaagttcctggactacaccaccgacaacatgagtatctacccttcgcccacaggtgtactcatcgccattgacctggcctataacttgcacagtgcctatggaaactggttcccaggcagcaagcctctcatacaacaggccatggccaagatcatgaaggcaaaccctgccctgtatgtgttacgtgaacggatccgcaaggggctacagctctattcatctgaacccactgagccttatttgtcttctcagaactatggtgagctcttctccaaccagattatctggtttgtggatgacaccaacgtctacagagtgactattcacaagacctttgaagggaacttgacaaccaagcccatcaacggagccatcttcatcttcaacccacgcacagggcagctgttcctcaagataatccacacgtccgtgtgggcgggacagaagcgtttggggcagttggctaagtggaagacagctgaggaggtggccgccctgatccgatctctgcctgtggaggagcagcccaagcagatcattgtcaccaggaagggcatgctggacccactggaggtgcacttactggacttccccaatattgtcatcaaaggatcggagctccaactccctttccaggcgtgtctcaaggtggaaaaattcggggatctcatccttaaagccactgagccccagatggttctcttcaacctctatgacgactggctcaagactatttcatcttacacggccttctcccgtctcatcctgattctgcgtgccctacatgtgaacaacgatcgggcaaaagtgatcctgaagccagacaagactactattacagaaccacaccacatctggcccactctgactgacgaagaatggatcaaggtcgaggtgcagctcaaggatctgatcttggctgactacggcaagaaaaacaatgtgaacgtggcatcactgacacaatcagaaattcgagacatcatcctgggtatggagatctcggcaccgtcacagcagcggcagcagatcgctgagatcgagaagcagaccaaggaacaatcgcagctgacggcaacacagactcgcactgtcaacaagcatggcgatgagatcatcacctccaccaccagcaactatgagacccagactttctcatccaagactgagtggagggtcagggccatctctgctgccaacctgcacctaaggaccaatcacatctatgtttcatctgacgacatcaaggagactggctacacctacatccttcccaagaatgtgcttaagaagttcatctgcatatctgaccttcgggcccaaattgcaggatacctatatggggtgagcccaccagataacccccaggtgaaggagatccgctgcattgtgatggtgccgcagtggggcactcaccagaccgtgcacctgcctggccagctgccccagcatgagtacctcaaggagatggaacccttaggttggatccacactcagcccaatgagtccccgcagttatcaccccaggatgtcaccacccatgccaagatcatggctgacaacccatcttgggatggcgagaagaccattatcatcacatgcagcttcacgccaggctcctgtacactgacggcctacaagctgacccccagtggctacgaatggggccgccagaacacagacaagggcaacaaccccaagggctacctgccttcacactatgagagggtgcagatgctgctgtcggaccgtttccttggcttcttcatggtccctgcccagtcctcgtggaactacaacttcatgggtgttcggcatgaccccaacatgaaatatgagctacagctggcgaaccccaaagagttctaccacgaggtgcacaggccctctcacttcctcaactttgctctcctgcaggagggggaggtttactctgcggatcgggaggacctgtatgcctgaccgtttccctgcctcctgcttcagcctcccgaggccgaagcctcagcccctccagacaggccgctgacattcagcagtttggcctctttccctctgtctgtgcttgtgttgttgacctcctgatggcttgtcatcctgaataaaatataataataaattttgtataaatagga

SEQ ID NO: 262206 - DNA, 8074 bp, Homo sapiens
atcgtacaatgcgcaatcttggcaaatttattcaaaccctttagacttcggtctctcacagtgcgacgccgggagcccatcacacgctgaggtctgtcagaggccccagaaacagcctcggaaatggaggaggcggggctcaccccgaccacacccccttgcgttcaaagcctttccgcctatgggcccgcctcctcggcgcagtgtgcaactctaattggtcgtctcactaatccatctgagcacctcggcgccgactggatcaactgctgaactcgggttgcgcacttcccggcgctgggaacgcggagcggacgcagtctggccgccattgcgctgcggggaaagcggcctcttgtgtgagggcctgtggggtgcgtggcaggcgtttaaggccgggctgcgggaggcgtggtcgggtcgggccgagtgaccgaaggggttaggccgggcggggctggatgcactgtgtggcgggactgcaggccggggtccccggacgcctttctgctgcgcttcttgtgggcccgggcctgtggttagtgaatttttctatcccgccgctccccagattctccggatatggccggagtgtttccttatcgagggccgggtaacccggtgcctggccctctagccccgctaccggactacatgtcggaggagaagctgcaggagaaagctcgaaaatggcagcaattgcaggccaagcgctatgcagaaaagcggaagtttgggtttgtggatgcccagaaggaagacatgcccccagaacatgtcaggaagatcattcgagaccatggagacatgaccaacaggaagttccgccatgacaaaagggtttacttgggtgccctaaagtacatgccccacgcagtcctcaaactcctggagaacatgcctatgccttgggagcagattcgggatgtgcctgtgctgtaccacatcactggagccatttccttcgtcaatgagattccctgggtcattgaacctgtctacatctcccagtgggggtcaatgtggattatgatgcgccgagaaaaaagagataggaggcatttcaagaggatgcgttttcccccttttgatgatgaggagccgcccttggactatgctgacaacatcctagatgttgagccactggaggccattcagctagagctggaccctgaggaggacgcccctgtgttggactggttctatgaccaccagccgttgagggacagcaggaagtatgtaaatggctccacttaccagcgctggcagttcacactacctatgatgtcgactctctaccgcctggctaatcagctcctgacagacttggtggatgacaactacttctacctgtttgatttgaaggccttctttacgtccaaggcactcaatatggccattcctggaggccccaaatttgaacctcttgttcgagacatcaacctacaggatgaagactggaatgaattcaatgatattaacaagattatcatccggcagcctatccgcactgagtacaagattgcttttccttacttgtacaacaatcttccacaccatgtccacctcacctggtaccatactcccaatgttgtattcatcaaaactgaggatcctgacttgccagctttctactttgaccctttgatcaacccaatctcccataggcactcagtcaagagccaggaaccattgccggatgatgatgaggaatttgagctcccggagtttgtggagcccttcctgaaggacacacccctctatacagacaatacagccaatggcattgccctgctctgggccccgcggcccttcaacctacgctctggtcgcacccgtcgggccctggacataccccttgtcaagaactggtatcgggagcattgtcctgccgggcagcctgtgaaagtgagggtctcctaccagaagctgcttaagtactatgtgctgaatgccctgaagcatcggccccctaaggctcaaaagaagaggtatttgttccgctccttcaaagccaccaaattctttcagtccacaaagctggactgggtggaggttgggctccaggtttgccgccagggctacaacatgctcaaccttctcattcaccgcaaaaacctcaactacctgcacctggactacaacttcaacctcaagcctgtgaaaacgctcaccaccaaggaaagaaagaaatctcgttttgggaatgctttccacctgtgtcgggaagttctgcgtttgactaagctggtggtggatagtcacgtgcagtatcggctgggcaatgtggatgccttccagctggcagatggattgcagtatatatttgcccatgttgggcagttgacgggcatgtatcgatacaaatacaagctgatgcgacagattcgcatgtgcaaggacctgaagcatctcatctattatcgtttcaacacgggccctgtagggaagggtcctggctgtggcttctgggctgccggttggcgagtctggctctttttcatgcgtggcattacccctttattagagcgatggcttggcaacctcctggcccggcagtttgaaggtgagtggttttctctgtgtccaacttctcctgttattgcttcaaaagtacctgcccctgtttgagtctgttccctgctcttgtatgagcactcttcctactggattgcctttaggtccagttctgaaatgagtctgacctagtattctatttcttgggcttccttctggggccttgagaggcagtcatgcatttgcaggagtggaaattcctcagaagcatagttgtgaatgtttaaggtagctcgtctttttgcatatgctgggcacagggacgctttgttaatacctaattttattaataaccataatgagtgaggagcatgaaggtagagacccttattgaaagcaaggaatcttccttgtaatccccttgggacactctacttccaggtcgacactcaaagggggtggcaaagacagtaacaaagcagcgagtggagtcacattttgaccttgagctgcgggcagctgtgatgcatgatattctggacatgatgcctgaggggatcaagcagaacaaggcccggacaatcctgcagcacctcagtgaagcctggcgctgctggaaagccaacattccctggaaggtccctgggctgccgacgcccatagagaatatgatccttcgatacgtgaaggccaaggctgactggtggaccaacactgcccactacaaccgagaacggatccgccgaggggccactgtggacaagactgtttgtaaaaagaatctgggccgcctcacccggctctatctgaaggcagaacaggagcggcagcacaactacctgaaggacgggccttacatcacagcggaggaagcagtggcagtatataccaccacagtgcattggttggaaagccgcaggttttcacccatcccattccccccactctcctataagcatgacaccaagttgctcatcttggcattggagcggctcaaggaagcttatagtgtgaagtctcggttgaaccagtctcagagggaggagctaggtctgatcgagcaggcctacgataacccccacgaggcgctgtcccgcatcaagcgtcacctcctcacacagagagccttcaaagaggtgggcattgagttcatggatctgtatagccacctcgttccagtatatgatgttgagcccctggagaagataactgatgcttacctggaccagtacctgtggtatgaagccgacaagcgccgcctgttcccaccctggattaagcctgcagacacagaaccacctccgctgcttgtttacaagtggtgtcaaggcatcaataacctgcaggacgtgtgggagacgagtgaaggcgagtgcaatgtcatgctggaatcccgctttgagaagatgtatgagaagatcgacttgactctgctcaacaggctgctgcgcctcatcgtggaccacaacatagccgactacatgacagccaagaacaacgtcgtcatcaactataaggacatgaaccatacgaattcatatgggatcatcagaggcctgcagtttgcctcattcatcgtgcagtattatggcctggtgatggatttgcttgtattgggattgcaccgggccagtgagatggctgggccccctcagatgccaaatgactttctcagtttccaggacatagccactgaggctgcccaccccatccgtctcttctgcagatacattgatcgcatccatatttttttcaggttcacagcagatgaggctcgggacctgattcaacgttacctgacagagcaccctgaccccaataatgaaaacatcgttggctataataacaagaagtgctggccccgagatgcccgcatgcgcctcatgaaacatgatgttaacttaggccgggcggtattctgggacatcaagaaccgcttgccacggtcagtgactacagttcagtgggagaacagcttcgtgtctgtgtacagtaaggacaaccccaacctgctgttcaacatgtgtggcttcgagtgccgcatcctgcctaagtgccgcaccagctatgaggagttcacccacaaggacggggtctggaacctgcagaatgaggttactaaggagcgcacagctcagtgtttcctgcgtgtggacgatgagtcaatgcagcgcttccacaaccgcgtgcgtcagattctcatggcctctgggtccaccaccttcaccaagattgtgaataagtggaatacagctctcattggccttatgacatactttcgggaggctgtggtgaacacccaagagctcttggacttactggtgaagtgtgagaacaaaatccagacacgtatcaagattggactcaactccaagatgccaagtcggttccccccggttgtgttctacacccctaaggagttgggtggactcggcatgctctcaatgggccatgtgctcatcccccaatccgacctcaggtggtccaaacagacagatgtaggtatcacacactttcgttcaggaatgagccatgaagaagaccagctcattcccaacttgtaccgctacatacagccatgggagagcgagttcattgattctcagcgggtctgggctgagtacgcactcaagaggcaagaggccattgctcagaacagacgcctgactttagaagacctagaagattcatgggatcgtggcattcctcgaatcaataccctcttccagaaggaccggcacacactggcttatgataagggctggcgtgtcagaactgactttaagcagtatcaggttttgaagcagaatccgttctggtggacacaccagcggcatgatgggaagctctggaacctgaacaactaccgtacagacatgatccaggccctgggcggtgtggaaggcattctggaacacacactctttaagggcacttacttccctacctgggaggggcttttctgggagaaggccagtggctttgaggaatctatgaagtggaagaagctaactaatgctcagcgatcaggactgaaccagattcccaatcgtagattcaccctctggtggtccccgaccattaatcgagccaatgtatatgtaggctttcaggtgcagctagacctgacgggtatcttcatgcacggcaagatccccacgctgaagatctctctcatccagatcttccgagctcacttgtggcagaagatccatgagagcattgttatggacttatgtcaggtgtttgaccaggaacttgatgcactggaaattgagacagtacaaaaggagacaatccatccccgaaagtcatataagatgaactcttcctgtgcagatatcctgctctttgcctcctataagtggaatgtctcccggccctcattgctggctgactccaaggatgtgatggacagcaccaccacccagaaatactggattgacatccagttgcgctggggggactatgattcccacgacattgagcgctacgcccgggccaagttcctggactacaccaccgacaacatgagtatctacccttcgcccacaggtgtactcatcgccattgacctggcctataacttgcacagtgcctatggaaactggttcccaggcagcaagcctctcatacaacaggccatggccaagatcatgaaggcaaaccctgccctgtatgtgttacgtgaacggatccgcaaggggctacagctctattcatctgaacccactgagccttatttgtcttctcagaactatggtgagctcttctccaaccagattatctggtttgtggatgacaccaacgtctacagagtgactattcacaagacctttgaagggaacttgacaaccaagcccatcaacggagccatcttcatcttcaacccacgcacagggcagctgttcctcaagataatccacacgtccgtgtgggcgggacagaagcgtttggggcagttggctaagtggaagacagctgaggaggtggccgccctgatccgatctctgcctgtggaggagcagcccaagcagatcattgtcaccaggaagggcatgctggacccactggaggtgcacttactggacttccccaatattgtcatcaaaggatcggagctccaactccctttccaggcgtgtctcaaggtggaaaaattcggggatctcatccttaaagccactgagccccagatggttctcttcaacctctatgacgactggctcaagactatttcatcttacacggccttctcccgtctcatcctgattctgcgtgccctacatgtgaacaacgatcgggcaaaagtgatcctgaagccagacaagactactattacagaaccacaccacatctggcccactctgactgacgaagaatggatcaaggtcgaggtgcagctcaaggatctgatcttggctgactacggcaagaaaaacaatgtgaacgtggcatcactgacacaatcagaaattcgagacatcatcctgggtatggagatctcggcaccgtcacagcagcggcagcagatcgctgagatcgagaagcagaccaaggaacaatcgcagctgacggcaacacagactcgcactgtcaacaagcatggcgatgagatcatcacctccaccaccagcaactatgagacccagactttctcatccaagactgagtggagggtcagggccatctctgctgccaacctgcacctaaggaccaatcacatctatgtttcatctgacgacatcaaggagactggctacacctacatccttcccaagaatgtgcttaagaagttcatctgcatatctgaccttcgggcccaaattgcaggatacctatatggggtgagcccaccagataacccccaggtgaaggagatccgctgcattgtgatggtgccgcagtggggcactcaccagaccgtgcacctgcctggccagctgccccagcatgagtacctcaaggagatggaacccttaggttggatccacactcagcccaatgagtccccgcagttatcaccccaggatgtcaccacccatgccaagatcatggctgacaacccatcttgggatggcgagaagaccattatcatcacatgcagcttcacgccaggctcctgtacactgacggcctacaagctgacccccagtggctacgaatggggccgccagaacacagacaagggcaacaaccccaagggctacctgccttcacactatgagagggtgcagatgctgctgtcggaccgtttccttggcttcttcatggtccctgcccagtcctcgtggaactacaacttcatgggcctgcaggagggggaggtttactctgcggatcgggaggacctgtatgcctgaccgtttccctgcctcctgcttcagcctcccgaggccgaagcctcagcccctccagacaggccgctgacattcagcagtttggcctctttccctctgtctgtgcttgtgttgttgacctcctgatggcttgtcatcctgaataaaatataataataaattttgtataaataggaataaataggagttcaggggct

SEQ ID NO: 262207 - DNA, 7814 bp, Homo sapiens
atcgtacaatgcgcaatcttggcaaatttattcaaaccctttagacttcggtctctcacagtgcgacgccgggagcccatcacacgctgaggtctgtcagaggccccagaaacagcctcggaaatggaggaggcggggctcaccccgaccacacccccttgcgttcaaagcctttccgcctatgggcccgcctcctcggcgcagtgtgcaactctaattggtcgtctcactaatccatctgagcacctcggcgccgactggatcaactgctgaactcgggttgcgcacttcccggcgctgggaacgcggagcggacgcagtctggccgccattgcgctgcggggaaagcggcctcttgtgtgagggcctgtggggtgcgtggcaggcgtttaaggccgggctgcgggaggcgtggtcgggtcgggccgagtgaccgaaggggttaggccgggcggggctggatgcactgtgtggcgggactgcaggccggggtccccggacgcctttctgctgcgcttcttgtgggcccgggcctgtggttagtgaatttttctatcccgccgctccccagattctccggatatggccggagtgtttccttatcgagggccgggtaacccggtgcctggccctctagccccgctaccggactacatgtcggaggagaagctgcaggagaaagctcgaaaatggcagcaattgcaggccaagcgctatgcagaaaagcggaagtttgggtttgtggatgcccagaaggaagacatgcccccagaacatgtcaggaagatcattcgagaccatggagacatgaccaacaggaagttccgccatgacaaaagggtttacttgggtgccctaaagtacatgccccacgcagtcctcaaactcctggagaacatgcctatgccttgggagcagattcgggatgtgcctgtgctgtaccacatcactggagccatttccttcgtcaatgagattccctgggtcattgaacctgtctacatctcccagtgggggtcaatgtggattatgatgcgccgagaaaaaagagataggaggcatttcaagaggatgcgttttcccccttttgatgatgaggagccgcccttggactatgctgacaacatcctagatgttgagccactggaggccattcagctagagctggaccctgaggaggacgcccctgtgttggactggttctatgaccaccagccgttgagggacagcaggaagtatgtaaatggctccacttaccagcgctggcagttcacactacctatgatgtcgactctctaccgcctggctaatcagctcctgacagacttggtggatgacaactacttctacctgtttgatttgaaggccttctttacgtccaaggcactcaatatggccattcctggaggccccaaatttgaacctcttgttcgagacatcaacctacaggatgaagactggaatgaattcaatgatattaacaagattatcatccggcagcctatccgcactgagtacaagattgcttttccttacttgtacaacaatcttccacaccatgtccacctcacctggtaccatactcccaatgttgtattcatcaaaactgaggatcctgacttgccagctttctactttgaccctttgatcaacccaatctcccataggcactcagtcaagagccaggaaccattgccggatgatgatgaggaatttgagctcccggagtttgtggagcccttcctgaaggacacacccctctatacagacaatacagccaatggcattgccctgctctgggccccgcggcccttcaacctacgctctggtcgcacccgtcgggccctggacataccccttgtcaagaactggtatcgggagcattgtcctgccgggcagcctgtgaaagtgagggtctcctaccagaagctgcttaagtactatgtgctgaatgccctgaagcatcggccccctaaggctcaaaagaagaggtatttgttccgctccttcaaagccaccaaattctttcagtccacaaagctggactgggtggaggttgggctccaggtttgccgccagggctacaacatgctcaaccttctcattcaccgcaaaaacctcaactacctgcacctggactacaacttcaacctcaagcctgtgaaaacgctcaccaccaaggaaagaaagaaatctcgttttgggaatgctttccacctgtgtcgggaagttctgcgtttgactaagctggtggtggatagtcacgtgcagtatcggctgggcaatgtggatgccttccagctggcagatggattgcagtatatatttgcccatgttgggcagttgacgggcatgtatcgatacaaatacaagctgatgcgacagattcgcatgtgcaaggacctgaagcatctcatctattatcgtttcaacacgggccctgtagggaagggtcctggctgtggcttctgggctgccggttggcgagtctggctctttttcatgcgtggcattacccctttattagagcgatggcttggcaacctcctggcccggcagtttgaaggtgagtggttttctctgtgtccaacttctcctgttattgcttcaaaagtacctgcccctgtttgagtctgttccctgctcttgtatgagcactcttcctactggattgcctttaggtccagttctgaaatgagtctgacctagtattctatttcttgggcttccttctggggccttgagaggcagtcatgcatttgcaggagtggaaattcctcagaagcatagttgtgaatgtttaaggtagctcgtctttttgcatatgctgggcacagggacgctttgttaatacctaattttattaataaccataatgagtgaggagcatgaaggtagagacccttattgaaagcaaggaatcttccttgtaatccccttgggacactctacttccaggtcgacactcaaagggggtggcaaagacagtaacaaagcagcgagtggagtcacattttgaccttgagctgcgggcagctgtgatgcatgatattctggacatgatgcctgaggggatcaagcagaacaaggcccggacaatcctgcagcacctcagtgaagcctggcgctgctggaaagccaacattccctggaaggtccctgggctgccgacgcccatagagaatatgatccttcgatacgtgaaggccaaggctgactggtggaccaacactgcccactacaaccgagaacggatccgccgaggggccactgtggacaagactgtttgtaaaaagaatctgggccgcctcacccggctctatctgaaggcagaacaggagcggcagcacaactacctgaaggacgggccttacatcacagcggaggaagcagtggcagtatataccaccacagtgcattggttggaaagccgcaggttttcacccatcccattccccccactctcctataagcatgacaccaagttgctcatcttggcattggagcggctcaaggaagcttatagtgtgaagtctcggttgaaccagtctcagagggaggagctaggtctgatcgagcaggcctacgataacccccacgaggcgctgtcccgcatcaagcgtcacctcctcacacagagagccttcaaagaggtgggcattgagttcatggatctgtatagccacctcgttccagtatatgatgttgagcccctggagaagataactgatgcttacctggaccagtacctgtggtatgaagccgacaagcgccgcctgttcccaccctggattaagcctgcagacacagaaccacctccgctgcttgtttacaagtggtgtcaaggcatcaataacctgcaggacgtgtgggagacgagtgaaggcgagtgcaatgtcatgctggaatcccgctttgagaagatgtatgagaagatcgacttgactctgctcaacaggctgctgcgcctcatcgtggaccacaacatagccgactacatgacagccaagaacaacgtcgtcatcaactataaggacatgaaccatacgaattcatatgggatcatcagaggcctgcagtttgcctcattcatcgtgcagtattatggcctggtgatggatttgcttgtattgggattgcaccgggccagtgagatggctgggccccctcagatgccaaatgactttctcagtttccaggacatagccactgaggctgcccaccccatccgtctcttctgcagatacattgatcgcatccatatttttttcaggttcacagcagatgaggctcgggacctgattcaacgttacctgacagagcaccctgaccccaataatgaaaacatcgttggctataataacaagaagtgctggccccgagatgcccgcatgcgcctcatgaaacatgatgttaacttaggccgggcggtattctgggacatcaagaaccgcttgccacggtcagtgactacagttcagtgggagaacagcttcgtgtctgtgtacagtaaggacaaccccaacctgctgttcaacatgtgtggcttcgagtgccgcatcctgcctaagtgccgcaccagctatgaggagttcacccacaaggacggggtctggaacctgcagaatgaggttactaaggagcgcacagctcagtgtttcctgcgtgtggacgatgagtcaatgcagcgcttccacaaccgcgtgcgtcagattctcatggcctctgggtccaccaccttcaccaagattgtgaataagtggaatacagctctcattggccttatgacatactttcgggaggctgtggtgaacacccaagagctcttggacttactggtgaagtgtgagaacaaaatccagacacgtatcaagattggactcaactccaagatgccaagtcggttccccccggttgtgttctacacccctaaggagttgggtggactcggcatgctctcaatgggccatgtgctcatcccccaatccgacctcaggtggtccaaacagacagatgtaggtatcacacactttcgttcaggaatgagccatgaagaagaccagctcattcccaacttgtaccgctacatacagccatgggagagcgagttcattgattctcagcgggtctgggctgagtacgcactcaagaggcaagaggccattgctcagaacagacgcctgactttagaagacctagaagattcatgggatcgtggcattcctcgaatcaataccctcttccagaaggaccggcacacactggcttatgataagggctggcgtgtcagaactgactttaagcagtatcaggttttgaagcagaatccgttctggtggacacaccagcggcatgatgggaagctctggaacctgaacaactaccgtacagacatgatccaggccctgggcggtgtggaaggcattctggaacacacactctttaagggcacttacttccctacctgggaggggcttttctgggagaaggccagtggctttgaggaatctatgaagtggaagaagctaactaatgctcagcgatcaggactgaaccagattcccaatcgtagattcaccctctggtggtccccgaccattaatcgagccaatgtatatgtaggctttcaggtgcagctagacctgacgggtatcttcatgcacggcaagatccccacgctgaagatctctctcatccagatcttccgagctcacttgtggcagaagatccatgagagcattgttatggacttatgtcaggtgtttgaccaggaacttgatgcactggaaattgagacagtacaaaaggagacaatccatccccgaaagtcatataagatgaactcttcctgtgcagatatcctgctctttgcctcctataagtggaatgtctcccggccctcattgctggctgactccaaggatgtgatggacagcaccaccacccagaaatactggattgacatccagttgcgctggggggactatgattcccacgacattgagcgctacgcccgggccaagttcctggactacaccaccgacaacatgagtatctacccttcgcccacaggtgtactcatcgccattgacctggcctataacttgcacagtgcctatggaaactggttcccaggcagcaagcctctcatacaacaggccatggccaagatcatgaaggcaaaccctgccctgtatgtgttacgtgaacggatccgcaaggggctacagctctattcatctgaacccactgagccttatttgtcttctcagaactatggtgagctcttctccaaccagattatctggtttgtggatgacaccaacgtctacagagtgactattcacaagacctttgaagggaacttgacaaccaagcccatcaacggagccatcttcatcttcaacccacgcacagggcagctgttcctcaagataatccacacgtccgtgtgggcgggacagaagcgtttggggcagttggctaagtggaagacagctgaggaggtggccgccctgatccgatctctgcctgtggaggagcagcccaagcagatcattgtcaccaggaagggcatgctggacccactggaggtgcacttactggacttccccaatattgtcatcaaaggatcggagctccaactccctttccaggcgtgtctcaaggtggaaaaattcggggatctcatccttaaagccactgagccccagatggttctcttcaacctctatgacgactggctcaagactatttcatcttacacggccttctcccgtctcatcctgattctgcgtgccctacatgtgaacaacgatcgggcaaaagtgatcctgaagccagacaagactactattacagaaccacaccacatctggcccactctgactgacgaagaatggatcaaggtcgaggtgcagctcaaggatctgatcttggctgactacggcaagaaaaacaatgtgaacgtggcatcactgacacaatcagaaattcgagacatcatcctgggtatggagatctcggcaccgtcacagcagcggcagcagatcgctgagatcgagaagcagaccaaggaacaatcgcagctgacggcaacacagactcgcactgtcaacaagcatggcgatgagatcatcacctccaccaccagcaactatgagacccagactttctcatccaagactgagtggagggtcagggccatctctgctgccaacctgcacctaaggaccaatcacatctatgtttcatctgacgacatcaaggagactggctacacctacatccttcccaagaatgtgcttaagaagttcatctgcatatctgaccttcgggcccaaattgcaggatacctatatggggtgagcccaccagataacccccaggtgaaggagatccgctgcattgtgatggtgccgcagtggggcactcaccagaccgtgcacctgcctggccagctgccccagcatgagtacctcaaggagatggaacccttaggttggatccacactcagcccaatgagtccccgcagttatcaccccaggatgtcaccacccatgccaagatcatggctgacaacccatcttgggatggcgagaagaccattatcatcacatgcagcttcacgccaggctcctgtacactgacggcctacaagctgacccccagtggctacgaatggggccgccagaacacagacaagggcaacaaccccaagggctacctgccttcacactatgagagggtgcagatgctgctgtcggaccgttcccttctgtcgtcttctcaagatcctgctagagtcaccccg

SEQ ID NO: 262208 - DNA, 2537 bp, Homo sapiens
cgtgatggctgactcttgaggatccccccgcggcgtgtcatgcacggcaagatccccacgctgaagatctctctcatccagatcttccgagctcacttgtggcagaagatccatgagagcattgttatggacttatgtcaggtgtttgaccaggaacttgatgcactggaaattgagacagtacaaaaggagacaatccatccccgaaagtcatataagatgaactcttcctgtgcagatatcctgctctttgcctcctataagtggaatgtctcccggccctcattgctggctgactccaaggatgtgatggacagcaccaccacccagaaatactggattgacatccagttgcgctggggggactatgattcccacgacattgagcgctacgcccgggccaagttcctggactacaccaccgacaacatgagtatctacccttcgcccacaggtgtactcatcgccattgacctggcctataacttgcacagtgcctatggaaactggttcccaggcagcaagcctctcatacaacaggccatggccaagatcatgaaggcaaaccctgccctgtatgtgttacgtgaacggatccgcaaggggctacagctctattcatctgaacccactgagccttatttgtcttctcagaactatggtgagctcttctccaaccagattatctggtttgtggatgacaccaacgtctacagagtgactattcacaagacctttgaagggaacttgacaaccaagcccatcaacggagccatcttcatcttcaacccacgcacagggcagctgttcctcaagataatccacacgtccgtgtgggcgggacagaagcgtttggggcagttggctaagtggaagacagctgaggaggtggccgccctgatccgatctctgcctgtggaggagcagcccaagcagatcattgtcaccaggaagggcatgctggacccactggaggtgcacttactggacttccccaatattgtcatcaaaggatcggagctccaactccctttccaggcgtgtctcaaggtggaaaaattcggggatctcatccttaaagccactgagccccagatggttctcttcaacctctatgacgactggctcaagactatttcatcttacacggccttctcccgtctcatcctgattctgcgtgccctacatgtgaacaacgatcgggcaaaagtgatcctgaagccagacaagactactattacagaaccacaccacatctggcccactctgactgacgaagaatggatcaaggtcgaggtgcagctcaaggatctgatcttggctgactacggcaagaaaaacaatgtgaacgtggcatcactgacacaatcagaaattcgagacatcatcctgggtatggagatctcggcaccgtcacagcagcggcagcagatcgctgagatcgagaagcagaccaaggaacaatcgcagctgacggcaacacagactcgcactgtcaacaagcatggcgatgagatcatcacctccaccaccagcaactatgagacccagactttctcatccaagactgagtggagggtcagggccatctctgctgccaacctgcacctaaggaccaatcacatctatgtttcatctgacgacatcaaggagactggctacacctacatccttcccaagaatgtgcttaagaagttcatctgcatatctgaccttcgggcccaaattgcaggatacctatatggggtgagcccaccagataacccccaggtgaaggagatccgctgcattgtgatggtgccgcagtggggcactcaccagaccgtgcacctgcctggccagctgccccagcatgagtacctcaaggagatggaacccttaggttggatccacactcagcccaatgagtccccgcagttatcaccccaggatgtcaccacccatgccaagatcatggctgacaacccatcttgggatggcgagaagaccattatcatcacatgcagcttcacgccaggctcctgtacactgacggcctacaagctgacccccagtggctacgaatggggccgccagaacacagacaagggcaacaaccccaagggctacctgccttcacactatgagagggtgcagatgctgctgtcggaccgtttccttggcttcttcatggtccctgcccagtcctcgtggaactacaacttcatgggtgttcggcatgaccccaacatgaaatatgagctacagctggcgaaccccaaagagttctaccacgaggtgcacaggccctctcacttcctcaactttgctctcctgcaggagggggaggtttactctgcggatcgggaggacctgtatgcctgaccgtttccctgcctcctgcttcagcctcccgaggccgaagcctcagcccctccagacaggccgctgacattcagcagtttggcctctttccctctgtctgtgcttgtgttgttgacctcctgatggcttgtcatcctgaataaaatataataataaattttgtataaatagga

SEQ ID NO: 262209 - DNA, 2507 bp, Homo sapiens
ctagctgactgaattggctcgattaatggtcggggaccaccagagggtgaatctacgattgggaatctggttcagtcctgatcgctgagcattgttatggacttatgtcaggtgtttgaccaggaacttgatgcactggaaattgagacagtacaaaaggagacaatccatccccgaaagtcatataagatgaactcttcctgtgcagatatcctgctctttgcctcctataagtggaatgtctcccggccctcattgctggctgactccaaggatgtgatggacagcaccaccacccagaaatactggattgacatccagttgcgctggggggactatgattcccacgacattgagcgctacgcccgggccaagttcctggactacaccaccgacaacatgagtatctacccttcgcccacaggtgtactcatcgccattgacctggcctataacttgcacagtgcctatggaaactggttcccaggcagcaagcctctcatacaacaggccatggccaagatcatgaaggcaaaccctgccctgtatgtgttacgtgaacggatccgcaaggggctacagctctattcatctgaacccactgagccttatttgtcttctcagaactatggtgagctcttctccaaccagattatctggtttgtggatgacaccaacgtctacagagtgactattcacaagacctttgaagggaacttgacaaccaagcccatcaacggagccatcttcatcttcaacccacgcacagggcagctgttcctcaagataatccacacgtccgtgtgggcgggacagaagcgtttggggcagttggctaagtggaagacagctgaggaggtggccgccctgatccgatctctgcctgtggaggagcagcccaagcagatcattgtcaccaggaagggcatgctggacccactggaggtgcacttactggacttccccaatattgtcatcaaaggatcggagctccaactccctttccaggcgtgtctcaaggtggaaaaattcggggatctcatccttaaagccactgagccccagatggttctcttcaacctctatgacgactggctcaagactatttcatcttacacggccttctcccgtctcatcctgattctgcgtgccctacatgtgaacaacgatcgggcaaaagtgatcctgaagccagacaagactactattacagaaccacaccacatctggcccactctgactgacgaagaatggatcaaggtcgaggtgcagctcaaggatctgatcttggctgactacggcaagaaaaacaatgtgaacgtggcatcactgacacaatcagaaattcgagacatcatcctgggtatggagatctcggcaccgtcacagcagcggcagcagatcgctgagatcgagaagcagaccaaggaacaatcgcagctgacggcaacacagactcgcactgtcaacaagcatggcgatgagatcatcacctccaccaccagcaactatgagacccagactttctcatccaagactgagtggagggtcagggccatctctgctgccaacctgcacctaaggaccaatcacatctatgtttcatctgacgacatcaaggagactggctacacctacatccttcccaagaatgtgcttaagaagttcatctgcatatctgaccttcgggcccaaattgcaggatacctatatggggtgagcccaccagataacccccaggtgaaggagatccgctgcattgtgatggtgccgcagtggggcactcaccagaccgtgcacctgcctggccagctgccccagcatgagtacctcaaggagatggaacccttaggttggatccacactcagcccaatgagtccccgcagttatcaccccaggatgtcaccacccatgccaagatcatggctgacaacccatcttgggatggcgagaagaccattatcatcacatgcagcttcacgccaggctcctgtacactgacggcctacaagctgacccccagtggctacgaatggggccgccagaacacagacaagggcaacaaccccaagggctacctgccttcacactatgagagggtgcagatgctgctgtcggaccgtttccttggcttcttcatggtccctgcccagtcctcgtggaactacaacttcatgggtgttcggcatgaccccaacatgaaatatgagctacagctggcgaaccccaaagagttctaccacgaggtgcacaggccctctcacttcctcaactttgctctcctgcaggagggggaggtttactctgcggatcgggaggacctgtatgcctgaccgtttccctgcctcctgcttcagcctcccgaggccgaagcctcagcccctccagacaggccgctgacattcagcagtttggcctctttccctctgtctgtgcttgtgttgttgacctcctgatggcttgtcatcctgaataaaatataataataaattttgtataaatagga

SEQ ID NO: 262210 - DNA, 2133 bp, Homo sapiens
tcgtcatagcctgtttcctagagtaaaacccctatgcactttgtcaacaggtgtactcatcgccattgacctggcctataacttgcacagtgcctatggaaactggttcccaggcagcaagcctctcatacaacaggccatggccaagatcatgaaggcaaaccctgccctgtatgtgttacgtgaacggatccgcaaggggctacagctctattcatctgaacccactgagccttatttgtcttctcagaactatggtgagctcttctccaaccagattatctggtttgtggatgacaccaacgtctacagagtgactattcacaagacctttgaagggaacttgacaaccaagcccatcaacggagccatcttcatcttcaacccacgcacagggcagctgttcctcaagataatccacacgtccgtgtgggcgggacagaagcgtttggggcagttggctaagtggaagacagctgaggaggtggccgccctgatccgatctctgcctgtggaggagcagcccaagcagatcattgtcaccaggaagggcatgctggacccactggaggtgcacttactggacttccccaatattgtcatcaaaggatcggagctccaactccctttccaggcgtgtctcaaggtggaaaaattcggggatctcatccttaaagccactgagccccagatggttctcttcaacctctatgacgactggctcaagactatttcatcttacacggccttctcccgtctcatcctgattctgcgtgccctacatgtgaacaacgatcgggcaaaagtgatcctgaagccagacaagactactattacagaaccacaccacatctggcccactctgactgacgaagaatggatcaaggtcgaggtgcagctcaaggatctgatcttggctgactacggcaagaaaaacaatgtgaacgtggcatcactgacacaatcagaaattcgagacatcatcctgggtatggagatctcggcaccgtcacagcagcggcagcagatcgctgagatcgagaagcagaccaaggaacaatcgcagctgacggcaacacagactcgcactgtcaacaagcatggcgatgagatcatcacctccaccaccagcaactatgagacccagactttctcatccaagactgagtggagggtcagggccatctctgctgccaacctgcacctaaggaccaatcacatctatgtttcatctgacgacatcaaggagactggctacacctacatccttcccaagaatgtgcttaagaagttcatctgcatatctgaccttcgggcccaaattgcaggatacctatatggggtgagcccaccagataacccccaggtgaaggagatccgctgcattgtgatggtgccgcagtggggcactcaccagaccgtgcacctgcctggccagctgccccagcatgagtacctcaaggagatggaacccttaggttggatccacactcagcccaatgagtccccgcagttatcaccccaggatgtcaccacccatgccaagatcatggctgacaacccatcttgggatggcgagaagaccattatcatcacatgcagcttcacgccaggctcctgtacactgacggcctacaagctgacccccagtggctacgaatggggccgccagaacacagacaagggcaacaaccccaagggctacctgccttcacactatgagagggtgcagatgctgctgtcggaccgtttccttggcttcttcatggtccctgcccagtcctcgtggaactacaacttcatgggtgttcggcatgaccccaacatgaaatatgagctacagctggcgaaccccaaagagttctaccacgaggtgcacaggccctctcacttcctcaactttgctctcctgcaggagggggaggtttactctgcggatcgggaggacctgtatgcctgaccgtttccctgcctcctgcttcagcctcccgaggccgaagcctcagcccctccagacaggccgctgacattcagcagtttggcctctttccctctgtctgtgcttgtgttgttgacctcctgatggcttgtcatcctgaataaaatataataataaattttgtataaatagga

SEQ ID NO: 262211 - DNA, 2113 bp, Homo sapiens
tcagctcggtccagtgtactccacaaacaggtgtactcatcgccattgacctggcctataacttgcacagtgcctatggaaactggttcccaggcagcaagcctctcatacaacaggccatggccaagatcatgaaggcaaaccctgccctgtatgtgttacgtgaacggatccgcaaggggctacagctctattcatctgaacccactgagccttatttgtcttctcagaactatggtgagctcttctccaaccagattatctggtttgtggatgacaccaacgtctacagagtgactattcacaagacctttgaagggaacttgacaaccaagcccatcaacggagccatcttcatcttcaacccacgcacagggcagctgttcctcaagataatccacacgtccgtgtgggcgggacagaagcgtttggggcagttggctaagtggaagacagctgaggaggtggccgccctgatccgatctctgcctgtggaggagcagcccaagcagatcattgtcaccaggaagggcatgctggacccactggaggtgcacttactggacttccccaatattgtcatcaaaggatcggagctccaactccctttccaggcgtgtctcaaggtggaaaaattcggggatctcatccttaaagccactgagccccagatggttctcttcaacctctatgacgactggctcaagactatttcatcttacacggccttctcccgtctcatcctgattctgcgtgccctacatgtgaacaacgatcgggcaaaagtgatcctgaagccagacaagactactattacagaaccacaccacatctggcccactctgactgacgaagaatggatcaaggtcgaggtgcagctcaaggatctgatcttggctgactacggcaagaaaaacaatgtgaacgtggcatcactgacacaatcagaaattcgagacatcatcctgggtatggagatctcggcaccgtcacagcagcggcagcagatcgctgagatcgagaagcagaccaaggaacaatcgcagctgacggcaacacagactcgcactgtcaacaagcatggcgatgagatcatcacctccaccaccagcaactatgagacccagactttctcatccaagactgagtggagggtcagggccatctctgctgccaacctgcacctaaggaccaatcacatctatgtttcatctgacgacatcaaggagactggctacacctacatccttcccaagaatgtgcttaagaagttcatctgcatatctgaccttcgggcccaaattgcaggatacctatatggggtgagcccaccagataacccccaggtgaaggagatccgctgcattgtgatggtgccgcagtggggcactcaccagaccgtgcacctgcctggccagctgccccagcatgagtacctcaaggagatggaacccttaggttggatccacactcagcccaatgagtccccgcagttatcaccccaggatgtcaccacccatgccaagatcatggctgacaacccatcttgggatggcgagaagaccattatcatcacatgcagcttcacgccaggctcctgtacactgacggcctacaagctgacccccagtggctacgaatggggccgccagaacacagacaagggcaacaaccccaagggctacctgccttcacactatgagagggtgcagatgctgctgtcggaccgtttccttggcttcttcatggtccctgcccagtcctcgtggaactacaacttcatgggtgttcggcatgaccccaacatgaaatatgagctacagctggcgaaccccaaagagttctaccacgaggtgcacaggccctctcacttcctcaactttgctctcctgcaggagggggaggtttactctgcggatcgggaggacctgtatgcctgaccgtttccctgcctcctgcttcagcctcccgaggccgaagcctcagcccctccagacaggccgctgacattcagcagtttggcctctttccctctgtctgtgcttgtgttgttgacctcctgatggcttgtcatcctgaataaaatataataataaattttgtataaatagga

SEQ ID NO: 262212 - DNA, 2003 bp, Homo sapiens
tctatagctgctctagagatccccggcaagcctcctgccctgtatgtgttacgtgaacggatccgcaaggggctacagctctattcatctgaacccactgagccttatttgtcttctcagaactatggtgagctcttctccaaccagattatctggtttgtggatgacaccaacgtctacagagtgactattcacaagacctttgaagggaacttgacaaccaagcccatcaacggagccatcttcatcttcaacccacgcacagggcagctgttcctcaagataatccacacgtccgtgtgggcgggacagaagcgtttggggcagttggctaagtggaagacagctgaggaggtggccgccctgatccgatctctgcctgtggaggagcagcccaagcagatcattgtcaccaggaagggcatgctggacccactggaggtgcacttactggacttccccaatattgtcatcaaaggatcggagctccaactccctttccaggcgtgtctcaaggtggaaaaattcggggatctcatccttaaagccactgagccccagatggttctcttcaacctctatgacgactggctcaagactatttcatcttacacggccttctcccgtctcatcctgattctgcgtgccctacatgtgaacaacgatcgggcaaaagtgatcctgaagccagacaagactactattacagaaccacaccacatctggcccactctgactgacgaagaatggatcaaggtcgaggtgcagctcaaggatctgatcttggctgactacggcaagaaaaacaatgtgaacgtggcatcactgacacaatcagaaattcgagacatcatcctgggtatggagatctcggcaccgtcacagcagcggcagcagatcgctgagatcgagaagcagaccaaggaacaatcgcagctgacggcaacacagactcgcactgtcaacaagcatggcgatgagatcatcacctccaccaccagcaactatgagacccagactttctcatccaagactgagtggagggtcagggccatctctgctgccaacctgcacctaaggaccaatcacatctatgtttcatctgacgacatcaaggagactggctacacctacatccttcccaagaatgtgcttaagaagttcatctgcatatctgaccttcgggcccaaattgcaggatacctatatggggtgagcccaccagataacccccaggtgaaggagatccgctgcattgtgatggtgccgcagtggggcactcaccagaccgtgcacctgcctggccagctgccccagcatgagtacctcaaggagatggaacccttaggttggatccacactcagcccaatgagtccccgcagttatcaccccaggatgtcaccacccatgccaagatcatggctgacaacccatcttgggatggcgagaagaccattatcatcacatgcagcttcacgccaggctcctgtacactgacggcctacaagctgacccccagtggctacgaatggggccgccagaacacagacaagggcaacaaccccaagggctacctgccttcacactatgagagggtgcagatgctgctgtcggaccgtttccttggcttcttcatggtccctgcccagtcctcgtggaactacaacttcatgggtgttcggcatgaccccaacatgaaatatgagctacagctggcgaaccccaaagagttctaccacgaggtgcacaggccctctcacttcctcaactttgctctcctgcaggagggggaggtttactctgcggatcgggaggacctgtatgcctgaccgtttccctgcctcctgcttcagcctcccgaggccgaagcctcagcccctccagacaggccgctgacattcagcagtttggcctctttccctctgtctgtgcttgtgttgttgacctcctgatggcttgtcatcctgaataaaatataataataaattttgtataaatagga

SEQ ID NO: 262213 - DNA, 2168 bp, Homo sapiens
  misc_feature (22)..(22): n is a, c, g, or t
gtccacacgtccgtgtggcggnacagaagcgtttggggcagttggctaagtggaagacagctgaggaggtggccgccctgatccgatctctgcctgtggaggagcagcccaagcagatcattgtcaccaggaagggcatgctggacccactggaggtgcacttactggacttccccaatattgtcatcaaaggatcggagctccaactccctttccaggcgtgtctcaaggtggaaaaattcggggatttcatctgaacccactgagccttatttgtcttctcagaactatggtgagctcttctccaaccagattatctggtttgtggatgacaccaacgtctacagagtgactattcacaagacctttgaagggaacttgacaaccaagcccatcaacggagccatcttcatcttcaacccacgcacagggcagctgttcctcaagataatccacacgtccgtgtgggcgggacagaagcgtttggggcagttggctaagtggaagacagctgaggaggtggccgccctgatccgatctctgcctgtggaggagcagcccaagcagatcattgtcaccaggaagggcatgctggacccactggaggtgcacttactggacttccccaatattgtcatcaaaggatcggagctccaactccctttccaggcgtgtctcaaggtggaaaaattcggggatctcatccttaaagccactgagccccagatggttctcttcaacctctatgacgactggctcaagactatttcatcttacacggccttctcccgtctcatcctgattctgcgtgccctacatgtgaacaacgatcgggcaaaagtgatcctgaagccagacaagactactattacagaaccacaccacatctggcccactctgactgacgaagaatggatcaaggtcgaggtgcagctcaaggatctgatcttggctgactacggcaagaaaaacaatgtgaacgtggcatcactgacacaatcagaaattcgagacatcatcctgggtatggagatctcggcaccgtcacagcagcggcagcagatcgctgagatcgagaagcagaccaaggaacaatcgcagctgacggcaacacagactcgcactgtcaacaagcatggcgatgagatcatcacctccaccaccagcaactatgagacccagactttctcatccaagactgagtggagggtcagggccatctctgctgccaacctgcacctaaggaccaatcacatctatgtttcatctgacgacatcaaggagactggctacacctacatccttcccaagaatgtgcttaagaagttcatctgcatatctgaccttcgggcccaaattgcaggatacctatatggggtgagcccaccagataacccccaggtgaaggagatccgctgcattgtgatggtgccgcagtggggcactcaccagaccgtgcacctgcctggccagctgccccagcatgagtacctcaaggagatggaacccttaggttggatccacactcagcccaatgagtccccgcagttatcaccccaggatgtcaccacccatgccaagatcatggctgacaacccatcttgggatggcgagaagaccattatcatcacatgcagcttcacgccaggctcctgtacactgacggcctacaagctgacccccagtggctacgaatggggccgccagaacacagacaagggcaacaaccccaagggctacctgccttcacactatgagagggtgcagatgctgctgtcggaccgtttccttggcttcttcatggtccctgcccagtcctcgtggaactacaacttcatgggtgttcggcatgaccccaacatgaaatatgagctacagctggcgaaccccaaagagttctaccacgaggtgcacaggccctctcacttcctcaactttgctctcctgcaggagggggaggtttactctgcggatcgggaggacctgtatgcctgaccgtttccctgcctcctgcttcagcctcccgaggccgaagcctcagcccctccagacaggccgctgacattcagcagtttggcctctttccctctgtctgtgcttgtgttgttgacctcctgatggcttgtcatcctgaataaaatataataataaattttgtataaatagga

SEQ ID NO: 262214 - DNA, 1902 bp, Homo sapiens
acggctaggtagaggcgggtggtaatcggccgaggtctccaaccagattatctggtttgtggatgacaccaacgtctacagagtgactattcacaagacctttgaagggaacttgacaaccaagcccatcaacggagccatcttcatcttcaacccacgcacagggcagctgttcctcaagataatccacacgtccgtgtgggcgggacagaagcgtttggggcagttggctaagtggaagacagctgaggaggtggccgccctgatccgatctctgcctgtggaggagcagcccaagcagatcattgtcaccaggaagggcatgctggacccactggaggtgcacttactggacttccccaatattgtcatcaaaggatcggagctccaactccctttccaggcgtgtctcaaggtggaaaaattcggggatctcatccttaaagccactgagccccagatggttctcttcaacctctatgacgactggctcaagactatttcatcttacacggccttctcccgtctcatcctgattctgcgtgccctacatgtgaacaacgatcgggcaaaagtgatcctgaagccagacaagactactattacagaaccacaccacatctggcccactctgactgacgaagaatggatcaaggtcgaggtgcagctcaaggatctgatcttggctgactacggcaagaaaaacaatgtgaacgtggcatcactgacacaatcagaaattcgagacatcatcctgggtatggagatctcggcaccgtcacagcagcggcagcagatcgctgagatcgagaagcagaccaaggaacaatcgcagctgacggcaacacagactcgcactgtcaacaagcatggcgatgagatcatcacctccaccaccagcaactatgagacccagactttctcatccaagactgagtggagggtcagggccatctctgctgccaacctgcacctaaggaccaatcacatctatgtttcatctgacgacatcaaggagactggctacacctacatccttcccaagaatgtgcttaagaagttcatctgcatatctgaccttcgggcccaaattgcaggatacctatatggggtgagcccaccagataacccccaggtgaaggagatccgctgcattgtgatggtgccgcagtggggcactcaccagaccgtgcacctgcctggccagctgccccagcatgagtacctcaaggagatggaacccttaggttggatccacactcagcccaatgagtccccgcagttatcaccccaggatgtcaccacccatgccaagatcatggctgacaacccatcttgggatggcgagaagaccattatcatcacatgcagcttcacgccaggctcctgtacactgacggcctacaagctgacccccagtggctacgaatggggccgccagaacacagacaagggcaacaaccccaagggctacctgccttcacactatgagagggtgcagatgctgctgtcggaccgtttccttggcttcttcatggtccctgcccagtcctcgtggaactacaacttcatgggtgttcggcatgaccccaacatgaaatatgagctacagctggcgaaccccaaagagttctaccacgaggtgcacaggccctctcacttcctcaactttgctctcctgcaggagggggaggtttactctgcggatcgggaggacctgtatgcctgaccgtttccctgcctcctgcttcagcctcccgaggccgaagcctcagcccctccagacaggccgctgacattcagcagtttggcctctttccctctgtctgtgcttgtgttgttgacctcctgatggcttgtcatcctgaataaaatataataataaattttgtataaatagga

SEQ ID NO: 262215 - DNA, 7579 bp, Homo sapiens
atcgtacaatgcgcaatcttggcaaatttattcaaaccctttagacttcggtctctcacagtgcgacgccgggagcccatcacacgctgaggtctgtcagaggccccagaaacagcctcggaaatggaggaggcggggctcaccccgaccacacccccttgcgttcaaagcctttccgcctatgggcccgcctcctcggcgcagtgtgcaactctaattggtcgtctcactaatccatctgagcacctcggcgccgactggatcaactgctgaactcgggttgcgcacttcccggcgctgggaacgcggagcggacgcagtctggccgccattgcgctgcggggaaagcggcctcttgtgtgagggcctgtggggtgcgtggcaggcgtttaaggccgggctgcgggaggcgtggtcgggtcgggccgagtgaccgaaggggttaggccgggcggggctggatgcactgtgtggcgggactgcaggccggggtccccggacgcctttctgctgcgcttcttgtgggcccgggcctgtggttagtgaatttttctatcccgccgctccccagattctccggatatggccggagtgtttccttatcgagggccgggtaacccggtgcctggccctctagccccgctaccggactacatgtcggaggagaagctgcaggagaaagctcgaaaatggcagcaattgcaggccaagcgctatgcagaaaagcggaagtttgggtttgtggatgcccagaaggaagacatgcccccagaacatgtcaggaagatcattcgagaccatggagacatgaccaacaggaagttccgccatgacaaaagggtttacttgggtgccctaaagtacatgccccacgcagtcctcaaactcctggagaacatgcctatgccttgggagcagattcgggatgtgcctgtgctgtaccacatcactggagccatttccttcgtcaatgagattccctgggtcattgaacctgtctacatctcccagtgggggtcaatgtggattatgatgcgccgagaaaaaagagataggaggcatttcaagaggatgcgttttcccccttttgatgatgaggagccgcccttggactatgctgacaacatcctagatgttgagccactggaggccattcagctagagctggaccctgaggaggacgcccctgtgttggactggttctatgaccaccagccgttgagggacagcaggaagtatgtaaatggctccacttaccagcgctggcagttcacactacctatgatgtcgactctctaccgcctggctaatcagctcctgacagacttggtggatgacaactacttctacctgtttgatttgaaggccttctttacgtccaaggcactcaatatggccattcctggaggccccaaatttgaacctcttgttcgagacatcaacctacaggatgaagactggaatgaattcaatgatattaacaagattatcatccggcagcctatccgcactgagtacaagattgcttttccttacttgtacaacaatcttccacaccatgtccacctcacctggtaccatactcccaatgttgtattcatcaaaactgaggatcctgacttgccagctttctactttgaccctttgatcaacccaatctcccataggcactcagtcaagagccaggaaccattgccggatgatgatgaggaatttgagctcccggagtttgtggagcccttcctgaaggacacacccctctatacagacaatacagccaatggcattgccctgctctgggccccgcggcccttcaacctacgctctggtcgcacccgtcgggccctggacataccccttgtcaagaactggtatcgggagcattgtcctgccgggcagcctgtgaaagtgagggtctcctaccagaagctgcttaagtactatgtgctgaatgccctgaagcatcggccccctaaggctcaaaagaagaggtatttgttccgctccttcaaagccaccaaattctttcagtccacaaagctggactgggtggaggttgggctccaggtttgccgccagggctacaacatgctcaaccttctcattcaccgcaaaaacctcaactacctgcacctggactacaacttcaacctcaagcctgtgaaaacgctcaccaccaaggaaagaaagaaatctcgttttgggaatgctttccacctgtgtcgggaagttctgcgtttgactaagctggtggtggatagtcacgtgcagtatcggctgggcaatgtggatgccttccagctggcagatggattgcagtatatatttgcccatgttgggcagttgacgggcatgtatcgatacaaatacaagctgatgcgacagattcgcatgtgcaaggacctgaagcatctcatctattatcgtttcaacacgggccctgtagggaagggtcctggctgtggcttctgggctgccggttggcgagtctggctctttttcatgcgtggcattacccctttattagagcgatggcttggcaacctcctggcccggcagtttgaaggtgagtggttttctctgtgtccaacttctcctgttattgcttcaaaagtacctgcccctgtttgagtctgttccctgctcttgtatgagcactcttcctactggattgcctttaggtccagttctgaaatgagtctgacctagtattctatttcttgggcttccttctggggccttgagaggcagtcatgcatttgcaggagtggaaattcctcagaagcatagttgtgaatgtttaaggtagctcgtctttttgcatatgctgggcacagggacgctttgttaatacctaattttattaataaccataatgagtgaggagcatgaaggtagagacccttattgaaagcaaggaatcttccttgtaatccccttgggacactctacttccaggtcgacactcaaagggggtggcaaagacagtaacaaagcagcgagtggagtcacattttgaccttgagctgcgggcagctgtgatgcatgatattctggacatgatgcctgaggggatcaagcagaacaaggcccggacaatcctgcagcacctcagtgaagcctggcgctgctggaaagccaacattccctggaaggtccctgggctgccgacgcccatagagaatatgatccttcgatacgtgaaggccaaggctgactggtggaccaacactgcccactacaaccgagaacggatccgccgaggggccactgtggacaagactgtttgtaaaaagaatctgggccgcctcacccggctctatctgaaggcagaacaggagcggcagcacaactacctgaaggacgggccttacatcacagcggaggaagcagtggcagtatataccaccacagtgcattggttggaaagccgcaggttttcacccatcccattccccccactctcctataagcatgacaccaagttgctcatcttggcattggagcggctcaaggaagcttatagtgtgaagtctcggttgaaccagtctcagagggaggagctaggtctgatcgagcaggcctacgataacccccacgaggcgctgtcccgcatcaagcgtcacctcctcacacagagagccttcaaagaggtgggcattgagttcatggatctgtatagccacctcgttccagtatatgatgttgagcccctggagaagataactgatgcttacctggaccagtacctgtggtatgaagccgacaagcgccgcctgttcccaccctggattaagcctgcagacacagaaccacctccgctgcttgtttacaagtggtgtcaaggcatcaataacctgcaggacgtgtgggagacgagtgaaggcgagtgcaatgtcatgctggaatcccgctttgagaagatgtatgagaagatcgacttgactctgctcaacaggctgctgcgcctcatcgtggaccacaacatagccgactacatgacagccaagaacaacgtcgtcatcaactataaggacatgaaccatacgaattcatatgggatcatcagaggcctgcagtttgcctcattcatcgtgcagtattatggcctggtgatggatttgcttgtattgggattgcaccgggccagtgagatggctgggccccctcagatgccaaatgactttctcagtttccaggacatagccactgaggctgcccaccccatccgtctcttctgcagatacattgatcgcatccatatttttttcaggttcacagcagatgaggctcgggacctgattcaacgttacctgacagagcaccctgaccccaataatgaaaacatcgttggctataataacaagaagtgctggccccgagatgcccgcatgcgcctcatgaaacatgatgttaacttaggccgggcggtattctgggacatcaagaaccgcttgccacggtcagtgactacagttcagtgggagaacagcttcgtgtctgtgtacagtaaggacaaccccaacctgctgttcaacatgtgtggcttcgagtgccgcatcctgcctaagtgccgcaccagctatgaggagttcacccacaaggacggggtctggaacctgcagaatgaggttactaaggagcgcacagctcagtgtttcctgcgtgtggacgatgagtcaatgcagcgcttccacaaccgcgtgcgtcagattctcatggcctctgggtccaccaccttcaccaagattgtgaataagtggaatacagctctcattggccttatgacatactttcgggaggctgtggtgaacacccaagagctcttggacttactggtgaagtgtgagaacaaaatccagacacgtatcaagattggactcaactccaagatgccaagtcggttccccccggttgtgttctacacccctaaggagttgggtggactcggcatgctctcaatgggccatgtgctcatcccccaatccgacctcaggtggtccaaacagacagatgtaggtatcacacactttcgttcaggaatgagccatgaagaagaccagctcattcccaacttgtaccgctacatacagccatgggagagcgagttcattgattctcagcgggtctgggctgagtacgcactcaagaggcaagaggccattgctcagaacagacgcctgactttagaagacctagaagattcatgggatcgtggcattcctcgaatcaataccctcttccagaaggaccggcacacactggcttatgataagggctggcgtgtcagaactgactttaagcagtatcaggttttgaagcagaatccgttctggtggacacaccagcggcatgatgggaagctctggaacctgaacaactaccgtacagacatgatccaggccctgggcggtgtggaaggcattctggaacacacactctttaagggcacttacttccctacctgggaggggcttttctgggagaaggccagtggctttgaggaatctatgaagtggaagaagctaactaatgctcagcgatcaggactgaaccagattcccaatcgtagattcaccctctggtggtccccgaccattaatcgagccaatgtatatgtaggctttcaggtgcagctagacctgacgggtatcttcatgcacggcaagatccccacgctgaagatctctctcatccagatcttccgagctcacttgtggcagaagatccatgagagcattgttatggacttatgtcaggtgtttgaccaggaacttgatgcactggaaattgagacagtacaaaaggagacaatccatccccgaaagtcatataagatgaactcttcctgtgcagatatcctgctctttgcctcctataagtggaatgtctcccggccctcattgctggctgactccaaggatgtgatggacagcaccaccacccagaaatactggattgacatccagttgcgctggggggactatgattcccacgacattgagcgctacgcccgggccaagttcctggactacaccaccgacaacatgagtatctacccttcgcccacaggtgtactcatcgccattgacctggcctataacttgcacagtgcctatggaaactggttcccaggcagcaagcctctcatacaacaggccatggccaagatcatgaaggcaaaccctgccctgtatgtgttacgtgaacggatccgcaaggggctacagctctattcatctgaacccactgagccttatttgtcttctcagaactatggtgagctcttctccaaccagattatctggtttgtggatgacaccaacgtctacagagtgactattcacaagacctttgaagggaacttgacaaccaagcccatcaacggagccatcttcatcttcaacccacgcacagggcagctgttcctcaagataatccacacgtccgtgtgggcgggacagaagcgtttggggcagttggctaagtggaagacagctgaggaggtggccgccctgatccgatctctgcctgtggaggagcagcccaagcagatcattgtcaccaggaagggcatgctggacccactggaggtgcacttactggacttccccaatattgtcatcaaaggatcggagctccaactccctttccaggcgtgtctcaaggtggaaaaattcggggatctcatccttaaagccactgagccccagatggttctcttcaacctctatgacgactggctcaagactatttcatcttacacggccttctcccgtctcatcctgattctgcgtgccctacatgtgaacaacgatcgggcaaaagtgatcctgaagccagacaagactactattacagaaccacaccacatctggcccactctgactgacgaagaatggatcaaggtcgaggtgcagctcaaggatctgatcttggctgactacggcaagaaaaacaatgtgaacgtggcatcactgacacaatcagaaattcgagacatcatcctgggtatggagatctcggcaccgtcacagcagcggcagcagatcgctgagatcgagaagcagaccaaggaacaatcgcagctgacggcaacacagactcgcactgtcaacaagcatggcgatgagatcatcacctccaccaccagcaactatgagacccagactttctcatccaagactgagtggagggtcagggccatctctgctgccaacctgcacctaaggaccaatcacatctatgtttcatctgacgacatcaaggagactggctacacctacatccttcccaagaatgtgcttaagaagttcatctgcatatctgaccttcgggcccaaattgcaggatacctatatggggtgagcccaccagataacccccaggtgaaggagatccgctgcattgtgatggtgccgcagtggggcactcaccagaccgtgcacctgcctggccagctgccccagcatgagtacctcaaggagatggaacccttaggttggatccacactcagcccaaaggtcagatatgcagatgaacttcttaagcacattcttgggacaggcgctgtaggtt

SEQ ID NO: 262216 - DNA, 1794 bp, Homo sapiens
tagcgatccccttctacgagcgcaaggagccatcttcatcttcaacccacgcacagggcagctgttcctcaagataatccacacgtccgtgtgggcgggacagaagcgtttggggcagttggctaagtggaagacagctgaggaggtggccgccctgatccgatctctgcctgtggaggagcagcccaagcagatcattgtcaccaggaagggcatgctggacccactggaggtgcacttactggacttccccaatattgtcatcaaaggatcggagctccaactccctttccaggcgtgtctcaaggtggaaaaattcggggatctcatccttaaagccactgagccccagatggttctcttcaacctctatgacgactggctcaagactatttcatcttacacggccttctcccgtctcatcctgattctgcgtgccctacatgtgaacaacgatcgggcaaaagtgatcctgaagccagacaagactactattacagaaccacaccacatctggcccactctgactgacgaagaatggatcaaggtcgaggtgcagctcaaggatctgatcttggctgactacggcaagaaaaacaatgtgaacgtggcatcactgacacaatcagaaattcgagacatcatcctgggtatggagatctcggcaccgtcacagcagcggcagcagatcgctgagatcgagaagcagaccaaggaacaatcgcagctgacggcaacacagactcgcactgtcaacaagcatggcgatgagatcatcacctccaccaccagcaactatgagacccagactttctcatccaagactgagtggagggtcagggccatctctgctgccaacctgcacctaaggaccaatcacatctatgtttcatctgacgacatcaaggagactggctacacctacatccttcccaagaatgtgcttaagaagttcatctgcatatctgaccttcgggcccaaattgcaggatacctatatggggtgagcccaccagataacccccaggtgaaggagatccgctgcattgtgatggtgccgcagtggggcactcaccagaccgtgcacctgcctggccagctgccccagcatgagtacctcaaggagatggaacccttaggttggatccacactcagcccaatgagtccccgcagttatcaccccaggatgtcaccacccatgccaagatcatggctgacaacccatcttgggatggcgagaagaccattatcatcacatgcagcttcacgccaggctcctgtacactgacggcctacaagctgacccccagtggctacgaatggggccgccagaacacagacaagggcaacaaccccaagggctacctgccttcacactatgagagggtgcagatgctgctgtcggaccgtttccttggcttcttcatggtccctgcccagtcctcgtggaactacaacttcatgggtgttcggcatgaccccaacatgaaatatgagctacagctggcgaaccccaaagagttctaccacgaggtgcacaggccctctcacttcctcaactttgctctcctgcaggagggggaggtttactctgcggatcgggaggacctgtatgcctgaccgtttccctgcctcctgcttcagcctcccgaggccgaagcctcagcccctccagacaggccgctgacattcagcagtttggcctctttccctctgtctgtgcttgtgttgttgacctcctgatggcttgtcatcctgaataaaatataataataaattttgtataaatagga

SEQ ID NO: 262217 - DNA, 1677 bp, Homo sapiens
tgggtcgttctcggtgggtcgttcttcggtggccgccctgatccgatctctgcctgtggaggagcagcccaagcagatcattgtcaccaggaagggcatgctggacccactggaggtgcacttactggacttccccaatattgtcatcaaaggatcggagctccaactccctttccaggcgtgtctcaaggtggaaaaattcggggatctcatccttaaagccactgagccccagatggttctcttcaacctctatgacgactggctcaagactatttcatcttacacggccttctcccgtctcatcctgattctgcgtgccctacatgtgaacaacgatcgggcaaaagtgatcctgaagccagacaagactactattacagaaccacaccacatctggcccactctgactgacgaagaatggatcaaggtcgaggtgcagctcaaggatctgatcttggctgactacggcaagaaaaacaatgtgaacgtggcatcactgacacaatcagaaattcgagacatcatcctgggtatggagatctcggcaccgtcacagcagcggcagcagatcgctgagatcgagaagcagaccaaggaacaatcgcagctgacggcaacacagactcgcactgtcaacaagcatggcgatgagatcatcacctccaccaccagcaactatgagacccagactttctcatccaagactgagtggagggtcagggccatctctgctgccaacctgcacctaaggaccaatcacatctatgtttcatctgacgacatcaaggagactggctacacctacatccttcccaagaatgtgcttaagaagttcatctgcatatctgaccttcgggcccaaattgcaggatacctatatggggtgagcccaccagataacccccaggtgaaggagatccgctgcattgtgatggtgccgcagtggggcactcaccagaccgtgcacctgcctggccagctgccccagcatgagtacctcaaggagatggaacccttaggttggatccacactcagcccaatgagtccccgcagttatcaccccaggatgtcaccacccatgccaagatcatggctgacaacccatcttgggatggcgagaagaccattatcatcacatgcagcttcacgccaggctcctgtacactgacggcctacaagctgacccccagtggctacgaatggggccgccagaacacagacaagggcaacaaccccaagggctacctgccttcacactatgagagggtgcagatgctgctgtcggaccgtttccttggcttcttcatggtccctgcccagtcctcgtggaactacaacttcatgggtgttcggcatgaccccaacatgaaatatgagctacagctggcgaaccccaaagagttctaccacgaggtgcacaggccctctcacttcctcaactttgctctcctgcaggagggggaggtttactctgcggatcgggaggacctgtatgcctgaccgtttccctgcctcctgcttcagcctcccgaggccgaagcctcagcccctccagacaggccgctgacattcagcagtttggcctctttccctctgtctgtgcttgtgttgttgacctcctgatggcttgtcatcctgaataaaatataataataaattttgtataaatagga

SEQ ID NO: 262218 - DNA, 8095 bp, Homo sapiens
atcgtacaatgcgcaatcttggcaaatttattcaaaccctttagacttcggtctctcacagtgcgacgccgggagcccatcacacgctgaggtctgtcagaggccccagaaacagcctcggaaatggaggaggcggggctcaccccgaccacacccccttgcgttcaaagcctttccgcctatgggcccgcctcctcggcgcagtgtgcaactctaattggtcgtctcactaatccatctgagcacctcggcgccgactggatcaactgctgaactcgggttgcgcacttcccggcgctgggaacgcggagcggacgcagtctggccgccattgcgctgcggggaaagcggcctcttgtgtgagggcctgtggggtgcgtggcaggcgtttaaggccgggctgcgggaggcgtggtcgggtcgggccgagtgaccgaaggggttaggccgggcggggctggatgcactgtgtggcgggactgcaggccggggtccccggacgcctttctgctgcgcttcttgtgggcccgggcctgtggttagtgaatttttctatcccgccgctccccagattctccggatatggccggagtgtttccttatcgagggccgggtaacccggtgcctggccctctagccccgctaccggactacatgtcggaggagaagctgcaggagaaagctcgaaaatggcagcaattgcaggccaagcgctatgcagaaaagcggaagtttgggtttgtggatgcccagaaggaagacatgcccccagaacatgtcaggaagatcattcgagaccatggagacatgaccaacaggaagttccgccatgacaaaagggtttacttgggtgccctaaagtacatgccccacgcagtcctcaaactcctggagaacatgcctatgccttgggagcagattcgggatgtgcctgtgctgtaccacatcactggagccatttccttcgtcaatgagattccctgggtcattgaacctgtctacatctcccagtgggggtcaatgtggattatgatgcgccgagaaaaaagagataggaggcatttcaagaggatgcgttttcccccttttgatgatgaggagccgcccttggactatgctgacaacatcctagatgttgagccactggaggccattcagctagagctggaccctgaggaggacgcccctgtgttggactggttctatgaccaccagccgttgagggacagcaggaagtatgtaaatggctccacttaccagcgctggcagttcacactacctatgatgtcgactctctaccgcctggctaatcagctcctgacagacttggtggatgacaactacttctacctgtttgatttgaaggccttctttacgtccaaggcactcaatatggccattcctggaggccccaaatttgaacctcttgttcgagacatcaacctacaggatgaagactggaatgaattcaatgatattaacaagattatcatccggcagcctatccgcactgagtacaagattgcttttccttacttgtacaacaatcttccacaccatgtccacctcacctggtaccatactcccaatgttgtattcatcaaaactgaggatcctgacttgccagctttctactttgaccctttgatcaacccaatctcccataggcactcagtcaagagccaggaaccattgccggatgatgatgaggaatttgagctcccggagtttgtggagcccttcctgaaggacacacccctctatacagacaatacagccaatggcattgccctgctctgggccccgcggcccttcaacctacgctctggtcgcacccgtcgggccctggacataccccttgtcaagaactggtatcgggagcattgtcctgccgggcagcctgtgaaagtgagggtctcctaccagaagctgcttaagtactatgtgctgaatgccctgaagcatcggccccctaaggctcaaaagaagaggtatttgttccgctccttcaaagccaccaaattctttcagtccacaaagctggactgggtggaggttgggctccaggtttgccgccagggctacaacatgctcaaccttctcattcaccgcaaaaacctcaactacctgcacctggactacaacttcaacctcaagcctgtgaaaacgctcaccaccaaggaaagaaagaaatctcgttttgggaatgctttccacctgtgtcgggaagttctgcgtttgactaagctggtggtggatagtcacgtgcagtatcggctgggcaatgtggatgccttccagctggcagatggattgcagtatatatttgcccatgttgggcagttgacgggcatgtatcgatacaaatacaagctgatgcgacagattcgcatgtgcaaggacctgaagcatctcatctattatcgtttcaacacgggccctgtagggaagggtcctggctgtggcttctgggctgccggttggcgagtctggctctttttcatgcgtggcattacccctttattagagcgatggcttggcaacctcctggcccggcagtttgaaggtgagtggttttctctgtgtccaacttctcctgttattgcttcaaaagtacctgcccctgtttgagtctgttccctgctcttgtatgagcactcttcctactggattgcctttaggtccagttctgaaatgagtctgacctagtattctatttcttgggcttccttctggggccttgagaggcagtcatgcatttgcaggagtggaaattcctcagaagcatagttgtgaatgtttaaggtagctcgtctttttgcatatgctgggcacagggacgctttgttaatacctaattttattaataaccataatgagtgaggagcatgaaggtagagacccttattgaaagcaaggaatcttccttgtaatccccttgggacactctacttccaggtcgacactcaaagggggtggcaaagacagtaacaaagcagcgagtggagtcacattttgaccttgagctgcgggcagctgtgatgcatgatattctggacatgatgcctgaggggatcaagcagaacaaggcccggacaatcctgcagcacctcagtgaagcctggcgctgctggaaagccaacattccctggaaggtccctgggctgccgacgcccatagagaatatgatccttcgatacgtgaaggccaaggctgactggtggaccaacactgcccactacaaccgagaacggatccgccgaggggccactgtggacaagactgtttgtaaaaagaatctgggccgcctcacccggctctatctgaaggcagaacaggagcggcagcacaactacctgaaggacgggccttacatcacagcggaggaagcagtggcagtatataccaccacagtgcattggttggaaagccgcaggttttcacccatcccattccccccactctcctataagcatgacaccaagttgctcatcttggcattggagcggctcaaggaagcttatagtgtgaagtctcggttgaaccagtctcagagggaggagctaggtctgatcgagcaggcctacgataacccccacgaggcgctgtcccgcatcaagcgtcacctcctcacacagagagccttcaaagaggtgggcattgagttcatggatctgtatagccacctcgttccagtatatgatgttgagcccctggagaagataactgatgcttacctggaccagtacctgtggtatgaagccgacaagcgccgcctgttcccaccctggattaagcctgcagacacagaaccacctccgctgcttgtttacaagtggtgtcaaggcatcaataacctgcaggacgtgtgggagacgagtgaaggcgagtgcaatgtcatgctggaatcccgctttgagaagatgtatgagaagatcgacttgactctgctcaacaggctgctgcgcctcatcgtggaccacaacatagccgactacatgacagccaagaacaacgtcgtcatcaactataaggacatgaaccatacgaattcatatgggatcatcagaggcctgcagtttgcctcattcatcgtgcagtattatggcctggtgatggatttgcttgtattgggattgcaccgggccagtgagatggctgggccccctcagatgccaaatgactttctcagtttccaggacatagccactgaggctgcccaccccatccgtctcttctgcagatacattgatcgcatccatatttttttcaggttcacagcagatgaggctcgggacctgattcaacgttacctgacagagcaccctgaccccaataatgaaaacatcgttggctataataacaagaagtgctggccccgagatgcccgcatgcgcctcatgaaacatgatgttaacttaggccgggcggtattctgggacatcaagaaccgcttgccacggtcagtgactacagttcagtgggagaacagcttcgtgtctgtgtacagtaaggacaaccccaacctgctgttcaacatgtgtggcttcgagtgccgcatcctgcctaagtgccgcaccagctatgaggagttcacccacaaggacggggtctggaacctgcagaatgaggttactaaggagcgcacagctcagtgtttcctgcgtgtggacgatgagtcaatgcagcgcttccacaaccgcgtgcgtcagattctcatggcctctgggtccaccaccttcaccaagattgtgaataagtggaatacagctctcattggccttatgacatactttcgggaggctgtggtgaacacccaagagctcttggacttactggtgaagtgtgagaacaaaatccagacacgtatcaagattggactcaactccaagatgccaagtcggttccccccggttgtgttctacacccctaaggagttgggtggactcggcatgctctcaatgggccatgtgctcatcccccaatccgacctcaggtggtccaaacagacagatgtaggtatcacacactttcgttcaggaatgagccatgaagaagaccagctcattcccaacttgtaccgctacatacagccatgggagagcgagttcattgattctcagcgggtctgggctgagtacgcactcaagaggcaagaggccattgctcagaacagacgcctgactttagaagacctagaagattcatgggatcgtggcattcctcgaatcaataccctcttccagaaggaccggcacacactggcttatgataagggctggcgtgtcagaactgactttaagcagtatcaggttttgaagcagaatccgttctggtggacacaccagcggcatgatgggaagctctggaacctgaacaactaccgtacagacatgatccaggccctgggcggtgtggaaggcattctggaacacacactctttaagggcacttacttccctacctgggaggggcttttctgggagaaggccagtggctttgaggaatctatgaagtggaagaagctaactaatgctcagcgatcaggactgaaccagattcccaatcgtagattcaccctctggtggtccccgaccattaatcgagccaatgtatatgtaggctttcaggtgcagctagacctgacgggtatcttcatgcacggcaagatccccacgctgaagatctctctcatccagatcttccgagctcacttgtggcagaagatccatgagagcattgttatggacttatgtcaggtgtttgaccaggaacttgatgcactggaaattgagacagtacaaaaggagacaatccatccccgaaagtcatataagatgaactcttcctgtgcagatatcctgctctttgcctcctataagtggaatgtctcccggccctcattgctggctgactccaaggatgtgatggacagcaccaccacccagaaatactggattgacatccagttgcgctggggggactatgattcccacgacattgagcgctacgcccgggccaagttcctggactacaccaccgacaacatgagtatctacccttcgcccacaggtgtactcatcgccattgacctggcctataacttgcacagtgcctatggaaactggttcccaggcagcaagcctctcatacaacaggccatggccaagatcatgaaggcaaaccctgccctgtatgtgttacgtgaacggatccgcaaggggctacagctctattcatctgaacccactgagccttatttgtcttctcagaactatggtgagctcttctccaaccagattatctggtttgtggatgacaccaacgtctacagagtgactattcacaagacctttgaagggaacttgacaaccaagcccatcaacggagccatcttcatcttcaacccacgcacagggcagctgttcctcaagataatccacacgtccgtgtgggcgggacagaagcgtttggggcagttggctaagtggaagacagctgaggaggtggccgccctgatccgatctctgcctgtggaggagcagcccaagcagatcattgtcaccaggaagggcatgctggacccactggaggtgcacttactggacttccccaatattgtcatcaaaggatcggagctccaactccctttccaggcgtgtctcaaggtggaaaaattcggggatctcatccttaaagccactgagccccagatggttctcttcaacctctatgacgactggctcaagactatttcatcttacacggccttctcccgtctcatcctgattctgcgtgccctacatgtgaacaacgatcgggcaaaagtgatcctgaagccagacaagactactattacagaaccacaccacatctggcccactctgactgacgaagaatggatcaaggtcgaggtgcagctcaaggatctgatcttggctgactacggcaagaaaaacaatgtgaacgtggcatcactgacacaatcagaaattcgagacatcatcctgggtatggagatctcggcaccgtcacagcagcggcagcagatcgctgagatcgagaagcagaccaaggaacaatcgcagctgacggcaacacagactcgcactgtcaacaagcatggcgatgagatcatcacctccaccaccagcaactatgagacccagactttctcatccaagactgagtggagggtcagggccatctctgctgccaacctgcacctaaggaccaatcacatctatgtttcatctgacgacatcaaggagactggctacacctacatccttcccaagaatgtgcttaagaagttcatctgcatatctgaccttcgggcccaagtgagtaagtggactcagctaggccacagtgtgtgcccaactcattttgtgcctaaaactcagacctgagattgtctggaacttgagatgctggtttcaagattcatggatgagtaattatacaaggatagccaaaacaacgaggtgggttttggccccatgagatagcaaaagctgtggcagctgagagaaggtagtaattgtagtattggcctgatagtatttggaagagaacagatatggtcagaaacaaattcctgaccaggtgtgcgtgctggctcatgcctgtaatcccaacactcggctgggcacagtggctaatgcctataatcccagcactttgggaggcctaggtgggtggatcacctgaggtcaggggtttgagaccagcctgaccaatatggtgaaaccctgtctctactaaaaatacaaaaaattagccaggcatggtggcatgcgcccgtagttgcagctactagggaggttgagacaggagaattgcttgaacccgggaggtgaggtggagcttgcagtgagccaagattgcatcactgcactccagcctgggcaacagagcaagaccccgtctaaaaaaacaaaaccaaaaaaaacgtggctgtagtcccagctactcaggaggatgaggttgcttgaacgcaagcagtgagctttgatgaccccactgcactccaggctgggcacagtggctcatgactgtaatcccagcactgtgggaggccgaggtgggcaga

SEQ ID NO: 262219 - DNA, 7496 bp, Homo sapiens
atcgtacaatgcgcaatcttggcaaatttattcaaaccctttagacttcggtctctcacagtgcgacgccgggagcccatcacacgctgaggtctgtcagaggccccagaaacagcctcggaaatggaggaggcggggctcaccccgaccacacccccttgcgttcaaagcctttccgcctatgggcccgcctcctcggcgcagtgtgcaactctaattggtcgtctcactaatccatctgagcacctcggcgccgactggatcaactgctgaactcgggttgcgcacttcccggcgctgggaacgcggagcggacgcagtctggccgccattgcgctgcggggaaagcggcctcttgtgtgagggcctgtggggtgcgtggcaggcgtttaaggccgggctgcgggaggcgtggtcgggtcgggccgagtgaccgaaggggttaggccgggcggggctggatgcactgtgtggcgggactgcaggccggggtccccggacgcctttctgctgcgcttcttgtgggcccgggcctgtggttagtgaatttttctatcccgccgctccccagattctccggatatggccggagtgtttccttatcgagggccgggtaacccggtgcctggccctctagccccgctaccggactacatgtcggaggagaagctgcaggagaaagctcgaaaatggcagcaattgcaggccaagcgctatgcagaaaagcggaagtttgggtttgtggatgcccagaaggaagacatgcccccagaacatgtcaggaagatcattcgagaccatggagacatgaccaacaggaagttccgccatgacaaaagggtttacttgggtgccctaaagtacatgccccacgcagtcctcaaactcctggagaacatgcctatgccttgggagcagattcgggatgtgcctgtgctgtaccacatcactggagccatttccttcgtcaatgagattccctgggtcattgaacctgtctacatctcccagtgggggtcaatgtggattatgatgcgccgagaaaaaagagataggaggcatttcaagaggatgcgttttcccccttttgatgatgaggagccgcccttggactatgctgacaacatcctagatgttgagccactggaggccattcagctagagctggaccctgaggaggacgcccctgtgttggactggttctatgaccaccagccgttgagggacagcaggaagtatgtaaatggctccacttaccagcgctggcagttcacactacctatgatgtcgactctctaccgcctggctaatcagctcctgacagacttggtggatgacaactacttctacctgtttgatttgaaggccttctttacgtccaaggcactcaatatggccattcctggaggccccaaatttgaacctcttgttcgagacatcaacctacaggatgaagactggaatgaattcaatgatattaacaagattatcatccggcagcctatccgcactgagtacaagattgcttttccttacttgtacaacaatcttccacaccatgtccacctcacctggtaccatactcccaatgttgtattcatcaaaactgaggatcctgacttgccagctttctactttgaccctttgatcaacccaatctcccataggcactcagtcaagagccaggaaccattgccggatgatgatgaggaatttgagctcccggagtttgtggagcccttcctgaaggacacacccctctatacagacaatacagccaatggcattgccctgctctgggccccgcggcccttcaacctacgctctggtcgcacccgtcgggccctggacataccccttgtcaagaactggtatcgggagcattgtcctgccgggcagcctgtgaaagtgagggtctcctaccagaagctgcttaagtactatgtgctgaatgccctgaagcatcggccccctaaggctcaaaagaagaggtatttgttccgctccttcaaagccaccaaattctttcagtccacaaagctggactgggtggaggttgggctccaggtttgccgccagggctacaacatgctcaaccttctcattcaccgcaaaaacctcaactacctgcacctggactacaacttcaacctcaagcctgtgaaaacgctcaccaccaaggaaagaaagaaatctcgttttgggaatgctttccacctgtgtcgggaagttctgcgtttgactaagctggtggtggatagtcacgtgcagtatcggctgggcaatgtggatgccttccagctggcagatggattgcagtatatatttgcccatgttgggcagttgacgggcatgtatcgatacaaatacaagctgatgcgacagattcgcatgtgcaaggacctgaagcatctcatctattatcgtttcaacacgggccctgtagggaagggtcctggctgtggcttctgggctgccggttggcgagtctggctctttttcatgcgtggcattacccctttattagagcgatggcttggcaacctcctggcccggcagtttgaaggtgagtggttttctctgtgtccaacttctcctgttattgcttcaaaagtacctgcccctgtttgagtctgttccctgctcttgtatgagcactcttcctactggattgcctttaggtccagttctgaaatgagtctgacctagtattctatttcttgggcttccttctggggccttgagaggcagtcatgcatttgcaggagtggaaattcctcagaagcatagttgtgaatgtttaaggtagctcgtctttttgcatatgctgggcacagggacgctttgttaatacctaattttattaataaccataatgagtgaggagcatgaaggtagagacccttattgaaagcaaggaatcttccttgtaatccccttgggacactctacttccaggtcgacactcaaagggggtggcaaagacagtaacaaagcagcgagtggagtcacattttgaccttgagctgcgggcagctgtgatgcatgatattctggacatgatgcctgaggggatcaagcagaacaaggcccggacaatcctgcagcacctcagtgaagcctggcgctgctggaaagccaacattccctggaaggtccctgggctgccgacgcccatagagaatatgatccttcgatacgtgaaggccaaggctgactggtggaccaacactgcccactacaaccgagaacggatccgccgaggggccactgtggacaagactgtttgtaaaaagaatctgggccgcctcacccggctctatctgaaggcagaacaggagcggcagcacaactacctgaaggacgggccttacatcacagcggaggaagcagtggcagtatataccaccacagtgcattggttggaaagccgcaggttttcacccatcccattccccccactctcctataagcatgacaccaagttgctcatcttggcattggagcggctcaaggaagcttatagtgtgaagtctcggttgaaccagtctcagagggaggagctaggtctgatcgagcaggcctacgataacccccacgaggcgctgtcccgcatcaagcgtcacctcctcacacagagagccttcaaagaggtgggcattgagttcatggatctgtatagccacctcgttccagtatatgatgttgagcccctggagaagataactgatgcttacctggaccagtacctgtggtatgaagccgacaagcgccgcctgttcccaccctggattaagcctgcagacacagaaccacctccgctgcttgtttacaagtggtgtcaaggcatcaataacctgcaggacgtgtgggagacgagtgaaggcgagtgcaatgtcatgctggaatcccgctttgagaagatgtatgagaagatcgacttgactctgctcaacaggctgctgcgcctcatcgtggaccacaacatagccgactacatgacagccaagaacaacgtcgtcatcaactataaggacatgaaccatacgaattcatatgggatcatcagaggcctgcagtttgcctcattcatcgtgcagtattatggcctggtgatggatttgcttgtattgggattgcaccgggccagtgagatggctgggccccctcagatgccaaatgactttctcagtttccaggacatagccactgaggctgcccaccccatccgtctcttctgcagatacattgatcgcatccatatttttttcaggttcacagcagatgaggctcgggacctgattcaacgttacctgacagagcaccctgaccccaataatgaaaacatcgttggctataataacaagaagtgctggccccgagatgcccgcatgcgcctcatgaaacatgatgttaacttaggccgggcggtattctgggacatcaagaaccgcttgccacggtcagtgactacagttcagtgggagaacagcttcgtgtctgtgtacagtaaggacaaccccaacctgctgttcaacatgtgtggcttcgagtgccgcatcctgcctaagtgccgcaccagctatgaggagttcacccacaaggacggggtctggaacctgcagaatgaggttactaaggagcgcacagctcagtgtttcctgcgtgtggacgatgagtcaatgcagcgcttccacaaccgcgtgcgtcagattctcatggcctctgggtccaccaccttcaccaagattgtgaataagtggaatacagctctcattggccttatgacatactttcgggaggctgtggtgaacacccaagagctcttggacttactggtgaagtgtgagaacaaaatccagacacgtatcaagattggactcaactccaagatgccaagtcggttccccccggttgtgttctacacccctaaggagttgggtggactcggcatgctctcaatgggccatgtgctcatcccccaatccgacctcaggtggtccaaacagacagatgtaggtatcacacactttcgttcaggaatgagccatgaagaagaccagctcattcccaacttgtaccgctacatacagccatgggagagcgagttcattgattctcagcgggtctgggctgagtacgcactcaagaggcaagaggccattgctcagaacagacgcctgactttagaagacctagaagattcatgggatcgtggcattcctcgaatcaataccctcttccagaaggaccggcacacactggcttatgataagggctggcgtgtcagaactgactttaagcagtatcaggttttgaagcagaatccgttctggtggacacaccagcggcatgatgggaagctctggaacctgaacaactaccgtacagacatgatccaggccctgggcggtgtggaaggcattctggaacacacactctttaagggcacttacttccctacctgggaggggcttttctgggagaaggccagtggctttgaggaatctatgaagtggaagaagctaactaatgctcagcgatcaggactgaaccagattcccaatcgtagattcaccctctggtggtccccgaccattaatcgagccaatgtatatgtaggctttcaggtgcagctagacctgacgggtatcttcatgcacggcaagatccccacgctgaagatctctctcatccagatcttccgagctcacttgtggcagaagatccatgagagcattgttatggacttatgtcaggtgtttgaccaggaacttgatgcactggaaattgagacagtacaaaaggagacaatccatccccgaaagtcatataagatgaactcttcctgtgcagatatcctgctctttgcctcctataagtggaatgtctcccggccctcattgctggctgactccaaggatgtgatggacagcaccaccacccagaaatactggattgacatccagttgcgctggggggactatgattcccacgacattgagcgctacgcccgggccaagttcctggactacaccaccgacaacatgagtatctacccttcgcccacaggtgtactcatcgccattgacctggcctataacttgcacagtgcctatggaaactggttcccaggcagcaagcctctcatacaacaggccatggccaagatcatgaaggcaaaccctgccctgtatgtgttacgtgaacggatccgcaaggggctacagctctattcatctgaacccactgagccttatttgtcttctcagaactatggtgagctcttctccaaccagattatctggtttgtggatgacaccaacgtctacagagtgactattcacaagacctttgaagggaacttgacaaccaagcccatcaacggagccatcttcatcttcaacccacgcacagggcagctgttcctcaagataatccacacgtccgtgtgggcgggacagaagcgtttggggcagttggctaagtggaagacagctgaggaggtggccgccctgatccgatctctgcctgtggaggagcagcccaagcagatcattgtcaccaggaagggcatgctggacccactggaggtgcacttactggacttccccaatattgtcatcaaaggatcggagctccaactccctttccaggcgtgtctcaaggtggaaaaattcggggatctcatccttaaagccactgagccccagatggttctcttcaacctctatgacgactggctcaagactatttcatcttacacggccttctcccgtctcatcctgattctgcgtgccctacatgtgaacaacgatcgggcaaaagtgatcctgaagccagacaagactactattacagaaccacaccacatctggcccactctgactgacgaagaatggatcaaggtcgaggtgcagctcaaggatctgatcttggctgactacggcaagaaaaacaatgtgaacgtggcatcactgacacaatcagaaattcgagacatcatcctgggtatggagatctcggcaccgtcacagcagcggcagcagatcgctgagatcgagaagcagaccaaggaacaatcgcagctgacggcaacacagactcgcactgtcaacaagcatggcgatgagatcatcacctccaccaccagcaactatgagacccagactttctcatccaagactgagtggagggtcagggccatctctgctgccaacctgcacctaaggaccaatcacatctatgtttcatctgacgacatcaaggagactggctacacctacatccttcccaagaatgtgcttaagaagttcatctgcatatctgaccttcgggcccaaattgcaggatacctatatggggtgagcccaccacccagaaatactggattgacatccagttgcgctggggggactatgattctcacgacattgagcgctacgcccgggctcaagttcctggacatacaccaccgacaacgactacgcgggtat

SEQ ID NO: 262220 - DNA, 7426 bp, Homo sapiens
atcgtacaatgcgcaatcttggcaaatttattcaaaccctttagacttcggtctctcacagtgcgacgccgggagcccatcacacgctgaggtctgtcagaggccccagaaacagcctcggaaatggaggaggcggggctcaccccgaccacacccccttgcgttcaaagcctttccgcctatgggcccgcctcctcggcgcagtgtgcaactctaattggtcgtctcactaatccatctgagcacctcggcgccgactggatcaactgctgaactcgggttgcgcacttcccggcgctgggaacgcggagcggacgcagtctggccgccattgcgctgcggggaaagcggcctcttgtgtgagggcctgtggggtgcgtggcaggcgtttaaggccgggctgcgggaggcgtggtcgggtcgggccgagtgaccgaaggggttaggccgggcggggctggatgcactgtgtggcgggactgcaggccggggtccccggacgcctttctgctgcgcttcttgtgggcccgggcctgtggttagtgaatttttctatcccgccgctccccagattctccggatatggccggagtgtttccttatcgagggccgggtaacccggtgcctggccctctagccccgctaccggactacatgtcggaggagaagctgcaggagaaagctcgaaaatggcagcaattgcaggccaagcgctatgcagaaaagcggaagtttgggtttgtggatgcccagaaggaagacatgcccccagaacatgtcaggaagatcattcgagaccatggagacatgaccaacaggaagttccgccatgacaaaagggtttacttgggtgccctaaagtacatgccccacgcagtcctcaaactcctggagaacatgcctatgccttgggagcagattcgggatgtgcctgtgctgtaccacatcactggagccatttccttcgtcaatgagattccctgggtcattgaacctgtctacatctcccagtgggggtcaatgtggattatgatgcgccgagaaaaaagagataggaggcatttcaagaggatgcgttttcccccttttgatgatgaggagccgcccttggactatgctgacaacatcctagatgttgagccactggaggccattcagctagagctggaccctgaggaggacgcccctgtgttggactggttctatgaccaccagccgttgagggacagcaggaagtatgtaaatggctccacttaccagcgctggcagttcacactacctatgatgtcgactctctaccgcctggctaatcagctcctgacagacttggtggatgacaactacttctacctgtttgatttgaaggccttctttacgtccaaggcactcaatatggccattcctggaggccccaaatttgaacctcttgttcgagacatcaacctacaggatgaagactggaatgaattcaatgatattaacaagattatcatccggcagcctatccgcactgagtacaagattgcttttccttacttgtacaacaatcttccacaccatgtccacctcacctggtaccatactcccaatgttgtattcatcaaaactgaggatcctgacttgccagctttctactttgaccctttgatcaacccaatctcccataggcactcagtcaagagccaggaaccattgccggatgatgatgaggaatttgagctcccggagtttgtggagcccttcctgaaggacacacccctctatacagacaatacagccaatggcattgccctgctctgggccccgcggcccttcaacctacgctctggtcgcacccgtcgggccctggacataccccttgtcaagaactggtatcgggagcattgtcctgccgggcagcctgtgaaagtgagggtctcctaccagaagctgcttaagtactatgtgctgaatgccctgaagcatcggccccctaaggctcaaaagaagaggtatttgttccgctccttcaaagccaccaaattctttcagtccacaaagctggactgggtggaggttgggctccaggtttgccgccagggctacaacatgctcaaccttctcattcaccgcaaaaacctcaactacctgcacctggactacaacttcaacctcaagcctgtgaaaacgctcaccaccaaggaaagaaagaaatctcgttttgggaatgctttccacctgtgtcgggaagttctgcgtttgactaagctggtggtggatagtcacgtgcagtatcggctgggcaatgtggatgccttccagctggcagatggattgcagtatatatttgcccatgttgggcagttgacgggcatgtatcgatacaaatacaagctgatgcgacagattcgcatgtgcaaggacctgaagcatctcatctattatcgtttcaacacgggccctgtagggaagggtcctggctgtggcttctgggctgccggttggcgagtctggctctttttcatgcgtggcattacccctttattagagcgatggcttggcaacctcctggcccggcagtttgaaggtgagtggttttctctgtgtccaacttctcctgttattgcttcaaaagtacctgcccctgtttgagtctgttccctgctcttgtatgagcactcttcctactggattgcctttaggtccagttctgaaatgagtctgacctagtattctatttcttgggcttccttctggggccttgagaggcagtcatgcatttgcaggagtggaaattcctcagaagcatagttgtgaatgtttaaggtagctcgtctttttgcatatgctgggcacagggacgctttgttaatacctaattttattaataaccataatgagtgaggagcatgaaggtagagacccttattgaaagcaaggaatcttccttgtaatccccttgggacactctacttccaggtcgacactcaaagggggtggcaaagacagtaacaaagcagcgagtggagtcacattttgaccttgagctgcgggcagctgtgatgcatgatattctggacatgatgcctgaggggatcaagcagaacaaggcccggacaatcctgcagcacctcagtgaagcctggcgctgctggaaagccaacattccctggaaggtccctgggctgccgacgcccatagagaatatgatccttcgatacgtgaaggccaaggctgactggtggaccaacactgcccactacaaccgagaacggatccgccgaggggccactgtggacaagactgtttgtaaaaagaatctgggccgcctcacccggctctatctgaaggcagaacaggagcggcagcacaactacctgaaggacgggccttacatcacagcggaggaagcagtggcagtatataccaccacagtgcattggttggaaagccgcaggttttcacccatcccattccccccactctcctataagcatgacaccaagttgctcatcttggcattggagcggctcaaggaagcttatagtgtgaagtctcggttgaaccagtctcagagggaggagctaggtctgatcgagcaggcctacgataacccccacgaggcgctgtcccgcatcaagcgtcacctcctcacacagagagccttcaaagaggtgggcattgagttcatggatctgtatagccacctcgttccagtatatgatgttgagcccctggagaagataactgatgcttacctggaccagtacctgtggtatgaagccgacaagcgccgcctgttcccaccctggattaagcctgcagacacagaaccacctccgctgcttgtttacaagtggtgtcaaggcatcaataacctgcaggacgtgtgggagacgagtgaaggcgagtgcaatgtcatgctggaatcccgctttgagaagatgtatgagaagatcgacttgactctgctcaacaggctgctgcgcctcatcgtggaccacaacatagccgactacatgacagccaagaacaacgtcgtcatcaactataaggacatgaaccatacgaattcatatgggatcatcagaggcctgcagtttgcctcattcatcgtgcagtattatggcctggtgatggatttgcttgtattgggattgcaccgggccagtgagatggctgggccccctcagatgccaaatgactttctcagtttccaggacatagccactgaggctgcccaccccatccgtctcttctgcagatacattgatcgcatccatatttttttcaggttcacagcagatgaggctcgggacctgattcaacgttacctgacagagcaccctgaccccaataatgaaaacatcgttggctataataacaagaagtgctggccccgagatgcccgcatgcgcctcatgaaacatgatgttaacttaggccgggcggtattctgggacatcaagaaccgcttgccacggtcagtgactacagttcagtgggagaacagcttcgtgtctgtgtacagtaaggacaaccccaacctgctgttcaacatgtgtggcttcgagtgccgcatcctgcctaagtgccgcaccagctatgaggagttcacccacaaggacggggtctggaacctgcagaatgaggttactaaggagcgcacagctcagtgtttcctgcgtgtggacgatgagtcaatgcagcgcttccacaaccgcgtgcgtcagattctcatggcctctgggtccaccaccttcaccaagattgtgaataagtggaatacagctctcattggccttatgacatactttcgggaggctgtggtgaacacccaagagctcttggacttactggtgaagtgtgagaacaaaatccagacacgtatcaagattggactcaactccaagatgccaagtcggttccccccggttgtgttctacacccctaaggagttgggtggactcggcatgctctcaatgggccatgtgctcatcccccaatccgacctcaggtggtccaaacagacagatgtaggtatcacacactttcgttcaggaatgagccatgaagaagaccagctcattcccaacttgtaccgctacatacagccatgggagagcgagttcattgattctcagcgggtctgggctgagtacgcactcaagaggcaagaggccattgctcagaacagacgcctgactttagaagacctagaagattcatgggatcgtggcattcctcgaatcaataccctcttccagaaggaccggcacacactggcttatgataagggctggcgtgtcagaactgactttaagcagtatcaggttttgaagcagaatccgttctggtggacacaccagcggcatgatgggaagctctggaacctgaacaactaccgtacagacatgatccaggccctgggcggtgtggaaggcattctggaacacacactctttaagggcacttacttccctacctgggaggggcttttctgggagaaggccagtggctttgaggaatctatgaagtggaagaagctaactaatgctcagcgatcaggactgaaccagattcccaatcgtagattcaccctctggtggtccccgaccattaatcgagccaatgtatatgtaggctttcaggtgcagctagacctgacgggtatcttcatgcacggcaagatccccacgctgaagatctctctcatccagatcttccgagctcacttgtggcagaagatccatgagagcattgttatggacttatgtcaggtgtttgaccaggaacttgatgcactggaaattgagacagtacaaaaggagacaatccatccccgaaagtcatataagatgaactcttcctgtgcagatatcctgctctttgcctcctataagtggaatgtctcccggccctcattgctggctgactccaaggatgtgatggacagcaccaccacccagaaatactggattgacatccagttgcgctggggggactatgattcccacgacattgagcgctacgcccgggccaagttcctggactacaccaccgacaacatgagtatctacccttcgcccacaggtgtactcatcgccattgacctggcctataacttgcacagtgcctatggaaactggttcccaggcagcaagcctctcatacaacaggccatggccaagatcatgaaggcaaaccctgccctgtatgtgttacgtgaacggatccgcaaggggctacagctctattcatctgaacccactgagccttatttgtcttctcagaactatggtgagctcttctccaaccagattatctggtttgtggatgacaccaacgtctacagagtgactattcacaagacctttgaagggaacttgacaaccaagcccatcaacggagccatcttcatcttcaacccacgcacagggcagctgttcctcaagataatccacacgtccgtgtgggcgggacagaagcgtttggggcagttggctaagtggaagacagctgaggaggtggccgccctgatccgatctctgcctgtggaggagcagcccaagcagatcattgtcaccaggaagggcatgctggacccactggaggtgcacttactggacttccccaatattgtcatcaaaggatcggagctccaactccctttccaggcgtgtctcaaggtggaaaaattcggggatctcatccttaaagccactgagccccagatggttctcttcaacctctatgacgactggctcaagactatttcatcttacacggccttctcccgtctcatcctgattctgcgtgccctacatgtgaacaacgatcgggcaaaagtgatcctgaagccagacaagactactattacagaaccacaccacatctggcccactctgactgacgaagaatggatcaaggtcgaggtgcagctcaaggatctgatcttggctgactacggcaagaaaaacaatgtgaacgtggcatcactgacacaatcagaaattcgagacatcatcctgggtatggagatctcggcaccgtcacagcagcggcagcagatcgctgagatcgagaagcagaccaaggaacaatcgcagctgacggcaacacagactcgcactgtcaacaagcatggcgatgagatcatcacctccaccaccagcaactatgagacccagactttctcatccaagactgagtggagggtcagggccatctctgctgccaacctgcacctaaggaccaatcacatctatgtttcatctgacgacatcaaggagactggctacacctacatccttccctgggctgccgacgcccatagagaatatgatccttcgatacgtgaaggccaaggctgactggtggaccaacactgcccactacaaccgagaacggatccgccgaggggccactgtggacaagactgtttgta

SEQ ID NO: 262221 - DNA, 7607 bp, Homo sapiens
atcgtacaatgcgcaatcttggcaaatttattcaaaccctttagacttcggtctctcacagtgcgacgccgggagcccatcacacgctgaggtctgtcagaggccccagaaacagcctcggaaatggaggaggcggggctcaccccgaccacacccccttgcgttcaaagcctttccgcctatgggcccgcctcctcggcgcagtgtgcaactctaattggtcgtctcactaatccatctgagcacctcggcgccgactggatcaactgctgaactcgggttgcgcacttcccggcgctgggaacgcggagcggacgcagtctggccgccattgcgctgcggggaaagcggcctcttgtgtgagggcctgtggggtgcgtggcaggcgtttaaggccgggctgcgggaggcgtggtcgggtcgggccgagtgaccgaaggggttaggccgggcggggctggatgcactgtgtggcgggactgcaggccggggtccccggacgcctttctgctgcgcttcttgtgggcccgggcctgtggttagtgaatttttctatcccgccgctccccagattctccggatatggccggagtgtttccttatcgagggccgggtaacccggtgcctggccctctagccccgctaccggactacatgtcggaggagaagctgcaggagaaagctcgaaaatggcagcaattgcaggccaagcgctatgcagaaaagcggaagtttgggtttgtggatgcccagaaggaagacatgcccccagaacatgtcaggaagatcattcgagaccatggagacatgaccaacaggaagttccgccatgacaaaagggtttacttgggtgccctaaagtacatgccccacgcagtcctcaaactcctggagaacatgcctatgccttgggagcagattcgggatgtgcctgtgctgtaccacatcactggagccatttccttcgtcaatgagattccctgggtcattgaacctgtctacatctcccagtgggggtcaatgtggattatgatgcgccgagaaaaaagagataggaggcatttcaagaggatgcgttttcccccttttgatgatgaggagccgcccttggactatgctgacaacatcctagatgttgagccactggaggccattcagctagagctggaccctgaggaggacgcccctgtgttggactggttctatgaccaccagccgttgagggacagcaggaagtatgtaaatggctccacttaccagcgctggcagttcacactacctatgatgtcgactctctaccgcctggctaatcagctcctgacagacttggtggatgacaactacttctacctgtttgatttgaaggccttctttacgtccaaggcactcaatatggccattcctggaggccccaaatttgaacctcttgttcgagacatcaacctacaggatgaagactggaatgaattcaatgatattaacaagattatcatccggcagcctatccgcactgagtacaagattgcttttccttacttgtacaacaatcttccacaccatgtccacctcacctggtaccatactcccaatgttgtattcatcaaaactgaggatcctgacttgccagctttctactttgaccctttgatcaacccaatctcccataggcactcagtcaagagccaggaaccattgccggatgatgatgaggaatttgagctcccggagtttgtggagcccttcctgaaggacacacccctctatacagacaatacagccaatggcattgccctgctctgggccccgcggcccttcaacctacgctctggtcgcacccgtcgggccctggacataccccttgtcaagaactggtatcgggagcattgtcctgccgggcagcctgtgaaagtgagggtctcctaccagaagctgcttaagtactatgtgctgaatgccctgaagcatcggccccctaaggctcaaaagaagaggtatttgttccgctccttcaaagccaccaaattctttcagtccacaaagctggactgggtggaggttgggctccaggtttgccgccagggctacaacatgctcaaccttctcattcaccgcaaaaacctcaactacctgcacctggactacaacttcaacctcaagcctgtgaaaacgctcaccaccaaggaaagaaagaaatctcgttttgggaatgctttccacctgtgtcgggaagttctgcgtttgactaagctggtggtggatagtcacgtgcagtatcggctgggcaatgtggatgccttccagctggcagatggattgcagtatatatttgcccatgttgggcagttgacgggcatgtatcgatacaaatacaagctgatgcgacagattcgcatgtgcaaggacctgaagcatctcatctattatcgtttcaacacgggccctgtagggaagggtcctggctgtggcttctgggctgccggttggcgagtctggctctttttcatgcgtggcattacccctttattagagcgatggcttggcaacctcctggcccggcagtttgaaggtgagtggttttctctgtgtccaacttctcctgttattgcttcaaaagtacctgcccctgtttgagtctgttccctgctcttgtatgagcactcttcctactggattgcctttaggtccagttctgaaatgagtctgacctagtattctatttcttgggcttccttctggggccttgagaggcagtcatgcatttgcaggagtggaaattcctcagaagcatagttgtgaatgtttaaggtagctcgtctttttgcatatgctgggcacagggacgctttgttaatacctaattttattaataaccataatgagtgaggagcatgaaggtagagacccttattgaaagcaaggaatcttccttgtaatccccttgggacactctacttccaggtcgacactcaaagggggtggcaaagacagtaacaaagcagcgagtggagtcacattttgaccttgagctgcgggcagctgtgatgcatgatattctggacatgatgcctgaggggatcaagcagaacaaggcccggacaatcctgcagcacctcagtgaagcctggcgctgctggaaagccaacattccctggaaggtccctgggctgccgacgcccatagagaatatgatccttcgatacgtgaaggccaaggctgactggtggaccaacactgcccactacaaccgagaacggatccgccgaggggccactgtggacaagactgtttgtaaaaagaatctgggccgcctcacccggctctatctgaaggcagaacaggagcggcagcacaactacctgaaggacgggccttacatcacagcggaggaagcagtggcagtatataccaccacagtgcattggttggaaagccgcaggttttcacccatcccattccccccactctcctataagcatgacaccaagttgctcatcttggcattggagcggctcaaggaagcttatagtgtgaagtctcggttgaaccagtctcagagggaggagctaggtctgatcgagcaggcctacgataacccccacgaggcgctgtcccgcatcaagcgtcacctcctcacacagagagccttcaaagaggtgggcattgagttcatggatctgtatagccacctcgttccagtatatgatgttgagcccctggagaagataactgatgcttacctggaccagtacctgtggtatgaagccgacaagcgccgcctgttcccaccctggattaagcctgcagacacagaaccacctccgctgcttgtttacaagtggtgtcaaggcatcaataacctgcaggacgtgtgggagacgagtgaaggcgagtgcaatgtcatgctggaatcccgctttgagaagatgtatgagaagatcgacttgactctgctcaacaggctgctgcgcctcatcgtggaccacaacatagccgactacatgacagccaagaacaacgtcgtcatcaactataaggacatgaaccatacgaattcatatgggatcatcagaggcctgcagtttgcctcattcatcgtgcagtattatggcctggtgatggatttgcttgtattgggattgcaccgggccagtgagatggctgggccccctcagatgccaaatgactttctcagtttccaggacatagccactgaggctgcccaccccatccgtctcttctgcagatacattgatcgcatccatatttttttcaggttcacagcagatgaggctcgggacctgattcaacgttacctgacagagcaccctgaccccaataatgaaaacatcgttggctataataacaagaagtgctggccccgagatgcccgcatgcgcctcatgaaacatgatgttaacttaggccgggcggtattctgggacatcaagaaccgcttgccacggtcagtgactacagttcagtgggagaacagcttcgtgtctgtgtacagtaaggacaaccccaacctgctgttcaacatgtgtggcttcgagtgccgcatcctgcctaagtgccgcaccagctatgaggagttcacccacaaggacggggtctggaacctgcagaatgaggttactaaggagcgcacagctcagtgtttcctgcgtgtggacgatgagtcaatgcagcgcttccacaaccgcgtgcgtcagattctcatggcctctgggtccaccaccttcaccaagattgtgaataagtggaatacagctctcattggccttatgacatactttcgggaggctgtggtgaacacccaagagctcttggacttactggtgaagtgtgagaacaaaatccagacacgtatcaagattggactcaactccaagatgccaagtcggttccccccggttgtgttctacacccctaaggagttgggtggactcggcatgctctcaatgggccatgtgctcatcccccaatccgacctcaggtggtccaaacagacagatgtaggtatcacacactttcgttcaggaatgagccatgaagaagaccagctcattcccaacttgtaccgctacatacagccatgggagagcgagttcattgattctcagcgggtctgggctgagtacgcactcaagaggcaagaggccattgctcagaacagacgcctgactttagaagacctagaagattcatgggatcgtggcattcctcgaatcaataccctcttccagaaggaccggcacacactggcttatgataagggctggcgtgtcagaactgactttaagcagtatcaggttttgaagcagaatccgttctggtggacacaccagcggcatgatgggaagctctggaacctgaacaactaccgtacagacatgatccaggccctgggcggtgtggaaggcattctggaacacacactctttaagggcacttacttccctacctgggaggggcttttctgggagaaggccagtggctttgaggaatctatgaagtggaagaagctaactaatgctcagcgatcaggactgaaccagattcccaatcgtagattcaccctctggtggtccccgaccattaatcgagccaatgtatatgtaggctttcaggtgcagctagacctgacgggtatcttcatgcacggcaagatccccacgctgaagatctctctcatccagatcttccgagctcacttgtggcagaagatccatgagagcattgttatggacttatgtcaggtgtttgaccaggaacttgatgcactggaaattgagacagtacaaaaggagacaatccatccccgaaagtcatataagatgaactcttcctgtgcagatatcctgctctttgcctcctataagtggaatgtctcccggccctcattgctggctgactccaaggatgtgatggacagcaccaccacccagaaatactggattgacatccagttgcgctggggggactatgattcccacgacattgagcgctacgcccgggccaagttcctggactacaccaccgacaacatgagtatctacccttcgcccacaggtgtactcatcgccattgacctggcctataacttgcacagtgcctatggaaactggttcccaggcagcaagcctctcatacaacaggccatggccaagatcatgaaggcaaaccctgccctgtatgtgttacgtgaacggatccgcaaggggctacagctctattcatctgaacccactgagccttatttgtcttctcagaactatggtgagctcttctccaaccagattatctggtttgtggatgacaccaacgtctacagagtgactattcacaagacctttgaagggaacttgacaaccaagcccatcaacggagccatcttcatcttcaacccacgcacagggcagctgttcctcaagataatccacacgtccgtgtgggcgggacagaagcgtttggggcagttggctaagtggaagacagctgaggaggtggccgccctgatccgatctctgcctgtggaggagcagcccaagcagatcattgtcaccaggaagggcatgctggacccactggaggtgcacttactggacttccccaatattgtcatcaaaggatcggagctccaactccctttccaggcgtgtctcaaggtggaaaaattcggggatctcatccttaaagccactgagccccagatggttctcttcaacctctatgacgactggctcaagactatttcatcttacacggccttctcccgtctcatcctgattctgcgtgccctacatgtgaacaacgatcgggcaaaagtgatcctgaagccagacaagactactattacagaaccacaccacatctggcccactctgactgacgaagaatggatcaaggtcgaggtgcagctcaaggatctgatcttggctgactacggcaagaaaaacaatgtgaacgtggcatcactgacacaatcagaaattcgagacatcatcctgggtatggagatctcggcaccgtcacagcagcggcagcagatcgctgagatcgagaagcagaccaaggaacaatcgcagctgacggcaacacagactcgcactgtcaacaagcatggcgatgagatcatcacctccaccaccagcaactatgagacccagactttctcatccaagactgagtggagggtcagggccatctctgctgccaacctgcacctaaggaccaatcacatctatgtttcatctgacggtgcccagcgctgggcactcgtcactatcgcccgcctgaggtgatccttgagctgggctgggcacagccctgtgacgtctggagcattggctgcattctctttgagtactaccggggcttcacactcttccagacccacgaaaaccgagagcacctggtgatgatggagaagatcctagggcccatcccatcacacatgatccaccgtaccaggaagcagaaatatttctacaaagggggcctagtttgggatgagaacagctctgacggccggtatgtgaaggagaactgcaaacctctgaagagttcatgctccaagactccctggagcacgtgcagctgtttga

SEQ ID NO: 262222 - DNA, 7328 bp, Homo sapiens
atcgtacaatgcgcaatcttggcaaatttattcaaaccctttagacttcggtctctcacagtgcgacgccgggagcccatcacacgctgaggtctgtcagaggccccagaaacagcctcggaaatggaggaggcggggctcaccccgaccacacccccttgcgttcaaagcctttccgcctatgggcccgcctcctcggcgcagtgtgcaactctaattggtcgtctcactaatccatctgagcacctcggcgccgactggatcaactgctgaactcgggttgcgcacttcccggcgctgggaacgcggagcggacgcagtctggccgccattgcgctgcggggaaagcggcctcttgtgtgagggcctgtggggtgcgtggcaggcgtttaaggccgggctgcgggaggcgtggtcgggtcgggccgagtgaccgaaggggttaggccgggcggggctggatgcactgtgtggcgggactgcaggccggggtccccggacgcctttctgctgcgcttcttgtgggcccgggcctgtggttagtgaatttttctatcccgccgctccccagattctccggatatggccggagtgtttccttatcgagggccgggtaacccggtgcctggccctctagccccgctaccggactacatgtcggaggagaagctgcaggagaaagctcgaaaatggcagcaattgcaggccaagcgctatgcagaaaagcggaagtttgggtttgtggatgcccagaaggaagacatgcccccagaacatgtcaggaagatcattcgagaccatggagacatgaccaacaggaagttccgccatgacaaaagggtttacttgggtgccctaaagtacatgccccacgcagtcctcaaactcctggagaacatgcctatgccttgggagcagattcgggatgtgcctgtgctgtaccacatcactggagccatttccttcgtcaatgagattccctgggtcattgaacctgtctacatctcccagtgggggtcaatgtggattatgatgcgccgagaaaaaagagataggaggcatttcaagaggatgcgttttcccccttttgatgatgaggagccgcccttggactatgctgacaacatcctagatgttgagccactggaggccattcagctagagctggaccctgaggaggacgcccctgtgttggactggttctatgaccaccagccgttgagggacagcaggaagtatgtaaatggctccacttaccagcgctggcagttcacactacctatgatgtcgactctctaccgcctggctaatcagctcctgacagacttggtggatgacaactacttctacctgtttgatttgaaggccttctttacgtccaaggcactcaatatggccattcctggaggccccaaatttgaacctcttgttcgagacatcaacctacaggatgaagactggaatgaattcaatgatattaacaagattatcatccggcagcctatccgcactgagtacaagattgcttttccttacttgtacaacaatcttccacaccatgtccacctcacctggtaccatactcccaatgttgtattcatcaaaactgaggatcctgacttgccagctttctactttgaccctttgatcaacccaatctcccataggcactcagtcaagagccaggaaccattgccggatgatgatgaggaatttgagctcccggagtttgtggagcccttcctgaaggacacacccctctatacagacaatacagccaatggcattgccctgctctgggccccgcggcccttcaacctacgctctggtcgcacccgtcgggccctggacataccccttgtcaagaactggtatcgggagcattgtcctgccgggcagcctgtgaaagtgagggtctcctaccagaagctgcttaagtactatgtgctgaatgccctgaagcatcggccccctaaggctcaaaagaagaggtatttgttccgctccttcaaagccaccaaattctttcagtccacaaagctggactgggtggaggttgggctccaggtttgccgccagggctacaacatgctcaaccttctcattcaccgcaaaaacctcaactacctgcacctggactacaacttcaacctcaagcctgtgaaaacgctcaccaccaaggaaagaaagaaatctcgttttgggaatgctttccacctgtgtcgggaagttctgcgtttgactaagctggtggtggatagtcacgtgcagtatcggctgggcaatgtggatgccttccagctggcagatggattgcagtatatatttgcccatgttgggcagttgacgggcatgtatcgatacaaatacaagctgatgcgacagattcgcatgtgcaaggacctgaagcatctcatctattatcgtttcaacacgggccctgtagggaagggtcctggctgtggcttctgggctgccggttggcgagtctggctctttttcatgcgtggcattacccctttattagagcgatggcttggcaacctcctggcccggcagtttgaaggtgagtggttttctctgtgtccaacttctcctgttattgcttcaaaagtacctgcccctgtttgagtctgttccctgctcttgtatgagcactcttcctactggattgcctttaggtccagttctgaaatgagtctgacctagtattctatttcttgggcttccttctggggccttgagaggcagtcatgcatttgcaggagtggaaattcctcagaagcatagttgtgaatgtttaaggtagctcgtctttttgcatatgctgggcacagggacgctttgttaatacctaattttattaataaccataatgagtgaggagcatgaaggtagagacccttattgaaagcaaggaatcttccttgtaatccccttgggacactctacttccaggtcgacactcaaagggggtggcaaagacagtaacaaagcagcgagtggagtcacattttgaccttgagctgcgggcagctgtgatgcatgatattctggacatgatgcctgaggggatcaagcagaacaaggcccggacaatcctgcagcacctcagtgaagcctggcgctgctggaaagccaacattccctggaaggtccctgggctgccgacgcccatagagaatatgatccttcgatacgtgaaggccaaggctgactggtggaccaacactgcccactacaaccgagaacggatccgccgaggggccactgtggacaagactgtttgtaaaaagaatctgggccgcctcacccggctctatctgaaggcagaacaggagcggcagcacaactacctgaaggacgggccttacatcacagcggaggaagcagtggcagtatataccaccacagtgcattggttggaaagccgcaggttttcacccatcccattccccccactctcctataagcatgacaccaagttgctcatcttggcattggagcggctcaaggaagcttatagtgtgaagtctcggttgaaccagtctcagagggaggagctaggtctgatcgagcaggcctacgataacccccacgaggcgctgtcccgcatcaagcgtcacctcctcacacagagagccttcaaagaggtgggcattgagttcatggatctgtatagccacctcgttccagtatatgatgttgagcccctggagaagataactgatgcttacctggaccagtacctgtggtatgaagccgacaagcgccgcctgttcccaccctggattaagcctgcagacacagaaccacctccgctgcttgtttacaagtggtgtcaaggcatcaataacctgcaggacgtgtgggagacgagtgaaggcgagtgcaatgtcatgctggaatcccgctttgagaagatgtatgagaagatcgacttgactctgctcaacaggctgctgcgcctcatcgtggaccacaacatagccgactacatgacagccaagaacaacgtcgtcatcaactataaggacatgaaccatacgaattcatatgggatcatcagaggcctgcagtttgcctcattcatcgtgcagtattatggcctggtgatggatttgcttgtattgggattgcaccgggccagtgagatggctgggccccctcagatgccaaatgactttctcagtttccaggacatagccactgaggctgcccaccccatccgtctcttctgcagatacattgatcgcatccatatttttttcaggttcacagcagatgaggctcgggacctgattcaacgttacctgacagagcaccctgaccccaataatgaaaacatcgttggctataataacaagaagtgctggccccgagatgcccgcatgcgcctcatgaaacatgatgttaacttaggccgggcggtattctgggacatcaagaaccgcttgccacggtcagtgactacagttcagtgggagaacagcttcgtgtctgtgtacagtaaggacaaccccaacctgctgttcaacatgtgtggcttcgagtgccgcatcctgcctaagtgccgcaccagctatgaggagttcacccacaaggacggggtctggaacctgcagaatgaggttactaaggagcgcacagctcagtgtttcctgcgtgtggacgatgagtcaatgcagcgcttccacaaccgcgtgcgtcagattctcatggcctctgggtccaccaccttcaccaagattgtgaataagtggaatacagctctcattggccttatgacatactttcgggaggctgtggtgaacacccaagagctcttggacttactggtgaagtgtgagaacaaaatccagacacgtatcaagattggactcaactccaagatgccaagtcggttccccccggttgtgttctacacccctaaggagttgggtggactcggcatgctctcaatgggccatgtgctcatcccccaatccgacctcaggtggtccaaacagacagatgtaggtatcacacactttcgttcaggaatgagccatgaagaagaccagctcattcccaacttgtaccgctacatacagccatgggagagcgagttcattgattctcagcgggtctgggctgagtacgcactcaagaggcaagaggccattgctcagaacagacgcctgactttagaagacctagaagattcatgggatcgtggcattcctcgaatcaataccctcttccagaaggaccggcacacactggcttatgataagggctggcgtgtcagaactgactttaagcagtatcaggttttgaagcagaatccgttctggtggacacaccagcggcatgatgggaagctctggaacctgaacaactaccgtacagacatgatccaggccctgggcggtgtggaaggcattctggaacacacactctttaagggcacttacttccctacctgggaggggcttttctgggagaaggccagtggctttgaggaatctatgaagtggaagaagctaactaatgctcagcgatcaggactgaaccagattcccaatcgtagattcaccctctggtggtccccgaccattaatcgagccaatgtatatgtaggctttcaggtgcagctagacctgacgggtatcttcatgcacggcaagatccccacgctgaagatctctctcatccagatcttccgagctcacttgtggcagaagatccatgagagcattgttatggacttatgtcaggtgtttgaccaggaacttgatgcactggaaattgagacagtacaaaaggagacaatccatccccgaaagtcatataagatgaactcttcctgtgcagatatcctgctctttgcctcctataagtggaatgtctcccggccctcattgctggctgactccaaggatgtgatggacagcaccaccacccagaaatactggattgacatccagttgcgctggggggactatgattcccacgacattgagcgctacgcccgggccaagttcctggactacaccaccgacaacatgagtatctacccttcgcccacaggtgtactcatcgccattgacctggcctataacttgcacagtgcctatggaaactggttcccaggcagcaagcctctcatacaacaggccatggccaagatcatgaaggcaaaccctgccctgtatgtgttacgtgaacggatccgcaaggggctacagctctattcatctgaacccactgagccttatttgtcttctcagaactatggtgagctcttctccaaccagattatctggtttgtggatgacaccaacgtctacagagtgactattcacaagacctttgaagggaacttgacaaccaagcccatcaacggagccatcttcatcttcaacccacgcacagggcagctgttcctcaagataatccacacgtccgtgtgggcgggacagaagcgtttggggcagttggctaagtggaagacagctgaggaggtggccgccctgatccgatctctgcctgtggaggagcagcccaagcagatcattgtcaccaggaagggcatgctggacccactggaggtgcacttactggacttccccaatattgtcatcaaaggatcggagctccaactccctttccaggcgtgtctcaaggtggaaaaattcggggatctcatccttaaagccactgagccccagatggttctcttcaacctctatgacgactggctcaagactatttcatcttacacggccttctcccgtctcatcctgattctgcgtgccctacatgtgaacaacgatcgggcaaaagtgatcctgaagccagacaagactactattacagaaccacaccacatctggcccactctgactgacgaagaatggatcaaggtcgaggtgcagctcaaggatctgatcttggctgactacggcaagaaaaacaatgtgaacgtggcatcactgacacaatcagaaattcgagacatcatcctgggtatggagatctcggcaccgtcacagcagcggcagcagatcgctgagatcgagaagcagaccaaggaacaatcgcagctgacggcaacacagactcgcactgtcaacaagcatggcgatgagatcatcacctccaccaccagcaactatgagacccagactttctcatccaagactgagtggagggtcagggccatctctgctgccaacctgcacctaaggaccaatcacatctatgtttcatctgacgggatacaggtaagagacgatacacatccctaatgatcaagcggggatcttgatatgtatgagattgcc

SEQ ID NO: 262223 - DNA, 1456 bp, Homo sapiens
tgggtctttgctcttttggggtctttgctcttttggggtctttgctcaagactatttcatcttacacggccttctcccgtctcatcctgattctgcgtgccctacatgtgaacaacgatcgggcaaaagtgatcctgaagccagacaagactactattacagaaccacaccacatctggcccactctgactgacgaagaatggatcaaggtcgaggtgcagctcaaggatctgatcttggctgactacggcaagaaaaacaatgtgaacgtggcatcactgacacaatcagaaattcgagacatcatcctgggtatggagatctcggcaccgtcacagcagcggcagcagatcgctgagatcgagaagcagaccaaggaacaatcgcagctgacggcaacacagactcgcactgtcaacaagcatggcgatgagatcatcacctccaccaccagcaactatgagacccagactttctcatccaagactgagtggagggtcagggccatctctgctgccaacctgcacctaaggaccaatcacatctatgtttcatctgacgacatcaaggagactggctacacctacatccttcccaagaatgtgcttaagaagttcatctgcatatctgaccttcgggcccaaattgcaggatacctatatggggtgagcccaccagataacccccaggtgaaggagatccgctgcattgtgatggtgccgcagtggggcactcaccagaccgtgcacctgcctggccagctgccccagcatgagtacctcaaggagatggaacccttaggttggatccacactcagcccaatgagtccccgcagttatcaccccaggatgtcaccacccatgccaagatcatggctgacaacccatcttgggatggcgagaagaccattatcatcacatgcagcttcacgccaggctcctgtacactgacggcctacaagctgacccccagtggctacgaatggggccgccagaacacagacaagggcaacaaccccaagggctacctgccttcacactatgagagggtgcagatgctgctgtcggaccgtttccttggcttcttcatggtccctgcccagtcctcgtggaactacaacttcatgggtgttcggcatgaccccaacatgaaatatgagctacagctggcgaaccccaaagagttctaccacgaggtgcacaggccctctcacttcctcaactttgctctcctgcaggagggggaggtttactctgcggatcgggaggacctgtatgcctgaccgtttccctgcctcctgcttcagcctcccgaggccgaagcctcagcccctccagacaggccgctgacattcagcagtttggcctctttccctctgtctgtgcttgtgttgttgacctcctgatggcttgtcatcctgaataaaatataataataaattttgtataaatagga

SEQ ID NO: 262224 - DNA, 5609 bp, Homo sapiens
  misc_feature (4406)..(4406): n is a, c, g, or t
  misc_feature (4412)..(4412): n is a, c, g, or t
atcgtacaatgcgcaatcttggcaaatttattcaaaccctttagacttcggtctctcacagtgcgacgccgggagcccatcacacgctgaggtctgtcagaggccccagaaacagcctcggaaatggaggaggcggggctcaccccgaccacacccccttgcgttcaaagcctttccgcctatgggcccgcctcctcggcgcagtgtgcaactctaattggtcgtctcactaatccatctgagcacctcggcgccgactggatcaactgctgaactcgggttgcgcacttcccggcgctgggaacgcggagcggacgcagtctggccgccattgcgctgcggggaaagcggcctcttgtgtgagggcctgtggggtgcgtggcaggcgtttaaggccgggctgcgggaggcgtggtcgggtcgggccgagtgaccgaaggggttaggccgggcggggctggatgcactgtgtggcgggactgcaggccggggtccccggacgcctttctgctgcgcttcttgtgggcccgggcctgtggttagtgaatttttctatcccgccgctccccagattctccggatatggccggagtgtttccttatcgagggccgggtaacccggtgcctggccctctagccccgctaccggactacatgtcggaggagaagctgcaggagaaagctcgaaaatggcagcaattgcaggccaagcgctatgcagaaaagcggaagtttgggtttgtggatgcccagaaggaagacatgcccccagaacatgtcaggaagatcattcgagaccatggagacatgaccaacaggaagttccgccatgacaaaagggtttacttgggtgccctaaagtacatgccccacgcagtcctcaaactcctggagaacatgcctatgccttgggagcagattcgggatgtgcctgtgctgtaccacatcactggagccatttccttcgtcaatgagattccctgggtcattgaacctgtctacatctcccagtgggggtcaatgtggattatgatgcgccgagaaaaaagagataggaggcatttcaagaggatgcgttttcccccttttgatgatgaggagccgcccttggactatgctgacaacatcctagatgttgagccactggaggccattcagctagagctggaccctgaggaggacgcccctgtgttggactggttctatgaccaccagccgttgagggacagcaggaagtatgtaaatggctccacttaccagcgctggcagttcacactacctatgatgtcgactctctaccgcctggctaatcagctcctgacagacttggtggatgacaactacttctacctgtttgatttgaaggccttctttacgtccaaggcactcaatatggccattcctggaggccccaaatttgaacctcttgttcgagacatcaacctacaggatgaagactggaatgaattcaatgatattaacaagattatcatccggcagcctatccgcactgagtacaagattgcttttccttacttgtacaacaatcttccacaccatgtccacctcacctggtaccatactcccaatgttgtattcatcaaaactgaggatcctgacttgccagctttctactttgaccctttgatcaacccaatctcccataggcactcagtcaagagccaggaaccattgccggatgatgatgaggaatttgagctcccggagtttgtggagcccttcctgaaggacacacccctctatacagacaatacagccaatggcattgccctgctctgggccccgcggcccttcaacctacgctctggtcgcacccgtcgggccctggacataccccttgtcaagaactggtatcgggagcattgtcctgccgggcagcctgtgaaagtgagggtctcctaccagaagctgcttaagtactatgtgctgaatgccctgaagcatcggccccctaaggctcaaaagaagaggtatttgttccgctccttcaaagccaccaaattctttcagtccacaaagctggactgggtggaggttgggctccaggtttgccgccagggctacaacatgctcaaccttctcattcaccgcaaaaacctcaactacctgcacctggactacaacttcaacctcaagcctgtgaaaacgctcaccaccaaggaaagaaagaaatctcgttttgggaatgctttccacctgtgtcgggaagttctgcgtttgactaagctggtggtggatagtcacgtgcagtatcggctgggcaatgtggatgccttccagctggcagatggattgcagtatatatttgcccatgttgggcagttgacgggcatgtatcgatacaaatacaagctgatgcgacagattcgcatgtgcaaggacctgaagcatctcatctattatcgtttcaacacgggccctgtagggaagggtcctggctgtggcttctgggctgccggttggcgagtctggctctttttcatgcgtggcattacccctttattagagcgatggcttggcaacctcctggcccggcagtttgaaggtgagtggttttctctgtgtccaacttctcctgttattgcttcaaaagtacctgcccctgtttgagtctgttccctgctcttgtatgagcactcttcctactggattgcctttaggtccagttctgaaatgagtctgacctagtattctatttcttgggcttccttctggggccttgagaggcagtcatgcatttgcaggagtggaaattcctcagaagcatagttgtgaatgtttaaggtagctcgtctttttgcatatgctgggcacagggacgctttgttaatacctaattttattaataaccataatgagtgaggagcatgaaggtagagacccttattgaaagcaaggaatcttccttgtaatccccttgggacactctacttccaggtcgacactcaaagggggtggcaaagacagtaacaaagcagcgagtggagtcacattttgaccttgagctgcgggcagctgtgatgcatgatattctggacatgatgcctgaggggatcaagcagaacaaggcccggacaatcctgcagcacctcagtgaagcctggcgctgctggaaagccaacattccctggaaggtccctgggctgccgacgcccatagagaatatgatccttcgatacgtgaaggccaaggctgactggtggaccaacactgcccactacaaccgagaacggatccgccgaggggccactgtggacaagactgtttgtaaaaagaatctgggccgcctcacccggctctatctgaaggcagaacaggagcggcagcacaactacctgaaggacgggccttacatcacagcggaggaagcagtggcagtatataccaccacagtgcattggttggaaagccgcaggttttcacccatcccattccccccactctcctataagcatgacaccaagttgctcatcttggcattggagcggctcaaggaagcttatagtgtgaagtctcggttgaaccagtctcagagggaggagctaggtctgatcgagcaggcctacgataacccccacgaggcgctgtcccgcatcaagcgtcacctcctcacacagagagccttcaaagaggtgggcattgagttcatggatctgtatagccacctcgttccagtatatgatgttgagcccctggagaagataactgatgcttacctggaccagtacctgtggtatgaagccgacaagcgccgcctgttcccaccctggattaagcctgcagacacagaaccacctccgctgcttgtttacaagtggtgtcaaggcatcaataacctgcaggacgtgtgggagacgagtgaaggcgagtgcaatgtcatgctggaatcccgctttgagaagatgtatgagaagatcgacttgactctgctcaacaggctgctgcgcctcatcgtggaccacaacatagccgactacatgacagccaagaacaacgtcgtcatcaactataaggacatgaaccatacgaattcatatgggatcatcagaggcctgcagtttgcctcattcatcgtgcagtattatggcctggtgatggatttgcttgtattgggattgcaccgggccagtgagatggctgggccccctcagatgccaaatgactttctcagtttccaggacatagccactgaggctgcccaccccatccgtctcttctgcagatacattgatcgcatccatatttttttcaggtgagggctttcctggattcctagccttgcagggtactgaggcatgtgctttgcctctgaaatcagctattgtacctgagttgacttaactgctgttggggctttaaaatggaatgaagcggccgggtgcggntactcnacgcctgtaatcccagcactttgggaggccgaggcaggcggatcacgaggtcaggagatcgagaccatcctggctaacacagtgaaaccccgtctctactaaaaataacaaaaaattagcggccgctcgcgtgacggcaacacagactcgcactgtcaacaagcatggcgatgagatcatcacctccaccaccagcaactatgagacccagactttctcatccaagactgagtggagggtcagggccatctctgctgccaacctgcacctaaggaccaatcacatctatgtttcatctgacgacatcaaggagactggctacacctacatccttcccaagaatgtgcttaagaagttcatctgcatatctgaccttcgggcccaaattgcaggatacctatatggggtgagcccaccagataacccccaggtgaaggagatccgctgcattgtgatggtgccgcagtggggcactcaccagaccgtgcacctgcctggccagctgccccagcatgagtacctcaaggagatggaacccttaggttggatccacactcagcccaatgagtccccgcagttatcaccccaggatgtcaccacccatgccaagatcatggctgacaacccatcttgggatggcgagaagaccattatcatcacatgcagcttcacgccaggctcctgtacactgacggcctacaagctgacccccagtggctacgaatggggccgccagaacacagacaagggcaacaaccccaagggctacctgccttcacactatgagagggtgcagatgctgctgtcggaccgtttccttggcttcttcatggtccctgcccagtcctcgtggaactacaacttcatgggtgttcggcatgaccccaacatgaaatatgagctacagctggcgaaccccaaagagttctaccacgaggtgcacaggccctctcacttcctcaactttgctctcctgcaggagggggaggtttactctgcggatcgggaggacctgtatgcctgaccgtttccctgcctcctgcttcagcctcccgaggccgaagcctcagcccctccagacaggccgctgacattcagcagtttggcctctttccctctgtctgtgcttgtgttgttgacctcctgatggcttgtcatcctgaataaaatataataataaattttgtataaatagga

SEQ ID NO: 262225 - DNA, 6710 bp, Homo sapiens
  misc_feature (6597)..(6598): n is a, c, g, or t
atcgtacaatgcgcaatcttggcaaatttattcaaaccctttagacttcggtctctcacagtgcgacgccgggagcccatcacacgctgaggtctgtcagaggccccagaaacagcctcggaaatggaggaggcggggctcaccccgaccacacccccttgcgttcaaagcctttccgcctatgggcccgcctcctcggcgcagtgtgcaactctaattggtcgtctcactaatccatctgagcacctcggcgccgactggatcaactgctgaactcgggttgcgcacttcccggcgctgggaacgcggagcggacgcagtctggccgccattgcgctgcggggaaagcggcctcttgtgtgagggcctgtggggtgcgtggcaggcgtttaaggccgggctgcgggaggcgtggtcgggtcgggccgagtgaccgaaggggttaggccgggcggggctggatgcactgtgtggcgggactgcaggccggggtccccggacgcctttctgctgcgcttcttgtgggcccgggcctgtggttagtgaatttttctatcccgccgctccccagattctccggatatggccggagtgtttccttatcgagggccgggtaacccggtgcctggccctctagccccgctaccggactacatgtcggaggagaagctgcaggagaaagctcgaaaatggcagcaattgcaggccaagcgctatgcagaaaagcggaagtttgggtttgtggatgcccagaaggaagacatgcccccagaacatgtcaggaagatcattcgagaccatggagacatgaccaacaggaagttccgccatgacaaaagggtttacttgggtgccctaaagtacatgccccacgcagtcctcaaactcctggagaacatgcctatgccttgggagcagattcgggatgtgcctgtgctgtaccacatcactggagccatttccttcgtcaatgagattccctgggtcattgaacctgtctacatctcccagtgggggtcaatgtggattatgatgcgccgagaaaaaagagataggaggcatttcaagaggatgcgttttcccccttttgatgatgaggagccgcccttggactatgctgacaacatcctagatgttgagccactggaggccattcagctagagctggaccctgaggaggacgcccctgtgttggactggttctatgaccaccagccgttgagggacagcaggaagtatgtaaatggctccacttaccagcgctggcagttcacactacctatgatgtcgactctctaccgcctggctaatcagctcctgacagacttggtggatgacaactacttctacctgtttgatttgaaggccttctttacgtccaaggcactcaatatggccattcctggaggccccaaatttgaacctcttgttcgagacatcaacctacaggatgaagactggaatgaattcaatgatattaacaagattatcatccggcagcctatccgcactgagtacaagattgcttttccttacttgtacaacaatcttccacaccatgtccacctcacctggtaccatactcccaatgttgtattcatcaaaactgaggatcctgacttgccagctttctactttgaccctttgatcaacccaatctcccataggcactcagtcaagagccaggaaccattgccggatgatgatgaggaatttgagctcccggagtttgtggagcccttcctgaaggacacacccctctatacagacaatacagccaatggcattgccctgctctgggccccgcggcccttcaacctacgctctggtcgcacccgtcgggccctggacataccccttgtcaagaactggtatcgggagcattgtcctgccgggcagcctgtgaaagtgagggtctcctaccagaagctgcttaagtactatgtgctgaatgccctgaagcatcggccccctaaggctcaaaagaagaggtatttgttccgctccttcaaagccaccaaattctttcagtccacaaagctggactgggtggaggttgggctccaggtttgccgccagggctacaacatgctcaaccttctcattcaccgcaaaaacctcaactacctgcacctggactacaacttcaacctcaagcctgtgaaaacgctcaccaccaaggaaagaaagaaatctcgttttgggaatgctttccacctgtgtcgggaagttctgcgtttgactaagctggtggtggatagtcacgtgcagtatcggctgggcaatgtggatgccttccagctggcagatggattgcagtatatatttgcccatgttgggcagttgacgggcatgtatcgatacaaatacaagctgatgcgacagattcgcatgtgcaaggacctgaagcatctcatctattatcgtttcaacacgggccctgtagggaagggtcctggctgtggcttctgggctgccggttggcgagtctggctctttttcatgcgtggcattacccctttattagagcgatggcttggcaacctcctggcccggcagtttgaaggtgagtggttttctctgtgtccaacttctcctgttattgcttcaaaagtacctgcccctgtttgagtctgttccctgctcttgtatgagcactcttcctactggattgcctttaggtccagttctgaaatgagtctgacctagtattctatttcttgggcttccttctggggccttgagaggcagtcatgcatttgcaggagtggaaattcctcagaagcatagttgtgaatgtttaaggtagctcgtctttttgcatatgctgggcacagggacgctttgttaatacctaattttattaataaccataatgagtgaggagcatgaaggtagagacccttattgaaagcaaggaatcttccttgtaatccccttgggacactctacttccaggtcgacactcaaagggggtggcaaagacagtaacaaagcagcgagtggagtcacattttgaccttgagctgcgggcagctgtgatgcatgatattctggacatgatgcctgaggggatcaagcagaacaaggcccggacaatcctgcagcacctcagtgaagcctggcgctgctggaaagccaacattccctggaaggtccctgggctgccgacgcccatagagaatatgatccttcgatacgtgaaggccaaggctgactggtggaccaacactgcccactacaaccgagaacggatccgccgaggggccactgtggacaagactgtttgtaaaaagaatctgggccgcctcacccggctctatctgaaggcagaacaggagcggcagcacaactacctgaaggacgggccttacatcacagcggaggaagcagtggcagtatataccaccacagtgcattggttggaaagccgcaggttttcacccatcccattccccccactctcctataagcatgacaccaagttgctcatcttggcattggagcggctcaaggaagcttatagtgtgaagtctcggttgaaccagtctcagagggaggagctaggtctgatcgagcaggcctacgataacccccacgaggcgctgtcccgcatcaagcgtcacctcctcacacagagagccttcaaagaggtgggcattgagttcatggatctgtatagccacctcgttccagtatatgatgttgagcccctggagaagataactgatgcttacctggaccagtacctgtggtatgaagccgacaagcgccgcctgttcccaccctggattaagcctgcagacacagaaccacctccgctgcttgtttacaagtggtgtcaaggcatcaataacctgcaggacgtgtgggagacgagtgaaggcgagtgcaatgtcatgctggaatcccgctttgagaagatgtatgagaagatcgacttgactctgctcaacaggctgctgcgcctcatcgtggaccacaacatagccgactacatgacagccaagaacaacgtcgtcatcaactataaggacatgaaccatacgaattcatatgggatcatcagaggcctgcagtttgcctcattcatcgtgcagtattatggcctggtgatggatttgcttgtattgggattgcaccgggccagtgagatggctgggccccctcagatgccaaatgactttctcagtttccaggacatagccactgaggctgcccaccccatccgtctcttctgcagatacattgatcgcatccatatttttttcaggttcacagcagatgaggctcgggacctgattcaacgttacctgacagagcaccctgaccccaataatgaaaacatcgttggctataataacaagaagtgctggccccgagatgcccgcatgcgcctcatgaaacatgatgttaacttaggccgggcggtattctgggacatcaagaaccgcttgccacggtcagtgactacagttcagtgggagaacagcttcgtgtctgtgtacagtaaggacaaccccaacctgctgttcaacatgtgtggcttcgagtgccgcatcctgcctaagtgccgcaccagctatgaggagttcacccacaaggacggggtctggaacctgcagaatgaggttactaaggagcgcacagctcagtgtttcctgcgtgtggacgatgagtcaatgcagcgcttccacaaccgcgtgcgtcagattctcatggcctctgggtccaccaccttcaccaagattgtgaataagtggaatacagctctcattggccttatgacatactttcgggaggctgtggtgaacacccaagagctcttggacttactggtgaagtgtgagaacaaaatccagacacgtatcaagattggactcaactccaagatgccaagtcggttccccccggttgtgttctacacccctaaggagttgggtggactcggcatgctctcaatgggccatgtgctcatcccccaatccgacctcaggtggtccaaacagacagatgtaggtatcacacactttcgttcaggaatgagccatgaagaagaccagctcattcccaacttgtaccgctacatacagccatgggagagcgagttcattgattctcagcgggtctgggctgagtacgcactcaagaggcaagaggccattgctcagaacagacgcctgactttagaagacctagaagattcatgggatcgtggcattcctcgaatcaataccctcttccagaaggaccggcacacactggcttatgataagggctggcgtgtcagaactgactttaagcagtatcaggttttgaagcagaatccgttctggtggacacaccagcggcatgatgggaagctctggaacctgaacaactaccgtacagacatgatccaggccctgggcggtgtggaaggcattctggaacacacactctttaagggcacttacttccctacctgggaggggcttttctgggagaaggccagtggctttgaggaatctatgaagtggaagaagctaactaatgctcagcgatcaggactgaaccagattcccaatcgtagattcaccctctggtggtccccgaccattaatcgagccaatgtatatgtaggctttcaggtgcagctagacctgacgggtatcttcatgcacggcaagatccccacgctgaagatctctctcatccagatcttccgagctcacttgtggcagaagatccatgagagcattgttatggacttatgtcaggtgtttgaccaggaacttgatgcactggaaattgagacagtacaaaaggagacaatccatccccgaaagtcatataagatgaactcttcctgtgcagatatcctgctctttgcctcctataagtggaatgtctcccggccctcattgctggctgactccaaggatgtgatggacagcaccaccacccagaaatactggattgacatccagttgcgctggggggactatgattcccacgacattgagcgctacgcccgggccaagttcctggactacaccaccgacaacatgagtatctacccttcgcccacaggtgtactcatcgccattgacctggcctataacttgcacagtgcctatggaaactggttcccaggcagcaagcctctcatacaacaggccatggccaagatcatgaaggcaaaccctgccctgtatgtgttacgtgaacggatccgcaaggggctacagctctattcatctgaacccactgagccttatttgtcttctcagaactatggtgagctcttctccaaccagattatctggtttgtggatgacaccaacgtctacagagtgactattcacaagacctttgaagggaacttgacaaccaagcccatcaacggagccatcttcatcttcaacccacgcacagggcagctgttcctcaagataatccacacgtccgtgtgggcgggacagaagcgtttggggcagttggctaagtggaagacagctgaggaggtggccgccctgatccgatctctgcctgtggaggagcagcccaagcagatcattgtcaccaggaagggcatgctggacccactggagtgcnnttactggcttccccatattgtctcaaggtccggagctccatccttcaggcgtgttccggggaaatccgggatctcttaaccttggcccatggtttttactcttagggtcaga

SEQ ID NO: 262226 - DNA, 1256 bp, Homo sapiens
  misc_feature (15)..(15): n is a, c, g, or t
ggaaattgccccagnccatcgtccttcgccagctagactctgggggaggagataagtaggcaggactatagggagagctgtcaatgtggcgggtgtatcggcgaagtggggacaccattcttcgaggatctcgctgcacccgttccaccagcccatggtgccgagtccgctgcattaatgcagcggactctgacggcaacacagactcgcactgtcaacaagcatggcgatgagatcatcacctccaccaccagcaactatgagacccagactttctcatccaagactgagtggagggtcagggccatctctgctgccaacctgcacctaaggaccaatcacatctatgtttcatctgacgacatcaaggagactggctacacctacatccttcccaagaatgtgcttaagaagttcatctgcatatctgaccttcgggcccaaattgcaggatacctatatggggtgagcccaccagataacccccaggtgaaggagatccgctgcattgtgatggtgccgcagtggggcactcaccagaccgtgcacctgcctggccagctgccccagcatgagtacctcaaggagatggaacccttaggttggatccacactcagcccaatgagtccccgcagttatcaccccaggatgtcaccacccatgccaagatcatggctgacaacccatcttgggatggcgagaagaccattatcatcacatgcagcttcacgccaggctcctgtacactgacggcctacaagctgacccccagtggctacgaatggggccgccagaacacagacaagggcaacaaccccaagggctacctgccttcacactatgagagggtgcagatgctgctgtcggaccgtttccttggcttcttcatggtccctgcccagtcctcgtggaactacaacttcatgggtgttcggcatgaccccaacatgaaatatgagctacagctggcgaaccccaaagagttctaccacgaggtgcacaggccctctcacttcctcaactttgctctcctgcaggagggggaggtttactctgcggatcgggaggacctgtatgcctgaccgtttccctgcctcctgcttcagcctcccgaggccgaagcctcagcccctccagacaggccgctgacattcagcagtttggcctctttccctctgtctgtgcttgtgttgttgacctcctgatggcttgtcatcctgaataaaatataataataaattttgtataaatagga

SEQ ID NO: 262227 - DNA, 1106 bp, Homo sapiens
agtctacacagagctcaaggcgggtgctggaagccagacgtgacggcaacacagactcgcactgtcaacaagcatggcgatgagatcatcacctccaccaccagcaactatgagacccagactttctcatccaagactgagtggagggtcagggccatctctgctgccaacctgcacctaaggaccaatcacatctatgtttcatctgacgacatcaaggagactggctacacctacatccttcccaagaatgtgcttaagaagttcatctgcatatctgaccttcgggcccaaattgcaggatacctatatggggtgagcccaccagataacccccaggtgaaggagatccgctgcattgtgatggtgccgcagtggggcactcaccagaccgtgcacctgcctggccagctgccccagcatgagtacctcaaggagatggaacccttaggttggatccacactcagcccaatgagtccccgcagttatcaccccaggatgtcaccacccatgccaagatcatggctgacaacccatcttgggatggcgagaagaccattatcatcacatgcagcttcacgccaggctcctgtacactgacggcctacaagctgacccccagtggctacgaatggggccgccagaacacagacaagggcaacaaccccaagggctacctgccttcacactatgagagggtgcagatgctgctgtcggaccgtttccttggcttcttcatggtccctgcccagtcctcgtggaactacaacttcatgggtgttcggcatgaccccaacatgaaatatgagctacagctggcgaaccccaaagagttctaccacgaggtgcacaggccctctcacttcctcaactttgctctcctgcaggagggggaggtttactctgcggatcgggaggacctgtatgcctgaccgtttccctgcctcctgcttcagcctcccgaggccgaagcctcagcccctccagacaggccgctgacattcagcagtttggcctctttccctctgtctgtgcttgtgttgttgacctcctgatggcttgtcatcctgaataaaatataataataaattttgtataaatagga

SEQ ID NO: 262228 - DNA, 6549 bp, Homo sapiens
  misc_feature (6491)..(6491): n is a, c, g, or t
  misc_feature (6498)..(6498): n is a, c, g, or t
atcgtacaatgcgcaatcttggcaaatttattcaaaccctttagacttcggtctctcacagtgcgacgccgggagcccatcacacgctgaggtctgtcagaggccccagaaacagcctcggaaatggaggaggcggggctcaccccgaccacacccccttgcgttcaaagcctttccgcctatgggcccgcctcctcggcgcagtgtgcaactctaattggtcgtctcactaatccatctgagcacctcggcgccgactggatcaactgctgaactcgggttgcgcacttcccggcgctgggaacgcggagcggacgcagtctggccgccattgcgctgcggggaaagcggcctcttgtgtgagggcctgtggggtgcgtggcaggcgtttaaggccgggctgcgggaggcgtggtcgggtcgggccgagtgaccgaaggggttaggccgggcggggctggatgcactgtgtggcgggactgcaggccggggtccccggacgcctttctgctgcgcttcttgtgggcccgggcctgtggttagtgaatttttctatcccgccgctccccagattctccggatatggccggagtgtttccttatcgagggccgggtaacccggtgcctggccctctagccccgctaccggactacatgtcggaggagaagctgcaggagaaagctcgaaaatggcagcaattgcaggccaagcgctatgcagaaaagcggaagtttgggtttgtggatgcccagaaggaagacatgcccccagaacatgtcaggaagatcattcgagaccatggagacatgaccaacaggaagttccgccatgacaaaagggtttacttgggtgccctaaagtacatgccccacgcagtcctcaaactcctggagaacatgcctatgccttgggagcagattcgggatgtgcctgtgctgtaccacatcactggagccatttccttcgtcaatgagattccctgggtcattgaacctgtctacatctcccagtgggggtcaatgtggattatgatgcgccgagaaaaaagagataggaggcatttcaagaggatgcgttttcccccttttgatgatgaggagccgcccttggactatgctgacaacatcctagatgttgagccactggaggccattcagctagagctggaccctgaggaggacgcccctgtgttggactggttctatgaccaccagccgttgagggacagcaggaagtatgtaaatggctccacttaccagcgctggcagttcacactacctatgatgtcgactctctaccgcctggctaatcagctcctgacagacttggtggatgacaactacttctacctgtttgatttgaaggccttctttacgtccaaggcactcaatatggccattcctggaggccccaaatttgaacctcttgttcgagacatcaacctacaggatgaagactggaatgaattcaatgatattaacaagattatcatccggcagcctatccgcactgagtacaagattgcttttccttacttgtacaacaatcttccacaccatgtccacctcacctggtaccatactcccaatgttgtattcatcaaaactgaggatcctgacttgccagctttctactttgaccctttgatcaacccaatctcccataggcactcagtcaagagccaggaaccattgccggatgatgatgaggaatttgagctcccggagtttgtggagcccttcctgaaggacacacccctctatacagacaatacagccaatggcattgccctgctctgggccccgcggcccttcaacctacgctctggtcgcacccgtcgggccctggacataccccttgtcaagaactggtatcgggagcattgtcctgccgggcagcctgtgaaagtgagggtctcctaccagaagctgcttaagtactatgtgctgaatgccctgaagcatcggccccctaaggctcaaaagaagaggtatttgttccgctccttcaaagccaccaaattctttcagtccacaaagctggactgggtggaggttgggctccaggtttgccgccagggctacaacatgctcaaccttctcattcaccgcaaaaacctcaactacctgcacctggactacaacttcaacctcaagcctgtgaaaacgctcaccaccaaggaaagaaagaaatctcgttttgggaatgctttccacctgtgtcgggaagttctgcgtttgactaagctggtggtggatagtcacgtgcagtatcggctgggcaatgtggatgccttccagctggcagatggattgcagtatatatttgcccatgttgggcagttgacgggcatgtatcgatacaaatacaagctgatgcgacagattcgcatgtgcaaggacctgaagcatctcatctattatcgtttcaacacgggccctgtagggaagggtcctggctgtggcttctgggctgccggttggcgagtctggctctttttcatgcgtggcattacccctttattagagcgatggcttggcaacctcctggcccggcagtttgaaggtgagtggttttctctgtgtccaacttctcctgttattgcttcaaaagtacctgcccctgtttgagtctgttccctgctcttgtatgagcactcttcctactggattgcctttaggtccagttctgaaatgagtctgacctagtattctatttcttgggcttccttctggggccttgagaggcagtcatgcatttgcaggagtggaaattcctcagaagcatagttgtgaatgtttaaggtagctcgtctttttgcatatgctgggcacagggacgctttgttaatacctaattttattaataaccataatgagtgaggagcatgaaggtagagacccttattgaaagcaaggaatcttccttgtaatccccttgggacactctacttccaggtcgacactcaaagggggtggcaaagacagtaacaaagcagcgagtggagtcacattttgaccttgagctgcgggcagctgtgatgcatgatattctggacatgatgcctgaggggatcaagcagaacaaggcccggacaatcctgcagcacctcagtgaagcctggcgctgctggaaagccaacattccctggaaggtccctgggctgccgacgcccatagagaatatgatccttcgatacgtgaaggccaaggctgactggtggaccaacactgcccactacaaccgagaacggatccgccgaggggccactgtggacaagactgtttgtaaaaagaatctgggccgcctcacccggctctatctgaaggcagaacaggagcggcagcacaactacctgaaggacgggccttacatcacagcggaggaagcagtggcagtatataccaccacagtgcattggttggaaagccgcaggttttcacccatcccattccccccactctcctataagcatgacaccaagttgctcatcttggcattggagcggctcaaggaagcttatagtgtgaagtctcggttgaaccagtctcagagggaggagctaggtctgatcgagcaggcctacgataacccccacgaggcgctgtcccgcatcaagcgtcacctcctcacacagagagccttcaaagaggtgggcattgagttcatggatctgtatagccacctcgttccagtatatgatgttgagcccctggagaagataactgatgcttacctggaccagtacctgtggtatgaagccgacaagcgccgcctgttcccaccctggattaagcctgcagacacagaaccacctccgctgcttgtttacaagtggtgtcaaggcatcaataacctgcaggacgtgtgggagacgagtgaaggcgagtgcaatgtcatgctggaatcccgctttgagaagatgtatgagaagatcgacttgactctgctcaacaggctgctgcgcctcatcgtggaccacaacatagccgactacatgacagccaagaacaacgtcgtcatcaactataaggacatgaaccatacgaattcatatgggatcatcagaggcctgcagtttgcctcattcatcgtgcagtattatggcctggtgatggatttgcttgtattgggattgcaccgggccagtgagatggctgggccccctcagatgccaaatgactttctcagtttccaggacatagccactgaggctgcccaccccatccgtctcttctgcagatacattgatcgcatccatatttttttcaggttcacagcagatgaggctcgggacctgattcaacgttacctgacagagcaccctgaccccaataatgaaaacatcgttggctataataacaagaagtgctggccccgagatgcccgcatgcgcctcatgaaacatgatgttaacttaggccgggcggtattctgggacatcaagaaccgcttgccacggtcagtgactacagttcagtgggagaacagcttcgtgtctgtgtacagtaaggacaaccccaacctgctgttcaacatgtgtggcttcgagtgccgcatcctgcctaagtgccgcaccagctatgaggagttcacccacaaggacggggtctggaacctgcagaatgaggttactaaggagcgcacagctcagtgtttcctgcgtgtggacgatgagtcaatgcagcgcttccacaaccgcgtgcgtcagattctcatggcctctgggtccaccaccttcaccaagattgtgaataagtggaatacagctctcattggccttatgacatactttcgggaggctgtggtgaacacccaagagctcttggacttactggtgaagtgtgagaacaaaatccagacacgtatcaagattggactcaactccaagatgccaagtcggttccccccggttgtgttctacacccctaaggagttgggtggactcggcatgctctcaatgggccatgtgctcatcccccaatccgacctcaggtggtccaaacagacagatgtaggtatcacacactttcgttcaggaatgagccatgaagaagaccagctcattcccaacttgtaccgctacatacagccatgggagagcgagttcattgattctcagcgggtctgggctgagtacgcactcaagaggcaagaggccattgctcagaacagacgcctgactttagaagacctagaagattcatgggatcgtggcattcctcgaatcaataccctcttccagaaggaccggcacacactggcttatgataagggctggcgtgtcagaactgactttaagcagtatcaggttttgaagcagaatccgttctggtggacacaccagcggcatgatgggaagctctggaacctgaacaactaccgtacagacatgatccaggccctgggcggtgtggaaggcattctggaacacacactctttaagggcacttacttccctacctgggaggggcttttctgggagaaggccagtggctttgaggaatctatgaagtggaagaagctaactaatgctcagcgatcaggactgaaccagattcccaatcgtagattcaccctctggtggtccccgaccattaatcgagccaatgtatatgtaggctttcaggtgcagctagacctgacgggtatcttcatgcacggcaagatccccacgctgaagatctctctcatccagatcttccgagctcacttgtggcagaagatccatgagagcattgttatggacttatgtcaggtgtttgaccaggaacttgatgcactggaaattgagacagtacaaaaggagacaatccatccccgaaagtcatataagatgaactcttcctgtgcagatatcctgctctttgcctcctataagtggaatgtctcccggccctcattgctggctgactccaaggatgtgatggacagcaccaccacccagaaatactggattgacatccagttgcgctggggggactatgattcccacgacattgagcgctacgcccgggccaagttcctggactacaccaccgacaacatgagtatctacccttcgcccacaggtgtactcatcgccattgacctggcctataacttgcacagtgcctatggaaactggttcccaggcagcaagcctctcatacaacaggccatggccaagatcatgaaggcaaaccctgccctgtatgtgttacgtgaacggatccgcaaggggctacagctctattcatctgaacccactgagccttatttgtcttctcagaactatggtgagctcttctccaaccagattatctggtttgtggatgacaccaacgtctacagagtgactattcacaagacctttgaagggaacttgacaaccaagcccatcaacggagccatcttcatcttcaacccacgcacagggcagctgttcctcaagataatccacacgtccgtgtgggcgggacagaagcgtttggggcaaattgggcttaantgggaanacaacttaaggaaggttgggcccgcccctggaacccgaacttttggcctgg

SEQ ID NO: 262229 - DNA, 979 bp, Homo sapiens
tgagaggccggggttaatcggacgaggccatctctgctgccaacctgcacctaaggaccaatcacatctatgtttcatctgacgacatcaaggagactggctacacctacatccttcccaagaatgtgcttaagaagttcatctgcatatctgaccttcgggcccaaattgcaggatacctatatggggtgagcccaccagataacccccaggtgaaggagatccgctgcattgtgatggtgccgcagtggggcactcaccagaccgtgcacctgcctggccagctgccccagcatgagtacctcaaggagatggaacccttaggttggatccacactcagcccaatgagtccccgcagttatcaccccaggatgtcaccacccatgccaagatcatggctgacaacccatcttgggatggcgagaagaccattatcatcacatgcagcttcacgccaggctcctgtacactgacggcctacaagctgacccccagtggctacgaatggggccgccagaacacagacaagggcaacaaccccaagggctacctgccttcacactatgagagggtgcagatgctgctgtcggaccgtttccttggcttcttcatggtccctgcccagtcctcgtggaactacaacttcatgggtgttcggcatgaccccaacatgaaatatgagctacagctggcgaaccccaaagagttctaccacgaggtgcacaggccctctcacttcctcaactttgctctcctgcaggagggggaggtttactctgcggatcgggaggacctgtatgcctgaccgtttccctgcctcctgcttcagcctcccgaggccgaagcctcagcccctccagacaggccgctgacattcagcagtttggcctctttccctctgtctgtgcttgtgttgttgacctcctgatggcttgtcatcctgaataaaatataataataaattttgtataaatagga

SEQ ID NO: 262230 - DNA, 982 bp, Homo sapiens
ggacgcgtgggtcgacccacgcgtcgacggccatctctgctgccaacctgcacctaaggaccaatcacatctatgtttcatctgacgacatcaaggagactggctacacctacatccttcccaagaatgtgcttaagaagttcatctgcatatctgaccttcgggcccaaattgcaggatacctatatggggtgagcccaccagataacccccaggtgaaggagatccgctgcattgtgatggtgccgcagtggggcactcaccagaccgtgcacctgcctggccagctgccccagcatgagtacctcaaggagatggaacccttaggttggatccacactcagcccaatgagtccccgcagttatcaccccaggatgtcaccacccatgccaagatcatggctgacaacccatcttgggatggcgagaagaccattatcatcacatgcagcttcacgccaggctcctgtacactgacggcctacaagctgacccccagtggctacgaatggggccgccagaacacagacaagggcaacaaccccaagggctacctgccttcacactatgagagggtgcagatgctgctgtcggaccgtttccttggcttcttcatggtccctgcccagtcctcgtggaactacaacttcatgggtgttcggcatgaccccaacatgaaatatgagctacagctggcgaaccccaaagagttctaccacgaggtgcacaggccctctcacttcctcaactttgctctcctgcaggagggggaggtttactctgcggatcgggaggacctgtatgcctgaccgtttccctgcctcctgcttcagcctcccgaggccgaagcctcagcccctccagacaggccgctgacattcagcagtttggcctctttccctctgtctgtgcttgtgttgttgacctcctgatggcttgtcatcctgaataaaatataataataaattttgtataaatagga

SEQ ID NO: 262231 - DNA, 923 bp, Homo sapiens
ggacgcgtgggtcgacccacgcgtcgacacatcaaggagactggctacacctacatccttcccaagaatgtgcttaagaagttcatctgcatatctgaccttcgggcccaaattgcaggatacctatatggggtgagcccaccagataacccccaggtgaaggagatccgctgcattgtgatggtgccgcagtggggcactcaccagaccgtgcacctgcctggccagctgccccagcatgagtacctcaaggagatggaacccttaggttggatccacactcagcccaatgagtccccgcagttatcaccccaggatgtcaccacccatgccaagatcatggctgacaacccatcttgggatggcgagaagaccattatcatcacatgcagcttcacgccaggctcctgtacactgacggcctacaagctgacccccagtggctacgaatggggccgccagaacacagacaagggcaacaaccccaagggctacctgccttcacactatgagagggtgcagatgctgctgtcggaccgtttccttggcttcttcatggtccctgcccagtcctcgtggaactacaacttcatgggtgttcggcatgaccccaacatgaaatatgagctacagctggcgaaccccaaagagttctaccacgaggtgcacaggccctctcacttcctcaactttgctctcctgcaggagggggaggtttactctgcggatcgggaggacctgtatgcctgaccgtttccctgcctcctgcttcagcctcccgaggccgaagcctcagcccctccagacaggccgctgacattcagcagtttggcctctttccctctgtctgtgcttgtgttgttgacctcctgatggcttgtcatcctgaataaaatataataataaattttgtataaatagga

SEQ ID NO: 262232 - DNA, 914 bp, Homo sapiens
tatactctgacgacctttactgagacagggctactaccgtactatcttgctcacgaatagtgccttcgaattacatctagcattcataccttcgggtcccaaattgcaggatacctatatggggtgagcccaccagataacccccaggtgaaggagatccgctgcattgtgatggtgccgcagtggggcactcaccagaccgtgcacctgcctggccagctgccccagcatgagtacctcaaggagatggaacccttaggttggatccacactcagcccaatgagtccccgcagttatcaccccaggatgtcaccacccatgccaagatcatggctgacaacccatcttgggatggcgagaagaccattatcatcacatgcagcttcacgccaggctcctgtacactgacggcctacaagctgacccccagtggctacgaatggggccgccagaacacagacaagggcaacaaccccaagggctacctgccttcacactatgagagggtgcagatgctgctgtcggaccgtttccttggcttcttcatggtccctgcccagtcctcgtggaactacaacttcatgggtgttcggcatgaccccaacatgaaatatgagctacagctggcgaaccccaaagagttctaccacgaggtgcacaggccctctcacttcctcaactttgctctcctgcaggagggggaggtttactctgcggatcgggaggacctgtatgcctgaccgtttccctgcctcctgcttcagcctcccgaggccgaagcctcagcccctccagacaggccgctgacattcagcagtttggcctctttccctctgtctgtgcttgtgttgttgacctcctgatggcttgtcatcctgaataaaatataataataaattttgtataaatagga

SEQ ID NO: 262233 - DNA, 857 bp, Homo sapiens
cctagttttagaagtttcaatagcatatctgaccttcgggcccaaattgcaggatacctatatggggtgagcccaccagataacccccaggtgaaggagatccgctgcattgtgatggtgccgcagtggggcactcaccagaccgtgcacctgcctggccagctgccccagcatgagtacctcaaggagatggaacccttaggttggatccacactcagcccaatgagtccccgcagttatcaccccaggatgtcaccacccatgccaagatcatggctgacaacccatcttgggatggcgagaagaccattatcatcacatgcagcttcacgccaggctcctgtacactgacggcctacaagctgacccccagtggctacgaatggggccgccagaacacagacaagggcaacaaccccaagggctacctgccttcacactatgagagggtgcagatgctgctgtcggaccgtttccttggcttcttcatggtccctgcccagtcctcgtggaactacaacttcatgggtgttcggcatgaccccaacatgaaatatgagctacagctggcgaaccccaaagagttctaccacgaggtgcacaggccctctcacttcctcaactttgctctcctgcaggagggggaggtttactctgcggatcgggaggacctgtatgcctgaccgtttccctgcctcctgcttcagcctcccgaggccgaagcctcagcccctccagacaggccgctgacattcagcagtttggcctctttccctctgtctgtgcttgtgttgttgacctcctgatggcttgtcatcctgaataaaatataataataaattttgtataaatagga

SEQ ID NO: 262234 - DNA, 5977 bp, Homo sapiens
  misc_feature (5837)..(5837): n is a, c, g, or t
atcgtacaatgcgcaatcttggcaaatttattcaaaccctttagacttcggtctctcacagtgcgacgccgggagcccatcacacgctgaggtctgtcagaggccccagaaacagcctcggaaatggaggaggcggggctcaccccgaccacacccccttgcgttcaaagcctttccgcctatgggcccgcctcctcggcgcagtgtgcaactctaattggtcgtctcactaatccatctgagcacctcggcgccgactggatcaactgctgaactcgggttgcgcacttcccggcgctgggaacgcggagcggacgcagtctggccgccattgcgctgcggggaaagcggcctcttgtgtgagggcctgtggggtgcgtggcaggcgtttaaggccgggctgcgggaggcgtggtcgggtcgggccgagtgaccgaaggggttaggccgggcggggctggatgcactgtgtggcgggactgcaggccggggtccccggacgcctttctgctgcgcttcttgtgggcccgggcctgtggttagtgaatttttctatcccgccgctccccagattctccggatatggccggagtgtttccttatcgagggccgggtaacccggtgcctggccctctagccccgctaccggactacatgtcggaggagaagctgcaggagaaagctcgaaaatggcagcaattgcaggccaagcgctatgcagaaaagcggaagtttgggtttgtggatgcccagaaggaagacatgcccccagaacatgtcaggaagatcattcgagaccatggagacatgaccaacaggaagttccgccatgacaaaagggtttacttgggtgccctaaagtacatgccccacgcagtcctcaaactcctggagaacatgcctatgccttgggagcagattcgggatgtgcctgtgctgtaccacatcactggagccatttccttcgtcaatgagattccctgggtcattgaacctgtctacatctcccagtgggggtcaatgtggattatgatgcgccgagaaaaaagagataggaggcatttcaagaggatgcgttttcccccttttgatgatgaggagccgcccttggactatgctgacaacatcctagatgttgagccactggaggccattcagctagagctggaccctgaggaggacgcccctgtgttggactggttctatgaccaccagccgttgagggacagcaggaagtatgtaaatggctccacttaccagcgctggcagttcacactacctatgatgtcgactctctaccgcctggctaatcagctcctgacagacttggtggatgacaactacttctacctgtttgatttgaaggccttctttacgtccaaggcactcaatatggccattcctggaggccccaaatttgaacctcttgttcgagacatcaacctacaggatgaagactggaatgaattcaatgatattaacaagattatcatccggcagcctatccgcactgagtacaagattgcttttccttacttgtacaacaatcttccacaccatgtccacctcacctggtaccatactcccaatgttgtattcatcaaaactgaggatcctgacttgccagctttctactttgaccctttgatcaacccaatctcccataggcactcagtcaagagccaggaaccattgccggatgatgatgaggaatttgagctcccggagtttgtggagcccttcctgaaggacacacccctctatacagacaatacagccaatggcattgccctgctctgggccccgcggcccttcaacctacgctctggtcgcacccgtcgggccctggacataccccttgtcaagaactggtatcgggagcattgtcctgccgggcagcctgtgaaagtgagggtctcctaccagaagctgcttaagtactatgtgctgaatgccctgaagcatcggccccctaaggctcaaaagaagaggtatttgttccgctccttcaaagccaccaaattctttcagtccacaaagctggactgggtggaggttgggctccaggtttgccgccagggctacaacatgctcaaccttctcattcaccgcaaaaacctcaactacctgcacctggactacaacttcaacctcaagcctgtgaaaacgctcaccaccaaggaaagaaagaaatctcgttttgggaatgctttccacctgtgtcgggaagttctgcgtttgactaagctggtggtggatagtcacgtgcagtatcggctgggcaatgtggatgccttccagctggcagatggattgcagtatatatttgcccatgttgggcagttgacgggcatgtatcgatacaaatacaagctgatgcgacagattcgcatgtgcaaggacctgaagcatctcatctattatcgtttcaacacgggccctgtagggaagggtcctggctgtggcttctgggctgccggttggcgagtctggctctttttcatgcgtggcattacccctttattagagcgatggcttggcaacctcctggcccggcagtttgaaggtgagtggttttctctgtgtccaacttctcctgttattgcttcaaaagtacctgcccctgtttgagtctgttccctgctcttgtatgagcactcttcctactggattgcctttaggtccagttctgaaatgagtctgacctagtattctatttcttgggcttccttctggggccttgagaggcagtcatgcatttgcaggagtggaaattcctcagaagcatagttgtgaatgtttaaggtagctcgtctttttgcatatgctgggcacagggacgctttgttaatacctaattttattaataaccataatgagtgaggagcatgaaggtagagacccttattgaaagcaaggaatcttccttgtaatccccttgggacactctacttccaggtcgacactcaaagggggtggcaaagacagtaacaaagcagcgagtggagtcacattttgaccttgagctgcgggcagctgtgatgcatgatattctggacatgatgcctgaggggatcaagcagaacaaggcccggacaatcctgcagcacctcagtgaagcctggcgctgctggaaagccaacattccctggaaggtccctgggctgccgacgcccatagagaatatgatccttcgatacgtgaaggccaaggctgactggtggaccaacactgcccactacaaccgagaacggatccgccgaggggccactgtggacaagactgtttgtaaaaagaatctgggccgcctcacccggctctatctgaaggcagaacaggagcggcagcacaactacctgaaggacgggccttacatcacagcggaggaagcagtggcagtatataccaccacagtgcattggttggaaagccgcaggttttcacccatcccattccccccactctcctataagcatgacaccaagttgctcatcttggcattggagcggctcaaggaagcttatagtgtgaagtctcggttgaaccagtctcagagggaggagctaggtctgatcgagcaggcctacgataacccccacgaggcgctgtcccgcatcaagcgtcacctcctcacacagagagccttcaaagaggtgggcattgagttcatggatctgtatagccacctcgttccagtatatgatgttgagcccctggagaagataactgatgcttacctggaccagtacctgtggtatgaagccgacaagcgccgcctgttcccaccctggattaagcctgcagacacagaaccacctccgctgcttgtttacaagtggtgtcaaggcatcaataacctgcaggacgtgtgggagacgagtgaaggcgagtgcaatgtcatgctggaatcccgctttgagaagatgtatgagaagatcgacttgactctgctcaacaggctgctgcgcctcatcgtggaccacaacatagccgactacatgacagccaagaacaacgtcgtcatcaactataaggacatgaaccatacgaattcatatgggatcatcagaggcctgcagtttgcctcattcatcgtgcagtattatggcctggtgatggatttgcttgtattgggattgcaccgggccagtgagatggctgggccccctcagatgccaaatgactttctcagtttccaggacatagccactgaggctgcccaccccatccgtctcttctgcagatacattgatcgcatccatatttttttcaggttcacagcagatgaggctcgggacctgattcaacgttacctgacagagcaccctgaccccaataatgaaaacatcgttggctataataacaagaagtgctggccccgagatgcccgcatgcgcctcatgaaacatgatgttaacttaggccgggcggtattctgggacatcaagaaccgcttgccacggtcagtgactacagttcagtgggagaacagcttcgtgtctgtgtacagtaaggacaaccccaacctgctgttcaacatgtgtggcttcgagtgccgcatcctgcctaagtgccgcaccagctatgaggagttcacccacaaggacggggtctggaacctgcagaatgaggttactaaggagcgcacagctcagtgtttcctgcgtgtggacgatgagtcaatgcagcgcttccacaaccgcgtgcgtcagattctcatggcctctgggtccaccaccttcaccaagattgtgaataagtggaatacagctctcattggccttatgacatactttcgggaggctgtggtgaacacccaagagctcttggacttactggtgaagtgtgagaacaaaatccagacacgtatcaagattggactcaactccaagatgccaagtcggttccccccggttgtgttctacacccctaaggagttgggtggactcggcatgctctcaatgggccatgtgctcatcccccaatccgacctcaggtggtccaaacagacagatgtaggtatcacacactttcgttcaggaatgagccatgaagaagaccagctcattcccaacttgtaccgctacatacagccatgggagagcgagttcattgattctcagcgggtctgggctgagtacgcactcaagaggcaagaggccattgctcagaacagacgcctgactttagaagacctagaagattcatgggatcgtggcattcctcgaatcaataccctcttccagaaggaccggcacacactggcttatgataagggctggcgtgtcagaactgactttaagcagtatcaggttttgaagcagaatccgttctggtggacacaccagcggcatgatgggaagctctggaacctgaacaactaccgtacagacatgatccaggccctgggcggtgtggaaggcattctggaacacacactctttaagggcacttacttccctacctgggaggggcttttctggtgaggattctcctctcttagagggacctgtcacaaccctttgagctcatctcttgtatgcctctgtgatttcctgtggtgtttcccagacagccacctccaggaggttagcagtgtgctgggaaatggcaggatatcacctcacctgcttctcttgctccccagggagaaggccagtggctttgaggaatctatgaagtggaagaagctaactaatgctcagcgatcaggactgaaccagattcccaatcgtagattcaccctctggtggtccccgaccattaatcgagccaatgtgagtgtgattgacactggagaggggaagctaaagacagttgctgcttcttgccttggnttatgtcgtgagcgcccgagtctcttgatctctaatgtcacattgtcgttttcctggcaggtatatgtaggctttcaggtgcagctagacctgacgggtatctaataaacgtatccgcgctgctgtactccggggacctc

SEQ ID NO: 262235 - DNA, 5219 bp, Homo sapiens
atcgtacaatgcgcaatcttggcaaatttattcaaaccctttagacttcggtctctcacagtgcgacgccgggagcccatcacacgctgaggtctgtcagaggccccagaaacagcctcggaaatggaggaggcggggctcaccccgaccacacccccttgcgttcaaagcctttccgcctatgggcccgcctcctcggcgcagtgtgcaactctaattggtcgtctcactaatccatctgagcacctcggcgccgactggatcaactgctgaactcgggttgcgcacttcccggcgctgggaacgcggagcggacgcagtctggccgccattgcgctgcggggaaagcggcctcttgtgtgagggcctgtggggtgcgtggcaggcgtttaaggccgggctgcgggaggcgtggtcgggtcgggccgagtgaccgaaggggttaggccgggcggggctggatgcactgtgtggcgggactgcaggccggggtccccggacgcctttctgctgcgcttcttgtgggcccgggcctgtggttagtgaatttttctatcccgccgctccccagattctccggatatggccggagtgtttccttatcgagggccgggtaacccggtgcctggccctctagccccgctaccggactacatgtcggaggagaagctgcaggagaaagctcgaaaatggcagcaattgcaggccaagcgctatgcagaaaagcggaagtttgggtttgtggatgcccagaaggaagacatgcccccagaacatgtcaggaagatcattcgagaccatggagacatgaccaacaggaagttccgccatgacaaaagggtttacttgggtgccctaaagtacatgccccacgcagtcctcaaactcctggagaacatgcctatgccttgggagcagattcgggatgtgcctgtgctgtaccacatcactggagccatttccttcgtcaatgagattccctgggtcattgaacctgtctacatctcccagtgggggtcaatgtggattatgatgcgccgagaaaaaagagataggaggcatttcaagaggatgcgttttcccccttttgatgatgaggagccgcccttggactatgctgacaacatcctagatgttgagccactggaggccattcagctagagctggaccctgaggaggacgcccctgtgttggactggttctatgaccaccagccgttgagggacagcaggaagtatgtaaatggctccacttaccagcgctggcagttcacactacctatgatgtcgactctctaccgcctggctaatcagctcctgacagacttggtggatgacaactacttctacctgtttgatttgaaggccttctttacgtccaaggcactcaatatggccattcctggaggccccaaatttgaacctcttgttcgagacatcaacctacaggatgaagactggaatgaattcaatgatattaacaagattatcatccggcagcctatccgcactgagtacaagattgcttttccttacttgtacaacaatcttccacaccatgtccacctcacctggtaccatactcccaatgttgtattcatcaaaactgaggatcctgacttgccagctttctactttgaccctttgatcaacccaatctcccataggcactcagtcaagagccaggaaccattgccggatgatgatgaggaatttgagctcccggagtttgtggagcccttcctgaaggacacacccctctatacagacaatacagccaatggcattgccctgctctgggccccgcggcccttcaacctacgctctggtcgcacccgtcgggccctggacataccccttgtcaagaactggtatcgggagcattgtcctgccgggcagcctgtgaaagtgagggtctcctaccagaagctgcttaagtactatgtgctgaatgccctgaagcatcggccccctaaggctcaaaagaagaggtatttgttccgctccttcaaagccaccaaattctttcagtccacaaagctggactgggtggaggttgggctccaggtttgccgccagggctacaacatgctcaaccttctcattcaccgcaaaaacctcaactacctgcacctggactacaacttcaacctcaagcctgtgaaaacgctcaccaccaaggaaagaaagaaatctcgttttgggaatgctttccacctgtgtcgggaagttctgcgtttgactaagctggtggtggatagtcacgtgcagtatcggctgggcaatgtggatgccttccagctggcagatggattgcagtatatatttgcccatgttgggcagttgacgggcatgtatcgatacaaatacaagctgatgcgacagattcgcatgtgcaaggacctgaagcatctcatctattatcgtttcaacacgggccctgtagggaagggtcctggctgtggcttctgggctgccggttggcgagtctggctctttttcatgcgtggcattacccctttattagagcgatggcttggcaacctcctggcccggcagtttgaaggtgagtggttttctctgtgtccaacttctcctgttattgcttcaaaagtacctgcccctgtttgagtctgttccctgctcttgtatgagcactcttcctactggattgcctttaggtccagttctgaaatgagtctgacctagtattctatttcttgggcttccttctggggccttgagaggcagtcatgcatttgcaggagtggaaattcctcagaagcatagttgtgaatgtttaaggtagctcgtctttttgcatatgctgggcacagggacgctttgttaatacctaattttattaataaccataatgagtgaggagcatgaaggtagagacccttattgaaagcaaggaatcttccttgtaatccccttgggacactctacttccaggtcgacactcaaagggggtggcaaagacagtaacaaagcagcgagtggagtcacattttgaccttgagctgcgggcagctgtgatgcatgatattctggacatgatgcctgaggggatcaagcagaacaaggcccggacaatcctgcagcacctcagtgaagcctggcgctgctggaaagccaacattccctggaaggtccctgggctgccgacgcccatagagaatatgatccttcgatacgtgaaggccaaggctgactggtggaccaacactgcccactacaaccgagaacggatccgccgaggggccactgtggacaagactgtttgtaaaaagaatctgggccgcctcacccggctctatctgaaggcagaacaggagcggcagcacaactacctgaaggacgggccttacatcacagcggaggaagcagtggcagtatataccaccacagtgcattggttggaaagccgcaggttttcacccatcccattccccccactctcctataagcatgacaccaagttgctcatcttggcattggagcggctcaaggaagcttatagtgtgaagtctcggttgaaccagtctcagagggaggagctaggtctgatcgagcaggcctacgataacccccacgaggcgctgtcccgcatcaagcgtcacctcctcacacagagagccttcaaagaggtgggcattgagttcatggatctgtatagccacctcgttccagtatatgatgttgagcccctggagaagataactgatgcttacctggaccagtacctgtggtatgaagccgacaagcgccgcctgttcccaccctggattaagcctgcagacacagaaccacctccgctgcttgtttacaagtggtgtcaaggcatcaataacctgcaggacgtgtgggagacgagtgaaggcgagtgcaatgtcatgctggaatcccgctttgagaagatgtatgagaagatcgacttgactctgctcaacaggctgctgcgcctcatcgtggaccacaacatagccgactacatgacagccaagaacaacgtcgtcatcaactataaggacatgaaccatacgaattcatatgggatcatcagaggcctgcagtttgcctcattcatcgtgcagtattatggcctggtgatggatttgcttgtattgggattgcaccgggccagtgagatggctgggccccctcagatgccaaatgactttctcagtttccaggacatagccactgaggctgcccaccccatccgtctcttctgcagatacattgatcgcatccatatttttttcaggttcacagcagatgaggctcgggacctgattcaacgttacctgacagagcaccctgaccccaataatgaaaacatcgttggctataataacaagaagtgctggccccgagatgcccgcatgcgcctcatgaaacatgatgttaacttaggccgggcggtattctgggacatcaagaaccgcttgccacggtcagtgactacagttcagtgggagaacagcttcgtgtctgtgtacagtaaggacaaccccaacctgctgttcaacatgtgtggcttcgagtgccgcatcctgcctaagtgccgcaccagctatgaggagttcacccacaaggacggggtctggaacctgcagaatgaggttactaaggagcgcacagctcagtgtttcctgcgtgtggacgatgagtcaatgcagcgcttccacaaccgcgtgcgtcagattctcatggcctctgggtccaccaccttcaccaagattgtgaataagtggaatacagctctcattggccttatgacatactttcgggaggctgtggtgaacacccaagagctcttggacttactggtgaagtgtgagaacaaaatccagacacgtatcaagattggactcaactccaagatgccaagtcggttccccccggttgtgttctacacccctaaggagttgggtggactcggcatgctctcaatgggccatgtgctcatcccccaatccgacctcaggtggtccaaacagacagatgtaggtatcacacactttcgttcaggaatgagccatgaagaagaccagctcattcccaacttgtaccgctacatacagccatgggagagcgagttcattgattctcagcgggtctgggctgagtacgcactcaagaggcaagaggccattgctcagaacagacgtcctgactgtcagacatccgtcgaatacgcatcctctaag

SEQ ID NO: 262236 - DNA, 4957 bp, Homo sapiens
atcgtacaatgcgcaatcttggcaaatttattcaaaccctttagacttcggtctctcacagtgcgacgccgggagcccatcacacgctgaggtctgtcagaggccccagaaacagcctcggaaatggaggaggcggggctcaccccgaccacacccccttgcgttcaaagcctttccgcctatgggcccgcctcctcggcgcagtgtgcaactctaattggtcgtctcactaatccatctgagcacctcggcgccgactggatcaactgctgaactcgggttgcgcacttcccggcgctgggaacgcggagcggacgcagtctggccgccattgcgctgcggggaaagcggcctcttgtgtgagggcctgtggggtgcgtggcaggcgtttaaggccgggctgcgggaggcgtggtcgggtcgggccgagtgaccgaaggggttaggccgggcggggctggatgcactgtgtggcgggactgcaggccggggtccccggacgcctttctgctgcgcttcttgtgggcccgggcctgtggttagtgaatttttctatcccgccgctccccagattctccggatatggccggagtgtttccttatcgagggccgggtaacccggtgcctggccctctagccccgctaccggactacatgtcggaggagaagctgcaggagaaagctcgaaaatggcagcaattgcaggccaagcgctatgcagaaaagcggaagtttgggtttgtggatgcccagaaggaagacatgcccccagaacatgtcaggaagatcattcgagaccatggagacatgaccaacaggaagttccgccatgacaaaagggtttacttgggtgccctaaagtacatgccccacgcagtcctcaaactcctggagaacatgcctatgccttgggagcagattcgggatgtgcctgtgctgtaccacatcactggagccatttccttcgtcaatgagattccctgggtcattgaacctgtctacatctcccagtgggggtcaatgtggattatgatgcgccgagaaaaaagagataggaggcatttcaagaggatgcgttttcccccttttgatgatgaggagccgcccttggactatgctgacaacatcctagatgttgagccactggaggccattcagctagagctggaccctgaggaggacgcccctgtgttggactggttctatgaccaccagccgttgagggacagcaggaagtatgtaaatggctccacttaccagcgctggcagttcacactacctatgatgtcgactctctaccgcctggctaatcagctcctgacagacttggtggatgacaactacttctacctgtttgatttgaaggccttctttacgtccaaggcactcaatatggccattcctggaggccccaaatttgaacctcttgttcgagacatcaacctacaggatgaagactggaatgaattcaatgatattaacaagattatcatccggcagcctatccgcactgagtacaagattgcttttccttacttgtacaacaatcttccacaccatgtccacctcacctggtaccatactcccaatgttgtattcatcaaaactgaggatcctgacttgccagctttctactttgaccctttgatcaacccaatctcccataggcactcagtcaagagccaggaaccattgccggatgatgatgaggaatttgagctcccggagtttgtggagcccttcctgaaggacacacccctctatacagacaatacagccaatggcattgccctgctctgggccccgcggcccttcaacctacgctctggtcgcacccgtcgggccctggacataccccttgtcaagaactggtatcgggagcattgtcctgccgggcagcctgtgaaagtgagggtctcctaccagaagctgcttaagtactatgtgctgaatgccctgaagcatcggccccctaaggctcaaaagaagaggtatttgttccgctccttcaaagccaccaaattctttcagtccacaaagctggactgggtggaggttgggctccaggtttgccgccagggctacaacatgctcaaccttctcattcaccgcaaaaacctcaactacctgcacctggactacaacttcaacctcaagcctgtgaaaacgctcaccaccaaggaaagaaagaaatctcgttttgggaatgctttccacctgtgtcgggaagttctgcgtttgactaagctggtggtggatagtcacgtgcagtatcggctgggcaatgtggatgccttccagctggcagatggattgcagtatatatttgcccatgttgggcagttgacgggcatgtatcgatacaaatacaagctgatgcgacagattcgcatgtgcaaggacctgaagcatctcatctattatcgtttcaacacgggccctgtagggaagggtcctggctgtggcttctgggctgccggttggcgagtctggctctttttcatgcgtggcattacccctttattagagcgatggcttggcaacctcctggcccggcagtttgaaggtgagtggttttctctgtgtccaacttctcctgttattgcttcaaaagtacctgcccctgtttgagtctgttccctgctcttgtatgagcactcttcctactggattgcctttaggtccagttctgaaatgagtctgacctagtattctatttcttgggcttccttctggggccttgagaggcagtcatgcatttgcaggagtggaaattcctcagaagcatagttgtgaatgtttaaggtagctcgtctttttgcatatgctgggcacagggacgctttgttaatacctaattttattaataaccataatgagtgaggagcatgaaggtagagacccttattgaaagcaaggaatcttccttgtaatccccttgggacactctacttccaggtcgacactcaaagggggtggcaaagacagtaacaaagcagcgagtggagtcacattttgaccttgagctgcgggcagctgtgatgcatgatattctggacatgatgcctgaggggatcaagcagaacaaggcccggacaatcctgcagcacctcagtgaagcctggcgctgctggaaagccaacattccctggaaggtccctgggctgccgacgcccatagagaatatgatccttcgatacgtgaaggccaaggctgactggtggaccaacactgcccactacaaccgagaacggatccgccgaggggccactgtggacaagactgtttgtaaaaagaatctgggccgcctcacccggctctatctgaaggcagaacaggagcggcagcacaactacctgaaggacgggccttacatcacagcggaggaagcagtggcagtatataccaccacagtgcattggttggaaagccgcaggttttcacccatcccattccccccactctcctataagcatgacaccaagttgctcatcttggcattggagcggctcaaggaagcttatagtgtgaagtctcggttgaaccagtctcagagggaggagctaggtctgatcgagcaggcctacgataacccccacgaggcgctgtcccgcatcaagcgtcacctcctcacacagagagccttcaaagaggtgggcattgagttcatggatctgtatagccacctcgttccagtatatgatgttgagcccctggagaagataactgatgcttacctggaccagtacctgtggtatgaagccgacaagcgccgcctgttcccaccctggattaagcctgcagacacagaaccacctccgctgcttgtttacaagtggtgtcaaggcatcaataacctgcaggacgtgtgggagacgagtgaaggcgagtgcaatgtcatgctggaatcccgctttgagaagatgtatgagaagatcgacttgactctgctcaacaggctgctgcgcctcatcgtggaccacaacatagccgactacatgacagccaagaacaacgtcgtcatcaactataaggacatgaaccatacgaattcatatgggatcatcagaggcctgcagtttgcctcattcatcgtgcagtattatggcctggtgatggatttgcttgtattgggattgcaccgggccagtgagatggctgggccccctcagatgccaaatgactttctcagtttccaggacatagccactgaggctgcccaccccatccgtctcttctgcagatacattgatcgcatccatatttttttcaggttcacagcagatgaggctcgggacctgattcaacgttacctgacagagcaccctgaccccaataatgaaaacatcgttggctataataacaagaagtgctggccccgagatgcccgcatgcgcctcatgaaacatgatgttaacttaggccgggcggtattctgggacatcaagaaccgcttgccacggtcagtgactacagttcagtgggagaacagcttcgtgtctgtgtacagtaaggacaaccccaacctgctgttcaacatgtgtggcttcgagtgccgcatcctgcctaagtgccgcaccagctatgaggagttcacccacaaggacggggtctggaacctgcagaatgaggttactaaggagcgcacagctcagtgtttcctgcgtgtggacgatgagtcaatgcagcgcttccacaaccgcgtgcgtcagattctcatggcctctgggtccaccaccttcaccaaggtacagggccgtcatgcccagcttccctcttgtcctctgctgtcctctgctcatttcacacccctttcacttcgtcccctgctggctgcttccttctcttctttgcttagtgtgccagtttccatgctctgtgccatagtggcttatagtatgtcaggtcacttcatcgttattttctgagcgttccttgtagaaattgtgtagcctcc

SEQ ID NO: 262237 - DNA, 5116 bp, Homo sapiens
atcgtacaatgcgcaatcttggcaaatttattcaaaccctttagacttcggtctctcacagtgcgacgccgggagcccatcacacgctgaggtctgtcagaggccccagaaacagcctcggaaatggaggaggcggggctcaccccgaccacacccccttgcgttcaaagcctttccgcctatgggcccgcctcctcggcgcagtgtgcaactctaattggtcgtctcactaatccatctgagcacctcggcgccgactggatcaactgctgaactcgggttgcgcacttcccggcgctgggaacgcggagcggacgcagtctggccgccattgcgctgcggggaaagcggcctcttgtgtgagggcctgtggggtgcgtggcaggcgtttaaggccgggctgcgggaggcgtggtcgggtcgggccgagtgaccgaaggggttaggccgggcggggctggatgcactgtgtggcgggactgcaggccggggtccccggacgcctttctgctgcgcttcttgtgggcccgggcctgtggttagtgaatttttctatcccgccgctccccagattctccggatatggccggagtgtttccttatcgagggccgggtaacccggtgcctggccctctagccccgctaccggactacatgtcggaggagaagctgcaggagaaagctcgaaaatggcagcaattgcaggccaagcgctatgcagaaaagcggaagtttgggtttgtggatgcccagaaggaagacatgcccccagaacatgtcaggaagatcattcgagaccatggagacatgaccaacaggaagttccgccatgacaaaagggtttacttgggtgccctaaagtacatgccccacgcagtcctcaaactcctggagaacatgcctatgccttgggagcagattcgggatgtgcctgtgctgtaccacatcactggagccatttccttcgtcaatgagattccctgggtcattgaacctgtctacatctcccagtgggggtcaatgtggattatgatgcgccgagaaaaaagagataggaggcatttcaagaggatgcgttttcccccttttgatgatgaggagccgcccttggactatgctgacaacatcctagatgttgagccactggaggccattcagctagagctggaccctgaggaggacgcccctgtgttggactggttctatgaccaccagccgttgagggacagcaggaagtatgtaaatggctccacttaccagcgctggcagttcacactacctatgatgtcgactctctaccgcctggctaatcagctcctgacagacttggtggatgacaactacttctacctgtttgatttgaaggccttctttacgtccaaggcactcaatatggccattcctggaggccccaaatttgaacctcttgttcgagacatcaacctacaggatgaagactggaatgaattcaatgatattaacaagattatcatccggcagcctatccgcactgagtacaagattgcttttccttacttgtacaacaatcttccacaccatgtccacctcacctggtaccatactcccaatgttgtattcatcaaaactgaggatcctgacttgccagctttctactttgaccctttgatcaacccaatctcccataggcactcagtcaagagccaggaaccattgccggatgatgatgaggaatttgagctcccggagtttgtggagcccttcctgaaggacacacccctctatacagacaatacagccaatggcattgccctgctctgggccccgcggcccttcaacctacgctctggtcgcacccgtcgggccctggacataccccttgtcaagaactggtatcgggagcattgtcctgccgggcagcctgtgaaagtgagggtctcctaccagaagctgcttaagtactatgtgctgaatgccctgaagcatcggccccctaaggctcaaaagaagaggtatttgttccgctccttcaaagccaccaaattctttcagtccacaaagctggactgggtggaggttgggctccaggtttgccgccagggctacaacatgctcaaccttctcattcaccgcaaaaacctcaactacctgcacctggactacaacttcaacctcaagcctgtgaaaacgctcaccaccaaggaaagaaagaaatctcgttttgggaatgctttccacctgtgtcgggaagttctgcgtttgactaagctggtggtggatagtcacgtgcagtatcggctgggcaatgtggatgccttccagctggcagatggattgcagtatatatttgcccatgttgggcagttgacgggcatgtatcgatacaaatacaagctgatgcgacagattcgcatgtgcaaggacctgaagcatctcatctattatcgtttcaacacgggccctgtagggaagggtcctggctgtggcttctgggctgccggttggcgagtctggctctttttcatgcgtggcattacccctttattagagcgatggcttggcaacctcctggcccggcagtttgaaggtgagtggttttctctgtgtccaacttctcctgttattgcttcaaaagtacctgcccctgtttgagtctgttccctgctcttgtatgagcactcttcctactggattgcctttaggtccagttctgaaatgagtctgacctagtattctatttcttgggcttccttctggggccttgagaggcagtcatgcatttgcaggagtggaaattcctcagaagcatagttgtgaatgtttaaggtagctcgtctttttgcatatgctgggcacagggacgctttgttaatacctaattttattaataaccataatgagtgaggagcatgaaggtagagacccttattgaaagcaaggaatcttccttgtaatccccttgggacactctacttccaggtcgacactcaaagggggtggcaaagacagtaacaaagcagcgagtggagtcacattttgaccttgagctgcgggcagctgtgatgcatgatattctggacatgatgcctgaggggatcaagcagaacaaggcccggacaatcctgcagcacctcagtgaagcctggcgctgctggaaagccaacattccctggaaggtccctgggctgccgacgcccatagagaatatgatccttcgatacgtgaaggccaaggctgactggtggaccaacactgcccactacaaccgagaacggatccgccgaggggccactgtggacaagactgtttgtaaaaagaatctgggccgcctcacccggctctatctgaaggcagaacaggagcggcagcacaactacctgaaggacgggccttacatcacagcggaggaagcagtggcagtatataccaccacagtgcattggttggaaagccgcaggttttcacccatcccattccccccactctcctataagcatgacaccaagttgctcatcttggcattggagcggctcaaggaagcttatagtgtgaagtctcggttgaaccagtctcagagggaggagctaggtctgatcgagcaggcctacgataacccccacgaggcgctgtcccgcatcaagcgtcacctcctcacacagagagccttcaaagaggtgggcattgagttcatggatctgtatagccacctcgttccagtatatgatgttgagcccctggagaagataactgatgcttacctggaccagtacctgtggtatgaagccgacaagcgccgcctgttcccaccctggattaagcctgcagacacagaaccacctccgctgcttgtttacaagtggtgtcaaggcatcaataacctgcaggacgtgtgggagacgagtgaaggcgagtgcaatgtcatgctggaatcccgctttgagaagatgtatgagaagatcgacttgactctgctcaacaggctgctgcgcctcatcgtggaccacaacatagccgactacatgacagccaagaacaacgtcgtcatcaactataaggacatgaaccatacgaattcatatgggatcatcagaggcctgcagtttgcctcattcatcgtgcagtattatggcctggtgatggatttgcttgtattgggattgcaccgggccagtgagatggctgggccccctcagatgccaaatgactttctcagtttccaggacatagccactgaggctgcccaccccatccgtctcttctgcagatacattgatcgcatccatatttttttcaggttcacagcagatgaggctcgggacctgattcaacgttacctgacagagcaccctgaccccaataatgaaaacatcgttggctataataacaagaagtgctggccccgagatgcccgcatgcgcctcatgaaacatgatgttaacttaggccgggcggtattctgggacatcaagaaccgcttgccacggtcagtgactacagttcagtgggagaacagcttcgtgtctgtgtacagtaaggacaaccccaacctgctgttcaacatgtgtggcttcgagtgccgcatcctgcctaagtgccgcaccagctatgaggagttcacccacaaggacggggtctggaacctgcagaatgaggtacagcctgggcggggctgggagtgacatgaacgcgcctgcacttcctgggtcagtcaccggagtcttgttgggtggaaagacttgaatggtgggcacagttggctcttgcttctgtgggagttcctcggacatgttaaccttgactttgtggtttaggttactaaggagcgcacagctcagtgtttcctgcgtgtggacgatgagtcaatgcagcgcttccacaaccgcgtgcgtcagattctcatggcctctgggtccaccaccttcaccaaggtacagggccgtcatgcccagcttccctcttgtcctctgctgtcctctgctcatttcacacccctttcacttcgtcccctgctggctgcttccttctcttctttgcttagtgtgccagtttccatgctctgtgccatagtggcttatagtatgtcaggtcacttcatcgttattttctgagcgttccttgtagaaattgtgtagcctcc

SEQ ID NO: 262238 - DNA, 4539 bp, Homo sapiens
atcgtacaatgcgcaatcttggcaaatttattcaaaccctttagacttcggtctctcacagtgcgacgccgggagcccatcacacgctgaggtctgtcagaggccccagaaacagcctcggaaatggaggaggcggggctcaccccgaccacacccccttgcgttcaaagcctttccgcctatgggcccgcctcctcggcgcagtgtgcaactctaattggtcgtctcactaatccatctgagcacctcggcgccgactggatcaactgctgaactcgggttgcgcacttcccggcgctgggaacgcggagcggacgcagtctggccgccattgcgctgcggggaaagcggcctcttgtgtgagggcctgtggggtgcgtggcaggcgtttaaggccgggctgcgggaggcgtggtcgggtcgggccgagtgaccgaaggggttaggccgggcggggctggatgcactgtgtggcgggactgcaggccggggtccccggacgcctttctgctgcgcttcttgtgggcccgggcctgtggttagtgaatttttctatcccgccgctccccagattctccggatatggccggagtgtttccttatcgagggccgggtaacccggtgcctggccctctagccccgctaccggactacatgtcggaggagaagctgcaggagaaagctcgaaaatggcagcaattgcaggccaagcgctatgcagaaaagcggaagtttgggtttgtggatgcccagaaggaagacatgcccccagaacatgtcaggaagatcattcgagaccatggagacatgaccaacaggaagttccgccatgacaaaagggtttacttgggtgccctaaagtacatgccccacgcagtcctcaaactcctggagaacatgcctatgccttgggagcagattcgggatgtgcctgtgctgtaccacatcactggagccatttccttcgtcaatgagattccctgggtcattgaacctgtctacatctcccagtgggggtcaatgtggattatgatgcgccgagaaaaaagagataggaggcatttcaagaggatgcgttttcccccttttgatgatgaggagccgcccttggactatgctgacaacatcctagatgttgagccactggaggccattcagctagagctggaccctgaggaggacgcccctgtgttggactggttctatgaccaccagccgttgagggacagcaggaagtatgtaaatggctccacttaccagcgctggcagttcacactacctatgatgtcgactctctaccgcctggctaatcagctcctgacagacttggtggatgacaactacttctacctgtttgatttgaaggccttctttacgtccaaggcactcaatatggccattcctggaggccccaaatttgaacctcttgttcgagacatcaacctacaggatgaagactggaatgaattcaatgatattaacaagattatcatccggcagcctatccgcactgagtacaagattgcttttccttacttgtacaacaatcttccacaccatgtccacctcacctggtaccatactcccaatgttgtattcatcaaaactgaggatcctgacttgccagctttctactttgaccctttgatcaacccaatctcccataggcactcagtcaagagccaggaaccattgccggatgatgatgaggaatttgagctcccggagtttgtggagcccttcctgaaggacacacccctctatacagacaatacagccaatggcattgccctgctctgggccccgcggcccttcaacctacgctctggtcgcacccgtcgggccctggacataccccttgtcaagaactggtatcgggagcattgtcctgccgggcagcctgtgaaagtgagggtctcctaccagaagctgcttaagtactatgtgctgaatgccctgaagcatcggccccctaaggctcaaaagaagaggtatttgttccgctccttcaaagccaccaaattctttcagtccacaaagctggactgggtggaggttgggctccaggtttgccgccagggctacaacatgctcaaccttctcattcaccgcaaaaacctcaactacctgcacctggactacaacttcaacctcaagcctgtgaaaacgctcaccaccaaggaaagaaagaaatctcgttttgggaatgctttccacctgtgtcgggaagttctgcgtttgactaagctggtggtggatagtcacgtgcagtatcggctgggcaatgtggatgccttccagctggcagatggattgcagtatatatttgcccatgttgggcagttgacgggcatgtatcgatacaaatacaagctgatgcgacagattcgcatgtgcaaggacctgaagcatctcatctattatcgtttcaacacgggccctgtagggaagggtcctggctgtggcttctgggctgccggttggcgagtctggctctttttcatgcgtggcattacccctttattagagcgatggcttggcaacctcctggcccggcagtttgaaggtgagtggttttctctgtgtccaacttctcctgttattgcttcaaaagtacctgcccctgtttgagtctgttccctgctcttgtatgagcactcttcctactggattgcctttaggtccagttctgaaatgagtctgacctagtattctatttcttgggcttccttctggggccttgagaggcagtcatgcatttgcaggagtggaaattcctcagaagcatagttgtgaatgtttaaggtagctcgtctttttgcatatgctgggcacagggacgctttgttaatacctaattttattaataaccataatgagtgaggagcatgaaggtagagacccttattgaaagcaaggaatcttccttgtaatccccttgggacactctacttccaggtcgacactcaaagggggtggcaaagacagtaacaaagcagcgagtggagtcacattttgaccttgagctgcgggcagctgtgatgcatgatattctggacatgatgcctgaggggatcaagcagaacaaggcccggacaatcctgcagcacctcagtgaagcctggcgctgctggaaagccaacattccctggaaggtccctgggctgccgacgcccatagagaatatgatccttcgatacgtgaaggccaaggctgactggtggaccaacactgcccactacaaccgagaacggatccgccgaggggccactgtggacaagactgtttgtaaaaagaatctgggccgcctcacccggctctatctgaaggcagaacaggagcggcagcacaactacctgaaggacgggccttacatcacagcggaggaagcagtggcagtatataccaccacagtgcattggttggaaagccgcaggttttcacccatcccattccccccactctcctataagcatgacaccaagttgctcatcttggcattggagcggctcaaggaagcttatagtgtgaagtctcggttgaaccagtctcagagggaggagctaggtctgatcgagcaggcctacgataacccccacgaggcgctgtcccgcatcaagcgtcacctcctcacacagagagccttcaaagaggtgggcattgagttcatggatctgtatagccacctcgttccagtatatgatgttgagcccctggagaagataactgatgcttacctggaccagtacctgtggtatgaagccgacaagcgccgcctgttcccaccctggattaagcctgcagacacagaaccacctccgctgcttgtttacaagtggtgtcaaggcatcaataacctgcaggacgtgtgggagacgagtgaaggcgagtgcaatgtcatgctggaatcccgctttgagaagatgtatgagaagatcgacttgactctgctcaacaggctgctgcgcctcatcgtggaccacaacatagccgactacatgacagccaagaacaacgtcgtcatcaactataaggacatgaaccatacgaattcatatgggatcatcagaggcctgcagtttgcctcattcatcgtgcagtattatggcctggtgatggatttgcttgtattgggattgcaccgggccagtgagatggctgggccccctcagatgccaaatgactttctcagtttccaggacatagccactgaggctgcccaccccatccgtctcttctgcagatacattgatcgcatccatatttttttcaggttcacagcagatgaggctcgggacctgattcaacgttacctgacagagcaccctgaccccaataatgaaaacatcgttggctataataacaagaagtgctggccccgagatgcccgcatgcgcctcatgaaacatgatgttaacttagggcgggcggatccgggacatcagaccgcttccaccggcagagactacagtcagggggaacagtcgggtctgggacaggagggaaaccacctgcgtcaaagggggccaggccacacgc

SEQ ID NO: 262239 - DNA, 4058 bp, Homo sapiens
atcgtacaatgcgcaatcttggcaaatttattcaaaccctttagacttcggtctctcacagtgcgacgccgggagcccatcacacgctgaggtctgtcagaggccccagaaacagcctcggaaatggaggaggcggggctcaccccgaccacacccccttgcgttcaaagcctttccgcctatgggcccgcctcctcggcgcagtgtgcaactctaattggtcgtctcactaatccatctgagcacctcggcgccgactggatcaactgctgaactcgggttgcgcacttcccggcgctgggaacgcggagcggacgcagtctggccgccattgcgctgcggggaaagcggcctcttgtgtgagggcctgtggggtgcgtggcaggcgtttaaggccgggctgcgggaggcgtggtcgggtcgggccgagtgaccgaaggggttaggccgggcggggctggatgcactgtgtggcgggactgcaggccggggtccccggacgcctttctgctgcgcttcttgtgggcccgggcctgtggttagtgaatttttctatcccgccgctccccagattctccggatatggccggagtgtttccttatcgagggccgggtaacccggtgcctggccctctagccccgctaccggactacatgtcggaggagaagctgcaggagaaagctcgaaaatggcagcaattgcaggccaagcgctatgcagaaaagcggaagtttgggtttgtggatgcccagaaggaagacatgcccccagaacatgtcaggaagatcattcgagaccatggagacatgaccaacaggaagttccgccatgacaaaagggtttacttgggtgccctaaagtacatgccccacgcagtcctcaaactcctggagaacatgcctatgccttgggagcagattcgggatgtgcctgtgctgtaccacatcactggagccatttccttcgtcaatgagattccctgggtcattgaacctgtctacatctcccagtgggggtcaatgtggattatgatgcgccgagaaaaaagagataggaggcatttcaagaggatgcgttttcccccttttgatgatgaggagccgcccttggactatgctgacaacatcctagatgttgagccactggaggccattcagctagagctggaccctgaggaggacgcccctgtgttggactggttctatgaccaccagccgttgagggacagcaggaagtatgtaaatggctccacttaccagcgctggcagttcacactacctatgatgtcgactctctaccgcctggctaatcagctcctgacagacttggtggatgacaactacttctacctgtttgatttgaaggccttctttacgtccaaggcactcaatatggccattcctggaggccccaaatttgaacctcttgttcgagacatcaacctacaggatgaagactggaatgaattcaatgatattaacaagattatcatccggcagcctatccgcactgagtacaagattgcttttccttacttgtacaacaatcttccacaccatgtccacctcacctggtaccatactcccaatgttgtattcatcaaaactgaggatcctgacttgccagctttctactttgaccctttgatcaacccaatctcccataggcactcagtcaagagccaggaaccattgccggatgatgatgaggaatttgagctcccggagtttgtggagcccttcctgaaggacacacccctctatacagacaatacagccaatggcattgccctgctctgggccccgcggcccttcaacctacgctctggtcgcacccgtcgggccctggacataccccttgtcaagaactggtatcgggagcattgtcctgccgggcagcctgtgaaagtgagggtctcctaccagaagctgcttaagtactatgtgctgaatgccctgaagcatcggccccctaaggctcaaaagaagaggtatttgttccgctccttcaaagccaccaaattctttcagtccacaaagctggactgggtggaggttgggctccaggtttgccgccagggctacaacatgctcaaccttctcattcaccgcaaaaacctcaactacctgcacctggactacaacttcaacctcaagcctgtgaaaacgctcaccaccaaggaaagaaagaaatctcgttttgggaatgctttccacctgtgtcgggaagttctgcgtttgactaagctggtggtggatagtcacgtgcagtatcggctgggcaatgtggatgccttccagctggcagatggattgcagtatatatttgcccatgttgggcagttgacgggcatgtatcgatacaaatacaagctgatgcgacagattcgcatgtgcaaggacctgaagcatctcatctattatcgtttcaacacgggccctgtagggaagggtcctggctgtggcttctgggctgccggttggcgagtctggctctttttcatgcgtggcattacccctttattagagcgatggcttggcaacctcctggcccggcagtttgaaggtgagtggttttctctgtgtccaacttctcctgttattgcttcaaaagtacctgcccctgtttgagtctgttccctgctcttgtatgagcactcttcctactggattgcctttaggtccagttctgaaatgagtctgacctagtattctatttcttgggcttccttctggggccttgagaggcagtcatgcatttgcaggagtggaaattcctcagaagcatagttgtgaatgtttaaggtagctcgtctttttgcatatgctgggcacagggacgctttgttaatacctaattttattaataaccataatgagtgaggagcatgaaggtagagacccttattgaaagcaaggaatcttccttgtaatccccttgggacactctacttccaggtcgacactcaaagggggtggcaaagacagtaacaaagcagcgagtggagtcacattttgaccttgagctgcgggcagctgtgatgcatgatattctggacatgatgcctgaggggatcaagcagaacaaggcccggacaatcctgcagcacctcagtgaagcctggcgctgctggaaagccaacattccctggaaggtccctgggctgccgacgcccatagagaatatgatccttcgatacgtgaaggccaaggctgactggtggaccaacactgcccactacaaccgagaacggatccgccgaggggccactgtggacaagactgtttgtaaaaagaatctgggccgcctcacccggctctatctgaaggcagaacaggagcggcagcacaactacctgaaggacgggccttacatcacagcggaggaagcagtggcagtatataccaccacagtgcattggttggaaagccgcaggttttcacccatcccattccccccactctcctataagcatgacaccaagttgctcatcttggcattggagcggctcaaggaagcttatagtgtgaagtctcggttgaaccagtctcagagggaggagctaggtctgatcgagcaggcctacgataacccccacgaggcgctgtcccgcatcaagcgtcacctcctcacacagagagccttcaaagaggtgggcattgagttcatggatctgtatagccacctcgttccagtatatgatgttgagcccctggagaagataactgatgcttacctggaccagtacctgtggtatgaagccgacaagcgccgcctgttcccaccctggattaagcctgcagacacagaaccacctccgctgcttgtttacaagtggtgtcaaggcatcaataacctgcaggacgtgtgggagacgagtgaaggcgagtgcaatgtcatgctggaatcccgctttgagaagatgtatgagaagatcgacttgactctgctcaacaggctgctgcgcctcatcgtggaccacaacatagccgactacatgacagccaagaacaacgtcgtcatcaactataaggacgcgccatcgtgcgcagtagca

SEQ ID NO: 262240 - DNA, 4240 bp, Homo sapiens
atcgtacaatgcgcaatcttggcaaatttattcaaaccctttagacttcggtctctcacagtgcgacgccgggagcccatcacacgctgaggtctgtcagaggccccagaaacagcctcggaaatggaggaggcggggctcaccccgaccacacccccttgcgttcaaagcctttccgcctatgggcccgcctcctcggcgcagtgtgcaactctaattggtcgtctcactaatccatctgagcacctcggcgccgactggatcaactgctgaactcgggttgcgcacttcccggcgctgggaacgcggagcggacgcagtctggccgccattgcgctgcggggaaagcggcctcttgtgtgagggcctgtggggtgcgtggcaggcgtttaaggccgggctgcgggaggcgtggtcgggtcgggccgagtgaccgaaggggttaggccgggcggggctggatgcactgtgtggcgggactgcaggccggggtccccggacgcctttctgctgcgcttcttgtgggcccgggcctgtggttagtgaatttttctatcccgccgctccccagattctccggatatggccggagtgtttccttatcgagggccgggtaacccggtgcctggccctctagccccgctaccggactacatgtcggaggagaagctgcaggagaaagctcgaaaatggcagcaattgcaggccaagcgctatgcagaaaagcggaagtttgggtttgtggatgcccagaaggaagacatgcccccagaacatgtcaggaagatcattcgagaccatggagacatgaccaacaggaagttccgccatgacaaaagggtttacttgggtgccctaaagtacatgccccacgcagtcctcaaactcctggagaacatgcctatgccttgggagcagattcgggatgtgcctgtgctgtaccacatcactggagccatttccttcgtcaatgagattccctgggtcattgaacctgtctacatctcccagtgggggtcaatgtggattatgatgcgccgagaaaaaagagataggaggcatttcaagaggatgcgttttcccccttttgatgatgaggagccgcccttggactatgctgacaacatcctagatgttgagccactggaggccattcagctagagctggaccctgaggaggacgcccctgtgttggactggttctatgaccaccagccgttgagggacagcaggaagtatgtaaatggctccacttaccagcgctggcagttcacactacctatgatgtcgactctctaccgcctggctaatcagctcctgacagacttggtggatgacaactacttctacctgtttgatttgaaggccttctttacgtccaaggcactcaatatggccattcctggaggccccaaatttgaacctcttgttcgagacatcaacctacaggatgaagactggaatgaattcaatgatattaacaagattatcatccggcagcctatccgcactgagtacaagattgcttttccttacttgtacaacaatcttccacaccatgtccacctcacctggtaccatactcccaatgttgtattcatcaaaactgaggatcctgacttgccagctttctactttgaccctttgatcaacccaatctcccataggcactcagtcaagagccaggaaccattgccggatgatgatgaggaatttgagctcccggagtttgtggagcccttcctgaaggacacacccctctatacagacaatacagccaatggcattgccctgctctgggccccgcggcccttcaacctacgctctggtcgcacccgtcgggccctggacataccccttgtcaagaactggtatcgggagcattgtcctgccgggcagcctgtgaaagtgagggtctcctaccagaagctgcttaagtactatgtgctgaatgccctgaagcatcggccccctaaggctcaaaagaagaggtatttgttccgctccttcaaagccaccaaattctttcagtccacaaagctggactgggtggaggttgggctccaggtttgccgccagggctacaacatgctcaaccttctcattcaccgcaaaaacctcaactacctgcacctggactacaacttcaacctcaagcctgtgaaaacgctcaccaccaaggaaagaaagaaatctcgttttgggaatgctttccacctgtgtcgggaagttctgcgtttgactaagctggtggtggatagtcacgtgcagtatcggctgggcaatgtggatgccttccagctggcagatggattgcagtatatatttgcccatgttgggcagttgacgggcatgtatcgatacaaatacaagctgatgcgacagattcgcatgtgcaaggacctgaagcatctcatctattatcgtttcaacacgggccctgtagggaagggtcctggctgtggcttctgggctgccggttggcgagtctggctctttttcatgcgtggcattacccctttattagagcgatggcttggcaacctcctggcccggcagtttgaaggtgagtggttttctctgtgtccaacttctcctgttattgcttcaaaagtacctgcccctgtttgagtctgttccctgctcttgtatgagcactcttcctactggattgcctttaggtccagttctgaaatgagtctgacctagtattctatttcttgggcttccttctggggccttgagaggcagtcatgcatttgcaggagtggaaattcctcagaagcatagttgtgaatgtttaaggtagctcgtctttttgcatatgctgggcacagggacgctttgttaatacctaattttattaataaccataatgagtgaggagcatgaaggtagagacccttattgaaagcaaggaatcttccttgtaatccccttgggacactctacttccaggtcgacactcaaagggggtggcaaagacagtaacaaagcagcgagtggagtcacattttgaccttgagctgcgggcagctgtgatgcatgatattctggacatgatgcctgaggggatcaagcagaacaaggcccggacaatcctgcagcacctcagtgaagcctggcgctgctggaaagccaacattccctggaaggtccctgggctgccgacgcccatagagaatatgatccttcgatacgtgaaggccaaggctgactggtggaccaacactgcccactacaaccgagaacggatccgccgaggggccactgtggacaagactgtttgtaaaaagaatctgggccgcctcacccggctctatctgaaggcagaacaggagcggcagcacaactacctgaaggacgggccttacatcacagcggaggaagcagtggcagtatataccaccacagtgcattggttggaaagccgcaggttttcacccatcccattccccccactctcctataagcatgacaccaagttgctcatcttggcattggagcggctcaaggaagcttatagtgtgaagtctcggttgaaccagtctcagagggaggagctaggtctgatcgagcaggcctacgataacccccacgaggcgctgtcccgcatcaagcgtcacctcctcacacagagagccttcaaagtctttacggaataaaggatgatgtcttccttagtgttccttgcattttgggacagaatggaatctcagaccttgtgaaggtgactctgacttctgaggaagaggcccgtttgaagaagagtgcagatacactttgggggatccaaaaggagctgcaattttaaagtcttctgatgtcatatcatttcactgtctaggctacaacaggattctaggtggaggttgtgcatgttgtcctttttatctgatctgtgattaaagcagtaatattttaagatggactgggaaaaacatcaactcctgaagttagaaataagaatggtttgtaaaatccacagctatatcctgatgctggatggtattaatcttgtgtagtcttcaactggttagtgtgaaatagttctgccactctgacgcaccactgccaatgctgtacgtactgcatttgccccttgagccaggtggatgtttaccgtgtgttatataaacttccctgggtcctttcatgaaacatgcctagtccaacaattttttcccagtgagtcaccatctgggatccagggtttaaatccatatcatgtttgggccta

SEQ ID NO: 262241 - DNA, 458 bp, Homo sapiens
gaggatccccctcttcgctgtgttgagctactgccttcacactatgagagggtgcagatgctgctgtcggaccgtttccttggcttcttcatggtccctgcccagtcctcgtggaactacaacttcatgggtgttcggcatgaccccaacatgaaatatgagctacagctggcgaaccccaaagagttctaccacgaggtgcacaggccctctcacttcctcaactttgctctcctgcaggagggggaggtttactctgcggatcgggaggacctgtatgcctgaccgtttccctgcctcctgcttcagcctcccgaggccgaagcctcagcccctccagacaggccgctgacattcagcagtttggcctctttccctctgtctgtgcttgtgttgttgacctcctgatggcttgtcatcctgaataaaatataataataaattttgtataaatagga

SEQ ID NO: 262242 - DNA, 1929 bp, Homo sapiens
  misc_feature (1768)..(1768): n is a, c, g, or t
atcgtacaatgcgcaatcttggcaaatttattcaaaccctttagacttcggtctctcacagtgcgacgccgggagcccatcacacgctgaggtctgtcagaggccccagaaacagcctcggaaatggaggaggcggggctcaccccgaccacacccccttgcgttcaaagcctttccgcctatgggcccgcctcctcggcgcagtgtgcaactctaattggtcgtctcactaatccatctgagcacctcggcgccgactggatcaactgctgaactcgggttgcgcacttcccggcgctgggaacgcggagcggacgcagtctggccgccattgcgctgcggggaaagcggcctcttgtgtgagggcctgtggggtgcgtggcaggcgtttaaggccgggctgcgggaggcgtggtcgggtcgggccgagtgaccgaaggggttaggccgggcggggctggatgcactgtgtggcgggactgcaggccggggtccccggacgcctttctgctgcgcttcttgtgggcccgggcctgtggttagtgaatttttctatcccgccgctccccagattctccggatatggccggagtgtttccttatcgagggccgggtaacccggtgcctggccctctagccccgctaccggactacatgtcggaggagaagctgcaggagaaagctcgaaaatggcagcaattgcaggccaagcgctatgcagaaaagcggaagtttgggtttgtggatgcccagaaggaagacatgcccccagaacatgtcaggaagatcattcgagaccatggagacatgaccaacaggaagttccgccatgacaaaagggtttacttgggtgccctaaagtacatgccccacgcagtcctcaaactcctggagaacatgcctatgccttgggagcagattcgggatgtgcctgtgctgtaccacatcactggagccatttccttcgtcaatgagattccctgggtcattgaacctgtctacatctcccagtgggggtcaatgtggattatgatgcgccgagaaaaaagagataggaggcatttcaagaggatgcgttttcccccttttgatgatgaggagccgcccttggactatgctgacaacatcctagatgttgagccactggaggccattcagctagagctggaccctgaggaggacgcccctgtgttggactggttctatgaccaccagccgttgagggacagcaggaagtatgtaaatggctccacttaccagcgctggcagttcacactacctatgatgtcgactctctaccgcctggctaatcagctcctgacagacttggtggatgacaactacttctacctgtttgatttgaaggccttctttacgtccaaggcactcaatatggccattcctggaggccccaaatttgaacctcttgttcgagacatcaacctacaggatgaagactggaatgaattcaatgatattaacaagattatcatccggcagcctatccgcactgagtacaagattgcttttccttacttgtacaacaatcttccacaccatgtccacctcacctggtaccatactcccaatgttgtattcatcaaaactgaggatcctgacttgccagctttctactttgaccctttgatcaacccaatctcccataggcactcagtcaaggtgaggaagggaagggatgctttccctcagctcttctaggagaaatgcgtgaggttggctgatgttactaaacgctcaggtggagggnagatgtgttttccgtcttgctaagtgttccccttgagctataagcgaatatgagaattcagcatttgctttaaaacatgtcattggtataatcctgttttctgtgattatccttttggactttacggttcttttcttgggtgctctagataatctgtcccg

SEQ ID NO: 262243 - DNA, 330 bp, Homo sapiens
  misc_feature (51)..(51): n is a, c, g, or t
  misc_feature (147)..(147): n is a, c, g, or t
  misc_feature (217)..(217): n is a, c, g, or t
aatgtctcccggccctcattgctggctgactccaagtaagtgcctcaggancccagccctaggcagccaggacactttcgttttcctgttcttctagccctgcaactttaggaattgtcctgtctgcctttgtttcaaacttggagnccagtgctacgcttggagcctgtcaacacccttagtcagatctgctgattctctggggtcctgctgaccntggaacaagttggtggagtgggtgggatggttttgggatttaagtggttctggttctggggacattggttatgcccatggtttcttagaagcttgaaccctcttcatcctcag

SEQ ID NO: 262244 - DNA, 375 bp, Homo sapiens
  misc_feature (51)..(51): n is a, c, g, or t
tgcatgaggcaggagccctgttaacattggctgtttccttctccccgaagngtgttcggcatgaccccaacatgaaatatgagctacagctggcgaaccccaaagagttctaccacgaggtgcacaggccctctcacttcctcaactttgctctcctgcaggagggggaggtttactctgcggatcgggaggacctgtatgcctgaccgtttccctgcctcctgcttcagcctcccgaggccgaagcctcagcccctccagacaggccgctgacattcagcagtttggcctctttccctctgtctgtgcttgtgttgttgacctcctgatggcttgtcatcctgaataaaatataataataaattttgtataaat

SEQ ID NO: 262245 - DNA, 526 bp, Homo sapiens
gtataggctgtcctgtcctaccaagttacaccctttccattgaggcagaagtgaccaaggggaagggatccttgtaatataacccacaccatccccacagtgtgaacgtggcatcactgacacaatcagaaattcgagacatcatcctgggtatggagatctcggcaccgtcacagcagcggcagcagatcgctgagatcgagaagcagaccaaggaacaatcgcagctgacggcaacacagactcgcactgtcaacaagcatggcgatgagatcatcacctccaccaccagcaactatgagacccagactttctcatccaagactgagtggagggtcaggtactgtcgggcaagagggtggggatggaaaggccggctgcactacctaaggtgctgggctgagcgatgctgacactccctgcctgtttttagggccatctctgctgccaacctgcacctaaggaccaatcacatctatgtttcatctgacgacatcaaggagactggctacacctacatccttcc

SEQ ID NO: 262246 - DNA, 499 bp, Homo sapiens
gcctacgataacccccacgaggcgctgtcccgcatcaagcgtcacctcctcacacagagagccttcaaagaggtgagtgaggcctcccaagttttctttttggttctaccaaaggtagcagttgcctttggttctaccaaaggtagcagttggtggattggtgtgaaccagcctccttgtcccacaggtgggcattgagttcatggatctgtatagccacctcgttccagtatatgatgttgagcccctggagaagataactgatgcttacctggaccagtacctgtggtatgaagccgacaagcgccgcctgttcccaccctggattaagcctgcagacacagaaccacctccgctgcttgtttacaagtggtgtcaaggtagaactttcatgagatcgccctgtgaggaacggggcaggaatttagttctacgtcaaaaatctcatctgggtagcatgattggtttactctcttgatgcgtggtagtaaagggaagt

SEQ ID NO: 262247 - DNA, 481 bp, Homo sapiens
atgcacttaacttttctggcctcatttctctcacctgtaaaaatgcaggtttcagatgttggtaatattttacctgtggttgaaagagttaccagcccttccttgatcacccatggtaagacccatgagcctctgaatataattatagaaaacatttggagagggatagagagagacaagatcatgcctcctttgataatgtcaaattttcagtgcacgaagccatacatagtgcagttttctagcttccctttcacacatggcattgaagaaagtaaattaagcaactcagctaacactgggaatgcagcagaagtaatcgagttcagtgctgggagacagttgccatgatattccaacatggacaccaggatcacagtcgatgactatgccctcccttgaagatggtggcttgcctctctttctgtaagcacatgtcatgtcataacaatattaaacaattgaaagtaatgtccccatc

SEQ ID NO: 262248 - DNA, 502 bp, Homo sapiens
ggcggccgccgggagggcgcgcggcgccggagacatgtccaggcggaaacagagcaacccccggcagatcaagcgttccctcggagacatggaggccagagaggaggtgcagttggtgggtgccagccacatggagcaaaaggccacggcacctgaagccccgagccctcccagcgcagatgttaactcacccccaccgctgccgccccccacatccccaggaggccccaaggagctggaaggacaggaaccagaacccaggcccacggaggaagagccgggcagtccctggagcgggccagacgagctggagccggtggtgcaggatgggcagaggcgcatacgggcccgactcagcctcgccacgggcctgtcctggggcccgttccatgggagtgtccagaccagagcctcatcccccaggcaggcggagccgagcccagccctgaccctgcttgtgttgacgaggctgctggctgaggcgctgcccagccctgactga

SEQ ID NO: 262249 - DNA, 498 bp, Homo sapiens
ggcggccgccgggagggcgcgcggcgccggagacatgtccaggcggaaacagagcaacccccggcagatcaagcgttccctcggagacatggaggccagagaggaggtgcagttggtgggtgccagccacatggagcaaaaggccacggcacctgaagccccgagccctcccagcgcagatgttaactcacccccaccgctgccgccccccacatccccaggaggccccaaggagctggaaggacaggaaccagaacccaggcccacggaggaagagccgggcagtccctggagcgggccaggtaaccacgcgggtggtgggggcagcagcatcgcctcccgggcagcctggcccggcccctgggagcagggcgacgtgggtgctggggcaggtgtgcaggttgctggagacccaccaggcccaggcctgtgcctagtccaaagctcagccaacccgtgcagctggtggtatcactggagcttggcaccctcgcgcca

SEQ ID NO: 262250 - DNA, 661 bp, Homo sapiens
ggcggccgccgggagggcgcgcggcgccggagacatgtccaggcggaaacagagcaacccccggcagatcaagcgttccctcggagacatggaggccagagaggaggtgcagttggtgggtgccagccacatggagcaaaaggccacggcacctgaagccccgagccctcccagcgcagatgttaactcacccccaccgctgccgccccccacatccccaggaggccccaaggagctggaaggacaggaaccagaacccaggcccacggaggaagagccgggcagtccctggagcgggccagacgagctggagccggtggtgcaggatgggcagaggcgcatacgggcccgactcagcctcgccacgggcctgtcctggggcccgttccatgggagtgtccagaccagagcctcatcccccaggcaggcggagccgatgagaaaactgaggctccaagatgttaagtcaattgcccaaatacccaggatcaaacagcagagggagaaatagaacccacatctgcctatccccggagaccctcgcaagctccttaatgaattaaatccttgattaacccttatctccccagcgaggcgctatctccgccttggcgccgagtgtccagacacaccgtacaagatgattgatttcttcaagata

SEQ ID NO: 262251 - DNA, 507 bp, Homo sapiens
ggcggccgccgggagggcgcgcggcgccggagacatgtccaggcggaaacagagcaacccccggcagatcaagcgttccctcggagacatggaggccagagaggaggtgcagttggtgggtgccagccacatggagcaaaaggccacggcacctgaagccccgagccctcccagcgcagatgttaactcacccccaccgctgccgccccccacatccccaggaggccccaaggagctggaaggacaggaaccagaacccaggcccacggaggaagagccgggcagtccctggagcgggccagacgagctggagccggtggtgcaggatgggcagaggcgcatacgggcccgactcagcctcgccacgggcctgtcctggggcccgttccatgggagtgtccagaccagagcctcatcccccaggcaggcggagccgcgaggcgctatctccgccttggcgccgagtgtccagacacaccgtacaagatgattgatttcttcaagata

SEQ ID NO: 262252 - DNA, 953 bp, Homo sapiens
ggcggccgccgggagggcgcgcggcgccggagacatgtccaggcggaaacagagcaacccccggcagatcaagcgttccctcggagacatggaggccagagaggaggtgcagttggtgggtgccagccacatggagcaaaaggccacggcacctgaagccccgagccctcccagcgcagatgttaactcacccccaccgctgccgccccccacatccccaggaggccccaaggagctggaaggacaggaaccagaacccaggcccacggaggaagagccgggcagtccctggagcgggccagacgagctggagccggtggtgcaggatgggcagaggcgcatacgggcccgactcagcctcgccacgggcctgtcctggggcccgttccatgggagtgtccagaccagagcctcatcccccaggcaggcggagccgatgagaaaactgaggctccaagatgttaagtcaattgcccaaatacccaggatcaaacagcagagggagaaatagaacccacatctgcctatccccggagaccctcgcaagctccttaatggtagggctgaggggctggcaccggcccaggagtcatccccacgggctgccctttgccctagctgcagtcacccctccctgtccgcctgcctccgcatttagtcctgctctggcctagggcacaggccatcctggggatacgggcacggggttagaaacgctcccaagtggggagataacgtctgggggcacaaggggagccaaggccagaggagccgctggggctctgtggggagcccggggaggaaggagcccccgctccactcttccctcctctgctttatctcctgcagaattaaatccttgattaacccttatctccccagcgaggcgctatctccgccttggcgccgagtgtccagacacaccgtacaagatgattgatttcttcaagata

SEQ ID NO: 262253 - DNA, 830 bp, Homo sapiens
ggcggccgccgggagggcgcgcggcgccggagacatgtccaggcggaaacagagcaacccccggcagatcaagcgttccctcggagacatggaggccagagaggaggtgcagttggtgggtgccagccacatggagcaaaaggccacggcacctgaagccccgagccctcccagcgcagacgagctggagccggtggtgcaggatgggcagaggcgcatacgggcccgactcagcctcgccacgggcctgtcctggggcccgttccatgggagtgtccagaccagagcctcatcccccaggcaggcggagccgatgagaaaactgaggctccaagatgttaagtcaattgcccaaatacccaggatcaaacagcagagggagaaatagaacccacatctgcctatccccggagaccctcgcaagctccttaatggtagggctgaggggctggcaccggcccaggagtcatccccacgggctgccctttgccctagctgcagtcacccctccctgtccgcctgcctccgcatttagtcctgctctggcctagggcacaggccatcctggggatacgggcacggggttagaaacgctcccaagtggggagataacgtctgggggcacaaggggagccaaggccagaggagccgctggggctctgtggggagcccggggaggaaggagcccccgctccactcttccctcctctgctttatctcctgcagaattaaatccttgattaacccttatctccccagcgaggcgctatctccgccttggcgccgagtgtccagacacaccgtacaagatgattgatttcttcaagata

SEQ ID NO: 262254 - DNA, 407 bp, Homo sapiens
atcctaacaggtgtacagtgatagctcactgtggttttgatttgcagtttcctgatgactagtggtgttgagcaccttttcagaaacccattggccatatgtagctcttctttggaaaaatgtctactcaggccccttttccatttttaaatgggttatttttctcccattttgtagagactgccttttcgttttgctgtttcttttgctgtgcagagacttttcattttaatgtagtctcatttatgttgcttttgttgcctgtgtttttgctgtcataaaaaaatcactgccaagaccaatgtcaagaagcttttcttctatgttttctcctagcagtgttatagtttcaggttttatgtttagatctttaatccactttaagctgatttttttttgcatggtgt

SEQ ID NO: 262255 - DNA, 464 bp, Homo sapiens
tgcaaggagggtgttgggcaccagaaggccctggggaaagtgggagccgcagacagccaggcagctcttctatgtctggggtttgcaggagcactgccttccggggggggggggaggggaggcgggtgaggacagcacgtgacttcccctcctaatgttcatgtggtggggagtcaccctgggggcctcccgccaaattttagtatctctgtgattttagttgttgccccaagcagttaggacttgtgtagtttgaaagaaaaatctcacccagcataaaaagagaaaagggggaattgtaacaaatgttaatcataagcactgtttcaacccggaaaaatgtttgctgccaggctgtgggcaaagaggtggcctcggcggctggcagctcagtgggccttccaagtttactaagcagggtcttgtatttttaaataaaatagagcatcagacacgctcactta

SEQ ID NO: 262256 - DNA, 653 bp, Homo sapiens
tagatacctgcccctttagacctggttattattcaactgtcattgagaaaaatgcttgattatttggctatatacctctctacccctccttattgttgccatccaccatccttatttgttgaggactttgggacttggcttgtccaccctattccctggcataatcatgggcaactttaggggctgcaagggcatttatccaagttcctgtccttaaggttctttgacatgaagcatgccagcagtgacaatatgatattgtggttttgaatcccagttcccctacttcctaactatgtaagtttgaaaacagtgcttaaccttttgtgcctcattttcctcatttgcatattggggatgatactatctgcatatttggaattttgtgaagattaaatcagaaaataatgtaaattattttctattactaagtactagtgcatggcacataataaacattccataaatgttagctattaagattattatttatatatctatttaataatatctgctactattattattttagttatgtaacccctccaaaagctacctcttgagccttgctttctcaaattttaacctcttaaaatttaagagtcaaagggacactgaccatgatttcctagtgtgtacaatgtacttgctta

SEQ ID NO: 262257 - DNA, 289 bp, Homo sapiens
caagatggagacacaggctcaagatggggccagtggcagggtccactcctacaaacttgattggaagccacattcctctggctcataataaacattccataaatgttagctattaagattattatttatatatctatttaataatatctgctactattattattttagttatgtaacccctccaaaagctacctcttgagccttgctttctcaaattttaacctcttaaaatttaagagtcaaagggacactgaccatgatttcctagtgtgtacaatgtacttgctta

SEQ ID NO: 262258 - DNA, 334 bp, Homo sapiens
cttctcactatggaaaaagctaaggttttgttttggttttggttttttacaattatgtgaccttctgtatttacctttacagtaatattttccctttgattaaatagataactaagtattgtttcatagttacctgttatcctgttttatcaagggttcaaaccttttgcaatttttgatagtcttccccaaatcaaattctaaagtcttttaaaattttttttgttaaattttattttttaaaatttttatttatttatttatttatttatttgagattgcacccctgcactccagcctggatgacagagcaagactctgtctccacataaag

SEQ ID NO: 262259 - DNA, 199 bp, Homo sapiens
gcattttcactgcaggcagactcggttgccttggtgaagtccccgtgcatctgaagagtggctcatctgttcctgcctggggatcacttgtgctcatccaggcatggcccccaccagaaatctgggagaatggcgagctggtgccagctgaactgtgaacctctaagaataagtgaataaaacgattttatgcactaca

SEQ ID NO: 262260 - DNA, 423 bp, Homo sapiens
cctgtgtcttgaggtgggggaaagggaagtataaatgtttgccattaagaatttggtagtattctggtgatttattcattaacattgtgcggatgagggatggaaaaggtctagtttagccctcaccactctcccttttgtttctcattggagattttattacccaatcaatagattttacagaacactatttgcaggttttaactcatgtataaaaagaagccttcaacaaaaaccaagtgcgggtaacagcatatccttaataccagcatatccttaatactatacataatagctgatgtatagtagaagctcagtaggcatttcctaaaaaatatgactaaatcgggatacatttctgtagattccaagaaggttatgtaaaaatacaaaatatttttatgtttatctacatatatagtt

SEQ ID NO: 262261 - DNA, 497 bp, Homo sapiens
cccaccccaccatacgtagaaaaattgtcttccacgaaacaggtccctggtgccaaaaaggttggggaccactgctttaatgtattcatgttaactcattgccatgttttatactggttatagaaatgtaaaaaccttaaaatagtcaagacaactttgaaaaagaacaataaagttgatggactaacaccacctaatttgaagacttactagaaaacttcaaaatagtataatattgacaaaaaggtagacaaatagaagagtgggagagaatggcaagcccagaaataaacccagccatagacagactactaattttgagaaaggtacaaagggaacgtaatgcagaaaggacagtctttttaagaaatgctgctagaacaattggataaccatatgcaaaaaagaacttcatacttgatatgatattttaaaaaattaactcaaaaaagaacatagacttgaatgtaaaactgaaaatagaaaactcctagaaa

SEQ ID NO: 262262 - DNA, 453 bp, Homo sapiens
aagattcctctttcattatagtccaaactctattaatgcatgtctggattattctaacaaaagttcttatttgcttccctgactgggcctcaagatcaattttcctaaggcacctttctgatcatggcctacactcctctaaaaaagtccaatcgaacctactatgtatcgtcaatctgacaacccatgcctccctccccaactcaatctcctattgtttcacctcccaactcaaagccaaatgagaactttctaccgtccactgcattttccttcctctttagttgtgctatgacatacccttcccccagaagcctgacctccctcccttagaatggctcatacaaaaccaaggatctattcaaacacctactccataaaatagttcccaaagtagtaaaagcactgctccctctggaagggaaaatctaaaacacaggatacagaaatgga

SEQ ID NO: 262263 - DNA, 420 bp, Homo sapiens
aacataaacactatgaacgcttccaatttccaggcgagaaacaagttccaagcggtgaagcaatttgttcaagatcctatatagctcaccagtgacagcaccagggcctgagcccaggctgttgagccaagagccagagctgaaaaaatggagagatccccctggctgtgagattccaaatgtggcaggtcttcagggtttccttctgatttgtagtcctgcagcccacaccacaggggctgtggtgaatagacggaaaataccgagcctcctaattgatgtgaagccttttgaaaatgtctccgtgtccctccaaaatgaggagtgcctactcctcatgctgcttcagaacttctttatcttttaaccatttttcccttcaaatttaactctgctgacttctgcactgaggattaccta

SEQ ID NO: 262264 - DNA, 490 bp, Homo sapiens
gctgtgagagattgatatccagaaaaaaacattgtttctatcacattggtagcttaaaatcagccatggtgggtgtcttcataccacaaaaatttgcagatgctacaaaccaggcctttccttgtttcgagagctggttgttaaacgtttaccagaatgctactggtagtccaggctctcccacagctttacagtgaagaaccaaggtcctgtcgtcattaatattccctgtatttcatctaattgtttacttaaggattctttagctccttaattggagttaaagatttgttttccagacatgcctttaaagacatgaatttacagatagattcctaaacacataacctctccctgaaacgaaatatgtccttagtgaaaatgatatccccctaaagggtgtatgttcatgagaagaaaattagcccaagtgaaaaaaagccacagtcaggaataggaagggcaaactggaaaagaaaaaagaaaaaaa

SEQ ID NO: 262265 - DNA, 545 bp, Homo sapiens
tctgttaacattttgtatgtctttgtaattcttttcctactattttaacataattgatcccaaactaaatataatttgcactactcttattagctaaatatatgacaaaggcgtttccttatatttttaaaattcatcataaacattgtttttgttgattgcatactattactatttcaacttttttcacgtacaaaatgaataaactataccctagcagctaagcatttcattttcttacagtatttttatttttcaaaatgctgatatcattattttttgtccataataatttttgtccataatatttttggatcttttaagtatctttaaattttaaaacagttttaagatttttatcattgaaagaatatcgttggccaggcatggtggctcatgcctgtaatcccagctctttgggaggccaaggtaggaggatcaattgagcccaggaggttgaggctgcaatgagccatgttcttaccactgcacactacgctccagtctgggtgacagaatgagaccctatctccaaaaaaaagaaa

SEQ ID NO: 262266 - DNA, 387 bp, Homo sapiens
attattttacaactttatacaaatctacctgaaacttgtgtaccacattggaggaattgtagcaggcgtcttcagagctgacctctgcactctgtgacaccgagaatgccgaggaggctttcccgagtattcatctttagactatgagtagatccacagctccgaaaggtcctatgaaggtcactgaagaggtggtgaattcagggggaccgatcctgctggaaacttccatccctgcaccccacctgcccaaggtggctgaagcataagcacaaaggggcacctgagggatggacaggggcaccacgggacggtgctgatgtgggacttcaccgtgcagggtcacggttacggaggtgtgaaacctttccctgatgtaattttctc

SEQ ID NO: 262267 - DNA, 544 bp, Homo sapiens
caagtaattctgtaaagcatcagttttctcatctgtgaagtatgaaaaattatacctattttctgggttgtgaagatgaatgaacataatctagggaaaacatttagcgcatatgccactgaattaaagagaagcagcttaaatttaaagacaagccttaagcaggaaagaagaatacagtataaatttattatcctaactttttgaataataagcaaatgaaagatagttcaactcagctaatggctgaggtgtttaacctttcatcccttcctaattttgtgagattccttgttctaatttaggaaaagaaatcaactgtcagtttttaattaggtcctgagagactggaaaggaaaatggcaggctaagtcagtctagaagaaggagtctcctatttctttttagtgagtcagctggtcaagttgtgtgttgagcagtgggttaacttagggaaggtgggagttggaggtctgagttctttatttcacctcctattcagtcaactgtgtgaggaatcacttccccttcacttcttagtaga

SEQ ID NO: 262268 - DNA, 396 bp, Homo sapiens
agagctttgtgctgaacatcagtcctccacatcgactcctcttgtaagatgttgtgtccaggtggatcatcacagtggctgccatccttaaatatgtcttggtcctgttgctgctaattgatgtgagcttgtcgccatgtgtcctttaaagcatttaaagttttttttagaaacaaggaagacttttataacacccttcacattttataatattcctatttaaaacttgctccttaaggagcttttggaagcttctttaaaactctgcttggccgggcacggtaactcatgcctgtaatgccagcacttggggaggctgaggcaggtggatcacttgaggttaggagtttagaccagcttggccaacattgtgaaaccccgtctctactaaaaaaa

SEQ ID NO: 262269 - DNA, 298 bp, Homo sapiens
gattgtcaatgaacttttaaaagtaattctcatatttggtaataaaccatggatttaaaatttcatgtttaaactttataatggagtcacatttgatacattattaacattgccaaacatgctgtgtaattattttactgtctctccctaacccctcctccaatagaatgtgagctccaggatgaaggctttctctgttctgtttacaacagtatgctcaatctccagagtggtgctggcactaagtaaatattcattaaatatttgctgaatgaataaatgtaacttggtctcaaaa

SEQ ID NO: 262270 - DNA, 206 bp, Homo sapiens
gagtaaagtttggcaattctcactgatgctttgcaatagacatgtctattacatgtcaattacatttcctagccatgtctgggggccacagaactggcaaagaatcgtcagcgctcagaggaatttctacctggacttggaactatgaagccacccccttgtttttgtctagcccccaacctggggagacaccaggtcatggttgt

SEQ ID NO: 262271 - DNA, 300 bp, Homo sapiens
ggcctggtgacaactacagaaagacaataccttcaactcaaaaagagcaagagagtagaactacaatcaaatagcattgatttagatggaaaaatacgtctttgggatcatgcagaggtgggaagaaccaatgtttaggctgatagcagcttgtctaacattcccaagaaaatcaactttcaagccaagagaggaagtttggcatcaaaggacatcaacagtttccaccccgggaccagcagacagcaggatttgttaagccttaatgatatcatttgtgctttgggcacacacaatttt

SEQ ID NO: 262272 - DNA, 384 bp, Homo sapiens
tttgaattgtgctatcaatagttacttgatatggataataatgttagcaaaagcttaccaatagtgttagcaatagctttaaaaaaaaactcatcaaaaacaattatatctaagttagactatttcatttataaaagaagctacttttttttttttttttttttttttttgagatggagtctcactctgttgcccaggctggagtgcggtggcatgatctcggctcattgcaacctctgcctcccaggttcaaatggttctcctgcctaagcctcccgagtggctgggagtataggcacctgccatcatacctggctaatttttgtattttttagtgaagatggggtttcaccatgttggccagactggtcttgaactcctgac

SEQ ID NO: 262273 - DNA, 455 bp, Homo sapiens
ctctctaagatgaggggagttaagatttcatccagttagagctgtctctcagtgtcattgtaaaaccgaagactttgggcttaactttctaagtctcttcgagttctcatggtttggggctgtagagtaatgcaggtcctagccattctgctctgctctgacatccttccacctcttaaatgagtagtttttaaagtccagattgaagaatacatgacaggttgaaaactggtgactttagggaaatggcttcagaaagaagtgaggcagaagtcattggtgatcttactgagtgttggcaagagcaaaatttagacacaaaaaaactgggctttggctggatgtggtggctcatgcctgtaatcccagcacattgggaggccaaggctggtggatcacctgaggtcaggagttggagactagcctggccaacatggtgaaaccccgtctctact

SEQ ID NO: 262274 - DNA, 515 bp, Homo sapiens
aaaatccgtgctgctgggtggaacgcgggtgctgttcacattcgtgtgtggttttccctggcttatatgcaacagcttctttttctcttttcttaatttaaaggtgactcttctggaagtccccaaagtggaattgaccctaaattgaaaagaagatctttctagggcaagagctttgttcttgtgaattttctgcctcaccaaccatggggaatgtgagctgggggggaaaagtctgttaaagctggtcattcatttcagggggccaaggagcgattctgaaggagcaaagtctcctcatgctcttggccttttgatctactcaggctctgtggcaggaagacagggaggaatccctgatcacccacagccctccccgctgctgttaaggcagtatgatgatggggggtggagctggaattaaaaataaagaaatacaagcttgaattctactttaacatgaacaatctctaattttcatatcataaaatgaataaaataatattttttcccat

SEQ ID NO: 262275 - DNA, 506 bp, Homo sapiens
tggttctactaagctcagtggttcatgaccaggaaaagatgcagccctgagttgagtgaatatgctgtgccaataccctaagtccctaaaacagaatgtagacaggaaaagagaaatgcttttctgcaaatagcggcgcgtctgcagttgtcacctaacttctcgtcatcgtcatgttccctgagagagaagaggaaagaatcagaggagaatgcatgcctggggagggaagagaaaatacaagttacaggaaagaagaatatttaggcggtgctgggttccttagctgctaccaaattgatattatagacccttgaataaagtggtggaaattcagtcttctctgttcttcatcccccaaacttaatcagccgatcagtgccagtgtagggcatgtgtggacgtgtttgggggtgaggggcttgtgcatggtatatggggtcctcttacttttctaaacaaaattattcccttctaattttttccttccatctgaagaaagcaat

SEQ ID NO: 262276 - DNA, 622 bp, Homo sapiens
cacgatattcagacttgaatggcagcaccaacttttccctgggtcttcagctccatgaccttcagacttgaacggcagcactggctcctcccctctccagctccatgaccttcagacttgaacggcagcgccggctcctccctgggtctcgaacctgcccagcctgcagattttggacttgctagccttcaggatcacattagccaattccttaaactcaacctctttctctgtatgtaggatatggacacctcctgctggctctttttccggagagcccagtgaacacaccgtgcatcaggctccatcattcaccagagcgtctttccaacagactttgctgtgatatttcttaaataaaggtcactccaaagaccctcacctctggattgtaaccaactcagtggcagacttaatccatttctatctgctgacatttctcacatggaataggctgtttgacagattgaagctgtctccccccactccccaggccagtgcacacttatctcccttgaatgttcattttgtgctcattttagagactgaggcacaaagacaggcaaatacaaggtgaagtcagtgacaaataaacaatgctatttaggcattgagagtttgt

SEQ ID NO: 262277 - DNA, 550 bp, Homo sapiens
cagacatgtagaccactagaacagaatagagagcccagaaataaagccaaacacctacaaccatctgaactttgacaaacgtcataaaaacaagcaatggagaagggagtccccattggccctgggataactagctagctacatggagaagattgaaactataccccttccttataccacatacaaaaatcaactcaagatggattaaatacttcagtgtaaaacctaaaactgtaaaaaattaaaacctaaaactgtaaaaactaataaaatccttaggaaataccaatttggacgtatgccctggcaaagatttcatgatgaagatgcccaaagcaattgcaataaaaaaaaattgacaaatgtgacctaattagactaaagaacttctgtacagcaaaagaaactgtcaacagagtcaacagacaacttactgaatgggagaaaatatttgcaaactatgcattcaacaaaggtctaatatccacagtctataaggaacttaaaaagatttacaaacaaaaagtaacctcattaaaaaatggacaaa

SEQ ID NO: 262278 - DNA, 399 bp, Homo sapiens
gttacatagattttagctggataaaaaataaggatgaatactttatggaaaggaaatcatataaaagtctgagaagttaggggaaatagcttcttttgatgaacagaatgaagtctatggtatgactaaaacagcacaagcaagggtaaagggctgagagctgctgctggagaagtaagcaaggaccaggcacagaacctcaaaaagcatgttaatgaaactggatgtgacgccaagggccagttaagcatatgataaagaaagctaatttagaaagaaaactaatagtatatttcaaaatactccattcattgaatgggcattcagtgagtttttgttgactattatgcctacccatttaaaaggagaattattcatacattaaattctgtgaaaata

SEQ ID NO: 262279 - DNA, 418 bp, Homo sapiens
gccactgcacccggcctgattccataatttttctcaattgtttcctctgagtaggatctcattttctctgtcatttgctttcctacatattaaagctccctcatttttttttttaatttatttacttttattattttttagtagagatggggtcttgctctgttacccaggctagagtgcagtgcttcaatcacacctcactgcagcctcaaacccctgagctctaatgatcctcccgcctcagcctctagagtaactgggactacaggcatatcaccacgcccagctagcttccttgttcttccattgttactggaaaggggtcctgatccagaccccaacagagggttcttcaaccttgtgcaagaaagaatttggggcaagtccatagagtaaagtgaaagcaagtttatgaaga

SEQ ID NO: 262280 - DNA, 693 bp, Homo sapiens
gtctcctttaattttcggtctatttaagaatgaaagatggaaaggaggtgagtggggcacaatgaaaatacaaaagcgagcatattctcttcccaaatctgggttctttagtacgggggcaaatgtcccactgcctcaggacactctggagttgagaagaaagtgttttgaacattgtgctttaaacaatctttttaagaaagcgaggaaatgtataattcattttgcagtcttgcagaagtggttaatgtggctgattttgtcactcagctgcatttctctggaaaaggcgtttatgtggcatggtttgttcactaatgatgctaagtgaataagctgtttctgaattatgggtgccagcagtacatgtgccaggtgaggcagttcttacttgtatttgtcataaactgatacctgccaagctgcactcaggcccttggggctgtagctttgctggcatccatcgtaccccaggcctctgaatggctggcagttggtacccacccacatcccctcaggaccattggtcaaggctctgcctcccctgctgttagctgcttccctttgcttgaggacttgctcaggctgccagagcctgctctgctcagcccagaagtacctgagaagtaacagccgtagaagccctccaccagtgactgactggagttggtggataaataccccagctccctc

SEQ ID NO: 262281 - DNA, 510 bp, Homo sapiens
tgcccgccaccacacctggctaatttttgtatttttagtagagagggggttttgccatgttggtctcaaactcctgaccttaggtgatctgcccgccttggcttcccaaagtgctggaaatacaggcgtgagccactgcgcctggctgagttttacttatttattactctgctttttaatttatttaactgtaagtttatatatcttaatttttaaatgatgaaggtggtaataactggcttgcaaaattcctgaaaacttaagagtcctcatgagctagtcttcactggctccagcatctgggagcaccacaatactttacctaaaatcattatggctggatgttagaatactgagttgttcagattttaggcaggtaatatggaatatgtgtcataagatgtaacacctcctgtgatgtctgaggcaggaccctgtagtcaaaattttggtatttctgtagcaaaatgtgaatattcaccaagtaaataaatactacaaataatcttg

SEQ ID NO: 262282 - DNA, 504 bp, Homo sapiens
tctattttcttactatgtatcgcaattttataaaagaaaaatagttgtcatgaaggaagaggtgttacaatcctgggtaaaagggccagggcaggagcatggacaagccacaggctctgggcacctctggaataaaatctcacttcagcttaaaataccaaacgtatactgtgaccagcaatttcaatatggtgaccaactgacatgcccttcgaacgccaagaagacaacagccccagaaacagcttcagtcaggagacccagggtgctggcccggttctgccgccggccggctgtggaacaggcttctggagcccgagggtgacgccccagcctctaagagcaggtgcttgagaacaacaggggctgcctcatggggtggcctgtggttcagtctcaaaagcagcaaaggaatcaatgaactgtgagacgctgatcgttactcactccacagattactgtggtgacactatgtgcaaaaccaggaggccagccatgctttta

SEQ ID NO: 262283 - DNA, 439 bp, Homo sapiens
tctacctcccaggttcaagcgattctcctgtctcagcctcccgagtagctgggattacaggcacacactaccacgccttgctagttttcttgtatttttagtagagatgggatttcaccatgttggccaggctggtctcgaactcctgacctcaggtgatccacccgccttggcctcccaaagtggtgggattacaggtgtgaggcaccgcaccctgcctgtattaaatatatttaaaaggtaagggcattctgtatgacattactagaatacctctgcagtttgtacccaactttacattcttttacattttgctcattacctgtcaggagaaaaccctccttccccagtctccactgtccatcatgatgatttcccccatcaaatgaaaataattaagatacttttaaaagctgaaaatgcaacaacattccaaaat

SEQ ID NO: 262284 - DNA, 303 bp, Homo sapiens
ggttgatcctgttttctagctctatttccagagcctgtgtttggagctcatcaaggtagaggattcttttgcttccctgttccagcttcagccagtgacaccaggatttagattccagcacccccatgaaatatagttgccgttgcctctcatctcctgcctcctttttaaaaaactgcttcactgagatataatccacagaccatacaattcagtggcttttttcgtatatttacatagctgtgcagcctgggcaacagagcaagcctccatctcaaaaaaaaatagaatgctacgtttacc

SEQ ID NO: 262285 - DNA, 257 bp, Homo sapiens
gccgcggctttctgctcccgccgccgcggctctgagggcgggagcggcagactccgctgccagctctactggcgtcctggcaagggcagcgccgaggggcgctcccggtccagctctcccggctcgggggttccttgcctaggcgcccgagccccgggctccctgcctcggccgctgtggcctgcatagggcggcactgcgcgcggaggcgatgggagagaagaaggagggcggtggcgggggtgatgcagcggccg

SEQ ID NO: 262286 - DNA, 405 bp, Homo sapiens
ggaaacaccagtgaagagtgcacacaaaggaaagaacttgtgagaacacagtgagaaggtggctatcctgcaagccaaagacagaggcctcaggagagaccaatgcatctggcaccgtcatcttggacttacagcctttagaactgtgagaaagaaaatttctgttatttaagccacccattctgtggtatttcgttatgtcagcctaagcaaaaactactgtaatacagaaacctgtgacatacttatgttagtaaaaatgtacaaattgtttgtagcaagagaatttggttaaatggctgatgtaaggtcctctgagctggcctcaccatggtcaagccatggtgacattccctacccttgtgataatatactttgtgatattccttgtgaatgtactttgta

SEQ ID NO: 262287 - DNA, 417 bp, Homo sapiens
cacctcccaggttcaaataattctcttgcctcagcctccggagtagctgggattacaggcacccaccaccatgcccggctaatttttttgtatatttagtagagagagggtttcaccacgttggccaggctggtcttgaactcccgacctccagtgatctgcctgcctcagcctgtgaaactgctgggattacaggcataagccactgcgcctggcctgttaattattctttaaaaagaatatatgttatgtgatcttgactatgtaatttatacatacacatactaaggcctgtatgttaataaagggagcttgagaaagtgagacaagcatgaatcttattttccaagcagcagaaatcctctctcaggaaatatttcctcttgctagacgtttatcttgatgagccttagggtg

SEQ ID NO: 262288 - DNA, 386 bp, Homo sapiens
ataaagcacctggcacataaaaggcagtccttcattgtttgccactgttattattattgttgttgctaggaacagtaatacttatttagatttttttcctattaaccttgacagtggaagctgcaagggaggaaccataccttgtttatccagtgagctttccctgaggcaagtaaagcatgctgcatgtggtttaattatgctgttccacaaaatcataaaaaatgtaataggttttaagaagcattaataacaacttagagttttcagtcactttccttctctcccagaaccaatgagaggttctcaccatgtttgccaggttcaaaggagagggcttactgacatttgccttgttgaattcaactggattcaagttctgactc

SEQ ID NO: 262289 - DNA, 422 bp, Homo sapiens
agcatcctttcaaaatttcattttctatttgatgctaaagtataaaatttataattttgaattttaatattaatgcttacatctagtaacattgtaaattttcttattattgcaaatactgtatccataaacttttaaaatttttctagatacatgatgtaatctacttttaagaacacttatttcttttttttcaagttttccaatccttatacttattactacttttctttttatttaccgtgctggatagtatccctggcacaatactgactatgtcattagttttcattgattctatgctagtcttttttatgctgaaaacttcctaaaacaaagagtgtgtgtatttactaatctctgtattgacagaagccccatgaaaactcaataaatatttgttgaaagagtaaagctatcaa

SEQ ID NO: 262290 - DNA, 263 bp, Homo sapiens
atgtagagtattccttaataaagcggttttttttttctttttaaaaaataacctgcaattttttattctgtctcaaaaaaaaaaaaaaaaaagaatatggaagttataaaaataatctgtgatcatataatgactgttttccccaaaaagggcattactttcctgcttcaaagtatgtatttcttaactaaagtgtttgtgggatatggctgcgtgttggcatcacctagagaacttaaaaaaaaaaaatgaaaacaaaaaca

SEQ ID NO: 262291 - DNA, 611 bp, Homo sapiens
gccatcaaaggtacttgtttataaggcagtaagaccattatgcaactttaaattttatcccactctgtttgtaaagacaatcacaaattgacaatattctttgtcttttcttttttggagcatatatacagaagcacacacacatatacatattcgtgtgtatgtatatgtatatctgtaaacacagatatgtaaagtgactttaaaatacaagtacatgtgtttcattttaaattctagcgatgtcattgggaaagaaagtgtagacaaagttacatatttttgtaagtagtgtacttttatttacgttgacagttaatatttaaaaattttttgttacagatacaaattttggggagaattgtccttagaaacatgttttaaatcgttgttctgatgtcttgataactggtaccaggaaaataaaagggttaccaaaaggcagaaaccagtttcaaattatctgggaaataaaaacaggaaactcagggaacttggcctgagaccagttggagaggagcagttgttggttgaataattatacctgcattttaactgttggaagtcatacagcgaccttctggttgttgtgatttcttgtgcccgtcaaa

SEQ ID NO: 262292 - DNA, 228 bp, Homo sapiens
ccagagtcccgttaggtgtgtttagcctgaatactccttacctgtaatgtttccttttagtaattttccacccactgactgccaccctgctccttggttataaactcccacttgcccaggcagtattcagagttgagcccaatctctgtctctcacccactccaagaccccgttgagcggtccctatgcccatccacatggtcctgaataaagtcttccttactgtgc

SEQ ID NO: 262293 - DNA, 1463 bp, Homo sapiens
gaactaaagttatcacattgtcctatccccctccttccagctacctgtcaaaatcgtgatatagtcagataatgaaatattatacagcaggtaaagtaaccaaaccagagtatacttatcagcaggtataattgccaagaatagaatgataagcaagtgctaaaagcaaattccaggtacaagatggcatttatattataaaacttaaaaaatgcaaaacaatatgttgtttctgaatacaggcatttacagtaaaggtataaaacatgcatggaaagcaagtttatgataaaggccacttactagtggagagaatgaaagacattggatttgagaggcctctgcaaggagtttcacgtatatcattaatgtgatagtgtgtatatgggtgtttatattatagccactatatttttggtattcttgaaatattttatgtaaaatactcagtgattgttttgaagtaggattcaaattgctttaaccaagtatttatgtagatttttaagtaatttgaataacaatgatgtaaacattctcacacctgtgtttgtgtgtgtgtgtgtgtgtgtgtgtgtgtgtatttggttaaatttgtctcataatgaagattgctccaatataaatatgatttgacaataactgcaatatctacagtggcagacaccaattggttcttcccagaacatcatagaaaaaattatgatgataaattgtgataatcttgaaatgttttagtatatactacctcaagccaggggatgaagcaaaggagataatagcattcatgacggtatattattacacttagcttcagaactagatttgttgccttagatttttatcccactttatccctcaaagagttgagactctgaatgcctgttctttgtgttcagcaaggtgcccagtataataactacatagtgcggacatttgtggagtctgtacaaatctgtctccccctcctagattgggagcctccaagcagtggacctgccgtgttctcttaggttctgtcactgtgcctgctccctgagcacaagtggtgatgccatggctggatggctggtgccagatccttcatggtttcaattcagtgtggaacacatcaaccttctgcatgttgtttgatttagatttttctaataacgaatttgtactgtctgtatttatgaaagtgccattattgttgtggtactttttttcacccatattttgaatgtaagtcctgaaattacatttgtaagtggaaaaattcacagggaagtgtttgttttcaggcaaggaaggtgcaaaaagtggaaaagcccaagatgtgagtccaagatgattaggagcaaaaccaaggtgtccctggcagccactatttatttttaaaggacccctttgtgttttgttaattgcctaaataaacagctctccaggacagagaggcttcttttttcatggaattccctaga

SEQ ID NO: 262294 - DNA, 659 bp, Homo sapiens
cccttctccagccttcccctcctcaattcgacccatttcttccctacttcccaaaagaaaaaatatctactttggattaatataaatcagtttaatctaacttattcaagacttttttggcctctacttggaggttcaagaaaaggtgtgtcaggcctctgagcccaagctaagccatcatatcccctgtgacctgcacatacacatccagatggccggttcctgccttaactgatgacattccaccacaaaagaagtgaaaatggcctgttcctgccttaactgatgacattgtcttgtgaaattccttttcctggctcatcctgtctcaaaaagctcccctactgagcaccctgtgacccccactctgtccgccagagaacaacacccctttgactgtaattttcctttatctacccaaatcctataaaacagccgcacccttatcttccttcgctgactctctttttggactcagcccgcctgcacccaggtgaaataaacagccatgttgctcacacaaagcctgtttggtggtctcttcacacgcacgagcatgaaagtgaggtgatacaacgagggggaaaagaattattattattattattaaggctaacctacaaatattttgaggtattttatgggtttaaatatccata

SEQ ID NO: 262295 - DNA, 524 bp, Homo sapiens
gcttatgggatgagctacgtttcccatagaaggggcagtagtgagggttttcttatctgaagcaaaatctctgacagatgatgagaaatgcagttttatgtcattttttttctgataagaattctattttttttttctgagtgactgtaatgggccttccatttattttagacaaaaaagacagaattagcattttaggctcagatgatagttattagaaagtttgagatgggccaaagtgcagggcaacagacggcaagggaaaagaggagcatagctggtgcatttgatgctggtaggttggagggagggaggaggtcagagttatgaaggcggccagggaaggcttcctcggaacctgaagaaagggagacagcaactgcagggaaggatctgtgggccctaatggccacgtcacactacaaaggcccggactttgtccaactcgcttctgtgctccatgagtgcacctgtgtctgaggcacatcagctctaagccagtgttctctagtgatggagtgaat

SEQ ID NO: 262296 - DNA, 436 bp, Homo sapiens
tcctctctgtaacacagcctgtagaatccaggaggaaagcgtccctagtctatctgaagtagctatcaaaagactctggtctaaagccatgcattttactttttagtttctcactcagagccttatcacttttattaaacttccagtccttaacaccactgagagtctgttttcccagcccggacagagaccaccaggtagaaagggacagagttgggttatttttagaagcagctacagttacaacagaagtggcaactggacatggagaggtgacagaatatcagaaaaatagaaggtaaaataatggatgttcaaaattttgaaatgctgaagtcatggaacaagattatgctttcccccagtattctctgtaatagaagtcacagaaatatgtgatacattttaataaagatttttatgcaaaatgaaaaaa

SEQ ID NO: 262297 - DNA, 368 bp, Homo sapiens
tcttattgatttgtgttagttccttgtacattccagaatgtaatatacaatgtgaattaaaaatacctatagactagagtttacaacaaaatgtataaatatatggatatatgtgaaaaaggcggtctatggaaacaagagaattgtgaatagaaaatacagataaaaaggaatatataataaaacacaggaattttgcagcctgaataaaaaactcctatgcaactgaggcccttaaaaatccattacttgggctgggtgtggtggttcacacttgtaatcccaacactttgggagaccaaagtaggtggatcactgagtccacgagttcgaaaacagcctgggcaacacagtggcctcatctctac

SEQ ID NO: 262298 - DNA, 504 bp, Homo sapiens
ccatatcagtagcctaaccttatgcagtaataactgattcagacttcatttataaaacggaagggaaaaatgcaagaataaaaaggaagagaattcacagcagagcaaagagaaattactgccatatgaactctaacactgtagcattctttcacggtctggtactttttaatcttgagtcatagatggaaaaataaaggaaaaaaattgaggcacaaccattctacagtaggcaaggcaattgagattgcttggattcattactctgaactccagcaaacagctacagaatgcctagaattccccagacatgactattacagctctctgtggtggctcaacagacttcgttttcagataggttatttggagcaccaattttctttctaaaaatctttgttttggccttgatttggaaataacctatgaccgtagtatttatttttctgcttaagaattcatagagaattttggtttgggcagcatgacaacttttacttaata

SEQ ID NO: 262299 - DNA, 447 bp, Homo sapiens
catgcttaaaattaaaaaaactaagagaatgtaagttccaaatgagtgtcacatgactataattgatagtaaatcttcacttacctccataacttaggagtcatgaaaagaaagaagttagcagaccaggcatgtaaatcagatgtaagtaggatggaataccagaaatattcctagttctgggtaacccaatttgaggtcattttaagtttactgaatttggattaatcaattggttcaataatcaaggtaaaatggtccaaaagatcctgatatatccagaagacatattactgaggttttacaaggctaatttgaaatgcagattaacattctaggtttccttacatatcattaaaatagaccatattaaaaatcaatttcagaagctgctttatgactggaataaaaaacaattaaagatgtagagtaacattgtatttctgt

SEQ ID NO: 262300 - DNA, 638 bp, Homo sapiens
aacatttgttcgtcacctactatgtgctaggctctggggagaaacaaaaacaaatgaaacaagaatcaccaagactcaagaagcttacaacgaacggcgaataaaaaggctagaaaaccactggcttcgggaatctgtggtaagtgctattcaaaatgggtgtccaggccaggcgcggtggctcacgcctgtaatcccagcactttgggaggctgaggcggatggatcatttgaggttaggggtttgagaccagcctggccaacatggtgaaaccccacctctactaaaaatagaaaaattagctgggcgtagtggcgggcgcctgtactccgagctactcgggaggctgaggcaggagaatcgcttgaacccaggaggtggagggtgcagtgagccgagattgcaccactgcactccagcctgggcgacagagcaagactccgctcaaaaacaaaacaaaacaaaaagtgtgtccaaaggaagggcctctaaatcagatttctcatggggcattagaaatatagaattttgtttttgccatatttttcatacaatcttagcttaataacaaatctgaataagctataaactagataacaaggccttgaataattccattttcttaactttaagttga

SEQ ID NO: 262301 - DNA, 308 bp, Homo sapiens
tttgacagtggtgaactttgatctacagtcccactttacagaatcattttcacaaaaacattttgtgtgatcctttcatctcattaagcacccccccaaaaaatccacatacgggacatttaatgccattgctgtaagctgtgtgtttagtataccatttaagtacttttaaaaatgtttgaaactcaatttatttattatatttgcatgccaaattgtgctatccaaaaacatggacctcagatcatgtagacataaatgaatgaatgaatgaatgaatgaatgaatgaataaaattttatcttcta

SEQ ID NO: 262302 - DNA, 306 bp, Homo sapiens
gagggggctggggtgggtgaggcacagacacttgctgccagagcatgtgtaaccagcagtcctttgttcaccatacctgcttcaatcattgttaggaaacctaacaatgtctattacagcaatgccatcataaatgtctgaatcaacgtggctgaaagaaacaccactaagattgaactgaagactcctagaagaaaacagataacagcagaaatagccctgagagatcaaattgctttttattccatggacatcatgatttgacacagaaaggttagaaaatacaaatatatatcactgagttca

SEQ ID NO: 262303 - DNA, 478 bp, Homo sapiens
tttctcatagataattcttaacagaataaaagctacaggttgaaaccaattccctttaaaatgtggacagttgaccatctccatgataggtagttaggcactgaattaatgctttttaatggaagagccaccctaagattcctggagtgtggtataatggagtactaaatcagcataggactaataactgcctcctgtgtaaactggtctatccggagagtggtatagcctctcatacagtgttcaaaggcagatttaactcactgcaggtccacagcaaccgataagataaactcgttggttatggtctcccactttgcaaaggagagcacagaggaagaggaaactgagataacttggtttaggaccccacagctggctggagctgggctgaacattagttcattgtttcttcgattaatctatgctgctttttctctacttggctccttttctaaattaaacaaaacaaaacaaa

SEQ ID NO: 262304 - DNA, 219 bp, Homo sapiens
acatatgaattttgagggtgaggaggacaagcacattcagaccatagcaattgccttaataaagtaggagctccctaagtacccctggctttaggcatgtttgtaactaaaggttgacacaacatccatttctttctgctctttgacctcattttctctatgtgggctttcttctccagcagaacgaccctaccgactgcagaggtggctctagcagca

SEQ ID NO: 262305 - DNA, 445 bp, Homo sapiens
ataagaagataggtattttctgtatctagccaggtgagaccacacatttagagttataagacagattgacaagatcagaactacaattacaagctatccacaaactgttgcagaggcagacaatgttttctggatgctttccttagcctgagtttctgaacctactactatatgaaggagtactgccaagacctagccaaaaaacaaaaacaaaaaaggccctggtggcttcaaagattttgacattgaaaacttgtcccagtacctgaaacatacaatgtcatgtgtcagcaagctcagcctggagcccacaccttggccatctgcccagaattctcaccccagttctctaaaactctactctttcttctcgggtggactactttttgatcccaaagggcaatgttaatggggctttgatgcaactgagacatagtccaaaaaa

SEQ ID NO: 262306 - DNA, 403 bp, Homo sapiens
agatacctattttgccccaggatgaggagaggtaagggggatattcctgggtgccctgttgcctgctgagaatacaaacaagtaagcccttctgcacagttcacatgcagcttttcagatatgggttttgtttgtaacttagatatgcacattaaaagacagatctgggaaatctatgatgtaaatgtaacaaatatgacttgattttttctgatgactccagtgttagctgcctgccagaccttttcagctacttagtggcagacatatcatcagcattgaaatctgtctgactccaggtccagtccttaaacattataccaggttttgggttatttacaatcataaatttcattgaatttctttttacagatttcaaactgtataggttgtagagggtcag

SEQ ID NO: 262307 - DNA, 289 bp, Homo sapiens
gaccagttgtctgctctcgaactctgtttcctgttaagatgtttatcaagacaatgcatgcacagcgggacacagactctcatcagtaattctaattttgcccttgccttgtgatcttttattgccctttgaagcatgtgatccttgtgacctactccctgttcgtacatcccctccccttttaaaatccctaataaaaacttgctggttttgtggcttggggttgccatcacagtcctaccaatatgcgatgacacccccggaggcccagctgtaaaatttctctctt

SEQ ID NO: 262308 - DNA, 311 bp, Homo sapiens
ccagcaatagaaattaactctggatgattcaagtggaaaagaagtttgttgaaaggatattgagtagttcacagagtcatttggaacactagagaaaaggcttaaaaaatgggcaggcaggataaaacaaagtgcatagctttgaagctaaaattatgctgcagaacttgactagtgaggatattttttctgatgccagcaaatgctagatgaatggtttgtacctctcatttctctagcattggcattggcattgtttgctgctgacattggctactggatgacccccctgctataactgtgaccagatc

SEQ ID NO: 262309 - DNA, 313 bp, Homo sapiens
gaggaccaagccatgcgtgcctttgagctaatgaggagcaacgcggccctgttccagctgggctcggcccccgcggtgtgctggattgtgtgcacgactctgaagctgcagatggagaagggggaggacccggtccccacctgcctcacccgcacggggctgttcctgcgtttcctctgcagccggttcccgcagggcgcacagctgcggggcgcgctgcggacgctgagcctcctggccgcgcagggcctgtgggcgcagatgtccgtgttccaccgagaggacctggaaaggctcggggtgcaggagtccg

SEQ ID NO: 262310 - DNA, 398 bp, Homo sapiens
gtgtcaatacactattgacagcttgtcaaatccattcatgaagacagcaacagcgcgaagctgaccgagtccgcgggcttacctcgctccacaccaacatagttccgaatacaacttgcagcccgtcaaagaagttgtcgccaattatgatgacggtggcaccccccgtggtccagccttcactgggactgatggccttgatgcacggagtggctgctcacacaagacagagaaggcagaccttagagccccgtcctcctccgacgctgggccgctcggccaccgcgcgtcccgcggccaccgcgggaggagaggcgcgccgttcctccaggcggcacgcaaagggcaaccgtagatcagcatgttgatgtgtttaaagcaaactattaaatgtttta

SEQ ID NO: 262311 - DNA, 472 bp, Homo sapiens
aatccaagcatgctcagctattgctgctctttctaaaaaagcagtttattctctcaggtacctgtgattctcctgttaagttagtctcccctcatagcacctgtatttttcttcccatttaggatacaggtgtgtgtatgtggggtaggtttcagaagaaggctcatgtttactaggttgctatgaatatgaacctgatttattttacatgtgttttctcatttaatcttttttagcaatcctctgaggtgggtagaattatgcccattttaacataatgaaaataagcttcagagagagattaagtcactttttcacaactaggaagagacagaactgagattcaaatacaggattttctggattcccactgttttgcactgaggagaaaattttcagcttctatttgttaccagttgtaagcccttacgatgtgctccacataataaaaacctatgctatttctggcttt

SEQ ID NO: 262312 - DNA, 644 bp, Homo sapiens
gtggcgggtgcctgtagttccagctactcgggaggctgaggcaggagaatggtgtgaacccaggaggcagagcttgcagtgatccgagatcgcaccactgcactccagcctgggcgacacaacgagattccatctcaaaaaaaaagatagtgtaatattggcactgggtaggctaataatgatggaccaatagaacaccatatggagtccagaaacagtattatgcatagccagacacttgatttatgacctggaggcatggcagaaaggcaggcaaaacaataacacttttagaattaatataggaagatactcatgaccttagtatagagaaacatttcttaaacaagatgctacaggcactaatagaataatgggcaaaagtcttgaacagccacttcagaaaaggagaaatccaaatgtctaataaacatgaaaaggtgttcaaccatgttaatgaaggaaatgcacatttcagccacagtgccagaacactgtatacctaaattaaagttggatgttgaacagtagggactttcatagatggctggtacagatataaattcatatgactaccttggaaaacagtattatcaagaaagtccaaaacatgcatactttaatgaccagcagttccaatatta

SEQ ID NO: 262313 - DNA, 2189 bp, Homo sapiens
  misc_feature (1323)..(1323): n is a, c, g, or t
ctcaatgtagtatagaataccatacaacaccgtttttctgctttctttttattcctaaataaatcagatggggttgataatgttaggtgttcatgtcactgtgagtctggtgtgaactggcagttagaaggctagcagggtgaggaggacatctgcctataagggtgacccggcatgaggcagaacctgagcagagtaagggagagacccatgtgaccttggtggggtgtcattgtctgagcaagttgaggaggatgttcacgtggggtaggggctaagatgaagagttagagtctgagtagggtaagggggacatgcaaactggcttttgagtccttggatggggaataggtgatgacagagatggaaatctggctacatacagaggaattggttaaatagataaataaatatatgaaagacaatgggagttagtttcttactattgtaaaaagggttgtaaatatagcaaaggagaagagtagatgaaccatgaagattgggttcaacactactggtatgaactcatgatttttaatataaatagataaagatagataaaaaatatagttgtgtatttataaacactctgaacgtgtgtttttgtatgtgttatgtacatacacatatatatccacttgctctgtccactgagaagactttggagcagctattctccacaagaatggacccaagggttctttgagaaacactgctttcaggtctggagcaggggaagtttggtgggtctaggtcatcttgtggcaaaataaataactcagaccttcttggaggtgtttccactggctgaaccatgttatccttgcatattaaaataactatgattttaatagattataacccactgataaaacaagaaagcaggagtccatggtgatataattaacaagataattatatcacaggatatttaaatagtttagaagtatatcatcacaaaatattagttagaaaggaatttcacagtggagaaagatgggtggtaggtctcatgttaatctagtgatcaaagtgaatgccattatcaatgagacaaattaaaattatgtcccaattttaataccagaaatgtataagatcaggtaaatccagattggagaacattacaaaataactggcctatgattggcaaagcatcaaggtcctcaaagtcaaggagaaagtgaaaacctcttgcagcctaaaggggactagaaattcataaaagtaaacacaacacgtgaatctgaatgcttagatcactttgctataaggacactactaggacaactggagaaacttactgttgtctacagattaganaattttattagtgttaatttcctgatgttgatagttatatgattatataaaataatgtcctttttttgctggaaacagaaaatttgggattgagggacaatgggacatgatatcagcaatttattctcaagtggtttaggaaaataaaagattttgtgctgtacttctacattttttcttagtttatgattatttttaaaatattacaagaaatgcctcttgaattcagtgtaagaaagtgtgaacaaattacttaaaataaatttcagaagttattcctatcattttatctaatgattaattaatgcatctacaagtgttgtcttcatacaaattttattaagttatcctcttgtataaacctagaaagagcaaattggaaatgttcctcttgaatatttttagaactggcaagaatatttcttcaggtgatagagaatcagaactatctgaaattctctggaagcacatttttaaaaatgtttacatcacattttgattggccatattttaaataagaattctcattagtattcttattttctgatcataattgatcccactcttgattagttaatataattcttttaaacatcaactatttttctgtgctgtgataacaagtgatagcttcaggatatatatatatatatataggaatacaggacttttaatttattactaaatggtcctaagattcttattcttttcctccctccctttcccacacctttgcctctcctcgtcatcccccttcttttcctctcctactctctttttctcattcaggaataagaaaatgctaattattgctacaaatcttcaatactgtgctagaggactaaccccaaataataattttgatg

SEQ ID NO: 262314 - DNA, 191 bp, Homo sapiens
cctccaccctctaccccctgtcagcaacctgttcttcagggactgggtgccttgtcccagctctgctgcaacacactggctcaggaataggagataggaggaccctgccaccaacccccgcttcaccttccctaaataactcgtttgcaggctaattccatcaaatttatccctgccatcaggagagaaat

SEQ ID NO: 262315 - DNA, 424 bp, Homo sapiens
gtgaaaccctgtctctactaaaaatacaaaaaattagcccagcgtgtagtcccagctacttggaaggctgaggtgggagaattgcttgaacccaggagtggaggttgcagtcagctgagattgcacgattgcactccagcctgggcaacagggcgacactttgttctccgccccctaaaaaacccccaaaacaaactaaccccatttcctaggcatagtttcagtgccatgcctaggtagtggagagcaagcagctttcaacctgggctgcctggattagagcccatgttcttaaccacaagactaaatatccccccaacttgtgcttcttgtataaagtaatggctgtttcctgatttttttttttctgatatggagtctcattctgtcatccagactggagggcagtggtgtgatctgcaac

SEQ ID NO: 262316 - DNA, 514 bp, Homo sapiens
gagtgacagctaaacaggtatgaggtttttttcagtcggaacaaaaatgttcagttagattgtgatggttgcactatcctgtgaatttataaaacacgttgaattttacactttaaattggtgaattgcatggtatgtgaatatctcaataaagctgcttttttttttaaataactagaatacaaagaaagcagggaaattcttgctgaggagaaatactaatgtgattatttgtcttgttaatgaatttcatgtcctcgttcgggctaaatatttgtcaatttttaaaaaaatctactttcagaaagagtttcaggtatctttaacagaagatcaacagattaaaacaaatttaaaagaattagggccaaatagtctagggaagaggagagatggatactattttaccagaaaacttaggctaagtagagctaccacagttcacttagcttttgctttctggcagtacaggccaacaagaaaacatggattccttaactaacattattaaata

SEQ ID NO: 262317 - DNA, 903 bp, Homo sapiens
gtaggcgtggctattttttgtatttttctagagacgaggtttcaccatgttgcccaggctgatcttgacctcataagctcaagtgatcctcccacctcagcctcccaacgtgctgggatcacacgagtgagccagcgcgcccaacctttaaccaatttcatatctacatagtccattttgtttctgtcaggctttctaattttcttttgcaacaagagttctgctttgttcttcctcttagattgcatatgcatttactctaataaatggtgcaaagaaagctttccagctctttttagtgatgtaacagaagagtgggcatcttggaaattagcactgttttgacttatatgagagggaactgctgtcttagtaactactacattaataagacaaatgtccagttactagttactactcagtctagttttgaaataacaagctaaatctaaaaatctcttagagtttgggtttcagcaaacatttatgaagctcctgtaatattcaaacctccatattctgtgatttctgctatatgctggtcaatctgaaagatacgaagatatgtaagagggctttaaccctcaggtgcttccaatcagtttgtaattattttccaacaataaataaattgaatttatttcattagatattttgagaactaagatattaataatttttttcttttttttccccctgaaattcctgagcttcaactagttggtctgtttttatagtagttatgttagctataaatgaataaataaaaatcagcctgccagtttatgtagattctcccctcgaggaggtggagcttaactcctccaccacttaggggtggatgatgagcttaatgacttgtttccacagagtacagtgtggaagggtggggagaagtactgc

SEQ ID NO: 262318 - DNA, 1747 bp, Homo sapiens
  misc_feature (2)..(3): n is a, c, g, or t
  misc_feature (1741)..(1741): n is a, c, g, or t
anngccaccatgctggcctcagggctgcttctggtgaccttgctggcctgcctgactgtgatggtcttgatgtcagtctggcggcagaggaagagcagggggaagctgcctccgggacccaccccattgcccttcattggaaactacctgcagctgaacacagagcagatgtacaactccctcatgaagatcagtgagcgctatggccctgtgttcaccattcacttggggccccggcgggtcgtggtgctgtgcggacatgatgccgtcaaggaggctctggtggaccaggctgaggagttcagcgggcgaggcgagcaggccaccttcgactggctcttcaaaggctatggcgtggcgttcagcaacggggagcgcgccaagcagctccggcgcttctccatcgccaccctaaggggttttggcgtgggcaagcgcggcatcgaggaacgcatccaggaggaggcgggcttcctcatcgacgccctccggggcacgcacggcgccaatatcgatcccaccttcttcctgagccgcacagtctccaatgtcatcagctccattgtctttggggaccgctttgactatgaggacaaagagttcctgtcactgttgcgcatgatgctgggaagcttccagttcacggcaacctccacggggcagctctatgagatgttctcttcggtgatgaaacacctgccaggaccacagcaacaggcctttaaggagctgcaagggctggaggacttcatcgccaagaaggtggagcacaaccagcgcacgctggatcccaattccccacgggacttcatcgactcctttctcatccgcatgcaggaggaggagaagaaccccaacacagagttctacttgaagaacctggtgatgaccaccctgaacctcttctttgcgggcactgagaccgtgagcaccaccctgcgctacggtttcctgctgctcatgaagcacccagaggtggaggccaaggtccatgaggagattgacagagtgatcggcaagaaccggcagcccaagtttgaggaccgggccaagatgccctacacagaggcagtgatccacgagatccaaagatttggagacatgctccccatgggtttggcccacagggtcaacaaggacaccaagtttcgggatttcttcctccctaagggcactgaagtgttccctatgctgggctccgtgctgagagaccccaggttcttctccaacccccgggacttcaatccccagcacttcctggataagaaggggcagtttaagaagagtgatgcttttgtgcccttttccatcggaaagcggtactgttttggagaaggcctggccagaatggagctctttctcttcttcaccaccatcatgcagaactttcgcttcaagtcccctcagtcgcctaaggatatcgacgtgtcccccaaacacgtgggctttgccacgatcccacgaaactacaccatgagcttcctgccccgctgagcgagggctgtgctggtgcagggctggtgggcggggccagggaaacggccggggcaggggcggggcttgtgggaggggcggggctaagaatgggggcagtgggggaaggaaggggagaggtggttagagggaacagaagaaacagaaggggctcagttcaccttgatgatgtccttcagagctgtgatgagaggaagggaaaccttacagtatgctacaaagagtagtaataatagcagctcttatntcctga

SEQ ID NO: 262319 - DNA, 282 bp, Homo sapiens
cgactgtatactgtatagacacatagagttaattcccacaagttgcctcaaactggagactataaagagacatgtctcacaagttgcctcaaacagaagacacgttaggggaggctcattcctgtaaatagacaagaaatttcttcttgtccaactggctactgcaagcattaaatgagatcctactggtggagtgttgtgtaatttgcaaactgctataacatagccactcatctcttgggcatcttggagtgtttcaggaagagctctggactcaatagc

SEQ ID NO: 262320 - DNA, 797 bp, Homo sapiens
agggctgcgttgcaaatgccattgtggaggcatcacccgatgtggtggacctgaacattggggaaatgcagtgctgcctgctgctgcgctggctggcatctgccctcctccgtctcctgggtgctgccacagagaagagagagagagtgaagcgggcagagactggctgttgccatcacacaactgagggcggacctggagctcagccggctgagggtttgagagaccgttgggagcaagacccaaccacaaggcccatggaagaggaagttggcagatctcagaaaggggaggaaaaggagaggtgcttatttgttcatcttgtttttgctttaaggaaaggaggagagttaaatgagaaaggagggcgagttgagaaggttctgagcagtttcaggtccacggttgagcaatgttcttcctggtcaacaaactgcctggatttcattttggcctgacaacagccccaccacctagggaactgcacagagatcctgtgtgttaaccacgcaagagagtctgcagttagaatactggggcttgtgcagagagaagaattcagaaagtcaaaggctggatgtaggtgaagagactatggactctgccttcatgtcatcagttaaagtgccctgcacacctgcctgtcctaggtcctgtagggatgtgatataacaagcatgagctgtaccttagtgtctgtgttccagaactttgttggctcccgaagcacctttccctcctcccaagaggaataagcaaatgtaaataaatggtgcccaggttttcatttggctcac

SEQ ID NO: 262321 - DNA, 433 bp, Homo sapiens
agtggatactaaagccagatgcaaactagcagtatctgtggcaagtggccaaggcctgggccagcctcagcccccctttctccagtgcccaagccccctgctgctgagatgagccaagagttgagctgcagccacctccacccctcctttgggcatctgacctgagttagtttggcaagtgctgcaactatagacccaactttgaaggcctgtcggggtcctgcagcagaggagacatttccctttgcaaaatcagggctaaatctctctctctctctctctttttttttttgtaatagactttatttttagaacagctttatttattcatttatagataggggcttgctctgtcacccagactggagtgcagtgagctgtgatcgcaccactgcaactccacttgggcaacagagcaagactcttgtctcga

SEQ ID NO: 262322 - DNA, 470 bp, Homo sapiens
cagtaaatctgagtctctcttcaaagggtttagcctgctaacttccttatccttgttctcaaattcaactttcttgttcttccttacccctagttactgtaaacagcctaccccattctcgtcagctttaatcaataattcacatctgttcccttggttacctgtacccattgttcccccgaaactgcacgcctcacactccacctctgtaactcatgtccccctccccttctatagttaggaaaatatgtacaagtggccaattgggtcagctcagattgtgcagtctgaccccagcccatggggggagtgacacagagatagggactgtgttaaggataaaaatcccctggtctcctttgttctctgtgctcttgtgatcttgattgacacaagtggcaccgttccgcagaagtaaattaccttgctgagagaaattaaacttttgcctgagtgctggttttacttca

SEQ ID NO: 262323 - DNA, 389 bp, Homo sapiens
aatttcagccaaattttgtcttgtgaatgatttaattttttttatgtacaaagtaattactgaaagggaatgacattgctttttgttttttattttagattttgtagcttttttgtttctgttttcctcttgctgtcttccttggtgttttattgatttttttttatagtggcatattttgattcctttctcatttctttttgtgtatctactataggtatttttgtggttaccatagatattacacaaaacatcttaaaattattaacaatttgtattaacctgataactttagtagcatacaaaaatcctgcctctctatgtccccttattgtattttattgaggtcacaaattatatgctttttattgtgaatccattaacacaga

SEQ ID NO: 262324 - DNA, 585 bp, Homo sapiens
gggctatattattaatgagatgtgttaaaagtactaaaagttcacatttgaagtgagctggcaagtccagaataagtccttttaatttttataccagtgtttattcctgttccccgggagaggaggcatttttttctgtcaacactgggcgatttaagaactgacttgggggatgaaaataactatggtgagtccacaggggcaaacagttctgctccagccaatccacatctgttcaccttaagtagagaggctggggtgagtcaatatttactcagcctcagtgcctcagaaaaggtgatgaattttatcttatgagctgctttcagtcatcatgtatatagttcacacaccattaataagaagactcattcaccatggaaataatctgctagtctgagagaatgttggtccctaagacaagcatcttgaagtatcaaagtttcatcacagatgtttactacttcctgtttctgtggtctaaaattcacctcaaatgtgtagttaacctgtaagtgatgaaccacttccatcacttccgcaataaaattaaaacgtgtctgctggggcaccccctccccattt

SEQ ID NO: 262325 - DNA, 388 bp, Homo sapiens
gaggagcagagccctgcaattgttggcagtttccctctgcttaccattaagggttcttctaatccattaacagtcccttttgaactttggctcacagacccatcccaagccagagcagtcagtatctccagatctccatactctactatgctttgagcaatagggttgacttgtgaactcatccacttttatttgagagaaatcaaagttgtacacagatgtgagtaagagaagaagaaagaaaccttctctcgctgtgtgcttcctgaaccttcataaactccgggggaagagcgtgagattccgggtccacttgaagatactcagggggacttagccagtgaaccagatgttagggtgatatttattaaaggcaggtccttcacat

SEQ ID NO: 262326 - DNA, 468 bp, Homo sapiens
catgcctctaagcaggtgagctccagccaagattatattgggcaggtaataaaattaagggcaataaaaccagataaaccacctcattagcagcagtgtactggtaaggccatttcaacaagaagaggaggatagatggaagactcaaatcctttgtcaagttctttccaatgtcctcctctgaaaaggaacattcttttcaggagtgttggcttggaagagagggcatatgtacatttatccaacacctgctgagaccaagtggtgattcagaggagagcctctggaatttggacctgtcacttgattgctactgagagatcaccagctgaactgcttgacttttctcagaacttttttatcagtcatgtaaatgagtgaagatcctgtaccagtctatgtaggatcaactggtcattgagtgtagctttacacattaaaagccacacttatattcatagtttcaaa

SEQ ID NO: 262327 - DNA, 242 bp, Homo sapiens
gtgaagcttcattatcacctaaactaagggactttgaacaccaaaagctttaagccctcaatgcaagaaagctaaatgcagaaactttggaaacctgattgggtttcactgcatttgattccaaagcaacatttctaaacagcactcctactctaaagacaaaaaaaagcggtggggactctggagtgttttttgtttttcatcttctctgtcagatgataccattccttctttgattatac

SEQ ID NO: 262328 - DNA, 404 bp, Homo sapiens
agagagtggttagtaattgagtgaaattggtgagtttggtggtgattcctgggtgcctggaactgactcccgctgaagtgtgggcgtggttggagagtagctgggacacacaggagagtccctgagggttggagagaaagacgtgctagagactgaggagtaactgagtgaaattggtggttggtggggaacgaaggaggcaggagtgggcagatgctggtgtgatgggcaggatggcaggggagggagagtgctggggagagtgactgaagggagatccaagcgcagagcccagagactctggcttagtagttacgggtgggaacagaaattcacctttaatttgtgccccaggaggctctgatgccaccagccaatcctggcatttgggatccatggggcca

SEQ ID NO: 262329 - DNA, 418 bp, Homo sapiens
aaaacttgtttgtggaggtctggggagtttcttcagacccctgataaaacttgtttaatcctaaacaggtcctgttaagaattccttcattatcttgtcatgcttcaaggcccaggaaaagcctagacaaactcttggtgggcttttgttacatataagcttttgtaaaagggcactggccctttcagcctttaacatttaacttacccactcagtcagggctgaaagttgtcttagaggcctgcctgttcagctgttagggagacctggcctgccacaggacctccatcatgggctaggcttttgccaggcccccaaacgaagccaccagcagagggcccagcactcagcgaatccaggccagacctgctgagcaacctctgctgccttcctggagtctgtttctgactgcaggatt

SEQ ID NO: 262330 - DNA, 402 bp, Homo sapiens
  misc_feature (3)..(3): n is a, c, g, or t
  misc_feature (5)..(6): n is a, c, g, or t
  misc_feature (8)..(9): n is a, c, g, or t
  misc_feature (11)..(12): n is a, c, g, or t
  misc_feature (324)..(324): n is a, c, g, or t
gcngnngnntnnagtaacggcttaactcttccagtcattcagactcctgacatgcaacgaggtctagattatttcaaaccatggttaagttctgatactaaacagccctttattctggtaggaccagaaggatgtggcaaagggtaagaaaaatattggcaaaggtatatgttgtggatttattcctgccgcccctaattgatttaatggcttttgttatgtttcttttggttaaagtagcatttacattttcatggaagattcattttattttcattacttataaaaataagaactatggggaatagtgtgtccttttctttnccaggttgtgtgatttctactggaaagacagcaatctgagaagatactcttaaaaattatccgtccatataatacagc

SEQ ID NO: 262331 - DNA, 689 bp, Homo sapiens
gtaatttcagtggctttgatcctttttgcatagttcccctctgtgcagaatgctgttgttaaatcatcagacttgatgctgtaaatcaacctgacatcttttttcatcaattaaacagtttaaaatctccaactgtgggccaaaaaagacaagacaattgagataaatagatgaatatgactcggtctcttcccttacaatatggtaaacatgtaaacaaagtgtctacaaaatccattacagatgctgctatagcagtatgtgccggcacagggccatccatgaggttgtttttgcaatgaagtggaggaggtgaggaagcacacttccagcattgcttgttaaagccttagggctagggttccatgattgagagtttattttagtacactagcatagtatttaggagagtgctaactgctataacaaagagacccccacataggcaaatacccaagcgagataagttattttctcctgatgtcacagttaagagcaggttaaggcagaagttcccctccacgaattaattcacccaggctgatagctgttctgccatcttcaatgtgtgacttagaggactgctgttgtcatcactatccaccagcaggaagcaaaaacaacagcagcaaaaacacaagttcataacaacatatgttctcttatgaaagtcaagatcacagctctat

SEQ ID NO: 262332 - DNA, 490 bp, Homo sapiens
caggggacttaaaattggttacatatttgcttcggtttgggcaaagaacatcttcttgtggtaaacagctactaatattgttataaagtaaacggtttaaattcccctatgaagctactatttacagacatgtggaaagtaaaggaaataaatagtaagtccccctccccagcctacagtttgagaggtggaactgtgatgaatctaataagcctttgcttggcagcctttctggaatttttcaagatcaattatgcagcacttgccaagccctcctcctctcctgcccccagtaaaagaacaaaaagaaagggggtcaatgtgtaataaattgtcaataaaaggaccatctgcaagtcccgtttaaatattggatttgcctttgaaggcatctatgaatattgaccagggtaaatgtgttaaaagggtgaaatttttaacttataaattttcccagccattttacctcgttaaataaagagaaaaagaa

SEQ ID NO: 262333 - DNA, 358 bp, Homo sapiens
tgtgtcaccttttcagtgactttcttattctagagcaggggttggcaaacgacagtccacaagcgtctgtttttgtaaataaagttttattggagcatagccacactcatttatttacatatcatctgtggctacttttgcattataatggcagaattgactgcaaagcctaaaatattcactatatggcccttaaaaagcttcttttccttttaaaaatgggtttagatgggctgggcacggtggcttacgcctgtaatcccagcactttgggaggccaaggcgggtggatcacaaggtcaggagatccagaccatcctgggtaacatggtgaaaccctgtctctactaaaaataca

SEQ ID NO: 262334 - DNA, 454 bp, Homo sapiens
atcacttgagcccaggagttcaagaccagtctggggaacatagcgagatcctgtctcaaaaaataaaaatatcaaaaaagcttgtggattctgaagcattatacttgatgtgggattttcaccccgtctcctgttgcccgttttcccccacctgcaattcatcttccacattacctccagagcaactgttctaagcacagattttatttcatcactctcttccttaaaatcctttgatggtccccattttcttcaggatgaattcacattccttagtaccacccagcaggcaagtcctaaactggcccctgcctgcctcttcggcttcattcccctgtcactccaaagatgctgcagccctttagaactacttttgttcttagaagttaataatgtctcatatccatacctttacaccaatggcatcttttccttaagaaacaaaacaaacaaa

SEQ ID NO: 262335 - DNA, 601 bp, Homo sapiens
atatttctgagttgtgagagtgatattttacatgtagctgttattgttgaactgtagttttataaacttgttttcacaaaggctcctcagggcagctctaatgtgtaaccacattttgagtagtgtaccacatgagcacctcccgagcacagtgaaatgacaacctgagtcataatgacacacgggcctgaaatctgcctcctcttggtattcatttcgctttaggaattagaatttaattgatcctcctttgagctgtgattaaaagtggtgttatttccacagccctgccacagtcttatccactgactctacttaaacttctctgttcagggaatggctgttgttatgataatttgttagtagtaggtggactgccacatttaaaaaatctatttatgatgaattcaactttcccaaaggagggttgctttttttttctcctgttgtcagcctccctgggaattttactaaaataaaaaaataaataaaggctttaactatttatttagtccaaggacttggcattaatccatagtgatttcttggtgatattttaatctgtaggaaacagatcagtagatcagtaaattggctaggc

SEQ ID NO: 262336 - DNA, 402 bp, Homo sapiens
tttaccggaaatgtattagcagagaccgactgaacagtcatctgggataattgcagaaggtgaaagttgggctttaagtatctttatttcacccattaatatttaatacatatagtatagctgacatgcttacatggacatctaggtgtgttgtagctgtcctgatttgagtttaagcttcattttgtgttgctctcaccaagatttaccagccatattttacagatttgtagtgatatcaagtgctgagaactaggataagaggaaaattcgaagagaaaaactacaagtatatccgcctttattctccgaaccatttctcattatttagagtatgatgaatgaatcaaacaatgatcttgggtatagttcttcagatatctgttctcaaacagtgtggga

SEQ ID NO: 262337 - DNA, 661 bp, Homo sapiens
aacggcacatattttacagtcatttgctagaatacctccacttcaatgatgtcatccagtgaccccgacaaaaggattatctcaatgtcttgcactttgcaatcaagcagcaagttatgcttctctaatcgtttctgttccagagaagtttgaatacttacaacttctttttgcaatttccccacttccctgtaattacacagatatgaaaaagtaatttactcattatgtaacactgcaccaaggaagaaaaatgtatgctatcttttatgaagaattatttattcctgtgagtgctgtaagttctagaatcctctcattgatgctgtaatttaattgttaacactcctgagaaaggtcacgaatatactcagttaatctaagggagcattttccactaataaatgttactgatttaatcagggttaccaaaaacagtgctttcctcactcaaatataagctctacattttagacctcaaaccaagataaacagactcttagcaaaagaaatcccttgccagtaagtcacatacacttaataatctgttttccttgctaccaccaccactaatgtagtaacgccttctatctgaaaatgagggcttgggttttactaatcgaaatgatgtgagatttttaaaggaacctggaaaaaggac

SEQ ID NO: 262338 - DNA, 441 bp, Homo sapiens
gaggttataccaatttgcactcacagtagcagtgtaggagagtttccattgccccacatcttcaccatccttggtattgacaggtattgttttgttttagccattttggtgtgtgtattaataagggttctccagagaaacagaaccaataggaggggtgtgtgtggggagaaagattatttctataataaatctcctcttacatacatatatacttattatggaaattgactcatgattatggaggctgataagtcatataatcaagttggggaaccaggaaacctggtgctgtaacttagtctaagtccaaagacctgaggaaaggggagagaaaatggtttaagtcctgggctgagtctgaagaccaaagaaccaggagcactgacgtccaatagcaggagaaggtagatattccagtcttaaaagaaaagaaaaaac

SEQ ID NO: 262339 - DNA, 94 bp, Homo sapiens
aatgctccttttcctctgctctctcttctagaattacattatttcaggaatgtaatatgaataggaattaaaattttatttatggtaaacaaat

SEQ ID NO: 262340 - DNA, 935 bp, Homo sapiens
caggagtcctcaggcagcagcatccgccgaggcccacccgggccacccccggggttccaggcctggcatggttcagggcccatggggaactgtgccaagcggccctggcgccggggccctaaggaccccttgcagtggctcggctccccaccaaggggctcctgccccagccccagctccagccccaaggagcagggggaccccgcgccaggcgtccagggctactcggtgctcaacagcctggtggggcctgcctgcatcttcctgcggcccagcattgccgccacccaactcgaccgggagctgcggcccgaggagattgaagagctgcaggtcgccttccaggagtttgaccgagaccaggacggctacattggctgccgggagctgggtgcctgcatgcggaccctgggctacatgcccaccgagatggagctcatcgagatctcacagcaaatcagtggcggaaaggtggactttgaagacttcgtggagctgatgggccccaagctgctggcagagacggcagacatgatcggtgtccgggagctacgggacgccttccgggagttcgacaccaatggggacggccgcatcagcgtgggcgagctccgggcggccctcaaggccctgctgggggagcgcctcagccagcgggaggtggacgagatcctccaggacgtggacctcaatggggacggtctggtcgacttcgaagagtttgtgcgaatgatgtctcggtgagcctgtacagaagctggaggcagcataaaggactcaaggaccacagcctctgcccaccagcatgttccttgaagcccatcgcctctagcggggaccctccttttctccccatcccacctgtgtgcagtgcccttgcctgccttacccccaccaccactttttcaataaagccgcctggccttgtctctgtc

SEQ ID NO: 262341 - DNA, 764 bp, Homo sapiens
caggagtcctcaggcagcagcatccgccgaggcccacccgggccacccccggggttccaggcctggcatggttcagggcccatggggaactgtgccaagcggccctggcgccggggccctaaggaccgggagctgcggcccgaggagattgaagagctgcaggtcgccttccaggagtttgaccgagaccaggacggctacattggctgccgggagctgggtgcctgcatgcggaccctgggctacatgcccaccgagatggagctcatcgagatctcacagcaaatcagtggcggaaaggtggactttgaagacttcgtggagctgatgggccccaagctgctggcagagacggcagacatgatcggtgtccgggagctacgggacgccttccgggagttcgacaccaatggggacggccgcatcagcgtgggcgagctccgggcggccctcaaggccctgctgggggagcgcctcagccagcgggaggtggacgagatcctccaggacgtggacctcaatggggacggtctggtcgacttcgaagagtttgtgcgaatgatgtctcggtgagcctgtacagaagctggaggcagcataaaggactcaaggaccacagcctctgcccaccagcatgttccttgaagcccatcgcctctagcggggaccctccttttctccccatcccacctgtgtgcagtgcccttgcctgccttacccccaccaccactttttcaataaagccgcctggccttgtctctgtc

SEQ ID NO: 262342 - DNA, 311 bp, Homo sapiens
ctctgcttgattatgttgctataaattactgtctgtcctgaacagagtccatctaactgagtgtcctgctgcctgtaggaagagagagagagagacagagacagggagaaacagagagagagagagacagagacagggagagacagagagagagagacagagacagggagaaacacagagagagagaaaatagttttctggaaaagagaaaagaaacataatttggattcatgtctagacagagatagggagaaaaagagagagaaagagagagggggcaggtgaggggcggaatagttgtccagaaaaga

SEQ ID NO: 262343 - DNA, 752 bp, Homo sapiens
ccttttccatttatatcagtctctatccccaaaggtaaccactattaacagtttcttacaacttttttcttgccagggtgcgatggctcgggcctgtaatcccagtacattgggaagctgaggcgagaggatcgcttgagcccaggagtttgagaccagcctgggcaacaaagtgagaccctgtttcttcagaaaaattaataatgagccgagtgtgatggtgcgtgcctggagctccacctgctgggaggggctgaggcaggaggatcccttgagcccaggagtttgaggttacagtgagctgatctcgccactgcacttcaacctggaagaccatctcaaaaaaaaaagctttttttctttattgacctaaaaaggattatataaagcaatcacactgttttgctgcttacattttttccacttgataacatcgtagagatttttcatattactacatgtagtcaatctaattcttttaaagagtggaataatattccattttatggatgtaaatcacattttgaaagtaaggcacattaaatttttagataatgtattaaacttggatgttctgcttcctgtagttaaattgctgcctgtaagaaaatgaattaaatggtgtgtgataaaacacatactttaagatcagagggtactgtggggcccagtggtttgaacgagcctggcagagtaacctgggaatgctgttgaaatacaaactctcatatttactccaaatctattaagtc

SEQ ID NO: 262344 - DNA, 400 bp, Homo sapiens
gctgctgctgaactttacagactgaactttcacagagctcttagaggttctctacaaatggaatccttttaggcacttgtgttataaaatgttgattgtaacatttgaaataagtgtgagttaatggaaagggccttgtctttgcctttaggaagtttctactttgttatcctaaacctgccccttcacacctctgtacttcaggaacccttgaaaagttctctctcccattgaagtgaaacatgggtctcatcagagtattcaaatttgtctctgtatttgttacagtgtctgtgtggaggaggagaacgttggctattatgtcctaattttacatttgattaaacctgtgactttttttttcttactgctaatttttaagtctccccacatcaaagtt

SEQ ID NO: 262345 - DNA, 253 bp, Homo sapiens
gttctgtgcagattgtgtctgccaggcgagcattaagattactgtttctgagatcttttggttgctatcagactggactcaattttttttctacattctcaaggttaagttgaaacagtattacccattatttataaatggtaagtgtttaggttttgccttgtgttacaaactagaatgttaataaaaatactatatttaacaagttgcaagtttatgaaagtcattgtttttgaaagtaagttttagatta

SEQ ID NO: 262346 - DNA, 214 bp, Homo sapiens
gtcttgtaggactgagcccttacctaagggatctctacttgcttctagtagtgagtgtcagaattgagttgaattgttggacacccaattggtgtcagagaattgcagaaatggtgttggaaaagacatcatgtatttgatgtcacagagaatctaatgaactatctagacaaaaattatttttaagatgtgctgttgggattatacctcttat

SEQ ID NO: 262347 - DNA, 520 bp, Homo sapiens
gcacgaggtggatttggacaccatgagagaaacaccccgggagccaaaatattcatccaataaagaagaatggatcagcttggcctatagaccattccttgatgcttctagatcttcaaagctgctgcgggcattctatgtccccttcctgtcagatcagtatacagtgtacgtaaactacaccatcctcaaaccccggaaagcaaagcaaatcaggaagaaaagtggagaccggagaagagcagaaccaacttacaggaagaattgaaaatcctggtactggatggctgtgataagctgttctccacactctggcctggcatctgagaactagcaagcctctcttaggccatatgggcttctccaccaaagctgtttggcagctcctagcagaccttcttattgaaatcctcatgctgaaaatgaacacagcctagttgccaacccacatgtccttttcacctccagcaagactaagcttctttaaagcacttcacaggactaggaccctgtcctggag

SEQ ID NO: 262348 - DNA, 356 bp, Homo sapiens
gcacgaggtggatttggacaccatgagagaaacaccccgggagccaaaatattcatccaataaagaagaatggatcagcttggcctatagaccattccttgatgcttctagatcttcaaagctgctgcgggcattctatgtccccttcctgtcagatcagtatacagtgtacgtaaactacaccatcctcaaaccccggaaagcaaagcaaatcaggaagaaaagtggaggttagcaacacacctgtggccccaaaggacaaccatcttgttaactattgattccagtgacctgactccctgcaagtcatcgcctgtaacatttgtaataaaggtcttctgacatgaatactggaa

SEQ ID NO: 262349 - DNA, 524 bp, Homo sapiens
aatttactcatccattctagtgtgggtggcatttgggtggttcccatctgaggctgttgcaaatggaattgctgtgaacttcctggtgtatgcatttcagagcacataggttcccattctggttggcggtccccctggcaatggaattgccttgccatgagacatgcacatgttcatctctcgttgatcatctgagaaactctgcaacctggttgtaccaatttgcatttccaccagctggtgagtgatagttcaggttgcaccctgttgttgccagtccttcaaattgtctgccattttcatatgaactcttgtgtatggtttttaatgtgcatttctctggtgactggtgaagataagccctttgttatatgtttattgcctcttttgtaaagtgtccgtgcaagttttttgccaactatgggattgtctgcctttcattctgaatcataggagttctttatctattgtggctatgagcccattattggatatgttcatatattatgaatgtcttatcccac

SEQ ID NO: 262350 - DNA, 816 bp, Homo sapiens
ggccacccgcctttcactatccgccattcttgtcacctcagctgctgccctcgctaccgcaccgacttcgcccgtgtgctcgcctgcacttgcgctgcccgccatggccaccgcccagccgtcgcaggtgcgccagaagtacgacaccaactgcgacgccgccatcaacagccacatcacgctggagctctacacctcctacctgtacctgtctatggccttctacttcaaccgggacgacgtggccctggagaacttcttccgctacttcctgcgcctgtcggacgacaaaatggagcatgcccagaagctgatgaggctgcagaacctgcgcggtggccacatctgccttcacgatatcaggaagccagagtgccaaggctgggagagcgggctcgtggccatggagtccgccttccacctggagaagaacgtcaaccagagcctgctggatctgtaccagctggccgtggagaagggcgacccccagctgtgccacttcctggagagccactacctgcacgagcaagtcaagaccatcaaagagctgggtggctacgtgagcaacctgcgcaagatttgttccccggaagccggcctggctgagtacctgttcgacaagctcaccctgggcggccgcgtcaaagagacttgagcccagatgggccccacagccacggggtcccttccctgggtcaggccactaggcggggcgtgcatgttgccctttcagaacgttctcttcagttttatctttcagttttaccattgttagcaaaaaagttatctggttctcaaagcaataaaggtgtccat

SEQ ID NO: 262351 - DNA, 424 bp, Homo sapiens
aatttttacccataatggatcatacccacagtcacaaccgatgcaagatttacatggtgagattttggatgtttcagctgatgaggtttatttgagattttggacttaagtagatactgtaatgtgttgagattttggagatttgatatggggtttatatactttgcatgtgagatagctagtcctttaggggaaccaagaaagaaatattgtagacagaacaatggttccccaacatacctatatcataatccagaaagccagtagatatattacctagatgaaaaaaggtatttttcaaacataattgcattaaggatctttagatcttttaacacaagtcaaattatcctgtgttatctgagtggatcaaatgtaattacaagcctcctaatgagagaatacaagatcagaaggtaaaact

SEQ ID NO: 262352 - DNA, 1330 bp, Homo sapiens
  misc_feature (76)..(76): n is a, c, g, or t
ctctaggatcttgtcagagctgcacctctctgtgaactggccattcctttcggtgctgctgtcctttttggggggnttcctgatttctgtatacatgtagctttgccagatatgtacttaataatatagtatattaccatctgcgcattttccctcaattctttcctgatggtagctgatgaaattgaaatggtaatttttagaatgttctaatatttgatgtatttaaaatacatcaccttttattggcctgctttatatgggaacaagaaagcctacctagcaaagaaatacaacctagttttatatcttatttattctgtaagtccttgtgcagcagcatgttaatgtggacacacagcttgtagataatttaaaatctagaaagggagaatgagatacatagagaaatagccaccacataaggcagtttatgacgaatacagtgtgttacaaatgacaaaagccacaggaattcagaagagggaaaaataaggactggcttcctaaagaaagtggcaatttttttagaatattgaagctgttactctgaggcatgagtgacacaagccagcagaagccagagatttgaagtcttgctcaagatttgctggtttccacttggggaaagacaccattaggctgggtacatctggagagatgagtgcaagaagccagttaagcaggagagaagtggacttgattgtggaggcactgtgtttcaaactcaaattaggcagctcttgggtgggtggctgataccattgttgtgttttcagctgattaatctggtagcagtgtgctcgtttaggagaaattacacaggagatcagtcaaagagaatggtcctctggtttgggaatgaaataatcagggcctgtacctggagtggggcaatgatgattaattggaaggaaatgagaaattgagaagacttgacaggacttggttactcattgtccggagtaaaggaaaagtagaaataggtaagttaattatcagtttggggaaggtgattatatagtttagtcttgttgaatttggcctggaataggaaggtatatctcagggcactgcaataacttgtggctgcaacttctgagccccatgtaacctttgaggagtcatggaatctaggagaggtgccacaatactagaagtgagaaatattctgtgtttttttaaagataggaaaaagatagattctacaaaatacaatccagcaaaattgatactgattttaggttattaaaataataagttgtgagcatatagaaaaataactggttaagaagtatgaaaaaatgcccaaatctcactacaataagag

SEQ ID NO: 262353 - DNA, 457 bp, Homo sapiens
tagtcacatctgtctaattggcaatgggtgaaggctgcgtattttattctctgtcttcggaggtgctgtgtttccgtttccatcgctgatatgcttggatgtcctgtcacctccaaatcgcatgttgaaatgtgacctccactgttgggggtgcctagtgggaggtgtttgaatcacgggagtggatatctcgtgaatggcttggtgttgtcctcatgataatgggtgagttatttttctattcgttcactagaacctgattgtgtaaaaagagcctggcaactcctacctctctctttttgctctgtctctcgccacgtgacatgcctgtacccacttcaccttctgccatgattggaagcttcctgaggcctcaccagaagctgagcagatgctggtgccatgcttgtacaccctgcagaactgtgaaccaaataaacctccttttgttacgaat

SEQ ID NO: 262354 - DNA, 358 bp, Homo sapiens
gcagctgaaccggattagcctctgcccggcgaggccagggattcctcattcatttattcaggcaaccattcagtgtttaccgagccaactctgtgttccggatacagccctgaccattcggtccgaggaggtgtcagtaaacaaacaaggtcgttcctttgggttagctttagaattccttgggcttggaggcggaaagaagagatcttagcgatctccacagtttcctcatctgtgaaatagagataatagaaattcctacctcatagggttgtggtgacgctcagtagaaaccgggtgacgctcctgcttgcagcgtttgacttgtggcttagcgtcattacccgcttacgttgat

SEQ ID NO: 262355 - DNA, 409 bp, Homo sapiens
atcctcatgccctaatcacctcccaaaggcctcaactcatttgggattaggtttccacataggagttttgcggggacataaatattcagatcatagcatttagaaagcaaaaaaacaggctgggcacggtggctcacacttgtaattccagcactttgggaggctgaagcgggcggatgacgaggtcgtgagatcaagaccatcctggctaacacggtgaaaccccgtctctactaaaaatacaaaaaattagctgggcgtggtggcgggcgcctgtagtcccagctgctcaggaggctgaggccggagaatggtgcgaacccgggaggcagagcttgcagtgagccgagatcgcgccactgcactccagcctgggtgacagagcgaggctccgtctcaaaaaaaaaaa

SEQ ID NO: 262356 - DNA, 479 bp, Homo sapiens
ctttctctacctctctgcctctcatttccatgcagaagggaataggagaaaataatattctgaaggccctgatatatttgagctaaaataattttaaaattatttgtatcgactttcatactcaagtgaatgagataattgatttttcatcatattattaaattgttgacaaataagactaaaatttcactaatgagtactctattaagaaaatatatcaacctttaccctgaaattgtttaagagtatagtatattaggtagacacctaatttctaaatacctgtcatcaaacactggcattgaaataagtgactgtgttatataatgcagtgtaatgtatttgtagttgagatttttctaatgcaaaaaaatttaatgtattaaatatcctgtcagttgaaatgagaactctactctgcaatgcctcagaataaatgagtttccctttacaagaagggagggttaaattcattgaaa

SEQ ID NO: 262357 - DNA, 357 bp, Homo sapiens
tttgttattctaagagtttagaaatataaataactttaaaaaatactttgtaaattatagaaggtattttattttatcttatttatttatttatttatttgagatggagtttcgctcttattgtccaggttggagtgcaatgatgcaaccttggctcattgcaacctctgcctcccgggtccaaactattcttctctactcccgagtgcctgtaatcctagcaactccggaggctgggcaggagaatcacttgaacccaggaggcggaggttgcggtgaaccgagatcgcaccattgcattccagcctgggcaacaagagcaaaactccgtctcaaacagacaaacaaacaaaaaaa

SEQ ID NO: 262358 - DNA, 342 bp, Homo sapiens
  misc_feature (1)..(1): n is a, c, g, or t
  misc_feature (89)..(89): n is a, c, g, or t
natcctgtaatcccagcacttcgggaggctgaggtgggtggatcatgaggtcaggagatcgagaccatcctggctaacatggtgaaacnctgtctctactaaaaatacaaaaaaaaaaattagccaggtgtggtggccggcgcctgtagtcccagctactcggaaggctgagacaggagaatggcgtgaaccgggaaggcagagcttgcagtgagctgagatcatgccactgcactccagcctgggggacagagcgagactccgtcaaaaaaaaaaaagggcaggcgcaaatccatatttatagtaaagtaactttcgcagattgtgcctctatagtctcct

SEQ ID NO: 262359 - DNA, 465 bp, Homo sapiens
  misc_feature (7)..(7): n is a, c, g, or t
  misc_feature (10)..(10): n is a, c, g, or t
  misc_feature (12)..(12): n is a, c, g, or t
  misc_feature (34)..(35): n is a, c, g, or t
cctcgtnggncntactcggtcccggcgctgggcnnaggggaggggttgtcttaaaagtctcgccttccccctgtagggccggccggcgagtcccagtgagagcggagggtgccagaggtagggggccgagaaacaaagttcccggggctccctccggggccgcggtcggggctgcgcgtttgaccgcccccctcctcgcgaaggcaatggcttccaaactcctgcgcgcggtcatcctcgggccgcccggctcgggcaagggcaccgtgtgccagaggatcgcccagaactttggtctccagcatctctccagcggccacttcttgcgggagaacatcaaggccagcaccgaagttggtgaggtggcaaagcagtatatagagaaaagtcttttggttccagaccatgtgatcacacgcctaatgatgtccgagttggagaataggcgtggccagcactggctcc

SEQ ID NO: 262360 - DNA, 552 bp, Homo sapiens
ttgggagattccaaagattttatgccaggagatggtaggaagaccaaataaatatttcacaatatcacatccctaatgtaggtcctattatcaccattctcattttgcaggtgaggagactgaagcatgagattaagaaatcaagaccgccttccccctgtagggccggccggcgagtcccagtgagagcggagggtgccagaggtagggggccgagaaacaaagttcccggggctccctccggggccgcggtcggggctgcgcgtttgaccgcccccctcctcgcgaaggcaatggcttccaaactcctgcgcgcggtcatcctcgggccgcccggctcgggcaagggcaccgtgtgccagaggatcgcccagaactttggtctccagcatctctccagcggccacttcttgcgggagaacatcaaggccagcaccgaagttggtgaggtggcaaagcagtatatagagaaaagtcttttggttccagaccatgtgatcacacgcctaatgatgtccgagttggagaataggcgtggccagcactggctcc

SEQ ID NO: 262361 - DNA, 145 bp, Homo sapiens
ccttcctcgtgctacctagtctaagatcgtttcacttttcttccacttgttggtctgtcccttgcacttcacttcattttcttctaagtggcccaatctactgagtcccccacaaaaaggcagatatagccatctttgctcttta

SEQ ID NO: 262362 - DNA, 560 bp, Homo sapiens
agttggagagtgtgagcataggtcaatgagagcaaaaactgaacagctagtatttttcagaattgcaaaaacttcttttggggagggagtgaatgactgcagtagaaaagtttgagtcccttttatgaaaggtttgcccaattacaagaaaatatcgcatcaagaattgttagaccatatatgaaactgaagttaactatatcaacctaatacaatgaaactctgaggttaaagtattcagtggccatccagataatcgtaagagaaagtgaaaaataataaataatctattttcagaactttgtaacctaatagaagacataattcgaaacatgtaagctacaaagaatgtacttggattatactgcagagtgggtggccgcatgagtgacagaaggaatggtgaaggaaaggtgggcagtaggttgttttcaaggcagtaaatattccttttacatttcttatacacttgatgggtcacatggttaactactgctgtatagattttgttgttgttttgaaatattttgaaaataaagcatctttttaaaaatcaactt

SEQ ID NO: 262363 - DNA, 710 bp, Homo sapiens
gagagagagaactagttctctctgctccagctgggcaagtaaccttgttattgcatacacaggtaagtcaattatacattttgcaaagagtactttgtcacaggcctcactataaatagcaatgaagtagcttgatttaattgaaataatgtgtaacttcttttatataattggatttagtttctagtccttgtatctgactaacagtaaagcatattaacataaaaatttattatttaataatttctacatatgtttgcttatgtgagagtagtactaagcaaaaaagcctcagggcctcaagttccagagagaatagagtaagaggcagatgatgctcaaacgtacctcctcacatttactcagatgttttggatactgtttggtgcttcttggatttttctttcttcttttttaatctcaaaatttgactatagcaggaaatttattctcttgttctgatcatcctttaatctcatattttcttcttcccatggtcaaaacccttatattgttattataatatgagtatttttgtattgctagaaatcttaagctgattttctggtctttaatatctcttccttccaaagactcattaccagcaagtaatttttattaaaatactgttttaattaaatgcattttaatccatattgaacagcaagtgaacctttaaaaatattattaaataaaattatctatctttt

SEQ ID NO: 262364 - DNA, 645 bp, Homo sapiens
gcatctcacctggcagccactccttctcaggctcgggcctcccctgtcgggtgtgcggggtgcacgggctcagcggctgctctctgctctctttgctatacacactcctggtcccctcgcctgctgacagctcctgctcctccctccatccttgacctctcccgagcctggactcacatctccttgggtgtccagtgggcacctcccgtgtgacacgtcagtagatgaatgaatccatgtgacctcccccagagctgctgatccgggcatccccagttcagccggcagccgctccgtctccccttgctccagtgggaaccctggcgcctcctgggcacccccattcctctagaccacatctgttcatcatcagctctgccttcgactctgccatgtgtgcactctgctccagctgcactggtctcctagtgtttctggaacattccacgcgctccccactgcactagctgttgcctccacctgggaaactttccccctgatgctgtcttggcctgcgcagccacatagcaccttggcagggaaaggggtgtgtgtttaccccttcctcaagcaaaaagtggtaaagttcatgtctttatttcttgataataaccattacaaaaaaaatgagtttgttacaacaaa

SEQ ID NO: 262365 - DNA, 416 bp, Homo sapiens
aaccttcatttaaccctaaacccaatgctttgatcccctgtacggcccgtgttccacgggatgcgccagaggctcaaatgttcctcattgacaagaaacgagtctgtggtttggccacttcccaattccctagctcagaacacacattcaggtgtgtttgccatacagggtcattctcagggtaagcttaagttattgctgtcaggtgttcttaccatacacctctggatctgccccacctctgttgctaaccacaaggactacaactagagttaagtcatgggccgggccacagtggctcatgcccataatcccagagctttgggaggcagaggcaggagaattgcttgaggccaggggtttgagaccagcctgcacaacataatgagaccttcatctctgcaaaaaaaataata

SEQ ID NO: 262366 - DNA, 471 bp, Homo sapiens
agcaaagagaccaccaccagtcccagtccttaatggatggggatctctttttctggccatcccaacctcaacatcttggcttttgactttggacagctgttgtggatgcagaacgagagtagacacccctgattactcaagggcccactctgggtcagtcagtgactgaatattgtagccttgcaataccatggccaagtgaacatggcccgcccccagtgggcccttcttttcctgcactgttgtctccccagatgtacgctagctaggcttatttttaaatgacagctccctcttgccagaactggaaaaaccaggaactgacagtacatggtgtgttcctacataacaatgataatcaatcttgttaatcacttggaaacaaaaaatgaattggaggctctttctagcctccagggaaatggaagcctttcagttcttagaatttcacaggcctcacagctatcttat

SEQ ID NO: 262367 - DNA, 343 bp, Homo sapiens
cttttccatataactatatatatataatttatattatatatatatataatgcagaatcttttcatgttggtgtatagagagcttcctcattttaatctgcatatcacaatattccattgtgtgcataaggtctatataactagtcctttcctgatgtatccaactttttttggatacatcatcagttacgaaaaaataagcacacactcccagtataggtttattgacaaattatgtacataaagtaccaccaatccctgtaagcaaactcagtgtcttacactgatagcttaaaaataataaaaatgcagcctgggcaacatggcgaagccctttctcgacc

SEQ ID NO: 262368 - DNA, 219 bp, Homo sapiens
gctttctggaagatgagagaccacatggaacagagaccaatgatctcggctgaagacaacttcaaccagttcccggctgacccaccaactgaccacagatgcaagagtgagcttaaccaagatcagctgaggttggcccagatcagcagaaccaccaacccagtcctaagttcacaaacaaaaataaattttcattgttacataccactgtgaaggaaa

SEQ ID NO: 262369 - DNA, 442 bp, Homo sapiens
gatctttgttaagacaaaaacaacaatcactaaggacaatcttttcagtaaatgctgctgggaaaatgggacagccatatacagaataatgaaaactagacccctatatctcaccatatttaaaaattacctcaacatggatcaagaactgaaatataagatctgaaataataaaaatactggaagaaatcctggaaagaaaactcttctggccaccaggcagctaattcatgactaaggcctcaaaagcataatcaacaatgacaaaaatagacatatgggacttaattgaactaaaaagcttctgcacagcaaaagaaataatcaacagggtgaacagaccagctggcaaaatgggagaaaatatttttaaactacagatctgattaatgattaaggacttatattcagaatttataaataactcaatccaacaacaacc

SEQ ID NO: 262370 - DNA, 323 bp, Homo sapiens
atgatatttttttgttttcaaatcaaatgaggtttgtatgtaatattaactatgaaaagaatgtaaaaaataaaaagaaaggttaggaaggccaatatacctagagttaagtgttccttgaccttaagtggtgtgatcatagttcatttttttctttactttttaaattttcagtttttcaattttctataataagtacttattgcttttaaattttatttaattaaattaatttatttatttgagacagggttttgctctgtttcccaggctggagtgcagggtgcaatcatagctcactgcagccttgaactcctcctggg

SEQ ID NO: 262371 - DNA, 394 bp, Homo sapiens
atgatgaggaacgccggtggtctctagaagctgagaatggcctttggctgacagcctgcaagggaatggaaacctcagttctactgtaacaaggacctggattctgccaataacctgaatgcacttgggagcggattgtttcctagatcctccagatagagctcagccagctgacacttggacttcagcgttataagactctaagcagagaacccagccaagaccacccgactctgacctacagaaatgtgagataattaatccacgttgccataagctgctaagtttgtgaaaatttgtcacacaacaatagataaagatgttatctcttatgtctaggcaaatggaactcctggctgagttatgaaataaataaaccccatctaaattttca

SEQ ID NO: 262372 - DNA, 446 bp, Homo sapiens
gatgccataccttctctatagctacctaatactgatttattgttttcctgggaactctggtttccttactgcatatggaacagaaacaagatggggaatgtggagaaaaggaaaagaagacagcagtccaaatacctcctgagttacgatacttataagagagattgcatcttgatttctggttgttacaaaccatgcactttctatctagtagaagactatgtggcaggtgaaccacttctttcatttttcagcacagttcattttttgtagcagtagaaaatcctaggctctggcagtttgtgatgtaagttttggtggtgtaaattttcatcatcttctattttcttcattcaaatgtaatggacactttgataggggcagcattaggatccatggagaggcaccattgtaaactggaagctgagtgatttttaaaattgccc

SEQ ID NO: 262373 - DNA, 597 bp, Homo sapiens
gagacggagagacggagtcttgctctgttgcccaggctggagtgcagtggcaccatctcggttcactgcaagctccgcctcctgggttcacgctattctcctgcctcagcctctgagtagctgaggcacgagaatcatttgaacctgggaggtgaggcttcagtgagcagagactgtaccactgcactccaccctgggtgccagagtgagaccctgtttcaaaacaaatgaacaaacagacaaacaaaaagaagacaaatgaaaaaattgtatatttctgtccctaatcctgcaggatggaattagctctcctaaaatgagctcaaatcttctggaatttgttcgagatgtcccgcaccgttctgtgcagatgcacgcacttgctgtggccactatgggtctccagtctactctgaaaataatcccactgtcttcaggctgtacctggggaaaggtgtcattctgtgaatgaagatacctggtgaagttgcgggtctttgggagctcctggcccacactgtccttataacgcctgaacccacatccgtggccacatactacgggaagaagcagaatctggccccagaactggacaca

SEQ ID NO: 262374 - DNA, 651 bp, Homo sapiens
agcagtggctcacacctgtaatcccagcactttgggaggccgaggtgggcggatcatctgaggtcaggagttcaagaccagcctgggcaacatggtgaaaccctgtctctaccaaaaatacacagtttagccaggcgtggtggcacccgcctataatcccagctactcgggaggctgaggcacgagaatcatttgaacctgggaggtgaggcttcagtgagcagagactgtaccactgcactccaccctgggtgccagagtgagaccctgtttcaaaacaaatgaacaaacagacaaacaaaaagaagacaaatgaaaaaattgtatatttctgtccctaatcctgcaggatggaattagctctcctaaaatgagctcaaatcttctggaatttgttcgagatgtcccgcaccgttctgtgcagatgcacgcacttgctgtggccactatgggtctccagtctactctgaaaataatcccactgtcttcaggctgtacctggggaaaggtgtcattctgtgaatgaagatacctggtgaagttgcgggtctttgggagctcctggcccacactgtccttataacgcctgaacccacatccgtggccacatactacgggaagaagcagaatctggccccagaactggacaca

SEQ ID NO: 262375 - DNA, 408 bp, Homo sapiens
tgaagtgtcagaaactcagcccagtgtaggcaaaacagtagagccaagtggctcaaagaaggggaagagacctatgaggaggccaaagcggtcatatcacacaaggtcttgaatgccacaccaaggaggttgaactgagtccaggagttgatggagaacctttcaacaatttaaagcagatgaatgaagatgtttataaaaatcttaacactcgtctctaagctcctgggaagcagggatgatggctcatttctctctgtcccccctgcagtgccggcctggctgaatggctgtttccccaactataaaatgctttcaacacaagcttgatgattttctatggtccttgccacaattgttttgttttttttttaaagtatttgagagcctgacatttttcttaaaaaa

SEQ ID NO: 262376 - DNA, 795 bp, Homo sapiens
tgagcccctgtacctggccttttttgttgttgttgtatttttagtagagatggggtttcgccatgtaggtcaggctggtctcgaactcctgatctcaaatgatcctcccgcctcagcctcccgaaatgccggcattacaggcatgagccgcctggcctggatagatgtttatgatacactgttgcatgaatgaagcaggttacaaaacagtgaaagtatggtgaggccttttcacctttgctttttattgatgtgaaattcatataacataaaactaaccattttaaagaatgaaatccagtggcgtttagttatttaccacgttgtccaaccatcacctctgtggagttctgaaacattgtcacccccaaaggggcttgtggctctgaagcaatcaccccccactccccctccctggcccccggtaacggggtcggcttcctgtactgcggctctaccagttccggtcgtttcccctgcggtgaatggaaccaacactctgcggccttcgtgtctggctctttccacttagcataacgttttcaaggttctttcacatgaatcagtgcctcagtccttttcatggctgcataatattccgttgtgtggacattccacactttgtgtgtccatccatcactgatggacatgtgctccgttcctgctacttgtttattgtaaactgtgctgccatggacatttgtatgcaagtatttgaacacctattttcaattcttttggacacatgcctagaagtggaactgctggttcccaataattctgttgaacgttttg

SEQ ID NO: 262377 - DNA, 339 bp, Homo sapiens
ctaatggtcagctttggaagttcagtgttaggtaacccagccaaatacttacgtatacaaaataaacacaagactgaaaaatagtaaatgtttaacctttgtgtctcttgctcactacagcagcctttaactagccaccaagccatagttcttttgtttgtcatagttgaatttcaaaatgtctttttaatgaagcccttcctgattggggagaaaggacataagtattgtgctttagttttatgtgctggtttataaaattgtgtatgttgactcaatatccccataagcatagggaaaggaaaacaggtcattttttgttcagaatcttatttgaga

SEQ ID NO: 262378 - DNA, 802 bp, Homo sapiens
cacgcgcgtgcacctgcgatcgcgacgcccagccttcgcgccttctccctccgcgctccgccccctctgagcccgggggcacggggcggggcttgccggcagccaatccccggcggccacggcgggaagagcctcgcgctgcccaggaccgtgtgccaccgaagagtaacggaactagcgcaggagctggcgaccgttgtccctgcgcccggacctcgggccgcaacctctgccctaccgccaaaaataacgtctgcagaaagagtggagtagagcggagtgggtgggcgaggggcttccttcccgggggtgagcggcgcacgtgacactcctgggcgcgtgtgaaggcagcgcccggccgagaccggctcggtgcagacgcgggctgtcggcggcagaagggggctctctgctcagtggggcgcggccgatccgcacgtgcggccgccgcccctttctccagagctcgcagcccgacccgcctctgccatggcgctcaccccgccgcccccagctctgggcaggaggtggcggggctgggaggcgccagccgcggaggggaggggcgcgcggagttgatgggccgctcgccgtccgtccaccgtctgtcgctgcgccggggatactcccgccgcctccgctcggtcctctctggtccctgggagcgtgggctgggccgcagggggcttccgtgggcctggcctctcccaccgcaggaggaaagagcagggggaagcccccggcgcccgccgcctccgagagccacggtgtcctcgggccgggcaggcgttgaagacgagcc

SEQ ID NO: 262379 - DNA, 406 bp, Homo sapiens
gacctcgtcactgaagaaggacaggagaaacgggtacaacaaaagcagtgggctggggtccccatctgggggaacactaggccctaaagacccacaacatcccttcctttccctggcatgggccctgcagctcctggtgtttttcttggcggcctgagagccaccctcaccaccataaatctgccctgtcgacgcccctccagtcctggctcccgtcagctttccctccagctgctaatgccgacctgctaatgccatcagccacggaacactgtaatgctagacggtgtggaaactctggcccagttccctctgttactcttcatcacctcttttgagaaactcaggacaagttcctcattgactgaggcagaggtacaatcccaaaacatctgttgtgggtcct

SEQ ID NO: 262380 - DNA, 2855 bp, Homo sapiens
cctggcaatcccatgtggacttctggtagaatgagcaatgcaaagaactggcttggacttggcatgtccttgtacttctgggggctgatggaccttacgaccaccgttctctcggacaccccaacaccacaaggtgaattagaagcactcctgtcagacaagccacagtcacatcagcggaccaagaggagctgggtttggaaccagtttttcgttctggaagagtacactgggaccgaccctttgtatgtcggcaagcttcattcagatatggacaggggagacggatccatcaaatacatcctctcgggagaaggtgctggcatcgtgtttaccatcgacgacaccactggagacatccacgccattcagaggctcgaccgagaggaaagagcccagtatactctaagggctcaagccctagacaggcggacgggcaggccaatggagcccgagtcagagttcatcatcaaaattcaagacatcaatgacaatgagcccaagttcctggacggaccttatgtggccactgtgccagaaatgtcccctgtgggtacctccgtcatccaagtgacagccacagatgcagatgacccgacctacggcaacagtgccagggtggtgtacagcattcttcagggccagccatatttttctgtggactctaaaacaggtgtaattaggacagcgctcatgaacatggacagagaagccaaagaatactacgaagtgattatccaagccaaggacatgggagggcagcttggaggattagctgggaccacaacagtcaacatcaccctctcagatgtcaatgataacccaccccgctttccccagaaacattaccagatgagtgtgttggaatcagctccaattagctccactgtcgggagagtgtttgccaaggacttggatgaaggcatcaatgcagagatgaaatatactattgtggatggagatggtgcagatgcctttgacattagcacagatcccaatttccaagttggtatcataactgtgaagaagcccctgagttttgaaagcaagaaaagctacaccttaaaggtggagggagccaatcctcacctagagatgcgttttctgaacttgggcccatttcaggacacaacaacagtgcacatcagtgtggaagacgtggacgagccccctgtgtttgaacctggcttttactttgtggaggtgcctgaggatgtggcgattggaacaaccatacagatcatttctgccaaggacccagatgtgaccaacaactcaatcagatactccattgatagaagcagtgaccctggaagatttttctatgttgacattacaacaggtgccctaatgacagcaagacccctagaccgggaagaattttcttggcataatatcactgtccttgctatggaaatgaacaatccctcccaggttggaagtgttcctgtcacaatcaaagtcttagatgtgaatgacaatgctccagagttccccagattctatgaagcttttgtctgtgagaacgccaaggcaggacagctgatccagacagtgagtgcggtggaccaagatgacccacgcaatggtcagcatttctactacagcttggctcctgaggctgctaacaaccccaactttaccataagggacaaccaagataacacagcacggattctaaccaggaggtctggtttccggcagcaggagcagagtgtctttcacctgcctatcctgatagcagatagcgggcagcccgtgctgagcagcacaggcacactgaccatccaagtgtgcagctgtgatgacgacggccacgtcatgtcctgcagcccagaggcctacatgctcccagtcagtttgagccggggccccctcattgccatcctcgcctgcatctttgtcctcctagtgctggtgttgctcattttgtccatgaggcggcaccggaaacaaccatacatcatcgacgacgaggaaaacatccacgagaacatcgtccgctacgacgacgagggcggcggcgaggaggacaccgaggccttcgacatcgcggccatgtggaacccccgggaggcgcaggcgggggccggccccaagacgcggcaggacatgctgcccgagatcgagagcctcttccgctacgtgcctcagacgtgcgcagtgaacagcactgtccacagctacgtgctggccaagctctacgaggccgacatggacctgtggacaccgcccttcgactccctccagacgtatatgttcgagggggacggccctgtggcggggtcgctgagctccctgcagtcggccacgtcggactcggaacagagcttcgacttcctgacggactgggggccccgcttccggaagctggccgagctctacggggcgtcggagggacccgcgccgctgtggtgacggaagccaggaggcaggcgcgcgtccaaatccagacgttctccgcgggtgcttcgcggacaaggtgcagccaaccacacgagcaatactgtgctggagagtgagaatgggggtgagcaggcgaacagagctctctctggatcagctttacttgggtagattaagttaaataagcaaaaggaaacccagaaggaagagggcagaatctttaattacctttttttcttttctttttgatttttctgacactgtgtgcgaaggcttggagtccaaggtgttctgacaagggtggcttttctctgccattcgctaaggcctttgtcacttttccaccacagaaaggctctggccttggatacagagatgccaattgaaagcagaaagttctactctcgtatctgttttttatcttatcttattctccatttaagagtttt

SEQ ID NO: 262381 - DNA, 520 bp, Homo sapiens
cactacgtctggctaatatttggtatttttagtagagacagggtttcaccatgttggccaggctggtcttgaactcctgacctcagatgatccgcccgccttggcctcccaaagttctgggattacagacatgagccactgtgcccagcccgactgagagcttaaaaaggtgcgatgactctccgaaagactgagactcagagatatttggatatctaataaagtaattcaagatgcatataaatctctggtttcttctaattagtgtcttatgattgtggcttttacttaacctaacctgcaccctgattgcaaaggttttcctgactagccggttgtgtggacactgcctgttcaccttcctttagtcctctccaaggtatgtaaagttcctcacaggaacttccgaagtatatctaccccccttccagcttgaccttctttcccttttggtgtggagtgacttgagggtgtcaccataggaatactgttttagagccaccctgatcactatttagtt

SEQ ID NO: 262382 - DNA, 707 bp, Homo sapiens
agccccaggatatcatgaagtgagactatctctttggaaagggcttaagagaagggcttcccccgttctggtttccagaaatgggataaccccacggaagctctcatcctgaaggatgctttgcactcatttccaatcttcaggccatgttatctactggccctgaggcacaacgagactgcacacacagtccacgcttgccccaacagcccaggcttttctctgtggggagtcctaagccccacttgacttccatgtgcctgatgtgtgcacagagtggcatgcagaccaaagttctacgttcaaaggcatcccattctaccctctccatactcccaatgctgcaaactggtggctcacccagcacagcagcttttacatgggtttggtatgtcccacccagagatggcccatgctatgtttttttaaagtttgcatttgttgccaacatttagaactgtggtttttattctttaatctctaggttcatttcaacaatcaggcccaattcctacatgacagtgatggcccggaggggaacagcaactgttttaggtggcttctgtcctcttaaatctacaaaaggccccacagttccctgtgatacctcctcctctgacatcaagggtcagctgccactgaccactgtgcttgcatcactgtgtttcttacaatgagtcggcttcctgtgtacgatgctgtctgcc

SEQ ID NO: 262383 - DNA, 1164 bp, Homo sapiens
ggcaagtcaggctcttgacacaaatgaaaatctgtggttcaattttgtgttttgctgtctgttttacatgcctctgagtgttttatataaacacttgataataaactttgtccccttctccattaaacataaattgttccaaattgcccttatgccacacttagcaagcctcttcatttttgacttctggtaaagccagcatgaaaggagtttgatgcattttagtgtcaactttaatcatatcatgttgagtttatttataaaagtgtttctccaacttaagttctctgtgatactttttcataatttttaccatatataccacctgtgttgcctggaccatacttcgagggagcattgatttataatatgtaggtaacccagcaagaagagttcctcttgctggcccagccctagatctcttagttaactacaaacagtttttcagttgttcacattagaaaagttgcagcatggtcagtgtcacatctcaaactctttttctcctgtttgtgatttctgtctttcttacaaccaattcacatatcccttgtgtctagttctttacattgtgtttaggagcacagactctggaaccagactcgggcctgaaatcccaaattcaccacttactctgtgaacttaatatgtcttaatatatttgtgccttagctttcttatgtgtaaaacagggatgataatagtaccttcctcataggttcttgttagcattgagtaagttactatgtgaaaacttttaaaaccaagtctttgtacataagtgtttactactatttattgtttgttttcctttccagttcgactaagaacttcttgggtcaggttaatagaggtgccatttaattagagctgtgtcctttagggtcccaacaggaaacagatgctatactcaaaacaggacaattttagaagagttttttttaataaagaagctgtttacaaaggcgcaagttcagagaaacaaccctgaagggacaaggttgaggagtggttactagaaccttaaaggaaagagaatcgtgtagagtcactgccttgagagaaaccttgacctttggttgggctgatcccaaccagaagctagaaggcataggaagccctattgacacagttcatataggccagtcttctgagccagagagc

SEQ ID NO: 262384 - DNA, 507 bp, Homo sapiens
gatacaggtttgtgtaccaggattggagacccctgatgtatagtgtaacgattaagaacaaagagtctgaatccagatttcatgtgaccttgagcaagtgattaaatttctgtgcctcagtttcttcatgataacagttcatacattagaagcttgttgtatgactaaataatagtggctggtatatattatgttacacacacacacacacagagccttatgccacatattgataatgggggttcgataagattattgatggagctgaaaaatttctatagcctggtgatgtcatagtcgtcgtcttatggtattgaaacatgttactcatgtgtttgcagtgatgctggtataaacaaacctaccaagctgccagttgtataaaagtatagcacatacaattatgtatggtacataatacatgataatgataagaaatggctatgttatggtttatgtaattactatactttttattattttagagtctatgccttctgtttatta

SEQ ID NO: 262385 - DNA, 657 bp, Homo sapiens
gaaaattttgatagtgataacattgaatctgcaaagtgctttgggccatatgtccattttaacaatattgattcttccagtccatgagcatggattatttttccgtttgtgtcctctctgattgctttcagcagtatgttacagttctgcttgtggagatggttcacctccttagttagatggattcctagatatttcattttacttgtggctattgtaaatgagattgtgttcttgatttggttctcaacctacttgattgtggtgaattgagtttttgatgtgctactggattcagtttgctagtattttgttagtaagttttgcatctatgttcattagggatattggcctgaacttttctttcttcattgcatctgtgccagattttggtatcaggattatgctggcttcatagaatgaacttatttaaatataaaagagataaaagagatatacaaaagagattgtttttatagcagccagtaggggtgacccttcccttccctgcattatcccttatctcttgaaagtaactattccagtgaaaatctaacttattgctattctaaattaaaggaaccagtttaacagctatacaaatatgtttataagaaaaaatgtgtaaaatagcaataaaagcttctctaccaaaag

SEQ ID NO: 262386 - DNA, 169 bp, Homo sapiens
ggggtgaaggaaaagggttaactagtatgttggaatggaggaagtcggcagaaatgtggtgatgatcttgaaaatccccttgagtattgatatttaaaccagtccattgaaggaatgggtaatagacctattctgaaagaaatggtaagtatcgtctattttgaaaaaa

SEQ ID NO: 262387 - DNA, 400 bp, Homo sapiens
gacattttatttatttgtaaagtatttaacaataataatgtgaatatggcagaataattgacccttttcccaatttcttgtgaattaaacaattattccactttccaggtcttaactctttacctgtgatatttcttggaacactttatgcctcccccaaacccaaccttcatccttcacctgatttaagtattacataagaaattattgttcctctataatttcagtgactagaatctccaatgtccaatgaatactcttaaaattagtagtagcaagttggtcaatcttgcatttgtggaagtgcttctagcatttcatcttcaactatgatggttgatctcaatttggggtaaatattccttttttgaatcaataaagttttctttttattctttca

SEQ ID NO: 262388 - DNA, 176 bp, Homo sapiens
catcccagctgagtccagccttccagccatctccaccaaagcaccagaagatatgggagtgcagctgcctcagaccttccagaccagcctaactgccacctgaattgctcggccaagctctgtccaaattcctgacccatcgtcatgggatataataaaatagttgttttaagccc

SEQ ID NO: 262389 - DNA, 570 bp, Homo sapiens
ctcttttctctatctcttctatctattctcacctcctattatctatcgtatttctctctaacttcaccgaaactgcacttgtcaagatcttcatcacatcccagttgccaaatccaatagccttttggttctcatcctattccatctgattaagctgatgttttccctcactttaaaaatacttttccctcttgcctcccatgtctcctcaaactacatgattttacaatcctcattggccagtctttggtctccttcaccacctctttctcttgcaacccctaaatgctgagtttctacctgctcagtcccgaaccctcttttaatcctttttctaactctctcccaagatagtctcatatattgacaaagcttgaaatgccatctctgtgcttatgagtctcatagtgatgtctctaattcagaccttttctcatatatttaattgactattttgcactccactgaaagatctcacattcacttttaatataacatggcaacatggaaatcttgaatctcccctaaatctttttcaccctaacttatctctatgaagtagcacaatca

SEQ ID NO: 262390 - DNA, 357 bp, Homo sapiens
gcaggctgcactggtaccagggaagagggccaagatgtttctcaatgtacaacaaaaagagtttgaacctgtttcagaagatggccaagtatttggagatcacagaacttgacatcaccaagcataaagaagttattttgacatcctccccccaaaaaaatccctgagtattttatttggccatattgaccacaaaagaacttcaccgtggaccctactgagaatttctttccaatcagaattacctcaccattggtctgccaggatgatttatcagtaaatgtcccaagtagttgaaggaagaaagcttttatctggggttacttaataaatttcatttaaaaactaaatgactgc

SEQ ID NO: 262391 - DNA, 492 bp, Homo sapiens
tctttgcacttttctttccttgtagtgtcctgaatttggcaatgattgttcttctgtcttcatgtttgttcctaatgaaaaaatactgtaacattttttattttcttgcggacatactgattttgtgatgtgttcgtttttaccttactaaagatatgtgttttagaagaaatctcattttatttggttggaacacaaattttgtgccaaagtaaatatcttagtatttaatactgtaagcactttgtgtccttccagtccatatgccataattctttcaaactctgggaagaatgctgtggttggaagattattctgttgtatgttactatgaacgcattagtcattttgttgcattacttgtttgcctgtttttggtcactgagtaatcggtgcaagatgctttaactgtttccacaaatggcagtggcatgttgtcacagcatctaaattgttgatagtcttggattgcattaaatgcagcacatttaa

SEQ ID NO: 262392 - DNA, 299 bp, Homo sapiens
ttaggctcaattttcctacataattaagagtttggaattcgggcaatatcaagaaccacatctgtcctgaaatcaattatctctgtttggtaagtaggggagaaaatacttgataaatatttcttatctgcaacaaattctcatgttcatgttttatctttgatcttgttgaagactctgcagaaaatttctaagcaacacttgattgttttgcccacactgctctgtattttggccacaggttggagacttacttacttttacgaatataaatataatctcctctactcaaaaccaag

SEQ ID NO: 262393 - DNA, 430 bp, Homo sapiens
gtagtatttcgtgcctagcttcttttacttagcataatgcttttgacattcattcatgtcatacgatgtgtcagtacttatttttttttttattgctgagtggtatttcattgtgtgggtagatcacttttgtttctcttacaacaatcaactttttaaaaagcatatattcaagaaactgttaacagtggctgcttgtagagaagggaattagagacaaagggacaaggatgaaaaagagactttttcattgtttactatttgatatggttttaattttttgaattcaggattatgtcatatctattaaagcaaaataagaaatgtgttccccattaatatatacaaaataagaggggagagccctctgctgatccaaatcccatattcctttaggaaattaccattaatttatttttgatatatttct

SEQ ID NO: 262394 - DNA, 448 bp, Homo sapiens
ggaaacctactttgaagttatccccactattattatgggggttaaggagctagtagatttcaaacccgtagagcagggcgtggccatagtaaagatttcaataatatcaacctgtatttagtatttctatgtgacagatgatgttctagtaccactattctaccaaaggccaagcatatgttcttcacagagcccacatctgtattttgtggtgatttattggaatcctatatgagagtgtgctttactgagaatgattatgctgggtttctgaaatcaaggtttagatgtaagaatatttggtgggaaaattatgaataacagggagcttcaaacttctaaaaataagtttttaaacggtgaaagctaacaagaagctgcaaaaatgtctttgcctgaaataattgccctgggatggtgagagagtcatgttaattctcgaaagcta

SEQ ID NO: 262395 - DNA, 462 bp, Homo sapiens
atatgtgtacataaaatgtatttccatatatttatgtgtctgtatgtgtatgatagaatctagactagagctagaggttacgattatctgaaattgtgatagagtttgccaaattgccttccaaaaagactgtatccgtttacattcccactagcaggagagaggagtatccattttctcgcatttcctaacactggatattgtatttttaaaattcttgcctatcttgtggatcaaaaatgttattgttagcctgtcacattggcctgtgtgctcttcctcaaacactctaagcctgctagcacttcatggtcttcactttcattcccactgccggcagtgcccttccctcagagattctttctgtcaggtgttaagctcaaataccatgtacccctgagcttcaaataaaagttttaaaaaagtgattaaaaaacatcaagtttttttggtcaaaattaa

SEQ ID NO: 262396 - DNA, 318 bp, Homo sapiens
ggaatcattacatgtgcttcctattttcttttgatgtagaactacaggaatttaagaaattatagaaaatttaactatactcacaaagagaagtgaaatgcaaacagaataatcatctatattatttagctgaaggcctctaaatttcaggcagaatatttggggtaggaaataatatgaatgtagtaaattggtacaccacattaatatatagatgtaataatgtttacttaataattttaagaagattgtggaattggtctttagtaatatgattttccaaattccttttaaaaaaatttacatttatgagtctct

SEQ ID NO: 262397 - DNA, 84 bp, Homo sapiens
  misc_feature (2)..(2): n is a, c, g, or t
  misc_feature (15)..(15): n is a, c, g, or t
anagcacaggcaacnaaagcaacaatagacaaatggaactgcatcaaacttaaaatcttctacacctcaaagaaagaagccagc

SEQ ID NO: 262398 - DNA, 395 bp, Homo sapiens
taaattcgcggccgcgtcgactgttcattaaatgttagtggcagaggtaatagtagttgtaacgttgaattgcctggtatgatggagaatgtttctaaagaacacccctcaaggctgggcatggtggctcactcctgtaatcccagcactttgggaggctgagactggctgatcagttgaggtcaggagttcgagactagcctggacaacatggtgaaaccccgtctctaccagaaaatacaaaaattagctgggtgtggtggtgcacgcctgtagttccagcttcttgggaggatgaggcaggagaatcacttgaacctggaagcggaggttgcagtgaactgagattgcaccactgcacaccagcctgggtgacagagcaagactccgtctca

SEQ ID NO: 262399 - DNA, 446 bp, Homo sapiens
tgaccctgactcgtagaaccaaagaaggcttttgggagggaatgaagtcgaatttgagaactgcacttggcaagtggaataggagttagccaagtgcaaggaagggtggtggggaccaggaattggactgagtagagaacatgcactctcaacaagggcatgatctcccccaggagaagaaaatgggtgcttggcagacaagataaatcttagctatcacactgttttgtcaccatccaaagctcaatcctatgtgacaaaattgtattcctcttaatatttaattgaggggagggaagatgactaggaaagaatttctaagaaggtctccttaggtgggcaataataaaaaaaaacattgagaaacattggtatagaaagagcatttgggcataggaaagatcacacatgaaactactgaaatgagagagaacatagactatttg

SEQ ID NO: 262400 - DNA, 313 bp, Homo sapiens
ggggtaaatactgttaacttcaaacacagattatcatgagaaaaaataggatgtttatgaaagtactctaaacctaaaagttctatactaaaaaaacatggtatttaatgaatgtgcaaggggggaaatcctcatataaaactgaagttcttcagtgaaattccaaagacagccttacttattacttctctgtcaaaagaaggcttgcttacttctctgtctaccatctaccacctttcttagcacttgtctggtaacctccacttaaaatatggggacccctttatttttttattttatttttatttttgag

SEQ ID NO: 262401 - DNA, 740 bp, Homo sapiens
agtttgagaccagcctgggcaacatggtgaaaccccatctctactaaaaatacaaaaattagctgggtgtggtggcacgcgcctgtaatcccagctacttgggaggctgaggcaggagaatcgcttgaacccgggaggcagaggctgcagtgagctgagatagcaccactacattccagcctgggcaacagagtgagactctgtctcaaaaaaagaaaaaagaaaagaaacttggaagccatttcagaaagactccaggaaggccagcagccactcctgcacaaccaggaggaagggctacattttactgcaagcagctgttttctctgatccttctttgtaaggaagtgcagtgattttgtgttttgaaggaagacttgaagaagcagttgggtaggtattccaataggactgatggggaggaaatcagatactccatgagaaggatttcagacctggtagagtcagaatacattctgctttcaggatttttgagattgctgatggtcccagggtttatacaaggacttggatctggctatagaaactcaggtagaaattacatgtatgcagatcagcactgatgttggttctaatctataatgatgtgataaattaaaaaaacaaaacaaaaaacagggctgggcatggtggcttacactataatcccagtactttggaatgccaaggcaggagcatcatctgaacccaggatttcaagtccagcctaggcaacatag

SEQ ID NO: 262402 - DNA, 347 bp, Homo sapiens
aaattgaaaactttcttgaaacaaatgataatgaaaacacaacacagcaaaacctatgggatacagaaagagcagtacttttttgcctacgtcaaaaaagaactcaaataagccacccaaggatgcatcttaactaggaaagcaagagcaaaccaaacccaaatttagtagaagaaattataaagatcagagcagaaataaatgaaatcaaaacaaaagaaacaatataaaaaatcaacaaaacaactgaactcagggagagagaatgcagaaggatggttaccagaggctgggaagggtagggggatgattggggaaacgtgggatggttaacggattaaaaaaaa

SEQ ID NO: 262403 - DNA, 426 bp, Homo sapiens
tgatcctggaatatctcaacatgcagataacaaggaagctatcaaagttatgtcaaaaggattttgagagactctgaacaaccaaaagggggacaatttgagattcaataaagataaggatgtcaatgaattgaatccatcaagtgtgttaaaatctagagttcatattatagtgtctgcagatgtatattttgtgaaaaaccatacagaaatgcaaggaagcgatttctattacactatgatactctagatagtggttacttttggaaggaggaaggggctgtgattaggaagaggcacgtggatggcttccggcctggctgcactgggtggtggctacaagggtgattgccttatgataattgaccgtgtcataatttgttttctgtaactgtgtttcattttaaaataaaaggtttaaaaagt

SEQ ID NO: 262404 - DNA, 312 bp, Homo sapiens
acactagtgtgccagcacatgagacactagaaatttagtgcagaagtctgtgcctttttcgagtgtatgtgtgggcatttttctggggagggatttatcagattatgcttggccaaaagtgccaagtatgagatgccaattactcattccactgtcccatatagaacagaactaacacaaattgatagtgggagatgtgggggatcttggtggttatctcaagaatcaaccacagcatctagtgctgagccttcataattatacttatcatcaacctgaagatttttttataataaactaatacacccctgt

SEQ ID NO: 262405 - DNA, 545 bp, Homo sapiens
tcgttcttcactgctatcatatgttgcatctgacctagatgtaggcttgggatataagaacagtttctgctgtgctgtacaagctctgaagcaattacagtacccttttcagattgagggtctaagaattagagcaacaactgagcaaaatgaacacagctttaggtacttgtgggacaatataagaaaagtctgagatatatacgtatttatctcagattcacatctcagagggagaatagagagacaatggggtataaaacttataaataggtataaaaacagcaaataacaaatgtagcagttttaagaaatctcagaagtctcataaaattcttttgtattcatggaaatgcaaacaaagttagcttcttcttattctatgtttatttgtcaaataatttgtgaacattagcaaatcagcacagtgctagaaattgtgggaaaaaccaagatagtttaaatgtttatcttgatatgcaaaaataactgtaatacaaataataaataccctaagagaggtagagtgatggaaatgtatagca

SEQ ID NO: 262406 - DNA, 252 bp, Homo sapiens
tagaatcaaaattcaaagtaattgtcagcggcttggaagagaatcacggaattctctttcaagaaatgctgctgggcacggtggctcatgcctgtaatcccagcactttgggaggccaaggcgggtggatcacttgaggccagaagtttgagaccagcctggccaacatgagggaaccccatctctactaaacatacaaaaattagccgggcgtggtggtacgtgcctataatcccagttacttaggaggct

SEQ ID NO: 262407 - DNA, 323 bp, Homo sapiens
gagatctctcagagagaggttaaatgcacaggctctgggggcaaccagcctgggtttaaatccccgttctgcctctttgcaactgtgagaacttgggcacattattttctctctctgggcctcagtttccttatctgtaacacagggggaatgatcacaatgcccaccttgtaggttatgatgaggactaaatgagttcatgtgtatgtagtttaaattcagtgcctacaccagatagtgagtatatccaccatgctgaacacgcaggacttgggggatggggaggggaagatggcatcattaaacagctttgtttccatctc

SEQ ID NO: 262408 - DNA, 638 bp, Homo sapiens
atttggcataacgtttttattgcaggattcttaaatatatttaggtactgtcttggtagtcatcagacatatgtatagatcatacacacacacacacacacacacacacacacatatacacatacatatttaaatcaccggctactgtttgcattcagtgcacattatagctctcagaaggttgcaaacacttttcattgttgccttttatctgtcatgctgttcaaataattttcctggacactactaaagtaggaaatggatacaagtaaattacaacttgtacccatttccaactgtcaaaaaaagcactaaaggagaaatagaatatggacttcataaaacgttgtgatttggaagcagtttttgtcaaattagtatatgtaaatcgtctttgttttgtgaaactttctctgaggttttgcagtgtttacaatgtagttgactcacaaaagtgatacagtgttgaaaccaatagcagagaattttcagaatgataaaattcattctaactgtggctgaaagagacagattgtatgtgagttcttttttaatatttgaagatgatatgtttcattcaggacattacattttaaagggtttattatacatttgtaggaaagtttaacaagctttaa

SEQ ID NO: 262409 - DNA, 411 bp, Homo sapiens
gctgtaccagtagtaccttaaaatgcaaatgcaattggtaaagaacaaggcagcatgtagtgcttgcacttacaaatactaccagttttgtaacaatttgcatttttttttgtccttgaaagagtaaccacttacctaataaaacgaatatttaaaagcgcaatattccttcctttgcatggcatgcaggaatggtgaaagcaaagaaacagtcatcccttctcttccccccacttctggtctcccgaaaaaggaatgccaggtcagacaggtggaggagggaaatggggcacaggtcaaggtatgatgaatctcttaaaaagaaatccggccaggtgcagtggctcacgtctgtaatcccagcactttgggaggcagaggcgggcggatcacgaggtcaggaatcgagac

SEQ ID NO: 262410 - DNA, 290 bp, Homo sapiens
tgatttcagcacttaagctacaccaccagaggaaacagcagtgaggagaaaccaagcgcgatcatgggacaagaggtcttttcttcctgtcttcatctgctgatctgctcacctgatattcactgagcaccaagtttatgccaggtaattgcactaggtgctgaaaacagaatagaaccctggctaagaggcccatttcagccctcatggagctttgaattaattgttgatgtatacttttttttttaacctctaaattacatcattttattgtcataatgactagccat

SEQ ID NO: 262411 - DNA, 186 bp, Homo sapiens
caaatgaggcaattagagtgggttctattcccatcagactgtgcccttataagaaatttggacacatgcacagataaaaggaccatgtgaagaggcagcaagcaggcagtcatttacaagccaaagagagaggtctcagaggcaaccaaccctctgctgatgcctctaccctgaacttagaacctc

SEQ ID NO: 262412 - DNA, 359 bp, Homo sapiens
agcctcccctgctcttagtctatgtgattcggacacagccaactacatttcccagatccagaaatgaacacgccattccaagtaaagccaatgagagacagctgcaggacttttgctggaactattgggaaagtggtgtttctttttctgctatggttacttatctgctatgctctaagcctggaactgctggaggtcatctttgctgcatgaaaatgaagtcaatattgaggacagcagaggtgagagggagagaggcataatcctgagtgtattgcaggggcacctggatccagccatacctgaaatccgagactttccattctaagaaccaatacattctctttgtacttaaaaaa

SEQ ID NO: 262413 - DNA, 455 bp, Homo sapiens
ttataggattagatgagaaacaatggctgacactagagtccacaatttctatataatatctgaaggtcagagatccaaaatgcagaaactagatgactgacttatgagactggttgatcttgactgtggatattagaaaacttaaaataggggagactttcaaatggaattgaggtgaagtatgtgtgcaaccagtgtaaggagcagatgtttgcagatatttcttttatttttatttttgaaacggaatctcacactgttgcccaggctgcagtacagtgctgtgatgtgggctcactgcagcctccaactcccaggctcaagtgatcctcccgcttcagcctcctgagtagctggagctataggtgtgtgccacaatgctccgctaattttttgcattttttgtagaggtggagtctccctgtgttgcccaaactgatctcaaactcctgggc

SEQ ID NO: 262414 - DNA, 639 bp, Homo sapiens
cgtgatgagcatcctgctgcccaacatggcggagttcgacaccatctcggaactggaggaggaggaggaagaagaagcggcaacgtcgtcgtcgtcgccgtcgtcgtcgtcgtcggtatctgggcccgacgatgacgaggaggatgaggaggaagaggaggaagaggaggaggaggaagaagaggaggaggaggaagaggaggaggaagcgccgcccccgcctcgggtagtgagcgaggagcatctgcggagatatgctcccgaccctgtattagtgcggggtgccggccacatcactgtgtttggcttgagcaacaagtttgatactgaatttccctccgttctaacagggaaggtggccccagaagaatttaaaaccagcattggccgtgtgaatgcatgtttgaaaaaggctctcccggtcaatgtgaaatggctgctgtgtggttgtctctgctgctgttgcacactgggttgcagcctatggcctgttatttgtctcaacaaaagaaccagaagatcaattcagaagttaatagaatgggaaaataacagattatatcacaaggtaagaaattttaagcacataagtgccccattcatatatttgcagcattaaattgaaaaataaatacaaaa

SEQ ID NO: 262415 - DNA, 1308 bp, Homo sapiens
cgtgatgagcatcctgctgcccaacatggcggagttcgacaccatctcggaactggaggaggaggaggaagaagaagcggcaacgtcgtcgtcgtcgccgtcgtcgtcgtcgtcggtatctgggcccgacgatgacgaggaggatgaggaggaagaggaggaagaggaggaggaggaagaagaggaggaggaggaagaggaggaggaagcgccgcccccgcctcgggtagtgagcgaggagcatctgcggagatatgctcccgaccctgtattagtgcggggtgccggccacatcactgtgtttggcttgagcaacaagtttgatactgaatttccctccgttctaacagggaagaaattctagagagatacacatgaaactaataaaagttattacctttgatgggagaagaggaatgtgatggatagaggcaagggtggccccagaagaatttaaaaccagcattggccgtgtgaatgcatgtttgaaaaaggctctcccggtcaatgtgaaatggctgctgtgtggttgtctctgctgctgttgcacactgggttgcagcctatggcctgttatttgtctcaacaaaagaaccagaagatcaattcagaagttaatagaatgggaaaataacagattatatcacaagcttgctttgcactggaagttgactaagaggaaatgtgaaactagcaatatgatggagtatgtaatactaatagaattcttaccaaaatatcccatattccgacctgactgaggagttttatccagtcacttctgtgttacctgtcatttcctacccttagtgccttgtagatttggaatgaagatggtctcctttgctgtgttcaacttattctttataatggtagaatattcttctcgctcttttgtgttggtttatgaagaaaatttgcacatcttttttgtctttcaatgaggcttgtgttttgcactctcaattttaaatacacacacatgcgtgtgtgcatatacatatatagatagttgccattaaagataaatcatcagtgttggtgtttaaaaaacaaaaacttgttctgagcatgctgccttataattttcatactcattgtttctaaactcgcatcatttttctaggctacttgatgctctgtaatcccttactggacaaacttaaataagcttttggtagcttttagaaatggttttactctgcttttaaaggacatgcttttaaaggacatgcaattaatggcactggttttgtcctgcactttgctttatcacttatgttagtggataaaatatttaaactccta

SEQ ID NO: 262416 - DNA, 1226 bp, Homo sapiens
cgtgatgagcatcctgctgcccaacatggcggagttcgacaccatctcggaactggaggaggaggaggaagaagaagcggcaacgtcgtcgtcgtcgccgtcgtcgtcgtcgtcggtatctgggcccgacgatgacgaggaggatgaggaggaagaggaggaagaggaggaggaggaagaagaggaggaggaggaagaggaggaggaagcgccgcccccgcctcgggtagtgagcgaggagcatctgcggagatatgctcccgaccctgtattagtgcggggtgccggccacatcactgtgtttggcttgagcaacaagtttgatactgaatttccctccgttctaacagggaaggtggccccagaagaatttaaaaccagcattggccgtgtgaatgcatgtttgaaaaaggctctcccggtcaatgtgaaatggctgctgtgtggttgtctctgctgctgttgcacactgggttgcagcctatggcctgttatttgtctcaacaaaagaaccagaagatcaattcagaagttaatagaatgggaaaataacagattatatcacaagcttgctttgcactggaagttgactaagaggaaatgtgaaactagcaatatgatggagtatgtaatactaatagaattcttaccaaaatatcccatattccgacctgactgaggagttttatccagtcacttctgtgttacctgtcatttcctacccttagtgccttgtagatttggaatgaagatggtctcctttgctgtgttcaacttattctttataatggtagaatattcttctcgctcttttgtgttggtttatgaagaaaatttgcacatcttttttgtctttcaatgaggcttgtgttttgcactctcaattttaaatacacacacatgcgtgtgtgcatatacatatatagatagttgccattaaagataaatcatcagtgttggtgtttaaaaaacaaaaacttgttctgagcatgctgccttataattttcatactcattgtttctaaactcgcatcatttttctaggctacttgatgctctgtaatcccttactggacaaacttaaataagcttttggtagcttttagaaatggttttactctgcttttaaaggacatgcttttaaaggacatgcaattaatggcactggttttgtcctgcactttgctttatcacttatgttagtggataaaatatttaaactccta

SEQ ID NO: 262417 - DNA, 353 bp, Homo sapiens
ccttcacctgctaccactgcacccacaggcagaaggatgtagaagtgcataaaaagtcacacttctctgtcttttatcccaggagagagtcaggaacagtgagctcctacataaagatcaacatttgtttctcctttccctcctgcaagtgcctgtctctgccaaagatttcagtaatttctgctgcagcaatgggaataatggctgcactggcctgcttctatcaaacccaagcagagcagggtctgcaacttccctttgaaacaagggctgacgggaggcggaggttgcagtgagccgagattgcgccactgcactccagcctgggtgatgacagcaaaactccatctcaa

SEQ ID NO: 262418 - DNA, 457 bp, Homo sapiens
caaagtacttgccctcatagagcttaaattttagtagtggaggtagagaagaaacaaaataaataagtaaaataacatgtaagggataagtgctaagaaggaagaaaaaaagcaggaaagggggatatgaaatatttcagggtaaggtcttgacattttagattagggttgccaaggaatatctcacagagaaagtgacttttgagtaagcacttaaaatgaatgagagggcttgacattcaggtatctggaggaagagcatttgaggcaaagggaacggcaagcacaaagggtcagttggaaatgtgccctgatatgttctaggaacaagaatttcaagagctggctggtcgcggtggctcactcctttaatcccagcactttggcaggccggggtgggaggactgcttaagcccataagtttgagaccagctgggaaacaatactccttctctac

SEQ ID NO: 262419 - DNA, 480 bp, Homo sapiens
acaagctgtatgtactctacatctgagcagaaaattttaatacagctgcatagtttgcctctgtcacccttgagtttctaaactctgccatatgaaaagcatgccacaaatagtagctacttttctagcctgggtcacagaaaggagattcctggaatgaagtgaaactgagctgagcctaagtgaacccaggagaacatagcaggccacggttctcatgtaatggaagcaaggaacaaaatacattttgttgtgaacaccgagatattggggttgttacgatagcaaaaacaaatctgagaaataataaacatacagaatgaattattgaaactgacccaatagtctcatcaatagataggttttgtttgcttttttgtttttgataaacatagaaattgacccatctggtcttaaggcttgaaacttatatttaatttatctgagttccttcctcaggaaatgaccttcaggcttcta

SEQ ID NO: 262420 - DNA, 418 bp, Homo sapiens
gtgtgggtgagtaaaaaaatatttaatatatgttaattaacttccgcatctcctgaccccactaaggtttgaataggagcctccccctttataaaccctttttatatacccacactacctagcctaattggggcacatattagctgcttcatacatacttttcaactgcctaatttgctgattaggcataaaagtatataattctggaaaagtctccacaaggtgaaaatgattatccaaataataaaggcccacaatgccagtgagtacattatctgcattatgctgatatttgactcctttcaactctctttggttgtagaaacatgaccgatgattatattacacttttaactctttaaatattattagcttgctttggactgtggaaaactaactacaatcatttttattcctc

SEQ ID NO: 262421 - DNA, 510 bp, Homo sapiens
tcttttcctaaaggcaatctattaataaaccacccaaattacatgcagttctagtgaccagctcttactctctaatactgtgcccaaataaaaggaaccagggcttctcagagaaataactaattgtatggattggccagggtaggtacaagatgaagcagtgataccttgtgtgagggaataaaaaggaaatgctcaaaaaaatggtgagagtatatgacaaagatccagaagctagcttaaagggaactctggccaaatctggggaaatttgaacacaaaaaatacttatgtacattaacagagtacaaacgattgaaaatacagcagttcatgagtccttaccaaaaataccaataataaattcataaatcaatgaaaatgaaacaaagcaatctcttgcttacagtaaaatgtcaacaaccatctagtaaatgtgaagggagtgtgctggaggtagaaaatcattattttgcaaccattatgggaaagactgaatcaggtaaaaaa

SEQ ID NO: 262422 - DNA, 459 bp, Homo sapiens
tgtcacccaggctggaatgcagtggcacagtcatggtccactgcagcctcaacctcctgggctcaagctgccctgcctcctcagcctttgaagtagctgggactacaggcgtgagccactgtgcctgggcagagttaactctgtgtgacgttgtgtctccattgccctctgtgggttcaggaacaccaaccgcacagctgcaatgttccagtcgttagctaggctctttcgtgtggcctgctccatttaatcacctcggtaaccccttcatagaggaggaaacagaggctaggagaggtgaaaagtcagccgggggcgcacagcaatcgctgccttttctcctccccaggactctgaagggatcagcactgctttccaagtccaagttgtgctgcagcaacttcacaaaatgccacttttatgcatttataaacaccaagtttaacaaacacgtgttga

SEQ ID NO: 262423 - DNA, 548 bp, Homo sapiens
tccttctttttcaagtatacttcatttaatgcaaagattcaaagtaagactccacaaaataaccctttagatctaaatggatttaaacacaatgaatatcaagaagtggtctctattgacaaatgcagaaaaccatgctatcatccagacaacttaagcagaactggctaaatctgtaatatttttgcaaaaccaggcattttgttagtatgcagaaaataaatctcgggaccccaaaatcactaagccaaagggaaaagtcaagctggtaactgtgtcaggcaaacttgcctcctattttattcctaagatagcttatctttacaggtgtgggacagaaagtcctccttctactcacctgagacaagtgtttatctgattgcttcctctgccccattgtttatgtaaaaatgcagactcactgagccagattaaggcataaatgactattcctgtacctgcctctcacaagtaaattgtgtattcagtgaaaggcagatcaaagactcaaaagaatgcaaccatttgtctcttatctaactgtaacc

SEQ ID NO: 262424 - DNA, 764 bp, Homo sapiens
tggtataaatacactgtctaaagcatttaatggtctttctttaacacagccaactcccccgggtttgaaacagtgttaaattctctcttgcttgtggcaaaagaagctgtcaagtccaacactgaaaaattggtaccatttcctggccagtaagcacagaacagaggggctaaatattttatggttttattcatttactgtgttctcatgctgtgtttttcttttctctgtctctccctcctgctcgtgtctgcccagggctgattgttgtgacattggccgtatgctggatgcccaaccagattcggaggatcatggctgcggccaaacccaagcacgactggacgaggtcctacttccgggcgtacatgatcctcctccccttctcggagacgtttttctacctcagctcggtcatcaacccgctcctgtacacggtgtcctcgcagcagtttcggcgggtgttcgtgcaggtgctgtgctgccgcctgtcgctgcagcacgccaaccacgagaagcgcctgcgcgtacatgcgcactccaccaccgacagcgcccgctttgtgcagcgcccgttgctcttcgcgtcccggcgccagtcctctgcaaggagaactgagaagattttcttaagcacttttcagagcgaggccgagccccagtctaagtcccagtcattgagtctcgagtcactagagcccaactcaggcgcgaaaccagccaattctgctgcagagaatggttttcaggagcatgaagtttga

SEQ ID NO: 262425 - DNA, 1362 bp, Homo sapiens
atggcttcacccagcctcccgggcagtgactgctcccaaatcattgatcacagtcatgtccccgagtttgaggtggccacctggatcaaaatcacccttattctggtgtacctgatcatcttcgtgatgggccttctggggaacagcgccaccattcgggtcacccaggtgctgcagaagaaaggatacttgcagaaggaggtgacagaccacatggtgagtttggcttgctcggacatcttggtgttcctcatcggcatgcccatggagttctacagcatcatctggaatcccctgaccacgtccagctacaccctgtcctgcaagctgcacactttcctcttcgaggcctgcagctacgctacgctgctgcacgtgctgacactcagctttgagcgctacatcgccatctgtcaccccttcaggtacaaggctgtgtcgggaccttgccaggtgaagctgctgattggcttcgtctgggtcacctccgccctggtggcactgcccttgctgtttgccatgggtactgagtaccccctggtgaacgtgcccagccaccggggtctcacttgcaaccgctccagcacccgccaccacgagcagcccgagacctccaatatgtccatctgtaccaacctctccagccgctggaccgtgttccagtccagcatcttcggcgccttcgtggtctacctcgtggtcctgctctccgtagccttcatgtgctggaacatgatgcaggtgctcatgaaaagccagaagggctcgctggccgggggcacgcggcctccgcagctgaggaagtccgagagcgaagagagcaggaccgccaggaggcagaccatcatcttcctgaggctgattgttgtgacattggccgtatgctggatgcccaaccagattcggaggatcatggctgcggccaaacccaagcacgactggacgaggtcctacttccgggcgtacatgatcctcctccccttctcggagacgtttttctacctcagctcggtcatcaacccgctcctgtacacggtgtcctcgcagcagtttcggcgggtgttcgtgcaggtgctgtgctgccgcctgtcgctgcagcacgccaaccacgagaagcgcctgcgcgtacatgcgcactccaccaccgacagcgcccgctttgtgcagcgcccgttgctcttcgcgtcccggcgccagtcctctgcaaggagaactgagaagattttcttaagcacttttcagagcgaggccgagccccagtctaagtcccagtcattgagtctcgagtcactagagcccaactcaggcgcgaaaccagccaattctgctgcagagaatggttttcaggagcatgaagtttga

SEQ ID NO: 262426 - DNA, 598 bp, Homo sapiens
gctggaagaacaatgcaggagggggtggcatctccttcagcttcagcagtgtgccgagaagagggctaatttgaggaacaggatggtggtgcggagccctggcctgagggccgaggcagaacttccccttttcttgggccttggcccgttacaaagaggggtgttgcagcagctgatgcaaactgagttcagtttccctggggagcagaaggactggtacccggcagaggcgatgagacaggccgctgatgatgcacaggacttgcggtacatgatccctgtaacacagacccaaaggagctgagttaacgtgcaccggcaaaagaatagctgtccctctcagcccaaatccaaacggacagctcttccttactcctcccacagcccagagactaggtgaggtcagggaagtgcttcggattgtctcattgatattcaagatagatggtgaaagagacaggcactatttcattagttttaacaaaactgttccaaaagcgatttgagatgccaatacctgtgaatacctgttaataaagagctgttaaatagacttatttacattttaagtcagagttcacactgtgtacaagacaca

SEQ ID NO: 262427 - DNA, 294 bp, Homo sapiens
gggtacttggtatatggatagagtcactgaggaactggatatttatttatttatttattgagactccatctcaaaaaaaaaaaaaaaaaaagtaaacattacattccacgcccaccaccaaaataaaggagtggtattgttttacacttttgcaaatctttttaaaatctgacctaataggttctcacatgtgcttcggcattcggtctgctgcaatatattgcattggttgacatacacattgtgaagaacatctgcagttatgtagttcacaaagagaggacctgcagaccc

SEQ ID NO: 262428 - DNA, 812 bp, Homo sapiens
aggactggactccccagtcccgcttttgcctgaagacttcgagggacgcagttggagcgcaaggctcctgcttggcggtgaggcagagggctaacgaccttccttctcctaaattcactgatgcggcggcaagaatggcaccgcctcgtagagctaccgcatttcccaaactcgtagtctcaggaccactttatactcataaaaatgagggccccaagcttttgctaatgtgggttacagctatcgatgttaccacattctaagttaaaatgctttaaagttttttgttgtttcgtttaaaagtaaacagccgggcgcggtagctcacgcctgtaatcccagcactttgggaggctgaggcgggcgtatcacctgaggtcaggagtttgagaccagcctggccaacatggtgaaaccctgtctctactaaaaatacaaaaatgagccaggtatggtggcgcaggcctgtaatcccagctactccggaggctgaggcaagagaatcatttgaacccaggaggcggaggttgcggtaagccaagatcgcgccattgcactccagcgtggacgacagagtgagactccatctcaaaaaaaaaaaaaaaaaaagtaaacattacattccacgcccaccaccaaaataaaggagtggtattgttttacacttttgcaaatctttttaaaatctgacctaataggttctcacatgtgcttcggcattcggtctgctgcaatatattgcattggttgacatacacattgtgaagaacatctgcagttatgtagttcacaaagagaggacctgcagaccc

SEQ ID NO: 262429 - DNA, 273 bp, Homo sapiens
gtggtccacagagtatttctgtttgaatggaaaagacagtgggctacccatgcccaaccctgttcgctccaatcctcactaactaggtgctttcctggcttcagagcaacactaacattcccatgaccccaagcaaccaaggcagctgggctggggacaacaggatatgatacccagggacatctgatccacacactctgctcccaccaggaaacttccaggctgggattatctgtccacttttgtccatttgtataattaaaaatcgagtct

SEQ ID NO: 262430 - DNA, 694 bp, Homo sapiens
ctgccctgaggcctacccccataagccagtgccttctgctacccagaagccgtgacccttcctccagccctgcactgtccaacaacttgaaggctaagggttggcacagcaaaggtattctgcatccttgatcttgagctatcatcagcatccattctgatcagctggtgtccatgaggcagcaccagttgttaactctgttggttatcacctctgcatcttccattctttatactgagtcccccagctatggtgattggtttaaaggagcaaaccataggttcaaataaggaattaatgacaatctaaataaatgagggggacagctcagtcctcagctattgcttctacaaatccaccaagaatttcttcatcaatatggttcctgttccctgcaggtccatctccattcactaaagcagttcagaagtgggtctttctcttcattgccttatttctgcctatgacctactcagaagcaagttcttaattattattagctcaactgatttattttgcacagaaatacacaatttactgatgtatacaaagtgttattgagagacaggactagctggatttcctaggccaactaagaatccctaagcctagctgggaaggtgaccgcatccaccgttaaacaccggcttgcaacttagcccatacccgaccaatcaggtagtaaagagagctc

SEQ ID NO: 262431 - DNA, 462 bp, Homo sapiens
attcttttccctatggatttctagttgtttcaacatcatttgtggaaaagattattctttccccatttaactgtgttgacacctttgtcaaaaatcaattgccacgaaatgtaagaacttatttctggactgttgattctattccactgatttatatatctagccgtatgccagtgtgtctggaactggtgggttcttggtctcactgacttcaagaatgaagctgcggaccctcgcagtgaatgttacagttcttaaaagtggcgtgtctggagtttgttccttctgatgtttggatgtgttcggagtttcttccttctggtgggttcttggtttcggtgcctcaggagtgaaactgcaaaccttcgcagtgagtgttacagctcataaaggcagtgtggacccaaagagtgagcagcagcaagatttattgcaaagagtgaaagaacaaagcttccacag

SEQ ID NO: 262432 - DNA, 601 bp, Homo sapiens
gtgaatcatgtgtgcatgtatataagtgctgtcatttttttaaaagtgcttcttgtggagtttggcaatatttttgttgtattttgaaaattcactagccactagaccttctacctttgttgataaagcaaattttggagttgagtaaagtaagctagtataaaagaaataaggctatagcaggcctttgaaaatatttatggaactatgtgttttaaagtaactttaagattatgggcagtattatgcagcatttttagaatgttactcaaagtcatagattctgagtcatttatggtaaagatgccaaaattactttttttctgatattttcctttaaattaaagatctgttttgatgccatattgagtgatttggcaaaataaaatctgttttgaatgatttgcttctatattttgagctgagatggaaatcaatagctgttagaatagacagtatctgtatatatcagccttttcaaagtaattattgtatactttgtgtagagtaagaaacatttaaattgttgagaggttatacttgaggtaagaatttttaaaattttcagtaaggacttaaaaataatgtctgaatattcaga

SEQ ID NO: 262433 - DNA, 286 bp, Homo sapiens
ctaacctggtgggaaatgagacaagagctgccagctgaggactcccagacaaaccaatccgcattcaagccaccaggagactacagccgcaagaatgagtccatacaagaccagcacgagaacctcctagctgagtccagaccaacataattgacccactaaacataaaacaataaaataacttggtttcaaaccaattcattttgaagtggcctgttatacagaaataggtagctaatatactaggtattaaatatttattatttattaaaatgataattgtttt

SEQ ID NO: 262434 - DNA, 308 bp, Homo sapiens
gggctcaagtgatcctcccacctctcagcctcctgagtagctgtgactacaggtgtgcaccaccacacccaactactttttgtattttttttgtagagacagggtctcactatgttgcccaggctggccttggactcctgggctcaagcgatctgtcccccgggcctcccaaagtgctgggattacaggcatgagcccccacccccctccccagtctggccagtgtgtccagcttttctgtccattcaccttccttcagctgctcacccctctcttccctcacacagggcatcctcctctgaaaaaaa

SEQ ID NO: 262435 - DNA, 394 bp, Homo sapiens
atacatcctgaaggaattaggggtgaagtagcatgatggctacaattcatttgtaaatgagtcatcaaaaaaacaatgtgtcggccaggcgtggtggctcacacctgtaatcccagcactttttggaggccagggaaggtgggttgcttcagcacaggagttcaagaccagcctgggcaacatgtgcagaccccatctctacaaaaaatacaaaaatcagccaggcacggtggcatgcacctgtagtcccagcaactcaggaggctgaggtgggagggtctcttgagcctgggaggtggaggtgggagaatagctgaaacccaggaggcaaaggttgcagtgagcttagatcgcgccactgccttctagcctgagcaacagagcaataccctgc

SEQ ID NO: 262436 - DNA, 417 bp, Homo sapiens
gaaaaaatgcgttccaaaataaaataattcacctccagtaaattatatagttagcacagaaacatacataaagaatgaaacagatattttcaaattcagcttctgcttttgatagagggtaaatctgaggaagacttttcagggctatggagcacaatctgaattgttttgtgggaaccacttctttctctctggctacactggcctcaaatctgttctacaagcatgtgaagataatctttgggttttcaaatccttccagcactacccgaccaccactctgggcagcatcaccgccatcaccaggaccaacagccttgtcgacatgaccacccgctgggagcaagaaacaggtggtctcccctccatgaggctgtgaggacaaataaatgttacctaagcaaagtgaaagagaca

SEQ ID NO: 262437 - DNA, 388 bp, Homo sapiens
ggagacagagcaagaccctgcctcgaaaaaaagaaaaagaaaatttggaagatctgacaacagttgacctgcattcctgctcggcaacagcctgatggtggatgggcagaggctcagttgtctgccaaacctcccatcactgatgtcttccctcgctgtcatcatctgcttgacatgtaggcatttggtgtgtgccttctgctctgggtgcccagatgaattggatgctatatgagaaaacattctgtaaatgtcttgtggtaggcaacctcaaagatcactggggcctccaatgatccctccttcctggtattcatgcctgtgtataatcctctcccttgagtgtgtactacacctggatacttgcttctaataaacagaacacagc

SEQ ID NO: 262438 - DNA, 482 bp, Homo sapiens
atcccattcattaggagttgatgtttgccggtggctatcctcatgctttgtgttcagataaactctatacttaatcataaattctaaatgttattatttactgctgacatcagtttctgtcacattgtaggagcctcaccagagagggcacctgtagccatgttgtaaaactcacacttgtcaaaaagacatgggttagtgtttctccccctccctctgcatgaagctaattagctgacacagatggtcacctccattaccaactagagccaggatgaactatgtgtgaccaagggtgttgtcaagtccttttccctgaggactgattagtgtttatcttgaaaacatgtacttaatgggttgtatagaactgtgaagtgtctttctcttttttcaacctcttagctgtttgcctctatttcccatcacattctggtctaaggcttacttattaataaaatggtgtttatttctttctctat

SEQ ID NO: 262439 - DNA, 1099 bp, Homo sapiens
  misc_feature (1004)..(1004): n is a, c, g, or t
  misc_feature (1050)..(1050): n is a, c, g, or t
  misc_feature (1090)..(1090): n is a, c, g, or t
caaaggtctctggttttcctaggcagaggagctccttggattttcttatctccatgagttccaggttctgctgtttgctctgatcctgttgatatatgtgctgatgctgctgggcaacctggccatcatcagcttcatttgccttgattcccgccttcactcacccatgtacttcttcctctgcaacttctccctcatggagatggtggtcacctccactgtggtacataggatgctggcagacctgctatccactcacaagaccatgtccctggccaaatgcctaacccagtctttcttttacttctccctgggctctgccaacttcctgatactcatggtcatggcctttgatcgctacgtggccatctgccaccccctgcgctacccaaccatcacgaatggtccagtgtgtgtgaagctggtggtggcctgttgggtggttggtttcctctccattgtctctcccacactgcagaaaacacgactctggttctgtggccctaacatcatcggccactacttctgtgactctgccccgctgctcaagcttgcctgctctgacacccgccacattgagcgcatggacctcttcctgtccctgctctttgtgctgaccaccatgctgcttatcatcctctcctacatcctcattgtggctgcagtgctgcacatcccttcctcctctggatgccagaaggccttctccacctgtgcctctcacctcacagtggtggttctgggctatggcagtgccatcttcatctacgtgaggccaggcaagggccactccacatacctcaacaaggcggtggccatggtgactgcaatggtaacccctttcctcaaccccttcatcttcaccttccggaatgagaaggtcaaggaggtcattgaggatgtgactaaaaggatcttccttggagacccagcagcctgtaggtgagagggtgagcccttgacagggctagagagcacctgacaagtcacgaggagtagacttnctgcaggtgggcacccacatgcctaagctgagctcctcactctctnttttctcattttctcctggtccctcatcttcatgcaagtntcttctcct

SEQ ID NO: 262440 - DNA, 420 bp, Homo sapiens
cctgaagctgtgccctaatttctccagaaggctggaatacaaacacagaaacgcacaagtactggccagggtcaggcagagagtaacaaagcaggggagttataaccagcttgctgtcctggacaccaagaagtggagctacagaacagcagaggctgaactgtcgggtgacttgcaattttaaaaggtagtatttttaaacactgtttaccaccaggcaaaacctattaagagcttacagaaaaggtcactgcagacaaggttctcaaccacggctgcacactggaatcacttgagaagctttaaaaacatgactagccgggcatggtggtgcatgcctgtaatcccagctactcgagggaggctcaggtgagaggatcccttgaacccagttgctcgaggctacagtgagctatgact

SEQ ID NO: 262441 - DNA, 404 bp, Homo sapiens
ttttgtccttcctccttctcctccctgtatctctgttcctggccttttaaagtcctccattacccatggcctgtggcctctccttttaggtctaacaatggacaggattccaggggccttaattttggtcatagcctctgctctgccccagggcgcagccaaagtcggattgtgccagggtttgtttatgctggaccgtgtgcccagggagagctgcgaaatctctttctggggaatggatggttctggacatgtttgagcaggactggcctgagtcaaaattgagagggagacagagtcgttatccctttctgttcttattttggggcggtggggaggatcacttgaagccaggagttccagaccagccttggcaacatagcaagacaccatctgtaccaaaa

SEQ ID NO: 262442 - DNA, 581 bp, Homo sapiens
tagtgatgtcgtagccatcataacattgtagtgcactgcattgctcatgtttgtggtgatgctggcgtaaacaaacctgctgcactggcagtcatataaaagcctagcacacaattatacacagcacattatacttaataacaataataagctactatgttactggttcatgtatttgttacactttttattattactttagagtatagtcctacttattagaagaaaaaagcaggtcatttagaaggtattccagaagaagacattgttatcatgggagatgacagtgccatgcttgttactgcccctgaagaccttccagtggtataagatgtagagggtaagacagggatattgaggattctgatgctgtgcaggcctaggctaatgcaggtgtgtcttgttttctaacaaaaagtttaaaaaataaaaataaaaagctttgaaaatagtaaaaagcatatagaataagcatataaaggaagtaaatatttttgtacagctctgtgtatttgtgttttaagctaagctattacaagaacccaaaattgaaaaataaaaagtttataaagtaaaaagtg

SEQ ID NO: 262443 - DNA, 298 bp, Homo sapiens
caacctgctaccagcccagaaccttctggctgggtcttttgggtccagaggctctaccatccctcctcccagaggcccggctgtgcaaggcaggagccctgtcttgggcttggccagcctgcctaggatcgtgccctcttcctctctctgcaggctgggctggtcctggttttgcccccactgcaggattactctcttacagtgcccaaattagaaataatccacatgtccagcatgggagatagttaaataaattaataatataccaactcagtgggaaacgaggcagcttttattt

SEQ ID NO: 262444 - DNA, 378 bp, Homo sapiens
ctcaggaggctgaggcacgagaatcgcctgaacccaagaggcagaggttggagtgaactgagatcatgcctcttcactccagcctgggcgacagagcgagattctgtcttaaagaaaaaaattattgggatgttagatttatttttgaaatgagatctattactgattatcaatagacgcttcagtttatgtaacttagtttaaaaattctttaaacaaatccttgagtgttcatttagaaaagtaatctctaggctggatgcagtggctcacacctgtaatcccagcactttgagaagccaaggcaagagacttgatcccagaagttcaagaccagcctgggcaatatagggagacggtgtctctaccaataaagag

SEQ ID NO: 262445 - DNA, 454 bp, Homo sapiens
aactcccttctctctattcagattccctgcccattttttctcctaatgagacgcctgacttcctacctcctttttgaaacttcaaactgcttagcaaatacaattttgaattgagtttgctgtcacagaacaaaaactagtccttggtccagagtatcttgcaggactgaatcaactgtggtctaagacacaataataactcttaattattttcttgtttccttcatggtatatttgttgctggatgatgagtttatattatggttgaatttcctttttgaaatgaaaagatgaatagtctttattggctgggtatctatttttatccagaagactttgcaaatgagaaatatttctacaatctgagtttaatttgcttaagcaatgaacttgttctttaaaagtcgtatatgtgcaaaataaatttaaattaaataaatcatattttaatgta

SEQ ID NO: 262446 - DNA, 456 bp, Homo sapiens
atccctggcctttggtagtttccatacagttatgtgctaattagtactctggcaaatagtcaaatactcaggagcactctgtgtagatttctgggattatttctctgtggaattctttactttttagtactctgtcctataagctatagcagcattgattttcctagatgcttagttctgtcttctcagcttcatagagtttggccccattttgattctccttcctttactgtggcctggaaactctgtcaaggaagtaagctctgacacatatcatcacgtcacttgcttcccatctatcacagattattgtccttcattacctgatgtccaatatcttgaaaaccattggttcatttattttatctggttttttgtttgctttggatgaaggggttaacccaacgacctggttatttttgttttagatacagattttatttaatttacttatgt

SEQ ID NO: 262447 - DNA, 419 bp, Homo sapiens
gactctgtgggctctttcatctcataatatattttgctcataatatttaattgtaaaaacatatgtgagaaataataaatcagtctatcttctacatgttattcatttttcagcacaccatttggcctgacacttcaaatagagtagacacctaaaataacacacttttagttttaaagaagtaacttataggtcatcagtattacctaaaatagattaaatactttgaacagtaaaggatttcatcactgtcatcctatacttaagttgtaagaattattttatcatacagaaatatgtcattggggccaagtgcaggggctcacaccagtaatcccagcactttgggaggccaaggttgggagattgctcaaggccaggagttccagacgagtcaaaaccctgtctccacaaaaaaa

SEQ ID NO: 262448 - DNA, 316 bp, Homo sapiens
tgcccagctaattttttgtagagacgggattgcgacatgttgcccaggctggtcttgaactcctgggctcaagtgatcttcccacctcagcctcccagagtgctgggattacaggtgtgagccactgcacctggctttgggacatttttaatttatttttgctggaggagagggtgtgtattctatgactgaagcctataagggccagcatctgatccctgctgaggtcaagttcagtggggacagggctgtagtgagctatgatagtgtcactgtgctccagcgaccctgggcaaaaaagtgagaccgcgtctca

SEQ ID NO: 262449 - DNA, 390 bp, Homo sapiens
gaaactacatattaatcctattacctaaagttgatcttaaaaaatttgtcacctactgatatggtttggatttgtgtccccacccaactgtcatgtagaattgtaatccccagtgttggaggagggggctggtgggaggtgattggatcatgggggtggatttctcccttgctgttctgagtgagttatcacgagatctggttgtttaaaagtgtgtagcacttccccctttgctctcttcctcctgctccagccatggagcagccatgctctcttcccctttgccttccaccatgtttgtaagtttcctgtggcctccccagccatacttcctgtacagcctgcagaaccatgagccaattaaacccgctttttttgtaaattacccag

SEQ ID NO: 262450 - DNA, 459 bp, Homo sapiens
accgctccttcctctgttgaagaccgccctgcctgctcttgcacccagccacttgtaatgtgggacatctctcaccccaactttgtaggtggagcaactgctacagaggtaaatatgattaactttacattccatctttcgtctgctcccaaacttaacagcaggtaatctgcttctagcaagtggtgaaggtaagagaagcatctgtataggaggcaagagatctgagtccttttgaaggcctatcctctgctctgtatctcaattactgttcttcatttcaattattcttacctactattcagttcccttgatcttttcttcttgggggctgtcttagggtcagggagattgcagaagcaccagaactaggagcagccctgagacatggggagttggagctgaaggaggaatggcaggatgaagaattccctaggtgaggacgtgtgagggtggctg

SEQ ID NO: 262451 - DNA, 226 bp, Homo sapiens
gctgggacaaccagctccccaacaactcctaggtgtttaaagaaggaggcaggaagacttgtgaagatgggaactatacaagaggcaggaaaaaagacagatgttggggtcagggagattgcagaagcaccagaactaggagcagccctgagacatggggagttggagctgaaggaggaatggcaggatgaagaattccctaggtgaggacgtgtgagggtggctg

SEQ ID NO: 262452 - DNA, 917 bp, Homo sapiens
aagtaagatcttggctcacttgattggtaacagtgaataaacagtccggagagacttccccaccacccagctcttactgggtcaaatctcgggttcctcaaggagacaagactgtaagagagtttgcagagaagagatgagggtggttttaggtaggaaatgtcagtatggtatggaactggggaacaggattccaggataattccctggtttaaaaataaaggaagtttctgtaatatgttgtacctgataaatctgcctgtgttcttttattttctaaccctcaccctccagaatggccatcaggaaagctgaaccagaaccgagtttaggtccaggttctcgttctggcaaatctttctccttaccttcttcctccacccctccacttatgccatgttttcccttagccactccccagctcggtggaggaaaggcaggcctaactaggtaccgtcttcccgactttgctcaatgatagctgggtgggtctagctgggttccagccacttgtaatgtgggacatctctcaccccaactttgtaggtggagcaactgctacagaggtaaatatgattaactttacattccatctttcgtctgctcccaaacttaacagcaggtaatctgcttctagcaagtggtgaaggtaagagaagcatctgtataggaggcaagagatctgagtccttttgaaggcctatcctctgctctgtatctcaattactgttcttcatttcaattattcttacctactattcagttcccttgatcttttcttcttgggggctgtcttagggtcagggagattgcagaagcaccagaactaggagcagccctgagacatggggagttggagctgaaggaggaatggcaggatgaagaattccctaggtgaggacgtgtgagggtggctg

SEQ ID NO: 262453 - DNA, 672 bp, Homo sapiens
tctagattatcagtctttttaatttcatgtgtatattggtatcccactgtggttttaatttgcatttccctgatgactaatgatgtttagcatcttttaacatgtcatgttccatctgtgtatctttttactaataaaaataaagtgtcttttgtttgtacattttaaattgggtttttatgttttattgttgagctataatggatgtattttattggactatattgttataatcaatgttatggagttttaagaattctttatatattctgggtaaaagtcttgtatctgaaatagttttgcaaatattatctcatagtttatgccttgacattttatttttataacaatgtctttcaaagagcagacattttatattataattaattctagtctatcaatttttttcttctgaggttcatacgttttgtgtcctaagaaatctttcctactgcatgatcataaagatttgttcctacattttactctggaagcttttcttagaattcctaaacaacacatgtgattgtctagaagttttatagttgtagctttcacatttaggtctatgacccattgtaagttaacttttgtatgtggtgtgggatatgggtcactgttcaggtgtttttcatgtggacatccagctgccccagcatcatatatcaaaaa

SEQ ID NO: 262454 - DNA, 457 bp, Homo sapiens
tataacccccttttgtgaatgagaaaaccaaagctcagttctgtttatagtttgccaaggctacactggtaagtaaagggttcagccaatgtatagacagactgtatagatatatgaagtgggggtgggggccaaggagctattactgctgtttggaaatacttgcctcttgtagatccagctttaacatttttatgacatcctagtaatagcagaccctgcacaaagtggatatcagagttaatactgtgaagagacaaaataatgagaatacttttaccaaagataatgaaatcttgcataatgtctgcatttttccattgattggagtgcatccttagaaaactgaaaataacaaaaacccaggacatttttggaaattgtatgctctctagcaactttgcgtgaatttttatacaaacacttatgagttatataaaatgttctaaaactagaa

SEQ ID NO: 262455 - DNA, 277 bp, Homo sapiens
gatcggccggacccctagttagaagttaatagcagaccctgcacaaagtggatatcagagttaatactgtgaagagacaaaataatgagaatacttttaccaaagataatgaaatcttgcataatgtctgcatttttccattgattggagtgcatccttagaaaactgaaaataacaaaaacccaggacatttttggaaattgtatgctctctagcaactttgcgtgaatttttatacaaacacttatgagttatataaaatgttctaaaactagaa

SEQ ID NO: 262456 - DNA, 335 bp, Homo sapiens
aaaaaaaaagagaattcagaacaaaggcatcactcgccccttttggggtgtcctgttttctttgtggagtttcaagtcataggcagattcttcttcagtctaaagctctgttttcctgtattgcatgacctgacgtttttggctttggggtaccagagatgaccttgtactgtgagaggatttgaccttggcatgtgtaattgtggacaacagctacaaagttaggggtgactgagcacagtttacagggagtagtcttggctgtttttctttctctcctagaaagttgttgtttagtgatcctaattctagtttggagatgcattctaaagggc

SEQ ID NO: 262457 - DNA, 700 bp, Homo sapiens
ttttacttttttctcttctttttttgacacagggtctcattctgtcacccaggcttgagtgcagtggcacgaatacatcactgaagccctgacctaggctcaagcaatcctcctgcctcagcctcctgagtaactgggttacaggtatgtgccaccatgcttgagtactttttaaagtttttgtagagatgaggtctcactatgttaaccaggctggtctccaactcctgggctcaagctatcctgctacctcagcctcccaaagtgttgggattacaggcataagctattgtgccaatttttttaagactaggaaaaaaatacacatttagccaaattaataaaaatcaaatttatcaaggaaaagttgatattttagcaactggggacttttttaaaaaaatcatactactctgtaagaaactatttagtcagttgacataatttttcttttgtaagacatttgtaattacaaatttttcctgtatctatgtatctattatatgcatatataatacatacttatgtatactaggttatgtagattattctacatattataaacaagtaataggtactttagtattataatagatttgaatgatttcttgatagaggaactgctattgtaagtgactctcatcaaagagaggttgattagcaatgtatgcatatgaaataccttaaaaaagggcccaag

SEQ ID NO: 262458 - DNA, 551 bp, Homo sapiens
tttcaatcagactcactactactgcttgaggagtccgttgacataatctctacatcatcttcattttctttattatgcccaggaggttccaacaaaaagtcactactatgatttggtggtaacatattcatcgacatgtcatttgactgccatggatactgtggagcaaggacatctggagaaaaaaagaagcatagataagaacagctctatctggtctcattctgtcacccaggcttgagtgcagtggcacgaatacatcactgaagccctgacctaggctcaagcaatcctcctgcctcagcctcctgagtaactgggttacagatattccaaccttgtcatctctggaaaaccctgatctgtttgaaaacactcttcggcttaacattacctggcaatcttcctgctgcaagtgcatctcctggtaaatggccattcacgccattagtggaaggattgttcatctgacccagtaacccacttctcatctctaaatcagttgggtagggtctccgggggtcccctaaaacaataaagactgcatttaa

SEQ ID NO: 262459 - DNA, 545 bp, Homo sapiens
tctctcacatctgtcactaacaatgaaatacagaaaagcatattatatcttacctttgtggttacaatgcacaggcaatccattactctaccattacaatattttatacataaagcaaaactattttaagttgcctagttgaacaaaacatgtaaataaaaataaataaagctgtgagataaaaccataaatgaagaagttataactgtaactagatctctccaggatccattcttagaggtagcaatttttctactatctaaaatacaagaaaccagagtctgtcacgtgccctacaatcttctttatgtaatctgtatctgaagaacttgaaattatcccacaaaacactgtggaagatgtcagggtttattccacaagagtccactgcttcttcagatgctgtttcattaatccctcttttcaagatatgaggttgacaggaagtcatctgatgaaatgctccacaaagaggttcccccgatataaatttaaatctgcttctcctcgttagctacagtttggatactcaaatgacaaccacc

SEQ ID NO: 262460 - DNA, 740 bp, Homo sapiens
tctgtggagtaaaaaagagcgtaattaaaatactagcaacattttacataactcaggaaatgtatatgtggggaaagtgtccgggagcacttagaagttagtgtgagtgctccaagatcctgatactctttaggatggaagttaagataatgaatgactttagatgttgttaatctaagtacttaacagaaaattttcagataacctttaaagaatagcaatacaatataactttcaaaccagtagagaggaaacattctgaaataagggaaaaacactttagaaatcccaactttgatagaccacaaaaatgcaagaaggaagaaaaagcatagaaaaagcaaagaaatggcatagtatataataaatggttacaataaatataaattgcctatctcaccagattaataaaaaaaaaagtctaccttgttcaatatatacagtttacaaaagacagtacaaggacagagaaagacaaaaagtagaattagggaaaataaaacaagcaaatatacctggttaggatagctgtatcagtattagccttacaaatattaaagtgaaaagcattaataaggataaggagactctcaaaaataataaaaatttcaactgaagtaggtataacagttctaaacaaagttattaaagtaaaaatgtagagggcaaaacggaaaaaaaaaactattatgttgtatttgaagtcactcaatttttagctcgagcagcaaaaaagtaaa

SEQ ID NO: 262461 - DNA, 416 bp, Homo sapiens
atcctcacctcctctggattttcacatcctccagctggtccagcatgagctctggaggctaaggaaaggcaatgcagtagcagaaacaagctgggctggcatttctgtgcagtttgttcagcacgctgaatgggaagcgcagggtaacagtgagagcacgaatcaaagtttatcacctgtggggtttcagctcctgtatcactgggttaggttttgagaatgctgaggtgaagatgacatggagcctgccttcaaatagatcacactttagcagaggagatagtgtgacttgtagacagctgcatccctagagttactttagagagccctgtcgttcccaagcagagagatttgtctgcacagccagcctctgggtgaagtacaaatgcaaaataaataaatgccttcttctagaa

SEQ ID NO: 262462 - DNA, 954 bp, Homo sapiens
cacaaacacacacaccccatgcacaccctcactatgcaccctccttcccaggcaccagcttccttctttgagagtcagtgcaggtcactggttaaggcgtgggttcgggatctaatatctggggccaagccttagctccatcgctctttttgtgagctcttagacaagccacttaacctctctgtgcctcggtttcctcatctgtgagataggaagactctaagaagagtcacttccatcaggactgtgaagatcgaatgagataataacatttaagcacttcgggcagcctctggcatgtgatgggccccaagtcaatgctaaccaccaaaggccatgacctttggggatgtgtcctggctctgaaaaaccatatagatgggtctcaggggtctaagtgggggaacaactgctgcgtttggccccagatttggggagcagcacctgttgttgagggacacctcctcagatcaaacttccattttttccagaaaaggctgtcatcccctctttagggccgtgctcattttggctttccgaaggtgaagggccaggtgccttcagcatctttctgagcactgtgacatgcagaggatgtggggtgactgcagctaggcggacttggatccgggggaggccctcagttctctgagccttggtttcctcatctataaaatagggataaaagtttctttcccacatagctcttctgaggcttagatgaggcgatgctggtggggtgtttaacacagagctctgttagcataatggacacttgtgtctgtcttcttataactcatttaatgaatgaatgaagtttgcaccatttgttcacctcctccagtcacctttcaaattagccaacttgcaaaaccccagcagacacactttccttctgtgtgtaatctcctgagccacttcctgtgtgttggggaggggaggggggatttctgc

SEQ ID NO: 262463 - DNA, 434 bp, Homo sapiens
atatatataaagtactttgcacagtgcctggctcctggttggcgctctgtgaagcttaactgcactccagcctgggcgacagagcgagactcttgtctcaaaaaaaaaaaaaaaaaaaaaagaacacagattccttgcctgggtcccaatgctgactgtgccccttaccagctgtgtgaccttgggccccaagcaaagtgccccaagcaaagtggacataatgaaagtacatatagtcagcctgggcaacaaagtgagaccccgtctctaaaaaaaaatattaaaaaattagccacgcatggtggcatgtgtctgtagtcccagctactctggaggttgaggcaggaggaccacttgagcctgggagttcaaggctgcagtgagctatgatcgtgccactgcattctagcctggacaacagcaataacttgtca

SEQ ID NO: 262464 - DNA, 286 bp, Homo sapiens
ctctcttggataaaattacttactgcaatgagttttttcaacaatacgtgagttcctggtggtcagaatacctggacccttctctattgttcttggctttccaggactcagccaaaacagaggcttaaagtcccccaacttaacattctcccagtgtagcctgggaaatcaacggaagaaatgctgctcgctggagttccttcttgagagttgcatgtacacagtcctagtaaaggctctgagaagtccttcagacaaaaagttattaaattctatttaacccagt

SEQ ID NO: 262465 - DNA, 278 bp, Homo sapiens
tggaattccattaatcctagaatttgtctgcagtcaactatcagattttttttttcccctggctcctgctgctctgggtttgcaggtttcagatttgcaggataatatcactcatttactcccacaaagagtttctcctctgttgtgttcagttgcaaactataggatacttcccttgacttaaccttgcccatgccacttctagcagaaatttccaaaagtacctggatgctaatgatatcattctgcatttattaaaaactgatttgaaaaataaa

SEQ ID NO: 262466 - DNA, 447 bp, Homo sapiens
aaaaatctataattttaattatagctgtaaagtcccttttcctatataatatattcaaaggttgcaggcatttgggtgttgacatctttgatgggcacattgtgtctaccacaggctatagaaagaacagagaaatttgtccaagataagatgattaggttttgtctagataggggcccttgctatgggccctcagtttttaccttaatgtaacagaacatgagaggagctttgacacccaccccaaaagagtcaacttcattatgctggcaaaggcatgggtacaacctgctctgtgatctaccttctgaaccacacaagcttgtcctgaacgaggttggggctgagtctgttgataacagacccccatttttgggcagaaaaaacagattctgtatgatctacagtatttaacattgtggcaaataaattataaaggaaaaatgg

SEQ ID NO: 262467 - DNA, 506 bp, Homo sapiens
atatcgaagtcctttctacattccagtaataactggactacagttgttgactacagaacatatattgcacgttggttctgttcactattaagaatccagcttaatacgaaaaatgaatatagaatctacatacaatatagtaatcattacaatttgtgtatgtagctctccttgcatcttcttgtcgaagtaagtggtaatgattctgtatgatatatttttatattatagactgctagtgggaagacttaggcatgtcaacttttcctttgtgggagaggttaggaggctgagtggatgatcaaaagtgctgcaacacagagatcagctgagtctgaaaggggaagacaatccattgtgctgattataagtatccttccgttctagataggtataagttttaattttacactgggttggagaactctaaggaatttagacatataagttatttttcttattcaactttcattaaagaaaacagttgtaatgttttgtttgtttgt

SEQ ID NO: 262468 - DNA, 775 bp, Homo sapiens
gccgtgggtcccatcaggctttcccctcggatcctctccaggatgaaccaggacttacctgaggttaccaagtgaacttctgggaaaagtccaattctcagatgctagatgtcttccaaaaatgaagcaaatttgtaacttagtagctgagtcaagtattcctgttagatggtcaacattaattttttattttattttagtatttttaagtggcaactctagtgtgtaagaaaatgaatgcgacagctgaatttgtagaaagcttctctgactctcttgggctctgtcataagccctggaacgaaataaaagtctagtgaatacagggaagcccccttctttttctccatatttacccctcaccttaaccataatttcacataattaaccacatttaaggtggttgataataaagtgggaatgtacaggattctttttaaccctgagttagcaatccaaaaattagaatttgttgcattcctagaactaagttcagggttcctgagcaggtactcaagcagacacaaagacaaaacttccattttatttcagaagaacctccataatcccgtgagtcagttcccttagtaaattatgttgtctatctatctatctgtctcctattggtactgtttctttggagaaccctaatacacacactcttttttcctggctctttgagtataagatgattggccaggattaagaatgtagcctctgcactgagatagcgccactgcactccagcctgggtgaaagaggagactctgtcaaa

SEQ ID NO: 262469 - DNA, 491 bp, Homo sapiens
ctccagaccaaaatcccatgagctgcgttcaaggtggtttccctgcagctgctcctctctgtgttgcaaaatgctggccccgtattcaggactcacgagatgtccatcaatgcaatcaagcaatatctctgtgtggccttgtccaaaaacggcgtctcttcagtgcctgatgtctttgagctctctcttgccactctttcttattctacttggtagtctttcttgtaataataatgcattaaatggtaaattactgaccttatagtatatttataccttcctgaacatgaaattaactattaggtaaatgactttggtgtggagaaaatttgattaatgttctgagggaaattttctttacatataactaaatttcttaagctaaagtacaaattgtttccatcagttccgaacacatttagaaaatagccagtcaccatctaccgtgtaagagttttatttattagaattccattattaattcacccttc

SEQ ID NO: 262470 - DNA, 446 bp, Homo sapiens
cttggaagaacctcatatgccccataaaggaacttttctctgaagtagaggatcgctttttgggcccagactcctttgagaaaatctggaaagccaaggtctgtcttcacaaagaagtgtaagggttttcctaggatctcgctgagagacagtacaacgaagtggatgagcgccccagtctctcttaccagcctgtgctatctcccattgtgtgatctcggtttcttcatctgtaaattagatgcatccacctattcggtgtgtttcggggagtgaatggactaatgtatggaatgcaatcgtaagaaaatcctccacgtattaaatgccttgcattagttaggcacttttattattgactgccatggatgctggtttagaaaaagaccctatattatttcccttttagtgttgagacagtgaacgggctcattccttttccatat

SEQ ID NO: 262471 - DNA, 422 bp, Homo sapiens
aggaaatctgtcagtgcccatcatttcctcaccaccttatcctctcttctacacaaagcccaaatcctgacacctaatagactatctataggaccatatgctgtgcagttgcactctcagaaggggcacatgcttggtttaatcctctgctgttgctgtcttggaattcttagtgattttatcttcgaatttgtgtttggtaagtgaagccagtgagacaatgaagcatgcacatgagcagtggaaacaccccagcggggaacgcatgcatgtgtgcatgattcagggcagtccagagtgcagctgagccagtacctgggcccagttgcagtggtgatggtggcgggcagcaggagtaacagtcaggacagcaatggctgcggctccaaagacaggaaagggctctgcatatggacattgcc

SEQ ID NO: 262472 - DNA, 405 bp, Homo sapiens
gggtccagcctttccatggttgcttgcagtatggcaatggatgcccaaatgggctgcctcccgggggcctacattaaagctcttgcagtggcaaacagtgcctggccatcaagagttccaacagaatggcccctgtctgatgaagtgcttttgctggcaccacacatcagaatgttgtggcctgtggcccaagaacactttagcccaccagcacagcagatttctaacctcaaggggccagggaacaaagctggggcaggataccagctctccagagttagagcaccctgcccaggagtgctgagctgagctgtatagccttctaatttctttcagaaacaaagtcagtaaactgaagccaccttatacaacaattaaacccctgacaaaatcaaataagataaa

SEQ ID NO: 262473 - DNA, 318 bp, Homo sapiens
atttatccacttttgtggctgcaaggtgattataacttatttctcctttaggctaatgattacaaaaggtataaattctagatttaaaatctaaagaaattggtatccatggaatttggtcttcactaatgttggaacatatcgaagtgataaattcccactttatcgctattgattaatgaacaacattaagaaaatgataaaatgtaattactattaccaccttaacaactgagttttcatttttgtaaatatgtggagttttcatttttgtaaatatgtggtcaagctttagggattcaagaatcctaaaataat

SEQ ID NO: 262474 - DNA, 455 bp, Homo sapiens
atttcagcctacctttcaacatgctactcacttggggataggagaattctgtcattttgttgataagtgagtgtttcaaaatgactgtctactcataagttaattgtgagcatatggagagatgacattcattgaagctagtgtgtgtgtatctctctaaatccttattcttaaaatgaagggtcccctgcaaagattattggaagaaagtcagatgacatagtttctaaaaactttatataacatggctatgtaattaaattaatttccactaaattatgctagctcagacatttgacttataattgtgcaattgttggaaagccaaattacatcaggttgcacagacagcaagttattaaataagacattagcagatatcagatgttattatctgtttcttaaaatgttctgttttgtagaagttaagcatcaaaagtttttgtatcactgag

SEQ ID NO: 262475 - DNA, 302 bp, Homo sapiens
gaggtgacttgcctaagccaccctgcgcgtcgatggcagcacccttatgggcccctggtttgcagattcccagcccagcatgctgctgagggtgcagatggcccggggcacctggctctccagctttgctgagggctgccccatacaccaaaacaaagctgggactctcggctgctccatttgggcactgccaacccatttattaatgtcacaactagagaggtcccaccacacaccactgcctgcctgccttgccctctgggcttagggaggcaagtataaagagaagagagaaaagaagg

SEQ ID NO: 262476 - DNA, 414 bp, Homo sapiens
taaaaacacattgtagaaattaacgacgtgattttgtaatggagcagaaaaagaaaacctctaagatggagtgagcgacttagggatccctatgtagtcatcacagatgcctgtctattgataggaatcctgtttcaaacatggaatttaaatttaagagaaaggtgcacaccaaattgatgcctggtttttctggtggcttgaaagaaagtaatggagtttttaaaaatgtgtgaacaattgatatgaaatgctcaatgtgtatacaatcatttatgtggcaggcaatgcactgcatgctggagctaaaagagaaagtccgggggctttccatctattgagggaggcagagaaaagagtgatacaaagggattggtgctacaatatgcaacaagaggtgggaatgttaaaaag

SEQ ID NO: 262477 - DNA, 692 bp, Homo sapiens
ggccaggtcccttgaggaaggactccactacattaccaacaatttatgcagtgaatcttcctcccaaccttctgcaaggagacctctggccttttaccagggtaactgtgcactgaggaaagggaaatgaatcagacatatcagggactactggacaccggctctcagcttacgttgtttccaggggatccaaaatgtcactgtggtcctccacttaaagtaggggcttatggaggacaggtaattaatggagttttatctcaggtctgacttacagtgggtccagttggtccccagactcatcctgtggtcatttacccagtgccagaatgcataattagcatagacatacttagcaactggcagaacccctacagacaccctattaagcaaattgtactggaataattggcaagctgtatgtagcagagtgatactggatccttatctctaaccttataaaataagtcaactcaaaatggatcaaagacttaaatctaagacctgaaaccataaaaattctagaaggtaacatcagaaaaactcttctagccattggcttaggcaaagaatttatgaccaagaacccaaaaacaactgcaacaaaaacaaagagaaatagtgggggcctaattagacaaaattattttaatgtatcaatgaaagctttcaacttatttttctctatcctt

SEQ ID NO: 262478 - DNA, 118 bp, Homo sapiens
tgggaaattctgtactgacatttgataacattcagtattcagaataccagttggcagttgacactcaaattgagaagctgtgttcaatatatgatatttgtctttttctactaagaaa

SEQ ID NO: 262479 - DNA, 425 bp, Homo sapiens
gtgtgcttttgtgtgtgtgtgtgtgagagagagagagagagagacagagagagagaaatgttgatgatgggtagtgaggtaaattctggtgcctcaacaatgagtttctacacagaaaaccacagttattaagttgatgtctgtggagctctatgaagtctttatgtgagcttcagtgggtccgtggatcctctaatattttgtgtgcatgcatatatgcctttttaggggagagagttcattgcttctaccagattctcaaagggaaatatgaaatttctcccaagaaaatcctacctcctgtggtataatggttgcccaaaatgttggttgctggatgctttctacttccttaaggaaaagttaagacgttttgtacctactttcaggcagtcctggcatgtatgggccatggattgaacatt

SEQ ID NO: 262480 - DNA, 176 bp, Homo sapiens
attccagaaataaacaattcataagttttaaattgcactcggttctgagtagcatcattaaataccacctgggacttgagtcatcccctttgtccggtgtattcgcactatgttacactattccccaaccctcattccttactgtataggaaaaaacagtatgtatagggtttggt

SEQ ID NO: 262481 - DNA, 517 bp, Homo sapiens
cggtgttaaaagttaatagaactgtctctctgtaatgagtcattttttgagagggaaaaattcacttattttcctctgattcttcttgtcatattgtgctctgagcaatttcaattagagggttacattttagtaatctgtacagcttcaactgatgcctgctcgtcgtgacgggagccttttagatttccttcagaagcttcaaggatacaaaactaattggagttttgacgctgttttacatctcggtaattttattttcggggcttagtgttactttgctgtcaaattaaatcagcctctgtattgtgcacgtcagaactgcacagagaaaattccccagtattccaagccggtgcgcccctgtgcagaagaaaacagatctacgtcagccagcccggggggcaaagcctcagttccactgccttcctctccctctccttccacgggagaggagaaacttaaagaggtttacattgctgcatttcaataaaattttatacttgcaaaggtatga

SEQ ID NO: 262482 - DNA, 443 bp, Homo sapiens
ccaaaatggagtcattcaagctgaagtgtcacattatcaaactaaaacctaaattgtttacttgtaagatctgaccttccaggaaatcaggaggaagatgatagctaaatctccaaaacaggctagttttagctgatgtgatgaagtcctctctgttttaaccgatacaaggaaagtgactttaaatgaccaatccacattttgttctttgtttctgccttctttagccttttcctgtctataaagcccatcccttctattcagctcagcagaacaactttctttctttcttttttttttgacacagggtctcactctgttgcccaggctgaagcgcagtgactctatcttggcaacagagcacctttctgttttgtagatgggatgctgcccaattcatgaatcacaataaaaacaaatgagatctttacaactcaatttgt

SEQ ID NO: 262483 - DNA, 277 bp, Homo sapiens
acatacttcacattgtccttacatgccacagtggcaaaaaaaggaagtgtccccttgatgattccagaagaaaagcactaggtcagttgctacggtccaaagataggatgatttgctggagctgcatatcatgcccacctctaggcctggggctaggaggtcagtcaggcccagttggtgcccatggaaatggctctacaagaaaacaggtgctcaagaggagagctgctgaacaacccatcaaaaaatggccactgcatacatacctgccattccc

SEQ ID NO: 262484 - DNA, 633 bp, Homo sapiens
tctcgctctgtcacccaggctggagtgcagtggcacgatctcggctcactgcaagctccgtctcccgggttcacgccattctcctgcctcagcctcctgagtagctgggactacaggcgcccgccaccacgcccagctaattttttgtatttttagtagagacggagtttcatcttgttagccaggatggtcccgatctcctgacctcgtgatctgcccacctcggcctcccaaagtgctgggattacaggcgtgagccaccgcgcctggccgcatatatattttatacaggtgtttctgcatgtatctatactaatataaaaagcacactttctggactcctgggtaattttaagtaaggagggattcttttctttttgataatagactgggtctctctgcctgtccaggctcttcagaatcatgcttttgttcagtctgacttccttgttctcctgttctcccttaagctaccgttctacccaaaactggctagaaggcctttctgttttccctttctgtgtggtagagacttcacttaaatcataaactcaatgtctttatatctcctcaacctcactagcacagatccccaaggctttactcaataggtaaagggaagcttctagaatt

SEQ ID NO: 262485 - DNA, 360 bp, Homo sapiens
tgtgagaggtagaggagtcagggttgggctggaagagacagaatttgtcactttaatccaacactgaatgccaggagacagaggtgaatggttacagtcttggtgatgtggctgcgtctgtgggaggatgtggatggatgatgacagtgatgaactggccaggcctgaggcaaccctcccacttagatttggcttttaaagtcttcaagctcattgagggcagctcatgagacctcttgactctgggtccactgctcctttatatacacatatatgtgtatatatatgtgtgtgtgtgtgtatatctatatatgtgtgtatatatatgtatctatatatatatctgtgtgtgtgtaactg

SEQ ID NO: 262486 - DNA, 216 bp, Homo sapiens
tctggaaaattcaggattatctccatttcaagatccttaaataaccacatccacaaagtcccttttgccatatgaggtaatagttacaggttccagcgattaggatgtgtgtatctttgacagccattattcagcctacttcatatgttattgatttgtacacttgtttgctgaaaagataaatataaataaatttttaaatatttgtagaacata

SEQ ID NO: 262487 - DNA, 438 bp, Homo sapiens
agtttctaatctttttctttgcttcagtttcactttgggctttggggtaatagattccatatcaatatatatctaaaaaatgttcacagttcttagttgggagaaataaaagtagtttataatctagtgggaaaaatatagtctttgaagtcagtcaaactagactttcattttttctatgttaacgtgaataagtaatttatcttccttaaaatgggtatgaaattacctttctcaccggaattttgtggatatttatgattagatatatgtaaaatacttttgcaaatatttttattagtagttgttattaaattcacttaaggggcagccaaaaatatcaaccttttttatagtaacaaaatgaaccaacacttaaggtaatgccttaacatacaaagtatagtacttctgcattttttagtttgttgcatttcc

SEQ ID NO: 262488 - DNA, 588 bp, Homo sapiens
atgtgagggtctgttacactgaaatgcatattgagtcaacaaagatgtagaaggcaagtcttttctcctgtagcaaaacttgtgttgaatccacgcacaggttatgagtgtatacatagataaatgactttttagatactcactgcgactcaatagatgggacaccctcaagttttagaggatgttgtgggaagttacaagtacagttggccctgtgtatccgtggattccacatctttggattcaagcaaccacagcctgaaaatattaaagaaaaatagatgtttatatctgtactgaacatatacaggcttttttttgttattccctaaacaacacagcagaatttatagagcatttacattgcattattataagtaatctagagatgatttacagtgtacgggaggatgtgcgtgggttacacgcaggcatttacaccagggacttgagcatcctggattttggtatcggggagtcctggaatcagtcacccctgtcccacaaaggaccattgtgttcaactgtttttgatcaacataatggcaaattgtatgactcaatagaataaaaaaagtgcttggaaca

SEQ ID NO: 262489 - DNA, 1472 bp, Homo sapiens
gtatgtgtttttaaactccaatgatataagctgtaattataatacaaagcaactaaattaattttaattattccaaataattagcttttttcataaaaagctagttattccaaatattagcttttttcatgaaaagctagttattccaaataattagcttttttcataaaaagctagttattccaaataattagcttttttcataaaaagctagttattccaaataattagcttttttcataaaaagctagttattccaaataattagcttttttcataaaaagctagttattccaaataattagcttttttcataaaaagctagttattccaaataattagcttttttcataaaaagctaatttaaatttggggcaagtgtattattaatggtacatattgtattaaagtttgtgtaatgtaatataaagtggccacattacaaaatataggttgtttcagcttgcaaaattaaacaactgtataaaacaaatttataactgattgctagtaagaggtaccatgtaagaattgtgtttccagctgaatgaagaaattttaaaacctggttccatatattacaaatcatgagccaggactttggtaggggaggaattgggggctttggctcccaaaaatctctgtcacataccccctccccaccacaagtacacaatctatggaaaacttgtgcttatcataattacagctttaagtaattttcccttctctttggatattgtatatttgcatattgaagaggttcaaaacaacagtaataacatgcatattaagagaatttgcatttcataaatagtacaagatagtactaaaaaattggacatttgaaaatatgaagcaactaagagttgcttaatgagatgtcatttcctaacaggatgttcatttatggtttttggctactattgctctttggtgtgtttgtggaatagaaattattccaagctattgtgaagagtcaataattaaccaaatgtatttatttcctaaaaagactaaaactgaaattattatcatgtaaagatggcatctgtcctaggcaacttggctttatgcagtttgtcctttcagttttcaggaatgagacctcttgacccctcccctccaatgcagcccctactaagggggagtttaaggagccatacatagttctataattcaaatcaagtaaacatgcttcttgtcccaggttaacttgtgctgcctcagtcgctgtttaaacatttttatacgcactgttaacctgcctgcccattaccctattacttttaatggataaactactgttccctgggcagttgtctcttttaacgtcccaccctaaacttgccaaccctcatatgaaggcctcaggcttgttattggcaaaggtcagaagtcttaagctagtgaccttgcaggctaaagtaggccttgaatttgtttgaccaggaactaaattaaaaaataaa

SEQ ID NO: 262490 - DNA, 481 bp, Homo sapiens
taacttgaggcctgtttccattgactttatacaaatggaatcacatagtatatactcttatgtttatataacaatgttttaatatcaccttcatcactgaaggaaaatattgctggagatagaattctgggttgacagttttgtttcagcacttcaaagatgttccactttcttttgatctccactgtaaggaatctgtagttgttcatataatttcccattctatgcaatgtgctactttgctcttcaatatcttctcttcatcttttggtttcagtagtagtctaattaaatgtttaggtgtggttttctttgtatttattctgcctgtggttcacagggcttcccaaatctgtaagttcatgtctttcaccagaagtgggaaaccttacagccattattcatcaaatatttatcttgcctcattctctagctcctttccttttgagactccaattatgaacattttaggccttttgct

SEQ ID NO: 262491 - DNA, 640 bp, Homo sapiens
ccctcatctgatttaccatcctgtgaatggccctaggcagatagcataggtgattgttgttactgttttgagacagaatctctgttgcccaagctggagtgcagtggcatgatctcagctcactgcagcctctgcctcctgggttcaagtgattcttctgcctcagcctcccaagtagttgagactacaggcatgtgccaccatgcccggctaatttttgtatttttgtagatactgggtttcaccatgttggccaggctggtctcgaattcctgacccaagcttaagctttggtcaggagagagcaaagatgccctaagaatgacatcagactgaccaaatgtgccttttcaaataagttatgagaacgaatgaattggaattagagcaaggtattggacagaaccatgctagtctttgagagaacgtgtggattgggtggatgtttggaccgaatgaatggtaactttttaatgtgaaacagagaactgatatatgggctgtcatgtcaccctagggtactgtcgctctgtcatgtgtagcaatctttccaaatttttgttggtgggctgaacaaagataaaactaataaagtatgtgtggataccactaaaaaaaaaaaagtcgacgcggccgcgaa

SEQ ID NO: 262492 - DNA, 5482 bp, Homo sapiens
  misc_feature (673)..(673): n is a, c, g, or t
cgggctcctgtctgctcccattttactccacggaatagttctgccctgtagcatctccagcggcctttgcagactgctgtcagccaacaggtgccaaaaatgcaaaagaagaagaaactaaaagcagtgctatttttgcagaacaaatgctagctattaaatcatcttaggccaagacaccaatggcacttggaccgataggtatttggagcatgagttaggaaggatatgtctttctccaggtgcgcagctgaaagttgctgagaaaagctgcctgtgttgctgtggtaacatgagaaggaatgaacagctctatacaaaaactggccacacattataaggcctattctatgcagtcatgtttttggctatttgctcatttagtcattgtttatcaaccaaactaggtaagccaaggagttacaagacagctctagagaagctccctctgcttacaggacaataatgcattgtttgttgatacaaatgaattatttgaatccacagaagtgaaaaagggaaaaaatcctggctgacttgtgggaagagcgtactgcagagcctagggcctgagttaactcgctggcggccctgcaggcaggcttgatgggagcgcccagcacatctgcccaccctgcacagggcatgaagcaccgtgtgcagagatctgtgngcaaaagcccaggacgtgaccttaggcaagaggggtccttggagaagtggaggtgtgcatggtgtgtagccttgcgtgtctgtgagcacgccctagtggacctgcgcctggattatcgggccagtctctcggaggggtccgtgatgctgagttacgccattcacctgaactctgcagctcatcggctgtaggatttgggtgagacacttttccttgctgactcatttccccatctgcaaaatgggggtgacgatatctacctcttggggtgtgtcaagggtaaaagagcacactttaagaatcctaaagcactaagccaaggatgaaagactagaaagctgcctctatgttgctactctcaaaaatgctcagaaattttcttgtcgtactaaaaatgtgttatttttctcattttcattcttccattcaacacagaagtaatctaagtaagttctaaaaacatagatccgggggcccacagacattcaattttcttctgaattggctctggtatcacacaacacacaagcaagcaaacagcctgcctgctagggccttgggttccaggctggaggaatgcaggcagaaatctcttaggaaataactaagtgagcgccaagttttgaattgccttagagccgaaagagaatgtggcgtgctggggagagatctggacctctttctcatcagtcatttgacctgtccacgaagaacaattttgttatgcagcctgggaacctggtttccttacaccctgcgcccttaatgacacagacaaccacgggtactcctggacggaagctcatcacgcctcctcaaataccttcacccatgttcaggtcacacggaggtcaccatctcctcagcacacaacaactgctttggttcccagggttattttttctacgagttgaaaacccacggagcctaagccatctttttgtcccctaaggagagccccatagactaagagctacacttcctgtctgtctttcccacctttccatctcattctagcttaaagcttatcacgctactgagagcctgttctgtagttcaaggtggcagagaaaaatacgaaccttgagtgaaatctggagagcagtgcagggtcatccccagacgtgacgggccatatcctaggcgactcctgcagcttatagaagcagggaatttaatggacttcttccaggaaagccagcccacggggactcttaaaaagacaccaaccatttggaagatgcagcttgaggtctgggggactggactgattctgccaccatatagtgaacacgattaatcgggaggaagaagtaaggcactctgtgagttagtctaccaccctattgactttgacagagagaaaaccaacttttttcatatgatcacacagtagtactggaatatctcgactgcaatatcctctaaacaaatgcatgcaaagctttgtaaaagcagctgatgattaaaaaaattttaaaacattagggtttttctaatatatccatatgtgggacagtgatttaaatgtcattaattgtccagccacaacttgtaacagtgatgtgaaagacacaaaaaaggccccactggagtggaggagtggtctggctggtccccaagcaaaacagaatgggcttcgcataggctttagaacttattcataaatattgaccaaagtgtgaagcaaggtatccagtgaagattctctagggtctctacttctgctcaagagatttaatccagctttctctaaagcagtggtccagacttgccacatactaggttaaagataaagtgagaaaaacaaatactttggtttgcacgtctcttgaggggccctaggctgtatggaggaatatttagaggaatatttgtgagctgccatttgtgtttaaaagaacatgaaagcaagacgggccctaacccgcctgtgtctgtagctgaccaggaggccactgcttccttcccccagagcttctaggagagccccccaaaatgcaactctccaaggtcctgtggagtagtcccctcataatgcctccaccacacctgtgtctcacgatgccttaactgacgtagctcctaagtgatgttcacagagaaggaaatacttaggcaagcccatgtgtaacatgctcacagatgtgctggctttgccaatgctttcggactccaccatgctttctgattcttctggtcctagtcacgccttggcacggggcagaagcggccgagctatgctgacaggtgctgctgagagccaacagccattcagccgagaaggcgtttctaggtgagggcatgagagctggcattccaggctgctgagtgcggcatctgcaggtgcaccacattgctccacggtgtgttcagaagagaccagcatcttgaatctcaggctctgggctcattctttgcctctgccaagggaccattcaggggcttcaagccagctgctgaaaatcccccttttctggatttttccccatctatataaggatatggtggctgtgtggacaagaaattggtttcatctcagaagggtgcttccctacaaagatcttcagaaatttaattgaaaacaattttttgaactttttttgtttggccaggatgaatgaagctgaagtcacatcctgaatgtgcatgccagacaaagggtaagcaagcagtctttacaaatgccaatccctctgcactccaaaaccggagcccgtaatgaaggcccaggttccagtcatcacaggatcccccaagccagcacagtgcctgatgcctccctaggcattagcacatcccagcactctaattcacatcctcagcatccctgcctcctgcatccagggcttaggttgagtgtttccagagtgtcaagtacatttaaacacaaaccaaatactccagggttttgacctgtcacaatggcttttgaaaacaacagacgtacaatttgagagaaggactcgatggacttcttaggctgaggactaaggacatgttgctgttcctcttggtccaggacattcaataccattcacagcattcatcaccaactgacatagtatcgatcacgacattcaactgtttgaaattactgctattttggtcaaaaactaagaaatcagaaattgcacctacatagtgtgtctcctcattggagtcccatctctctgagcacagggatgggctcctgagctcacagccctgccctgcccccccagcagggcctcaccctcatggccctcagtgaatagtgactacatgaagggggcacttactagaggcctgagtaatggaatttcaattagcttctgcttcccttttctaaaaaagaaccacctttcttaagaataattaggccaaaataaacttgagtaatttgtacagtcaatattttgaagtttcggagttaccagtgaaatagcaaagctgttctccaggaaaggacatccaggttcccacccaggccttccttcctcagctcctgcagcctcatcctagtttaatatgaaggttgtgaatgggttaaaaagcagttcttaagcacctacttagatcttttcagtatctggaaatagcacccagggctgtgttagtaaagcttttcactgggtaagagtcatacaatttttacatttaatttgtttttttaaaacaaggcagtcttgttttacatattggaatgactagatattttttgacatttctggcacctctggttctgctgaattttaagggaggtgagtggtatgtacacaaagttaagattgctgcataataattcctttgcatttccaaaataaattacacaaatgtcacttttccttttctattccatagtactagttttagccagatctttgccaaacattctaggacattcagaaaagtcatccatggaattttggaatgccattctctctgtatctttgcagatcatgaggaaggaaagttgatgaactagtacgggatggctcagacttgtaaagtgtctaagtcacaacgctgcagagccagcttccgggtagcaatggcatggcctcagctgtgccaaggctacaactggagcttccttactcgcatctgaggcaaacacagcaaggctggcccaggccgcccacagtcaacagatgttcacgggagatggatcagcccctcttttgcttgttctatcaaggaaagagatctaaccatgggcaagggtggaacacacccggttcaggtcagggaatgagttgctctaagtgaacagtgaattcttacttctcagcctgtatcaattgtacccagggttcatgattactgtgacccactaagggacgatctttgaggaaacagacctggagggaggtaatttaaggagggaaagtgagtgggttttacagactgctttgtggcgacattcaggaacagaccattcaatggatgacttttcagtacataaaagcaagcagtaatggccaggagagagcaaagatgccctaagaatgacatcagactgaccaaatgtgccttttcaaataagttatgagaacgaatgaattggaattagagcaaggtattggacagaaccatgctagtctttgagagaacgtgtggattgggtggatgtttggaccgaatgaatggtaactttttaatgtgaaacagagaactgatatatgggctgtcatgtcaccctagggtactgtcgctctgtcatgtgtagcaatctttccaaatttttgttggtgggctgaacaaagataaaactaataaagtatgtgtggataccactaaaaaaaaaaaagtcgacgcggccgcgaa

SEQ ID NO: 262493 - DNA, 5641 bp, Homo sapiens
  misc_feature (673)..(673): n is a, c, g, or t
cgggctcctgtctgctcccattttactccacggaatagttctgccctgtagcatctccagcggcctttgcagactgctgtcagccaacaggtgccaaaaatgcaaaagaagaagaaactaaaagcagtgctatttttgcagaacaaatgctagctattaaatcatcttaggccaagacaccaatggcacttggaccgataggtatttggagcatgagttaggaaggatatgtctttctccaggtgcgcagctgaaagttgctgagaaaagctgcctgtgttgctgtggtaacatgagaaggaatgaacagctctatacaaaaactggccacacattataaggcctattctatgcagtcatgtttttggctatttgctcatttagtcattgtttatcaaccaaactaggtaagccaaggagttacaagacagctctagagaagctccctctgcttacaggacaataatgcattgtttgttgatacaaatgaattatttgaatccacagaagtgaaaaagggaaaaaatcctggctgacttgtgggaagagcgtactgcagagcctagggcctgagttaactcgctggcggccctgcaggcaggcttgatgggagcgcccagcacatctgcccaccctgcacagggcatgaagcaccgtgtgcagagatctgtgngcaaaagcccaggacgtgaccttaggcaagaggggtccttggagaagtggaggtgtgcatggtgtgtagccttgcgtgtctgtgagcacgccctagtggacctgcgcctggattatcgggccagtctctcggaggggtccgtgatgctgagttacgccattcacctgaactctgcagctcatcggctgtaggatttgggtgagacacttttccttgctgactcatttccccatctgcaaaatgggggtgacgatatctacctcttggggtgtgtcaagggtaaaagagcacactttaagaatcctaaagcactaagccaaggatgaaagactagaaagctgcctctatgttgctactctcaaaaatgctcagaaattttcttgtcgtactaaaaatgtgttatttttctcattttcattcttccattcaacacagaagtaatctaagtaagttctaaaaacatagatccgggggcccacagacattcaattttcttctgaattggctctggtatcacacaacacacaagcaagcaaacagcctgcctgctagggccttgggttccaggctggaggaatgcaggcagaaatctcttaggaaataactaagtgagcgccaagttttgaattgccttagagccgaaagagaatgtggcgtgctggggagagatctggacctctttctcatcagtcatttgacctgtccacgaagaacaattttgttatgcagcctgggaacctggtttccttacaccctgcgcccttaatgacacagacaaccacgggtactcctggacggaagctcatcacgcctcctcaaataccttcacccatgttcaggtcacacggaggtcaccatctcctcagcacacaacaactgctttggttcccagggttattttttctacgagttgaaaacccacggagcctaagccatctttttgtcccctaaggagagccccatagactaagagctacacttcctgtctgtctttcccacctttccatctcattctagcttaaagcttatcacgctactgagagcctgttctgtagttcaaggtggcagagaaaaatacgaaccttgagtgaaatctggagagcagtgcagggtcatccccagacgtgacgggccatatcctaggcgactcctgcagcttatagaagcagggaatttaatggacttcttccaggaaagccagcccacggggactcttaaaaagacaccaaccatttggaagatgcagcttgaggtctgggggactggactgattctgccaccatatagtgaacacgattaatcgggaggaagaagtaaggcactctgtgagttagtctaccaccctattgactttgacagagagaaaaccaacttttttcatatgatcacacagtagtactggaatatctcgactgcaatatcctctaaacaaatgcatgcaaagctttgtaaaagcagctgatgattaaaaaaattttaaaacattagggtttttctaatatatccatatgtgggacagtgatttaaatgtcattaattgtccagccacaacttgtaacagtgatgtgaaagacacaaaaaaggccccactggagtggaggagtggtctggctggtccccaagcaaaacagaatgggcttcgcataggctttagaacttattcataaatattgaccaaagtgtgaagcaaggtatccagtgaagattctctagggtctctacttctgctcaagagatttaatccagctttctctaaagcagtggtccagacttgccacatactaggttaaagataaagtgagaaaaacaaatactttggtttgcacgtctcttgaggggccctaggctgtatggaggaatatttagaggaatatttgtgagctgccatttgtgtttaaaagaacatgaaagcaagacgggccctaacccgcctgtgtctgtagctgaccaggaggccactgcttccttcccccagagcttctaggagagccccccaaaatgcaactctccaaggtcctgtggagtagtcccctcataatgcctccaccacacctgtgtctcacgatgccttaactgacgtagctcctaagtgatgttcacagagaaggaaatacttaggcaagcccatgtgtaacatgctcacagatgtgctggctttgccaatgctttcggactccaccatgctttctgattcttctggtcctagtcacgccttggcacggggcagaagcggccgagctatgctgacaggtgctgctgagagccaacagccattcagccgagaaggcgtttctaggtgagggcatgagagctggcattccaggctgctgagtgcggcatctgcaggtgcaccacattgctccacggtgtgttcagaagagaccagcatcttgaatctcaggctctgggctcattctttgcctctgccaagggaccattcaggggcttcaagccagctgctgaaaatcccccttttctggatttttccccatctatataaggatatggtggctgtgtggacaagaaattggtttcatctcagaagggtgcttccctacaaagatcttcagaaatttaattgaaaacaattttttgaactttttttgtttggccaggatgaatgaagctgaagtcacatcctgaatgtgcatgccagacaaagggtaagcaagcagtctttacaaatgccaatccctctgcactccaaaaccggagcccgtaatgaaggcccaggttccagtcatcacaggatcccccaagccagcacagtgcctgatgcctccctaggcattagcacatcccagcactctaattcacatcctcagcatccctgcctcctgcatccagggcttaggttgagtgtttccagagtgtcaagtacatttaaacacaaaccaaatactccagggttttgacctgtcacaatggcttttgaaaacaacagacgtacaatttgagagaaggactcgatggacttcttaggctgaggactaaggacatgttgctgttcctcttggtccaggacattcaataccattcacagcattcatcaccaactgacatagtatcgatcacgacattcaactgtttgaaattactgctattttggtcaaaaactaagaaatcagaaattgcacctacatagtgtgtctcctcattggagtcccatctctctgagcacagggatgggctcctgagctcacagccctgccctgcccccccagcagggcctcaccctcatggccctcagtgaatagtgactacatgaagggggcacttactagaggcctgagtaatggaatttcaattagcttctgcttcccttttctaaaaaagaaccacctttcttaagaataattaggccaaaataaacttgagtaatttgtacagtcaatattttgaagtttcggagttaccagtgaaatagcaaagctgttctccaggaaaggacatccaggttcccacccaggccttccttcctcagctcctgcagcctcatcctagtttaatatgaaggttgtgaatgggttaaaaagcagttcttaagcacctacttagatcttttcagtatctggaaatagcacccagggctgtgttagtaaagcttttcactgggtaagagtcatacaatttttacatttaatttgtttttttaaaacaaggcagtcttgttttacatattggaatgactagatattttttgacatttctggcacctctggttctgctgaattttaagggaggtgagtggtatgtacacaaagttaagattgctgcataataattcctttgcatttccaaaataaattacacaaatgtcacttttccttttctattccatagtactagttttagccagatctttgccaaacattctaggacattcagaaaagtcatccatggaattttggaatgccattctctctgtatctttgcagatcatgaggaaggaaagttgatgaactagtacgggatggctcagacttgtaaagtgtctaagtcacaacgctgcagagccagcttccgggtagcaatggcatggcctcagctgtgccaaggctacaactggagcttccttactcgcatctgaggcaaacacagcaaggctggcccaggccgcccacagtcaacagatgttcacgggagatggatcagcccctcttttgcttgttctatcaaggaaagagatctaaccatgggcaagggtggaacacacccggttcaggtcagggaatgagttgctctaagtgaacagtgaattcttacttctcagcctgtatcaattgtacccagggttcatgattactgtgacccactaagggacgatctttgaggaaacagacctggagggaggtaatttaaggagggaaagtgagtgggttttacagactgctttgtggcgacattcaggaacagaccattcaatggatgacttttcagtacataaaagcaagcagtaatggccaggagagagcaaagatgccctaagaatgacatcagactgaccaaatgtgccttttcaaataagttatgagaacgaatgaattggaattagagcaaggtattggacagaaccatgctagtctttgagagaacgtgtggattgggtggatgtttggaccgaatgaatggtaactttttaatgtgaaacagagaactgatatatgggctgtcatgtcaccctagggtactgtcgctctgtcatgtgtagcaatctttccaaatttttgttggtgggctgaacaaagataaaactaataaagtatgtgtggataccactagacagcacagcttactggactggatgtaataaaactgactgaaactatagaaaaaaagaaaagaagataagaaaagtgagagaaggaaagaaaagaagagaaaaaggagaagacagaggaggaagagaataagaagaatgagaagaaaaaaaaggaagaagagaagaggagagaaaggaaagagaga

SEQ ID NO: 262494 - DNA, 566 bp, Homo sapiens
aagagtcagggtcttactctgtcactcaggctggagtgcagtggtgcaatcatagctcatcactgtagccttcaactgcctggctcaagtgatcctcctgcctcagcctcccaagtagctgggactacaggcatgggctacactacccaactaatttttaaaattgttatttttgggaatggggtcttgttatgttgcccaggctggtctcaaattcctggcctcaagcaattctccctcagccaccagagtcactgggattacaagtgtgattagaccatttttaaaacatcgttgcttttttcctcaatgatttgttacagttctttcaatattaatcattctctttatattatatgccaggcaaatttctgctttcaatatgtgacttgtctttttactttgtttgttgtcaattttttctttaagtcaaggtctcgttgtgtcacccaggtgtgagtgcagtggtgtgatcttagctcactgtaccctcaaactcccgagttcaagcgatcctcatacctcagcctcccttatttaacttttgacataaccactgaacatac

SEQ ID NO: 262495 - DNA, 700 bp, Homo sapiens
aataaagttcaggagaagggtcaaataatgcagacttgtaagttcctgttaattcttgactatacaattgattccattttgaatgtttaacacacagttgctcagcagtctggatgttactgtattcccccacaaagacagctctgtaaatgaacataaatcaggctataagagaatatctccttacacttggtcttcagggcagaagtagcaacaaaaaagcacaagtcctctttgaaaccatatcttgatttagtgtcctcagcctaacaggtattgcagtgtggcccaacagagatgggtctgtgagatacttcaacacccggcagggctgctgggtctaacattggagtgttgggctgcagacactgactggggagaaatgttgtgaactttatttgcagttctgagagaaatgctgtgttgaaacaggagaggttttcagaagctgctctcagtagctggctccaggattggggtgatggtataatacttacaaaaggcagcacatcagatagagaatttgataggcagaaattaggtagctccggcaagttatttttcaatggaagactaaggggtagatccgagtacattagcagaaaaagttctgtgatttagattgggaagttgagttagaaataattataaaagcccagtcatgtgtgaacttagaccagtgaacagacgaatgtactac

SEQ ID NO: 262496 - DNA, 298 bp, Homo sapiens
acctgatttacctcccaccgtaatacaattacaattcaccataatagaggctttgttaagttctccttttgagtctgtcagttttttgctttatttttgaagctatgttgttaagtgcatagccatatgagtagaataagggttcaggatttttatacctttttggtgaattgttgcattttccagctacttgggagggcgaggtgggagaatcacttgagaccaggaattcaaggccgcagtgagctatgattgctccactgcactccagtctaggtgacagagtgagacattctca

SEQ ID NO: 262497 - DNA, 339 bp, Homo sapiens
atacgagtctggctgatttgtccaaggtaaatactactatggcctacttatccattaggctgaatgggcaaagtaccgagagcccacagaaatgttttctttcaaaataagaaaatgaattttaaggtcaaagaaacttaatatcgtagtctactggcgagtgtataaattgatataatcacttgggaaaactatttggcaagatctattgaatttgaatatatgcatttgctataacctagcagttccattcttacctttaacccaaatgtaagtgtatacatattcaccaaaatacatgaatggggatgtttgtggcattgccatttttattggaaa

SEQ ID NO: 262498 - DNA, 289 bp, Homo sapiens
tctcaacaatgcgttcctacagagctggagtccacgttgaacagctggctaaagccaatgccaggcctaatttggattattaagggctaattatccaggcttcagtgcaaccactggccttggccaagtgctcaacatggactcaagctctgcgggaaagaaatggcaggaggctgtgcagctttagttttgagtagaatattcattttcagccctgatgtgggggcagcctgttttcacaacctttaaagattgaggcagggtcagaaaagagagagaattaagccag

SEQ ID NO: 262499 - DNA, 6643 bp, Homo sapiens
gtcgccccgtggccccacaatgacccacagccccgcgacaagcgaggacgaggaacgccacagtgccagcgagtgtcccgaggggggctcagagtccgacagctccccagacgggccaggtcgaggcccccgggggacccggggccagggcagtggggcacctggtagcctggcctctgttagaggcctccagggccgctcaatgtccgtcccagacgacgcccacttcagcatgatggtcttcaggattggcatcccggacctgcaccagacaaaatgccttcgcttcaaccccgatgccaccatctggacggccaagcagcaggtgctctgtgccctgagcgagagcctgcaggatgtgctcaactatggcctgttccaaccggccacctccggccgcgatgccaacttcctggaggaggagaggctgctgcgggagtacccccagtcctttgagaagggggtcccctacctggagttccgatacaagacccgagtttacaaacagaccaacctggatgagaagcagctggccaagttgcacacgaagacggggttgaagaagttcctggagtatgtgcagctcgggacatctgacaaggtggcgcggctgctggacaaggggctggaccccaattaccatgactcggattcgggagagacccccttgacactggcggcccagaccgaaggctctgtagaggtgattcgaaccctgtgcctgggcggggcccacattgacttccgggcccgggatggcatgaccgcactgcataaggccgcatgcgcccgacactgcctggcactcacggcgctcctggaccttgggggttcccccaactacaaggaccgtcgggggctgacccctctgttccacacggccatggtgggtggtgacccccgatgctgcgagctgctcctgttcaacagggcccagctgggcatagctgatgagaacggctggcaggaaatccaccaggcctgccagcggggtcactctcagcacctggagcatctgcttttctacggggctgagcctggagcccagaacgcctcggggaacacggctctgcacatctgcgccctctacaacaaggagacctgtgccaggatcctcctgtatcgaggtgccgacaaggatgtgaagaacaacaacggacagacccccttccaggtggcagtgattgctgggaattttgagctgggggagctgatccgaaaccaccgagaacaggatgtggtgcccttccaggagtcccccaagtacgcggcccggcgacgggggcccccaggcacagggctgacggtgcccccggcgctgctgcgggccaacagtgacaccagcatggcgctgcccgactggatggtgttctccgccccgggggccgcgtcctctggggcccctggccctacctcagggtcccagggccagtcgcagccctcggcccccaccaccaagctcagcagcgggaccctccgaagtgccagcagcccccggggtgccagggcccgctctccatcccgagggaggcaccctgaggacgccaagaggcagccccgaggccggcccagctccagcgggacaccccgggaagggccagccgggggcacggggggctcagggggccccgggggctccctgggcagccgcgggaggcggaggaagctctactcagcggtacccggacgctccttcatggctgtgaagtcctaccaggcccaagccgagggggagatctccctgagcaagggcgagaagatcaaagtacttagcatcggggaaggaggcttctgggaaggccaggtcaaaggtcgtgttggctggttcccctctgactgcctggaagaagtggcgaatcgctctcaggagagcaagcaagaaagccgcagtgacaaggcaaagagactcttccggcattataccgtgggctcctacgacagctttgatgccccaagcttaatggatgggattggcccagggagcgattacatcattaaggagaagacagtcttgctgcagaagaaggacagtgaggggtttgggttcgtgctccggggggccaaggcgcagacccccatcgaggagttcacccccaccccggccttcccggcgctgcagtacctggagtcggtggacgagggtggcgtggcatggcgagctggactgcgaatgggagacttcctcatcgaggtgaacgggcagaatgtggtgaaggtcggccaccgacaggtggtgaacatgatccgccaagggggcaacacgctgatggtgaaggtggtgatggtcaccaggcacccggacatggatgaggcagtgcacaagaaagcaccccagcaggccaagcggctgccgcccccaaccatctccctgcgttccaaatctatgacctcagagctggaggagatggagtacgagcagcagccggcgccggtgcccagcatggagaaaaagcggaccgtgtatcagatggctctcaacaaactggacgaaatcctggccgcagctcaacagaccatcagtgcaagcgaaagccctggtcccggtggcctcgcgtccctgggcaaacaccgacccaaaggtttctttgccactgagtcgagcttcgatccccaccaccgtgcccagccaagttacgagcgtccttctttcctgcctccaggacctgggttgatgctccggcaaaaatctatcggtgcggcagaagatgacagaccttacctagcacccccagccatgaaattcagccgcagcctgtctgtgcctggttcggaggacattcccccgccacccaccacgtacccaccggagcctccctacagcacacctacagtcccctcctcctcagggcgcctcaccccctcccctcggggagggcccttcaaccctggctctggtggccccctccccgcctcctcccctgcaacctttgacgggccctcccctcccgacactcgcgtggggagccgcgagaagagcctgtaccacagtgggcccctgcccccggcccaccaccacccgccccaccaccaccaccaccacgccccgccccctcagccccaccaccaccacgcccacccccctcatcctcccgagatggagacaggcggctctcccgacgaccctccaccccgcctggctctggggccccagcccagcctgcgaggctggaggggcggcgggcccagcccgaccccgggggccccgtccccatcgcaccacggcagcgcgggcgggggcggcggctcctcccagggcccggctctacgctatatccagctgcccccgcgggcggccagcgcagccatgtacgtgcccgcccgctcgggccgcggccgcaagggcccgctggtcaagcagaccaaggtggaaggcgagccccagaagggcggcggcctcccgcccgcgccgtcgccctcgtccccggcctccccgcagccgccgcccgccgtggccgcgccctcggagaagaactccatccccatccccaccatcatcatcaaggccccgtccaccagtagcagcggccgcagcagccagggcagcagcaccgaggcggagccccccacccagccggagcccacgggaggcggcggcggcggcggctcctcgcccagccccgccccggccatgtcacccgtgcccccgtccccctcgcccgtgcccacccccgcctcgcccagcggcccggccacgctggacttcacgagccagttcggggccgccctggtgggggcggcccggagggaggggggctggcagaatgaggcgcgccggcgctccacgctgttcctgtccaccgacgcgggggacgaggacggcggggacggcgggctgggcacaggggcggccccgggcccgcggctgcgccactccaaatccatcgacgagggcatgttctccgccgagccctacctccgactggagtctgcgggcagcggcgcgggctacggcggctacggggccggtagccgagcctacgggggtggcgggggcagcagcgccttcaccagcttcctgcccccgcgacccctggtgcacccgctgaccggcaaggccctggatcccgcctccccgctggggctggccctggccgcccgcgagcgagcgctgaaggagtcctcggagggcggcggggccccccagccgcctcccaggcccccatcgccccgctacgaggccccgccgcccaccccgcaccaccactcgccccacgcccaccacgagccagtgctgcgtctctggggggcctccccgccggaccctgcgcgccgggagctggggtacagggccgggctgggcagccaggagaagtcccttcccgccagcccgcccgccgcccggcgttccctgctacaccgcctgccgcccaccgctcccggggtggggcccctcctgctgcagctggggacggagcccccggccccgcaccccggagtaagcaagccctggaggtccgcagcccccgaagaacccgagcggctgccgctgcacgtgcggttccttgaaaactgccagccccgggcccctgtgacgagcggaaggggtcccccctcggaggacgggccgggggtcccgccgcccagcccacgccggtccgtgcccccctccccgacctccccgagggccagcgaagagaacgggctgcccctgctggtcctgccgcctcccgccccctcggtggatgtggaagatggcgaattccttttcgtggaaccgctgcctccgcctctggaattctccaacagcttcgaaaagccagagtcgcccctcacgcctgggcctccccacccgctgcccgacacacctgcccctgccaccccgttaccccctgtgccacccccggctgtggccgcagcccctcccaccctggactccaccgcatccagcctgacatcctatgacagcgaggtggccaccctgacccagggggcctccgccgctcctggggacccccatccaccaggcccgcctgccccagcagcaccggctcccgctgccccacagcctggcccggaccctccgcctggcacggattctggcatcgaggaggtggacagtcggagcagcagtgaccacccactggagaccatcagcagcgcctccacgctgagcagcctatctgccgaaggtggtggcagcgcagggggtgggggcggggctggggccggtgtggccagtgggccggagcttctggacacctatgtggcctacctggacggccaggcctttgggggcagcagtactcccggcccgccataccctcctcagctcatgactccctctaagctccggggccgggcgctaggagccagcggaggcctgcggcctggccccagcgggggactccgagaccctgttacccccaccagccccaccgtctcggtgacaggggctggaaccgatgggctgctggccctgcgtgcttgttcaggaccccccacggcaggcgtggcggggggtccggtggctgtagagccagaagtcccaccggtgcccttgccgacggcctcctgtctgccccggaagctgctgccctgggaggagggcccgggcccaccgccaccacctctgcccgggcccttggcccagcctcaggcctcagccttggccacagtaaaagccagcatcatcagtgaactcagctccaagcttcagcagtttgggggctcctcggcagctggcggcgctctgccctgggcccgaggaggcagtgggggaggcggagacagccaccacgggggagccagctatgtccccgagaggacctcctccctgcagcggcagagactctccgacgactcccagtcctcactcctctccaagcctgtcagcagcctgtttcagaactggcccaaaccacctctgccgccactccccaccggaacaggggtctcccctacagccgctgcggccccaggggccacctcaccctcagcctcctcctcctccacgtccacccgccacctccagggcgtggagttcgagatgcggccccctctgctccgccgggcccccagcccctcgctgctgcccgcctcggagcacaaggtcagccctgcgcccaggccctcgtccctgcccatcctgccttccggacccctctacccaggcctctttgacatccgtggctccccaactggaggggcaggaggctcggctgaccccttcgccccagtctttgtgccgccacacccggggatatccggggggctcgggggagccttgtcaggggcctcgcgctccctctcaccgacccgcctgctctcgctgcccccggacaagccgtttggcgctaaacctctggggttctggaccaagttcgacgtggctgattggctggagtggctgggtttggcggagcaccgagcccagttcctggaccacgagatcgatggctcccacctgcccgccttgaccaaggaggactacgtcgatctaggtgtgaccagggtgggccaccgcatgaacatcgaccgggctctcaaattcttcctggagaggtgatggctggcctggacggaccagccccgtccacagaactcttgagcctgctggcctcttgacctctgacccctgactgtcattctctccccgggccagggactctgttcaaactgcgccctgccctcatcttccaaggcc

SEQ ID NO: 262500 - DNA, 4785 bp, Homo sapiens
atgcaattaatggccctggagcagaggtttgggtctgggttgccgggtgggggacagcctctgtgtctcatgatgtcttctccactccccccaccacccccccatttctcctgcctccctgccagcgattacatcattaaggagaagacagtcttgctgcagaagaaggacagtgaggggtttgggttcgtgctccggggggccaaggcgcagacccccatcgaggagttcacccccaccccggccttcccggcgctgcagtacctggagtcggtggacgagggtggcgtggcatggcgagctggactgcgaatgggagacttcctcatcgaggtgaacgggcagaatgtggtgaaggtcggccaccgacaggtggtgaacatgatccgccaagggggcaacacgctgatggtgaaggtggtgatggtcaccaggcacccggacatggatgaggcagtgcacaagaaagcaccccagcaggccaagcggctgccgcccccaaccatctccctgcgttccaaatctatgacctcagagctggaggagatggagtacgagcagcagccggcgccggtgcccagcatggagaaaaagcggaccgtgtatcagatggctctcaacaaactggacgaaatcctggccgcagctcaacagaccatcagtgcaagcgaaagccctggtcccggtggcctcgcgtccctgggcaaacaccgacccaaaggtttctttgccactgagtcgagcttcgatccccaccaccgtgcccagccaagttacgagcgtccttctttcctgcctccaggacctgggttgatgctccggcaaaaatctatcggtgcggcagaagatgacagaccttacctagcacccccagccatgaaattcagccgcagcctgtctgtgcctggttcggaggacattcccccgccacccaccacgtacccaccggagcctccctacagcacacctacagtcccctcctcctcagggcgcctcaccccctcccctcggggagggcccttcaaccctggctctggtggccccctccccgcctcctcccctgcaacctttgacgggccctcccctcccgacactcgcgtggggagccgcgagaagagcctgtaccacagtgggcccctgcccccggcccaccaccacccgccccaccaccaccaccaccacgccccgccccctcagccccaccaccaccacgcccacccccctcatcctcccgagatggagacaggcggctctcccgacgaccctccaccccgcctggctctggggccccagcccagcctgcgaggctggaggggcggcgggcccagcccgaccccgggggccccgtccccatcgcaccacggcagcgcgggcgggggcggcggctcctcccagggcccggctctacgctatatccagctgcccccgcgggcggccagcgcagccatgtacgtgcccgcccgctcgggccgcggccgcaagggcccgctggtcaagcagaccaaggtggaaggcgagccccagaagggcggcggcctcccgcccgcgccgtcgccctcgtccccggcctccccgcagccgccgcccgccgtggccgcgccctcggagaagaactccatccccatccccaccatcatcatcaaggccccgtccaccagtagcagcggccgcagcagccagggcagcagcaccgaggcggagccccccacccagccggagcccacgggaggcggcggcggcggcggctcctcgcccagccccgccccggccatgtcacccgtgcccccgtccccctcgcccgtgcccacccccgcctcgcccagcggcccggccacgctggacttcacgagccagttcggggccgccctggtgggggcggcccggagggaggggggctggcagaatgaggcgcgccggcgctccacgctgttcctgtccaccgacgcgggggacgaggacggcggggacggcgggctgggcacaggggcggccccgggcccgcggctgcgccactccaaatccatcgacgagggcatgttctccgccgagccctacctccgactggagtctgcgggcagcggcgcgggctacggcggctacggggccggtagccgagcctacgggggtggcgggggcagcagcgccttcaccagcttcctgcccccgcgacccctggtgcacccgctgaccggcaaggccctggatcccgcctccccgctggggctggccctggccgcccgcgagcgagcgctgaaggagtcctcggagggcggcggggccccccagccgcctcccaggcccccatcgccccgctacgaggccccgccgcccaccccgcaccaccactcgccccacgcccaccacgagccagtgctgcgtctctggggggcctccccgccggaccctgcgcgccgggagctggggtacagggccgggctgggcagccaggagaagtcccttcccgccagcccgcccgccgcccggcgttccctgctacaccgcctgccgcccaccgctcccggggtggggcccctcctgctgcagctggggacggagcccccggccccgcaccccggagtaagcaagccctggaggtccgcagcccccgaagaacccgagcggctgccgctgcacgtgcggttccttgaaaactgccagccccgggcccctgtgacgagcggaaggggtcccccctcggaggacgggccgggggtcccgccgcccagcccacgccggtccgtgcccccctccccgacctccccgagggccagcgaagagaacgggctgcccctgctggtcctgccgcctcccgccccctcggtggatgtggaagatggcgaattccttttcgtggaaccgctgcctccgcctctggaattctccaacagcttcgaaaagccagagtcgcccctcacgcctgggcctccccacccgctgcccgacacacctgcccctgccaccccgttaccccctgtgccacccccggctgtggccgcagcccctcccaccctggactccaccgcatccagcctgacatcctatgacagcgaggtggccaccctgacccagggggcctccgccgctcctggggacccccatccaccaggcccgcctgccccagcagcaccggctcccgctgccccacagcctggcccggaccctccgcctggcacggattctggcatcgaggaggtggacagtcggagcagcagtgaccacccactggagaccatcagcagcgcctccacgctgagcagcctatctgccgaaggtggtggcagcgcagggggtgggggcggggctggggccggtgtggccagtgggccggagcttctggacacctatgtggcctacctggacggccaggcctttgggggcagcagtactcccggcccgccataccctcctcagctcatgactccctctaagctccggggccgggcgctaggagccagcggaggcctgcggcctggccccagcgggggactccgagaccctgttacccccaccagccccaccgtctcggtgacaggggctggaaccgatgggctgctggccctgcgtgcttgttcaggaccccccacggcaggcgtggcggggggtccggtggctgtagagccagaagtcccaccggtgcccttgccgacggcctcctgtctgccccggaagctgctgccctgggaggagggcccgggcccaccgccaccacctctgcccgggcccttggcccagcctcaggcctcagccttggccacagtaaaagccagcatcatcagtgaactcagctccaagcttcagcagtttgggggctcctcggcagctggcggcgctctgccctgggcccgaggaggcagtgggggaggcggagacagccaccacgggggagccagctatgtccccgagaggacctcctccctgcagcggcagagactctccgacgactcccagtcctcactcctctccaagcctgtcagcagcctgtttcagaactggcccaaaccacctctgccgccactccccaccggaacaggggtctcccctacagccgctgcggccccaggggccacctcaccctcagcctcctcctcctccacgtccacccgccacctccagggcgtggagttcgagatgcggccccctctgctccgccgggcccccagcccctcgctgctgcccgcctcggagcacaaggtcagccctgcgcccaggccctcgtccctgcccatcctgccttccggacccctctacccaggcctctttgacatccgtggctccccaactggaggggcaggaggctcggctgaccccttcgccccagtctttgtgccgccacacccggggatatccggggggctcgggggagccttgtcaggggcctcgcgctccctctcaccgacccgcctgctctcgctgcccccggacaagccgtttggcgctaaacctctggggttctggaccaagttcgacgtggctgattggctggagtggctgggtttggcggagcaccgagcccagttcctggaccacgagatcgatggctcccacctgcccgccttgaccaaggaggactacgtcgatctaggtgtgaccagggtgggccaccgcatgaacatcgaccgggctctcaaattcttcctggagaggtgatggctggcctggacggaccagccccgtccacagaactcttgagcctgctggcctcttgacctctgacccctgactgtcattctctccccgggccagggactctgttcaaactgcgccctgccctcatcttccaaggcc

SEQ ID NO: 262501 - DNA, 6689 bp, Homo sapiens
gtcgccccgtggccccacaatgacccacagccccgcgacaagcgaggacgaggaacgccacagtgccagcgagtgtcccgaggggggctcagagtccgacagctccccagacgggccaggtcgaggcccccgggggacccggggccagggcagtggggcacctggtagcctggcctctgttagaggcctccagggccgctcaatgtccgtcccagacgacgcccacttcagcatgatggtcttcaggattggcatcccggacctgcaccagacaaaatgccttcgcttcaaccccgatgccaccatctggacggccaagcagcaggtgctctgtgccctgagcgagagcctgcaggatgtgctcaactatggcctgttccaaccggccacctccggccgcgatgccaacttcctggaggaggagaggctgctgcgggagtacccccagtcctttgagaagggggtcccctacctggagttccgatacaagacccgagtttacaaacagaccaacctggatgagaagcagctggccaagttgcacacgaagacggggttgaagaagttcctggagtatgtgcagctcgggacatctgacaaggtggcgcggctgctggacaaggggctggaccccaattaccatgactcggattcgggagagacccccttgacactggcggcccagaccgaaggctctgtagaggtgattcgaaccctgtgcctgggcggggcccacattgacttccgggcccgggatggcatgaccgcactgcataaggccgcatgcgcccgacactgcctggcactcacggcgctcctggaccttgggggttcccccaactacaaggaccgtcgggggctgacccctctgttccacacggccatggtgggtggtgacccccgatgctgcgagctgctcctgttcaacagggcccagctgggcatagctgatgagaacggctggcaggaaatccaccaggcctgccagcggggtcactctcagcacctggagcatctgcttttctacggggctgagcctggagcccagaacgcctcggggaacacggctctgcacatctgcgccctctacaacaaggagacctgtgccaggatcctcctgtatcgaggtgccgacaaggatgtgaagaacaacaacggacagacccccttccaggtggcagtgattgctgggaattttgagctgggggagctgatccgaaaccaccgagaacaggatgtggtgcccttccaggagtcccccaagtacgcggcccggcgacgggggcccccaggcacagggctgacggtgcccccggcgctgctgcgggccaacagtgacaccagcatggcgctgcccgactggatggtgttctccgccccgggggccgcgtcctctggggcccctggccctacctcagggtcccagggccagtcgcagccctcggcccccaccaccaagctcagcagcgggaccctccgaagtgccagcagcccccggggtgccagggcccgctctccatcccgagggaggcaccctgaggacgccaagaggcagccccgaggccggcccagctccagcgggacaccccgggaagggccagccgggggcacggggggctcagggggccccgggggctccctgggcagccgcgggaggcggaggaagctctactcagcggtacccggacgctccttcatggctgtgaagtcctaccaggcccaagccgagggggagatctccctgagcaagggcgagaagatcaaagtacttagcatcggggaaggaggcttctgggaaggccaggtcaaaggtcgtgttggctggttcccctctgactgcctggaagaagtggcgaatcgctctcaggagagcaagcaagaaagccgcagtgacaaggcaaagagactcttccggcattataccgtgggctcctacgacagctttgatgccccaagcgattacatcattaaggagaagacagtcttgctgcagaagaaggacagtgaggggtttgggttcgtgctccggggggccaaggcgcagacccccatcgaggagttcacccccaccccggccttcccggcgctgcagtacctggagtcggtggacgagggtggcgtggcatggcgagctggactgcgaatgggagacttcctcatcgaggtgaacgggcagaatgtggtgaaggtcggccaccgacaggtggtgaacatgatccgccaagggggcaacacgctgatggtgaaggtggtgatggtcaccaggcacccggacatggatgaggcagtgcacaagaaagcaccccagcaggccaagcggctgccgcccccaaccatctccctgcgttccaaatctatgacctcagagctggaggagatggagtacgagcagcagccggcgccggtgcccagcatggagaaaaagcggaccgtgtatcagatggctctcaacaaactggacgaaatcctggccgcagctcaacagaccatcagtgcaagcgaaagccctggtcccggtggcctcgcgtccctgggcaaacaccgacccaaaggtttctttgccactgagtcgagcttcgatccccaccaccgtgcccagccaagttacgagcgtccttctttcctgcctccaggacctgggttgatgctccggcaaaaatctatcggtgcggcagaagatgacagaccttacctagcacccccagccatgaaattcagccgcagcctgtctgtgcctggttcggaggacattcccccgccacccaccacgtacccaccggagcctccctacagcacacctacagtcccctcctcctcagggcgcctcaccccctcccctcggggagggcccttcaaccctggctctggtggccccctccccgcctcctcccctgcaacctttgacgggccctcccctcccgacactcgcgtggggagccgcgagaagagcctgtaccacagtgggcccctgcccccggcccaccaccacccgccccaccaccaccaccaccacgccccgccccctcagccccaccaccaccacgcccacccccctcatcctcccgagatggagacaggcggctctcccgacgaccctccaccccgcctggctctggggccccagcccagcctgcgaggctggaggggcggcgggcccagcccgaccccgggggccccgtccccatcgcaccacggcagcgcgggcgggggcggcggctcctcccagggcccggctctacgctatatccagctgcccccgcgggcggccagcgcagccatgtacgtgcccgcccgctcgggccgcggccgcaagggcccgctggtcaagcagaccaaggtggaaggcgagccccagaagggcggcggcctcccgcccgcgccgtcgccctcgtccccggcctccccgcagccgccgcccgccgtggccgcgccctcggagaagaactccatccccatccccaccatcatcatcaaggccccgtccaccagtagcagcggccgcagcagccagggcagcagcaccgaggcggagccccccacccagccggagcccacgggaggcggcggcggcggcggctcctcgcccagccccgccccggccatgtcacccgtgcccccgtccccctcgcccgtgcccacccccgcctcgcccagcggcccggccacgctggacttcacgagccagttcggggccgccctggtgggggcggcccggagggaggggggctggcagaatgaggcgcgccggcgctccacgctgttcctgtccaccgacgcgggggacgaggacggcggggacggcgggctgggcacaggggcggccccgggcccgcggctgcgccactccaaatccatcgacgagggcatgttctccgccgagccctacctccgactggagtctgcgggcagcggcgcgggctacggcggctacggggccggtagccgagcctacgggggtggcgggggcagcagcgccttcaccagcttcctgcccccgcgacccctggtgcacccgctgaccggcaaggccctggatcccgcctccccgctggggctggccctggccgcccgcgagcgagcgctgaaggagtcctcggagggcggcggggccccccagccgcctcccaggcccccatcgccccgctacgaggccccgccgcccaccccgcaccaccactcgccccacgcccaccacgagccagtgctgcgtctctggggggcctccccgccggaccctgcgcgccgggagctggggtacagggccgggctgggcagccaggagaagtcccttcccgccagcccgcccgccgcccggcgttccctgctacaccgcctgccgcccaccgctcccggggtggggcccctcctgctgcagctggggacggagcccccggccccgcaccccggagtaagcaagccctggaggtccgcagcccccgaagaacccgagcggctgccgctgcacgtgcggttccttgaaaactgccagccccgggcccctgtgacgagcggaaggggtcccccctcggaggacgggccgggggtcccgccgcccagcccacgccggtccgtgcccccctccccgacctccccgagggccagcgaagagaacgggctgcccctgctggtcctgccgcctcccgccccctcggtggatgtggaagatggcgaattccttttcgtggaaccgctgcctccgcctctggaattctccaacagcttcgaaaagccagagtcgcccctcacgcctgggcctccccacccgctgcccgacacacctgcccctgccaccccgttaccccctgtgccacccccggctgtggccgcagcccctcccaccctggactccaccgcatccagcctgacatcctatgacagcgaggtggccaccctgacccagggggcctccgccgctcctggggacccccatccaccaggcccgcctgccccagcagcaccggctcccgctgccccacagcctggcccggaccctccgcctggcacggattctggcatcgaggaggtggacagtcggagcagcagtgaccacccactggagaccatcagcagcgcctccacgctgagcagcctatctgccgaaggtggtggcagcgcagggggtgggggcggggctggggccggtgtggccagtgggccggagcttctggacacctatgtggcctacctggacggccaggcctttgggggcagcagtactcccggcccgccataccctcctcagctcatgactccctctaagctccggggccgggcgctaggagccagcggaggcctgcggcctggccccagcgggggactccgagaccctgttacccccaccagccccaccgtctcggtgacaggggctggaaccgatgggctgctggccctgcgtgcttgttcaggaccccccacggcaggcgtggcggggggtccggtggctgtagagccagaagtcccaccggtgcccttgccgacggcctcctgtctgccccggaagctgctgccctgggaggagggcccgggcccaccgccaccacctctgcccgggcccttggcccagcctcaggcctcagccttggccacagtaaaagccagcatcatcagtgaactcagctccaagcttcagcagtttgggggctcctcggcagctggcggcgctctgccctgggcccgaggaggcagtgggggaggcggagacagccaccacgggggagccagctatgtccccgagaggacctcctccctgcagcggcagagtatagaatagtggtgaagagctcagactttggtgccatataaccgggctctgccacttcctgtgtgtccttagactctccgacgactcccagtcctcactcctctccaagcctgtcagcagcctgtttcagaactggcccaaaccacctctgccgccactccccaccggaacaggggtctcccctacagccgctgcggccccaggggccacctcaccctcagcctcctcctcctccacgtccacccgccacctccagggcgtggagttcgagatgcggccccctctgctccgccgggcccccagcccctcgctgctgcccgcctcggagcacaaggtcagccctgcgcccaggccctcgtccctgcccatcctgccttccggacccctctacccaggcctctttgacatccgtggctccccaactggaggggcaggaggctcggctgaccccttcgccccagtctttgtgccgccacacccggggatatccggggggctcgggggagccttgtcaggggcctcgcgctccctctcaccgacccgcctgctctcgctgcccccggacaagccgtttggcgctaaacctctggggttctggaccaagttcgacgtggctgattggctggagtggctgggtttggcggagcaccgagcccagttcctggaccacgagatcgatggctcccacctgcccgccttgaccaaggaggactacgtcgatctaggtgtgaccagggtgggccaccgcatgaacatcgaccgggctctcaaattcttcctggagaggtgatggctggcctggacggaccagccccgtccacagaactcttgagcctgctggcctcttgacctctgacccctgactgtcattctctccccgggccagggactctgttcaaactgcgccctgccctcatcttccaaggcc

SEQ ID NO: 262502 - DNA, 1442 bp, Homo sapiens
gtcgccccgtggccccacaatgacccacagccccgcgacaagcgaggacgaggaacgccacagtgccagcgagtgtcccgaggggggctcagagtccgacagctccccagacgggccaggtcgaggcccccgggggacccggggccagggcagtggggcacctggtagcctggcctctgttagaggcctccagggccgctcaatgtccgtcccagacgacgcccacttcagcatgatggtcttcaggattggcatcccggacctgcaccagacaaaatgccttcgcttcaaccccgatgccaccatctggacggccaagcagcaggtgctctgtgccctgagcgagagcctgcaggatgtgctcaactatggcctgttccaaccggccacctccggccgcgatgccaacttcctggaggaggagaggctgctgcgggagtacccccagtcctttgagaagggggtcccctacctggagttccgatacaagacccgagtttacaaacagaccaacctggatgagaagcagctggccaagttgcacacgaagacggggttgaagaagttcctggagtatgtgcagctcgggacatctgacaaggtggcgcggctgctggacaaggggctggaccccaattaccatgactcggattcgggagagacccccttgacactggcggcccagaccgaaggctctgtagaggtgattcgaaccctgtgcctgggcggggcccacattgacttccgggcccgggatggcatgaccgcactgcataaggccgcatgcgcccgacactgcctggcactcacggcgctcctggaccttgggggttcccccaactacaaggaccgtcgggggctgacccctctgttccacacggccatggtgggtggtgacccccgatgctgcgagctgctcctgttcaacagggcccagctgggcatagctgatgagaacggctggcaggaaatccaccaggcctgccagcggggtcactctcagcacctggagcatctgcttttctacggggctgagcctggagcccagaacgcctcggggaacacggctctgcacatctgcgccctctacaacaaggtctgcctagcagcggccaccccaggcccctcacatccccgatagccgcctcccccagggccaagctcagacactcctcttgactgcatctctgcaccctccacttcttcactatttccaccctttcatccagtcattcctccattcattcctccatccatccatccatccatccatccatccatccaacagatatttactgagctcctctgtatcaggcctggagctgggtgctggggacaaagtgttgagctcatggcctagcagagggcagacaacatagtttgctgctacagtccagagtgctcagagcaaagtcacagggaatccagatccctgcgggagc

SEQ ID NO: 262503 - DNA, 182 bp, Homo sapiens
gggccgagccgtggggcggggccaaggggttagcatcgtcccagctgcgccctccccagcgtccagtagccaaagtgcttcacaggacctcggctggagcgccaggaggcgctaccgggagaacagagccccacactgatggctggcgctcatttgccaccaggtcctggccttggggtgga

SEQ ID NO: 262504 - DNA, 609 bp, Homo sapiens
tcctttgcggactcctacctagatgagatggtgctccacatggttctgtccttggcttcccatgtgatcttgtctcctcttgaggcttcagataccactctaggtgatgactgccagtctgtgcttacagcccaaacctctcctgagcaccaacccatatgcccacggtgcagagacagcacaacccagtgtcaaggagcctggcttttaagagtcatgtaatcttgggcaagttatgtaatttctctgtgcctcagtttcctcagctgttaaaggaaggcataataatagggttgttgtgaggattaaataacaccatatatggccaggagcagtggcttgtgcctgtaatcccagtactttgggaggccgaggcgggcagatcacctgagcctcaggagttgaagagctgcctgggcaacatagcgagaccccacctctacaaaaaatacaaaaagtagctagatgtggtggtgcgcacctgtcccagctattcaggaggctgaggtaggaggatcacctgagcccaggaagtcgaagctgccgtgagctgtgattgtgccattgcatcactccagcctgggcgacagagagactttgtctcaaaag

SEQ ID NO: 262505 - DNA, 526 bp, Homo sapiens
  misc_feature (458)..(458): n is a, c, g, or t
gcccccactcttagccaccacgttatacagactcccaattcccaggccacacgaggcctctgcaaagtcgaagggtgcaaatatgactggagctgccacttactgagggtgacctgggtgccaggtactgagcgtggcaccttcagaggatgatctgtcaggtgaatgggaggaaagtctccctaaaacctatctgaggagaggagagaggtggctgacccctgccaagaaagcagagctcatggagccaccccccgaggagggtactggctggtgagagacatgggggtgggagaacagaatcttagaaactcactcttatcccatggaggctcccttctccctcaccttgctgagccaaagacaggcaggtgaagctcagcaaaaggaacacccgaggctcgggtctacctagagctaaaagaggccacacccagggcacaggtgggcaaacaacnagcccgcaggtcaaatgcagcggccacatgtttttataaataaagttttattggaacacagttacatg

SEQ ID NO: 262506 - DNA, 392 bp, Homo sapiens
tattttatttttattattttttttatttccttagattattggcatacaggtggtgtttggttacatgagtaagttctttagtggggatttgtgagattttggtgcacccatcacccaagcagtatacactgaaccctatttgtagtcttttatccctgagtcctcaaagtccattgtgtcattcttctgcctttgcatcctcatagcttagctgccacttataagtcagaacatacgatgtttggttttccattcctgagttacttcacttagaataatagtctccagtctcatccaggtcgctcaaatgccattaattcatgagaaaatctttttaaccttgtcttaggaaaagattttctagagacaataccccatgaacaatccataaa

SEQ ID NO: 262507 - DNA, 419 bp, Homo sapiens
gttagccggggagcaaagaaagggtccctgttgctggccatcggtctcctgggcctgagactgagggcctgtttgatcaggaggagggtagaaggaaggctgccctggtgacctggcagctgtgttcagacgccggaacctgggctggcactgtgggaacctgccacagaggtgctgtgggccctgaggagcaggagcaaggaaactgcaggaggccacagggaaccccaaagccagggctgccagtcactgtgtgactttagatgtccagaacactgagttgggctgacaagactgtcatgagggtgcagatatgacaagacctacacactcacctacatatatgctgccattctagtgccagatgttgtactagaggagaattaataaagaccgaggactcctatgcacatagggta

SEQ ID NO: 262508 - DNA, 310 bp, Homo sapiens
ttggtctccagggggctgcgaattcagggttttggggtgttttggttaaaacttggttccccagctgagatcctagggaactgtggtatcaaaaggaaaaggaagattagaaagggaaaatgaaatctcaggaaaggaaatgcaagattgcatgagaacatcatggtgttttgtgggataggtgatattctgccaaataaagaggcccgcccctccactccttttgcaaacctgagcttttcccctgcctgcagttgagcccagcatacctgtgccttggaaaaagcaagctatgccttccaagtgaaat

SEQ ID NO: 262509 - DNA, 451 bp, Homo sapiens
ctgatttctccctttgggaagggaggcttggaggctgcctggggctgagcagggagcaccatgcttgtaggcctttggggaggtttcgaggtccaagtgtgacttagaggaactgggagatgccagcagacactgagacccaaaggggcctggcttgggacctatgcagctgtgggaggggaaaggccctccccgctaccagatgcagactctggtgccctgaagcctggcgtctgagccagatctgactttgtgtagaagcataaaaggagtaggatgtttgtgatggctgagcgtcatggaggaattcatacctgttcctggagcaatctatttttaaccttgttaacctgaactgtactttaagattgaaactaaatgcagcctcttttctacccatgatttattagacctcccctttctatcaaattaaagctctgcacaaacgaaa

SEQ ID NO: 262510 - DNA, 320 bp, Homo sapiens
caatctacttctagtacactggaagcagctaatgttcagtaagaaaagaatatttttagggccaggtgcatggctcatgcctgtaatcccagcactttgggaacatgaggcagatggagtgcttgagtccaggagttcaagacctgcctgggtaacatgacaaaaccctgtctctacaaaaaagaatacagaaattagccaggtgtggtggtgcactcccgtagtctcggctacttgggaggctcaggtgagagaatcacttgagcctgggaggtcgatgctgcagtgagccatgattgtgccactgcacttcagcttgg

SEQ ID NO: 262511 - DNA, 618 bp, Homo sapiens
catttctctgatgattagtgatgctgagcatcttttcatatacttctaggctatttgcatgttttctttggagaaatatctattcatatcccctcatccatttttaatgcagttagcgtttcttttatttatttatttttgctattgagttgtaggaattcgttactttggatatcaaaactttatcagatagaaatatggtttgcaaatagtttctccaattctataggttggtgtttcactctgttgattgtttcctttgctgtgcacaagctgttcagtttgatgtagtcccacatatctactcttgcttttatttcttgtgcttttgttatcatatccaaaaaattgtttccaagctcaatgtaataaaggttttccccttttttggtatgttttcttctagaagttttacagtttcaggccttaatttcaaatcttaacctactttctgttgatttttgtacagtgtaagatatacactatactcattcttttacttgtaaatatttagttttcccaacatttgttgaagagactgtcctttctctattgtgtattcttagaagccttgcaaaatattagttgatcataaatgtgtggatttatttctgggct

SEQ ID NO: 262512 - DNA, 628 bp, Homo sapiens
  misc_feature (580)..(580): n is a, c, g, or t
  misc_feature (628)..(628): n is a, c, g, or t
cttttgggaccatattcacgtatgtggtctgtcattgtatagataatgtattttataaagctttgatcataaatgtcataaagtgtttaagtatttataattacttatgtcatatatcatttatttctataaatatctctatataagtgtgtatatatatttgcttgcacatgtgtgtacattgacacacataggcatacatatataactgactcaataatttattatagcccaaagatttgattttgtactttttctttcagattctataaatacatgcaagtaattttatttaaaatactactgtttagagtatggaaaaaactgaattgattttagattcccaagagaatgctcatttttaatgagcattctaattgtattacattagagtttatctccagagacaataagggccaatttcagcgaggctttaggtattttacccaggaaatttgctaatgtatataatcaaaccaaataatgaggtataaatacagcgagcatacagttttgtttgaaatatattcaaatgcaatcttgctttgagatggccctgtgaagcataaatctccttccntttaaaacccatcatcataggtttcctgtggtgatgaccagacatcgn

SEQ ID NO: 262513 - DNA, 335 bp, Homo sapiens
gatatctttagccacctagtaattgcacagcttcttttatgcagaggaacgagaggtatgatggggggagggaccctaagtgttttttcagagtgggctttcttcctctcctctcatcggaaattaaaatgaagattgccattgtaacacacatttaagatgtagccgtgatgcctgccaatcagccggatcctctaaaaacaaaaaaaaaagaacctagatttttttttttagaagagaaaatagaatagtttatattgagtgttcttagaatcattgaggtttgttgggattgaactaacataatttataggtttagggagaaactgttcctg

SEQ ID NO: 262514 - DNA, 962 bp, Homo sapiens
tgcgcccggaggacgcggccttagccaatcccagggctacagggcgcttttaaaatgcaggaacctacttcagggaaccatacagaggccaaattcagaatccctacttgaaccgctgaccttttgccctctccaaggccggaagcaagcccttgcctgatgcacgcctcagtcgccccgtctgtaaagtgggcagcccatcaaattcacatctccctggctgagagtcatctggagaaataatgactatgtgacctaatgaaaattgcacggtgcctgccgagcgaggtgggtaagccactggcccaacgctgtcattacaggaggtgaagcagcgcgtgggctgatgactggcaaggggtgcagccgcaggaacctttcatcatgggttcccttgggaggccaggtaggtcagctctgaaagcacccggtgctgcggggcctgccttcctgtggcttcggcttgggcgccatcccaagccgggttggccagaactctgcctgtgcagccccgcccccaggcaagcaggaaacaatgcacctgagcaacctcctcccatctgcagaggaggaagctaaggtgtaggggggtcaaggcactggcctaaggtcccacagccaaggggtggctgggaggtgcaatcaggtctgcctggcacagagtctggtctcctgaccacgatgccaaactggttattattgtcaccacaatagaatactaataatagttgtcgtaattattattattgtggagggctgttctccaggcaggcaggtctgggttgctgcgtcactggggccaggaggctggctagtgcccacaatgaggcagggtcctgtcccaaacagcactaggagaatgctggagatgggaggctgagcccatcctgcagcctgggtcagcagcctggggcctcaccccaccctccatccaatgctgggtggcgggcagcctctccaat

SEQ ID NO: 262515 - DNA, 689 bp, Homo sapiens
tcaacatcctgtcctcggctggacatggtggctcacgcttgtaatcccagtactttggagagccaagtggggagaatcacttgagcccaggagtttgacatcagcctgagcaacatagtgagatccccatctctataagaaaaaatttaaacaaacaaacaaaaatcaacatcttgtccttgcatctcctctgggagatctcagcactacctctgcctgcaagccccccgtgtgggtttcaccccctcctctgcagggaaacagccttggaagttgggatgctacttcccctccatcttagtgtcatagggctgctgaaacaaagtccccaaaactgggtgacttaaaacaacaggaatttattgtctcagttctggaggccagaagtctgaattccaaggtgtcatcaaggccatactccctcttaaacccatagggcaccgtgccctgcctcttcctagctcctggtggtttgccaataatctttggcatttcttggtgtgtagatgcattgttcccatctctgccttcatcttcatgaggctggcttctgcctgtgtctcctcccatcctcttcccttcatgcatgtttgtccctgtgtcctgatttctcctttttgtttttgtgttttggagacggagttttgctcttgttgcccaggctggagtgtagcagtgcgatctcagct

SEQ ID NO: 262516 - DNA, 411 bp, Homo sapiens
gcattttctgctccttgaatccagcattgctccaactttttcccctatgttttctcttttctactgagtagacaagcttagtcgactaataaatctctcagtccttaaaactaggaggatctttttttaagttaagtttgcaagccatgcattcttttaagaattcatgactggaatttcaaagaattatctaagttaacagttttgtatagtctatgagcactgttagtatctcatggtttagaacaaagtatgatccatgaattcaggtatgaaagagagagagttttagtggtattctaaatttaaatataattgaatattagtgggatgtaagctttaaaagttctgtttttaagttttgggcttgttgtatactatggattataaaataaaaacgtttacttcatg

SEQ ID NO: 262517 - DNA, 471 bp, Homo sapiens
aacttggaaggctcctcatagttggtcactcatgctgggcctaggacatggtccttctgaccacatgaccccctgtggcacttgggaaccttgagctgtgagggtgaacacagccccagccttgtgggccccgcaccctcctgtgggagctgtaaccacataggtgatatgggatgtcagcggcaaaaggacctttaggggaaagagccagtgaggtgggatggggtgaaaggccacaggtgcagacaggctgggggctaagcaggggcacaggtgccaggcaccctggagtgcgcactgggagccacaggaggggaggttggagtgaagaggaggccagtcacaagggaccttgtgctgacagtgttctgcttccacttgaaatgagacaaaggactcaatgccaagtgactcaatgccaatgtcaatgactcaaggccaaataaaatgatcccacgtgcattttagcaa

SEQ ID NO: 262518 - DNA, 353 bp, Homo sapiens
gcaacgaaaaacaaacttatagagttccaagtacagatgctccttgacttgtgatggggctgtgtcccactaaatccatcagaagtggaagatatctgaagttgaaaatgcatttgatgctggtaacacagcagatggtccccgacttatggtggttcaacttataacttttttacttcatcctgatgcaaaagcagtaagtattcagtacaaactgtaatcccactgtaagtcataagaagctctttgataaacttaatgttaagtcaaaaaattgtatgtctaaccatcataagttggggactgtctgtattttgtaccttatgaggcttcagtaaaaggcactattttta

SEQ ID NO: 262519 - DNA, 537 bp, Homo sapiens
ctcactttgcctgttttaaaatccacatctatggaatcataccatgtttactctcttatccgtaatgtccttcctgcaacatggtgtttgcgacagtcaccagtgttgttgcgcgtagcactcgtcttattcattctcgttgcagcatgaattctgtggtgtggatgcccgttctggagctgttgggcctatgggttgttcccagttggtggctcctacaaaagacacagctatgaaccttctcaggcatttcttctcatgcatttagaagggaaacatatgttcagctttaggagattctgctttccaaaggtggtagtccaatttacactcccatcagcagcatctgagaatcccaattgcttatttgcctccttagaatttgggattgaggccgggcgcggtggctcaggcctgtaatcccagcacgttgggaggccaagatgggaggatcacgaggtcaggagttcaagaccagcctgaccaacatggtgaaaccatgtctctactaacaacacaaaaatcagccaggcatgg

SEQ ID NO: 262520 - DNA, 453 bp, Homo sapiens
aatcatcctagagagcagattcaaagttatcctaaattgtctgaggcagaaaacataccaagttactacagttctccatcatcacatcccaatacaaggtcttctgaacatggtcgagacattcccactcctgctgcgagaagtctatggccacatccctgaatgtcattgatgcccgaaatggcaaacccatagtgttactggagaaattaaaggaatactttcaagatggatggaggggaaataaggactgtattgcaggaagagagcaatgtaacaagcatgttgtctacaaatttacagtatgagggggactgaagtggaatgtatacgtatttttgaaaaagactgctggcatatagaaaactatgtggcatactctaaaatacttgcaccatttgggaataaataaaataataatgtttgcctatgaaagtaaacagtgaatataag

SEQ ID NO: 262521 - DNA, 646 bp, Homo sapiens
ggctgatggaagctgagaggcagtccatggaggccctgccagtgctgcccccagggaggccagggcccagctcctgtgcctggaggctccgagctttcctctcccaacagctctgcagggagggcagctctggggctcaggcaggtcagtaggatttctcccccaccccagcctgtcttgcttgcgctgctgtaacaaaataccttaggctggtgataggatttagatctgtgtccctaaccaaatcttttgtggaattgtaatccccagtgtttgaggtggggcctggtgggaggtgactggatcttggggatggatcatttttgaatggtttagcaccatcctcttgacactgttttcaagatagtgaatgggttctgcaacagcaggtcatttaacagggtgtagcacctcccccatctctctctcgctcctgccctggccacgtgagatgtctcactccctgtgcatcttctgccatgattggaagcttcctgaggcctccccagaagcctagcagataccagcatcgtgcttcccgtacagcctgcagaaccatgagccaattaaacctctgttctttataaattacccagtctcaggtatgtctttatagcaatgcaagaatggactaacacagctggat

SEQ ID NO: 262522 - DNA, 339 bp, Homo sapiens
gccccctgaagtttgagcattttgtgattcaacacaaacacgaagcagtaactgcggtgttgggcttgtggtgcagtttactgccttcagagagttttcaggatgtgacataggaaggaagaacccaggaggggactggtgggtttcctgagttgagaagacagactgctgaaatgtttccaggcagaccatggcagctagagttcagagggcagagcacaagagacgagattgctgcatagaaagagaactccagagatctgcagagggtcctgcttgaggattcaggcaattcatttctaatggcagcttatctactgaatagattttcaatactga

SEQ ID NO: 262523 - DNA, 483 bp, Homo sapiens
atccagctgtggaactacgccacagcccccagacgtgatccttgagccaaacgtgacacctggcaattgctgggcctttgagggtgaccgcggccaggtgaccatccaattggctcagaaggtttacctgtccaacctcacgctgcagcacatccccaagaccatctcattgtcaggcagcctggacaccgcccccaaggacttcgtcatctatggcatggagggctcccccaaggaggaggtgttcctgggggcatttcagtttcagccagaaaacatcatccagatgttcccactccagaaccagccggcccgggctttcagtgcggtcaaggtgaagatctcaagcaactgggggaacccaggcttcacttgcctgtaccgcgtgcgagtgcatggctctgtggccccgcccagagagcagcctcaccagaacccctaccctaagagagattaaaatttattctttacccccaaaccaag

SEQ ID NO: 262524 - DNA, 536 bp, Homo sapiens
taaacttattatatgtattttttaagttacttaaactctttttgaaacaaaacgagagagggcagtcctaatgctgaggttgtccccactctcctgtcctccatattctgagaggaatgaatcagattggactttcacagttttcatttgtcaccacaggtgtataaggtgtctgtgtcctgggctaatgaattctgattgtgcaaattagcttcttaagcaatagtccctaaatacttggtgatttctaattgccttactaaataccatataattctctcaaaatgttcttttaggaacaccagggggcatatttttcaagacggaggtgctataaaatcaacaaatttgacaagctattcaaattctaaaatggcctggaatatttaactcaaaatattaaaagttcctgtaataacagctgggcacagtggcacatacttgtaatcccaacactttgggaggccaaggcaggaagattgcttgagtccgggagttcaagaccagcctgggcaatatagtgagaacctttctct

SEQ ID NO: 262525 - DNA, 2786 bp, Homo sapiens
ctcagttttctaatctgaaaaatgagaatattaaccatagacaactgccactcactgaacaccagctgcagtagagccgagcatacacgtaatcctcaccgcaaccataggagctggatcctgacatccccatctcacagaggaggagactgaggttaatgacgtggcaaatatccacaatgacagtttctgcaagtctttcctagtgcaatcacccacaaccacagccctagaaagaaggatgaacactcttccacagaggctggcacgcaccttaaggcaggtgcccactggaaccctgtctgtggtgtcaaggattttacagttgaccttgaagaccacctagtccaaagctctcattgtacaaaaagccaagcccagaggtcacataaagctttggacctgagcctctgggccccgcggtctggaaagtgctcctttctctgcatgctacggggctatcaacttgagctggtccagtctgcagatctacatcctgcccgcctgagcagaggcgggtgtgggaccagtgcggatctccacgatttgtcagcccatcctgataagtctgaggctctgaccatcatatctcatcacagcatcattaggattacaagtgccatgcggtagaagaggaagggaaacacgaacaaaaggatgagaaattaagcccatttcacccggaaaagatgactctgatttattgctctatagcagctgacgatggcctgtcagagaaattctgtgttgaaaataaagaataaaaatcacccagagttgttttgccacacatccaaattagaaaatgctactctccggatgatttatgcttcaattttttcccttattcacagagaatttgtccagcattacaagagcacctaagagcaataatacaattcaaaaggagatagaagaggccgcagaggtgttgatgtgcggctgagggcggggtgctggcccaaaggcagggctttggtgctcagaagcattgaccttacagggaggaacaaggagaaaccagccaggcaggccccgcaggcagcccacagagccacttcgccgtgcagccgagggagtcccgcaccacggggcctcgctcagggtagccaccatgggagaatgtccccacctcgtggatgtcaggcttggccacaggtccttggccacgggacctgagcagagtgacatatgccacactggatcagaagcacgctggaccaccacgtggtatggctccctttctttctcccgtcataagtacaagatgttggctgacctgactcctggggtagaaatgtcatgtagacactgggcgcggtggctcacgcctgtaatcccagcactttggaaggccgaggcaggtggattgcctgagctcaggagttcgagaccagcctggacaacatggtgaaacccgtctctactaatttacaaaaaaaattagccaggtgtgttggcacatgcctgtagtcccagctacgtgggaggctgaggcacgagaattgcctgaaccccagaggtggaggttgcagtgagccgagatggtacctctgcactgcagcctgggcaacagaatgagactgtgtcttcaaaaaaaaaaaagcactgtcatgcagggcagggtcccaaggccccagccaacctctcgttgacatgtaatgtaagaagatgtcaactcatgcttatagtcactgacatttaggaatagtctgttaccacggcataagctggtaaaaaaaaaaatcatacagctcttcttcccgggacgcccctgcacctctgctccggtgcacaaatgctttctcttcaaggcatggcgcaaaaaagccactacttccagaagcatctcctcattccccgccgggagcaacatctctcttctcgagaccccagcccctccgctgtctacccatggacttcctcagtgtttgttttttgcatgattctttgtgaccaagctgtttctccagctgccttgaggacatgccctagggaacagtgctctgaatcgtacctggattctgtgcctacctgctccatctaaagcagaaaactccacaactaagatctcttctaacatttaaggaatagagcctaattagcgcatgaatacgtgttgaactgtgaatgaatcaatgagtatggaaactacattatacgcagtgctgatagaaccaagttgccaagggagatatcatctctcctgcaggaaggaagtcctgcctcccactgatccactcagcgcacagccttgaacaaaacagagcaagagttataaccttcagatgtgggggcagaataggacccatttgggcagacacaggccacggaaaccacagggccagcgtcttgagccctcgatcagacgcctcccgcccaccgcggccgcttctccacgcttttgcccagatctctgcaccgcgtggcccggtcttgcctccctgaggaccacactggctgcaacccaaactcgactcttctacttacacttgctcagcatttttgtcatccctgcccttggccaatccctgtcttggtttctgctcttcccacacaaagttttgggaatcaattcatacatatttgagattaaccaaagtccatgatcagttctggaccgctatggattccagatccaccttacgtagccgtgtgagctccggtaaattacataacccatcaaatttctttatctataaagcagcaacaataatgtcacgaaggattaaggtaaagatgagaaatagtatagcaaaatgatcttccaaacctgttatcttttg

SEQ ID NO: 262526 - DNA, 398 bp, Homo sapiens
actaatattacaagggtctctgatccagtgagtggagtttgatagtaatttttgatacaagtgaaaataaataaataaaaataaaaaggtatacagaaaagataaaaatctcttgtaattttactactcactgtatttatttacaattatacataaatttatgttgcatacgtatgtattttattttttaaatgaatgtatgctaaaattccttttttcttttcttttttttgagatggagttttgctcttgttgcccaggctggagtgcaatgtcacaatctcagctcactgcaacctctacctcccagattcaagtggttctcctgcttcagcctcccgagtagctgggattacaggcatgcaccatcacacgcagctaattttatatttttagta

SEQ ID NO: 262527 - DNA, 341 bp, Homo sapiens
tactactactaaattcgcggccgcgtcgaccacagggaaaacagaacaaggacagggagaaacaaatgtttgaatagataatggccaagaattttaaaaaatgaattagatcaaaccacacaaccaaaaagaagctcagacaacccccaagcaaactaaataccatgatgatgataataataataataaaaagaaaatatgcctgtacacatcatagtcaaacttctggaaaccaaacatgaaaatatcttgaaggcaattggaaatttaaaaagaagaaagacacattacatacagaggaacaaagataagaattgcagcagactttttgccagaaaaaa

SEQ ID NO: 262528 - DNA, 398 bp, Homo sapiens
atggaacgtcattcattgaacagagcatctaagatgggacaatatcagaggctataacataagtaaattataagtaaatgggagtctcacagggaaaacagaacaaggacagggagaaacaaatgtttgaatagataatggccaagaattttaaaaaatgaattagatcaaaccacacaaccaaaaagaagctcagacaacccccaagcaaactaaataccatgatgatgataataataataataaaaagaaaatatgcctgtacacatcatagtcaaacttctggaaaccaaacatgaaaatatcttgaaggcaattggaaatttaaaaagaagaaagacacattacatacagaggaacaaagataagaattgcagcagactttttgccagaaaaaa

SEQ ID NO: 262529 - DNA, 394 bp, Homo sapiens
ccaggggctgggaatggggagaggagtgactacagagggacctagattcttcaacaaatacattacaagaggaaaagggaagggaagggaagcctggagattgaaagatacttgagacgtgtgaatccagtgcaatgtatgaaccttgtttgcctcttgatctgaactagccaatcaatcttgtaaaaatgtgcttaagggacaaagcaaatttgaactctggctggatatttgatgatattaaggaaacaacatttaaacatatgacagtggggctatggttatgattggttttgttttttttttctctagagactgggttttgcagtgttacctaagctggtcttgaactcctgggctcaagcagttctcccacctcagccttggtttaaga

SEQ ID NO: 262530 - DNA, 1079 bp, Homo sapiens
cttgactcttgagtggacagtcaaggcaaagtttacttaggaaatgtaaagtatggagtgttttaaaaaattcaaattgagtttattcactgttggaggaattgaattctattgcctccctcatttccattatgttcattgttacaattgtgctgctctgttctcattgtgatgcttagttctcgtgtagaactgagtgctacattgtgattagaaactggagttgtgcttgagtcagtcctggaaaacaggacccatttttaagaagaacggaacataccactttggcattctggctgaccctaatttctgcagagttccttggtgttaaaatcatttgaggtcatagttgctgcttatggtttatatacacaccatctgctgctctaagttcacatcctctcaaaagcatgcaagtgcttgaaatttaaatatttcccagatctaaaacaacttgtgactacctaagaaatgcttgaaccaaataagaaacagcactgtggaataaaatataccattgtgaacatatctgatgctgcaatgaaatgtaaagttccttactttgctgatttttcatcataactccttgactcataaaagcggtgtctaaactgggaacagctgctaatagggtaaaagtattatacatcaaataaaagttcattacaatatttgtactcataagtcaaaatctgacctggttcgctttgtgcctctgtcagcctacttacagtgataaatgtacacacaagtccagtgttgccaaggagctttgtttatagaaagaagcttggtcccctcagttctatgctgttgtgtggcctggttggtacatgccgtcatgatgaaggatgactttggtttgagataatttgtcactccacattccatggagaaaagtgtttcattttgatgttggaaaaacatgaccagagaagcatgtgactcagataatgttccccggaagttgcagagcaatctgtggtgtctgtcatagcccaactagtcctggagcacatggacaattctgtaccccaataatcagaacaataaaatggtagttgtgattcaaaaagcgt

SEQ ID NO: 262531 - DNA, 452 bp, Homo sapiens
gcgtggcatgaagtggccactatggctgtggggacgcagacgtgtggcactgtgaggcgtgtgaggcgtatagaggcacgtgacgtgtgcagaggcgtgcagacgtgtggcactgtgaggcgtgtgaggcgtatagaggcacgtgacgtgtgcagaggcgtgcagacgtgtggcactgtgaggcgtgtgaggcgtatagaggcacgtgacgtgtgcagaggcgtgcagacgtgtggcactgtgaggcgtgtgaggcgtatagaggcacgtgacgtgtgcagaggcgtgcagacgtgtggcactgtgaggcgtgtgaggcgtatagaggcacgtgacgtgtgcagaggcgtgcagacgtgtggcactgtgaggcgtgtgaggcgtatagaggcacgtgacgtgtgcagaggcgtgcagacgtgtggcactgtgaggcgtgtgaggcgtataga

SEQ ID NO: 262532 - DNA, 824 bp, Homo sapiens
ctcaatcagctttatgcagagaagaagcttactgagctcactgctggtgctggtgtaggcaagtgctgctttggcaatctgggctgacctggcttgtctcctcagaactccttctccaaccctggagcaggcttccatgctgctgtgggcgtccttgctggcctttgctccagtctgtggacaatctggctcttgctctgttgcagattggcagatgccgcctccctatgtggtgctggacttgccgcaggagaccctggaggaggagacccccggcgccaacctgtggcccaccaccatcaccttcctcaccctcttcctgctgagcctgttctatagcacagcactgaccgtgaccagcgtccggggcccatctggcaacagggagggcccccagtactgagcgggagccggcaaggcacaggtgggagcccaggagggggatgagcccacagtggatgaggtgggctgcagtgcttggctaagaggagagcaccacctgctcccactgtggggggacgtgctctcctggggggcccttcacagacactgaggacacgcgcaggcccagggtcagggctgagcttccctccagtgcagtaacgaggattccgtccaggctcccatgagcaggccagggctgagacagagggcgttggcaaggatgctgctcttcaggctgtgacccctctgtctttgcagggaggaagtgtggaggaacctcttggagaagccagctatgcttgccagaactcagccctttcagacgtcaccgacccgcccttactcacatgccttccaggtgcaataaagtggccccaagg

SEQ ID NO: 262533 - DNA, 433 bp, Homo sapiens
ggcagccctgggtttgacaaaacagtgcatcttcacgtttcgtgacagcgacttgcgctgtgcctcttcgggtcgaagcttagggtcagtcttgggatgtgcatctctggatgagggcagaggggcgctggctcagggttttggagtaatggctggactgtgcgtccctgaatgggatgagggatttgcttaagcagctagtctctggatatagaggatggcttgggctgttctcgctcagtttggtgggggcgattctggctcagcacccctaggttcttggatggggagttgtcttgggtctgaactctggattttggcagctctgactccattggggcatttatgacttcaaggcagaggttctggcttttggcaataaagaaacaactcagactgtaatactgtaataactccagagtttaatgtcacc

SEQ ID NO: 262534 - DNA, 468 bp, Homo sapiens
cagggatataagaacagaagaaagaaagaggacacttttctcctctccctcatgtacctcaggtatttactaggaaaaagaagaaactagggatgccttgctcccctcttcttagtaactaccctggacatttcatcattcacagacaaatgtcttgttttgatcctactcaaaagatgatttataatcagctataagattttgacaagtgttctcaaatgcaagattccattaactctggagattatgacattgaaaaaaatacagtactcatgaagaactgaaatgttcatgaatatcaagcagaacaagagaacagaatggattgaactaatagaaaacaagtattatttttaacctttttgcttaaaactttggtgatccttgctttgtttttttgagtcaaggatacttattttgacctatttaaaacctttaataattgagtaaactatacgcctgtgaaca

SEQ ID NO: 262535 - DNA, 389 bp, Homo sapiens
cctggtccctctctcccatagacacttggggacaggcctggaccctcatcccagcaggtgggaaggctacctgaggggttttaaggcgtaggagtccttctgtttgtttggttttgttcccctgtagccatttctgctgctgtgaagaaatgagcagggaggtggcaagtgtgtgggtgataatgacaactaatgtttttgagcagtgagtctgagtcaggccttatgcgatgcaaggtccatgcaccgtcttattcaaaccttccacacctgtaaggggttctctttaatcaacccattgtacaaatgagaaaaccaagacttgtgaagattttgcaggttgcccaaggtccccatagattaagagataaagcaagacttcaaatcca

SEQ ID NO: 262536 - DNA, 427 bp, Homo sapiens
gtttgctcaaaacataatgggaaatagaatattatggtgtgatgagtgcaaagtcagaggtatggtgcaggatataatgagaacactggaaacttccactcttttgcgagttcagggaagactactcggacaaggtaattagtgaactgagtttggaaatataaaaataatcaggcagaagtaaatagaatgctaagtattttatatttcaagagagagatcaacatgtttgaaagatattaatttgaaatcagtttcacttaagctccagattccacaagctccagattcaaggactaagacatgatgtatatgatttcccatagatttcctccagcttgttttttttttgtcatggattcaaatgagatgggcacatattaaatatgaaaaggtgtacttgaagccaacagagctcaagcacatg

SEQ ID NO: 262537 - DNA, 467 bp, Homo sapiens
tgcctggtggggagggcagcagacaggagcagactggcaatgacctctccatttagcctagaaggcgagtgtgccagcacctggccaggagccacggtcagctcctcgcacgcaacccagggcctcagaggctacgacacatgggatgttccctcccttctgtctgccagagcaatgacagctgactgtttaaaaattattatggtacaatatacataatgcaatttataatcttttaagtgcacagttcagtggcattaagtatattcacagggtcgtgcaaccaacagcaccctccacctgcagaaatcgtcacctggcaaaacggaaactctacccactatgcactaactcctctttccctctcctccgggccctggcaaccgccattctacctttcgtctctgtggtcttgactattctatgtactgcaaataaatagagtcacacagcgttaaaacttttgt

SEQ ID NO: 262538 - DNA, 593 bp, Homo sapiens
ggaggcaggggacgggggcttcctgaaggaggccccctaaggggaagggggctacaaggctggccagagtgctggccgcgcggctgtgcacagggccttgagcccctccggtcgtcaagccttgcttgaaatgcgtaaatgcggaaaggtgaagtggctgacccggctcacaccactttaagtagcggagtggggttcctagccaggcctatgggactcccactggagcctttccccctctggggctggggctggacccacaggctgccggagcaggcagaaggggaggggcccaaggcccagactccagggcctcgtctggatcatcaacccggctttgcccattcagcgcaggcctccgtttccaggcctgtctccccatccacaccgtctctcaggggtcgtgcaaccaacagcaccctccacctgcagaaatcgtcacctggcaaaacggaaactctacccactatgcactaactcctctttccctctcctccgggccctggcaaccgccattctacctttcgtctctgtggtcttgactattctatgtactgcaaataaatagagtcacacagcgttaaaacttttgt

SEQ ID NO: 262539 - DNA, 342 bp, Homo sapiens
ggaggcaggggacgggggcttcctgaaggaggccccctaaggggaagggggctacaaggctggccagagtgctggccgcgcggctgtgcacagggccttgagcccctccggtcgtcaagccttgcttgaaatgcgtaaatgcggaaagggtcgtgcaaccaacagcaccctccacctgcagaaatcgtcacctggcaaaacggaaactctacccactatgcactaactcctctttccctctcctccgggccctggcaaccgccattctacctttcgtctctgtggtcttgactattctatgtactgcaaataaatagagtcacacagcgttaaaacttttgt

SEQ ID NO: 262540 - DNA, 389 bp, Homo sapiens
aattaataaagcatagtctgttttaaagcctctccttcagtctggagacagaagacaaggccaaatgggtgtctctggaatgatagacttagaaagatctatctctacatgagcagcacattttaatgtattgagttcaagtctagtgtctttcaacttttaatgtgtacatgaatcgcttagggatttgtaaaaatgcagattcggattcagtaggcttaggtcgggcactgagctttggcactcataacaggttctcaggtgatgctgatactggtctacagccttcattctaagggtcaaagtgctagcagacaatgtcttaattggatagaacattagttaactttctgttgcaaatgtagattgcatcaccatttgacattgtg

SEQ ID NO: 262541 - DNA, 475 bp, Homo sapiens
cctttgggggtgattttgggttggcaagtcatgtgtgtgtgggggtctccttccttcagatccatgcatcagtgtgaatgacactcttctaatagatgacaaagaaccagacacctgccttttcacagctggatgtgcctcagaacatggcacacccaagactcagagaggcaagcaccttgcttaaggccacacagtgagacaaggacagagtcagaatctgagcctaggcctcctgccttccagcccagggctcttggggccccacagccttctgagaatatcctatgagaaagttggcttttctttttctttcatgtaggaaacagaaaaacagccaggaatcttgaatgtttatctaaatattctgttcacaaaaaaacattttaaccacatggacttgaatgggcttaaattcagtggcacggggtgtaaattccacataaataaaagcactttggattattgaaaaaaa

SEQ ID NO: 262542 - DNA, 618 bp, Homo sapiens
gtcacaaacaggagcctcagctgggcaccgtggggctatttgcagcctgacagcctctgctgaattattgatgcccctcagtacctcgggacctcctccatgttaacaaatcacactgcatattaaaatttaaagaggcaaatgagggcaatctctttccctattatttccctcttcttttgccatctgagctctaagttttaagtcaatcagcctgaaaggcttctcttaggagatggcacagctcagagagccaagcctaggaaaggaaaactagaggccatgagtgggcccaggactgagtcctgagtcaattaatggagtctgggggctctgggccaggtgagcactgactctctgagtcgtggaaacacctgagtctcaagtgtttccctaaagcagaagataaaaacttttaagttgtggtccaaatttgttgttgttgtttcttagtgaaaagagttgcaaaaattttaaaatcagaaggttttacctaaacctgtttttttttatatttgacgtgctattttgcatgcaaatatagtaaaaactgttttactacctagattaattattccttttattagtataaatgaccttttctctttgttttcatgc

SEQ ID NO: 262543 - DNA, 801 bp, Homo sapiens
aagatgtgggcaagactgttccgagggtcgaaactctggttcaggataagattagcaggtatttcacagagtcgacttaaggaagctagtgccggagagggaagaagtacgaagggcttgccagtgagccttaatgactgattgatcaagtgggagggcactgcactggcggtcagagaactgttctgtcactgacttgctcttgtgataatggtaggctagtgcatttctagctcaggcgcaaatttctcccgactctaaagtcatacacttgccttagatgatgcccagtggtcctctaattaatgattttttttaagcttaaagaccttcatactatacgttggcaagggtaaagtgtagagcctttgtttcacaagaagccagatagtaatttcttctccaggaaatcattccgtaagtcagaatttctcctctgtacccacccataaatgataatacaggccgtattttacctggtgctgtatttgtgtacctgtccgctgtcaaaatccagcccttgaaggcaggcttccttcagatcttcattgccttgcacaatgcaagggtaggtacttccatcttaattgaatttttacttcccataaaaattcttcatggtgacttacattagtcatcattacacatcaccgtcagttttgtaagcacagtgtcattcaaggtattgtaaaattttgagtttgatgatgtgtgacagtttcaattattttagtacagccctaatgagaacaaggccgtagtattgattcccttcaaagttggcgtctaagtgaaggtcac

SEQ ID NO: 262544 - DNA, 8160 bp, Homo sapiens
  misc_feature (5725)..(5725): n is a, c, g, or t
  misc_feature (8155)..(8160): n is a, c, g, or t
agtcccagaaatcctggattaaaggagtatttgacaagagagaatgtagcacaatcatacccagctcaaaaaatcctcacagatgtactccagtatgccaagtctgccagaatttaatcaggtgttactgtggccgactgattggagaccatgctgggatagattattcctggaccatctcagctgccaagggtaaagaaagtgaacaatggtctgttgaaaagcacacaacgaaaagcccaacagatacttttggcacgattaatttccaagatggagagcacacccatcatgccaagtatattagaacttcttatgatacaaaactggatcatctgttacatttaatgttgaaagagtggaaaatggaactgcccaagcttgtgatctcagtccatgggggcatccagaactttactatgccctctaaatttaaagagattttcagccaaggtttggttaaagctgcagagacaacaggagcgtggataataactgaaggcatcaatacaggagtgtccaagcatgttggggatgccttgaaatcccattcctctcattccttgagaaaaatctggacagttggaatccctccttggggtgtcattgagaaccagagagaccttattggaaaagatgtggtgtgcctgtaccagactctggataaccccctcagcaagctcacaacactcaacagcatgcactcgcacttcatcctgtctgatgatgggaccgtgggcaagtatggaaatgaaatgaagctcagaaggaacctggagaagtacctctctctgcagaaaatacactgccgctcaagacaaggcgtgccggtcgtggggctggtggtggaaggcggtcccaacgtcatcctgtcagtgtgggagactgtcaaggacaaggacccagtggtggtgtgtgagggcacaggtagggcggctgacctcctggccttcacacacaaacacctggcagatgaagggatgctgcgacctcaggtgaaagaggagatcatctgcatgattcagaacactttcaactttagtcttaaacagtccaagcaccttttccaaattctaatggagtgtatggttcacagggattgtattaccatatttgatgctgactctgaagagcagcaagacctggacttagcaatcctaacagctttgctgaagggcacaaatttatcagcgtcagagcaattaaatctggcaatggcttgggacagggtggacattgccaagaaacatatcctaatttatgaacaacactggaagcctgatgccctggaacaagcaatgtcagatgctttagtgatggatcgggtggattttgtgaagctcttaatagaatatggagtgaacctccatcgctttcttaccatccctcgactggaagagctctacaatacaaaacaaggacctactaatacactcttgcatcatctcgtccaagatgtgaaacagcatacccttctttcaggctaccgaataaccttgattgacattggattagtagtagaatacctcattggtagagcatatcgcagcaactacactagaaaacatttcagagccctctacaacaacctctacagaaaatacaagcaccagagacactcctcaggaaatagaaatgagtctgcagaaagtacgctgcactcccagttcattagaactgcacagccatacaaattcaaggaaaagtctatagtccttcataaatcaaggaagaagtcaaaagaacaaaatgtatcagatgaccctgagtctactggctttctttacccttacaatgacctgctggtttgggctgtgctgatgaaaaggcagaagatggctatgttcttctggcagcatggagaggaggccacggttaaagccgtgattgcgtgtatcctctaccgggcaatggcccatgaagctaaggagagtcacatggtggatgatgcctcagaagagttgaagaattactcaaaacagtttggccagctggctctggacttgttggagaaggcattcaagcagaatgagcgcatggccatgacgctgttgacgtatgaactcaggaactggagcaattcgacctgccttaaactggccgtgtcgggaggattacgaccctttgtttcacatacttgtacccagatgctactgacagacatgtggatggggaggctgaaaatgaggaaaaactcttggttaaagattattataagcattattttaccacccaccattttgacactggaatttaaaagcaaagctgagatgtcacatgttccccagtcccaggacttccaatttatgtggtattacagtgaccagaacgccagcagttccaaagaaagtgcttctgtgaaagagtatgatttggaaaggggccatgatgagaaactggatgaaaatcagcattttggtttggaaagtgggcaccaacaccttccgtggaccaggaaagtctatgagttctacagtgctccaattgtcaagttttggttttatacgatggcgtatttggcattcctcatgctgttcacttacaccgtgttggtggagatgcagccccagcccagcgtgcaggagtggcttgttagcatttacatcttcaccaatgctattgaggtggtcagggagatctgtatttcagaacctgggaagtttacccaaaaggtgaaggtatggattagtgagtactggaacttaacagaaactgtggccattggcctgttttcagctggcttcgtccttcgatggggtgaccctccttttcacacagcgggaagactgatctactgcatagacatcatattctggttctcacggctcctggacttctttgctgtgaatcaacatgcaggtccatatgtgaccatgattgcaaaaatgacagcaaacatgttctatattgtgatcatcatggccatagtcctgctgagctttggagtggcacgcaaggccatcctttcgccaaaagagccaccatcttggagtctagctcgagatattgtatttgagccatactggatgatatacggagaagtctatgctggagaaatagatgtttgttcaagccagccatcctgccctcctggttcttttcttactccattcttgcaagctgtctacctcttcgtgcaatatatcatcatggtgaacctgttgattgctttcttcaacaacgtttacttagatatggaatccatttcaaataacctgtggaaatacaaccgctatcgctacatcatgacctaccacgagaagccctggctgcccccacctctcatcctgctgagccacgtgggccttctcctccgccgcctgtgctgtcatcgagctcctcacgaccaagaagagggtgacgttggattaaaactctacctcagtaaggaggatctgaaaaaacttcatgattttgaggagcagtgcgtggaaaaatacttccatgagaagatggaagatgtgaattgtagttgtgaggaacgaatccgagtgacatcagaaagggttacagagatgtacttccagctgaaagaaatgaatgaaaaggtgtcttttataaaggactccttactgtctttggacagccaggtgggacacctgcaggatctctctgccctgactgtggataccctgaaagtcctttctgctgttgacactttgcaagaggatgaggctctcctggccaagagaaagcattctacttgcaaaaaacttccccacagctggagcaatgtcatctgtgcagaggttctaggcagcatggagatcgctggagagaagaaataccagtattatagcatgccctcttctttgctgaggagcctggctggaggccggcatcccccaagagtgcagaggggggcacttcttgagattacaaacagtaaaagagaggctacaaatgtaagaaatgaccaggaaaggcaagaaacacaaagtagtatagtggtttctggggtgtctcctaacaggcaagcacactcaaagtatggccagtttcttctggtcccctctaatctaaagcgagttcctttttcagcagaaactgtcttgcctctgtccagaccctctgtgccagatgtgctggcaactgaacaggacatccagactgaggttcttgttcatctgactgggcagaccccagttgtctctgactgggcatcagtggatgaacccaaggaaaagcacgagcctattgctcacttactggatggacaagacaaggcagagcaagtgctacccactttgagttgcacacctgaacccatgacaatgagctcccctctttcccaagccaagatcatgcaaactggaggtggatatgtaaactgggcattttcagaaggtgatgaaactggtgtgtttagcatcaagaaaaagtggcaaacctgcttgccctccacttgtgacagtgattcctctcggagtgaacagcaccagaagcaggcccaggacagctccctatctgataactcaacaagatcggcccagagtagtgaatgctcagaggtgggaccatggcttcagccaaacacatccttttggatcaatcctctccgcagatacaggcccttcgctaggagtcatagttttagattccataaggaggagaaattgatgaagatctgtaagattaaaaatctttcaggctcttcagaaatagggcagggagcatgggtcaaagcgaaaatgctaaccaaagacaggagactgtcaaagaaaaagaagaatactcaaggactccaggtgccaatcataacagtcaatgcctgctctcagagtgaccagttgaatccagagccaggagaaaacagcatctctgaagaggagtacagcaagaactggttcacagtgtccaaatttagtcacacaggtgtagaaccttacatacatcagaaaatgaaaactaaagaaattggacaatgtgctatacaaatcagtgattacctaaagcagtctcaggaggatctcagcaaaaactctttgtggaattccaggagcaccaacctcaataggaactccctgctgaaaagttcaattggagttgacaagatctcagcctccttaaaaagccctcaagagcctcaccatcattattcagccattgaaaggaataatttaatgaggctttctcagaccataccatttacaccagtccaactgtttgcaggagaagaaataactgtctacaggttggaggagagttcccctttaaaccttgataaaagcatgtcctcttggtctcagcgtgggagagcggcaatgatccaggtattgtcccgagaggagatggatgggggcctccgtaaagctatgagagtcgtcagcacttggtctgaggatgacattctcaagccgggacaagttttcattgtcaagtcctttcttcctgaggttgtgcggacatggcataaaatcttccaggagagcactgtgcttcatctttgcctcagggaaattcaacaacaaagagctgctcaaaaattgatctataccttcaaccaagtgaaaccacaaaccataccctacacaccaaggttcctggaagttttcttaatctactgccattcagccaaccagtggttgaccattgagaagtatatgacaggggagttccggaagtataacaacaacaatggtgatgaaatcacccccaccaacaccctggaggagctgatgttggctttctctcactggacctatgagtacactcggggagagcngctggttttagatttgcaaggtgttggagaaaatttgacagatccatctgttataaaacctgaagtcaaacaatcaagaggaatggtgtttggaccggccaatttgggggaagatgcaattagaaacttcattgcaaaacatcattgtaactcctgctgccggaagctcaaactcccggatttaaaaagaaatgactattcccctgaaaggataaattccacctttggacttgagataaaaatagaatcagctgaggagcctccagcaagggagacgggtagaaattccccagaagatgatatgcaactataaaaagggaggagcaagaagatcccagtgcttgccctgcctgccaggaactctgtgataacatagattgatcaacgtgatgttgattacatcagcgtctccttgggacacgccttctgagcctcacatctccttctgttcaaaggcctcattggtatatgatcaatgggttctcctagacactgacctctgtccagggcactttgcagctccatcctcaagttccacacgaagatgcttggatgagtcagctgggaatattgttcttgtgtacctcattgctttagctggtcacttggaactttggagcagaatcctgcacattaaaggatggggttgggggggatacatttattttattttctcactatgtatgcagactggaccccctactactatttgtcacctcacccacagattgtatttatgtctatatatatgttcataaaaagttatgtgatttcctcctctgtcttttccacaacataggactttgaatagcaatgataggaaaaacaatggaacaagggtgggtttgcacagattggagcacattcctgcacaaactaccaagtatactggtgaaatctcgatgggtttcagatattgtcagtgaatcatatgatgcctggatatttcaggtttctgtaaaagaaagggaaacctaaaacaaatacccttccatatataatatatatggaatatgtatattatatatatttttatatatataatatatatggaatatatatattatatatataaaatacatatggaatatatatattttatatatatatatatatttttatttttgagatggagtttcactctttttacccaggctggagtgcaatgatgcgatctcactgcaacctctgcctcccgggcttgagcgattcttgtgtctcagtcttccgggtagctgggactacaggtgtgcaccactatgcctggctaattttgtatttttagtagagatggggtttcaccatgttggccaggctggtctcaaactcctgacctcagatgatccacctgccttggcttcccaaagtgctgggattacaggcgtgagccactgcgcctggcctttttttttttttttttaaacgagaacaagaatatgaagaactggaaatcattaagaaagggtttcccttccttaaagctcaggggtactattagttaggagttgactaactcaacctgtaaaacaccactcctccttccaaagttgtatatataatattgcaggttaaattactttatgtcaggtcctatgaagaaagatacggtttcagactgaaaacatgtttcacaggtgtttgcttccttccagagcagagttccctattcccctggcataaagaatgtatatatattttgaaatatggctgagaacatgtcattggtttgtgaggcctaaggtgaagcactcctggcagccacactgtgtagtgtatttgagggatcagtcatccctcttgtatgctgggcctggttgccctacctcgaacaagcaccagcttttcacacaaggagagatgtggggctgggagtcctctccccatcctattgcatctcctttcttattataagctgttccagttcacaggcagcaaacctcctgggtttgaaaaattccaacttatttttatctttaatcctgacattagctgacttgctagtgagcttgctttaaaaatctacactcttgcattcttaggcatacaggggaaatgttgaaaaggaaggtggaaaaccaagaatttagtttgccaatgattgcctctgattcttgtaagtttgagttccacaagggctaatttattccccttttacttgggttttggggtggtggaaagcgggaaatttgggtgatttgttgattggcaatgaggataaaatgttaatacttttttggggacttaacaactttatcctattctacaagtcagtaaaggaacaattggtactcacctcagtgctgcactcaactatggaaagaggcagagtttgcttgcccaattgccaaactaaagacatcagttcattggtcaaatatttgttacctggaatggaacttgaaagcaaatacatttggatttcaaatttcnnnnnn

SEQ ID NO: 262545 - DNA, 3491 bp, Homo sapiens
  misc_feature (2720)..(2720): n is a, c, g, or t
agctaatatattttgtttggtggaagaagaattgtaaacacgtggatagtatttgtattgggtaactgccggtaatgtcaggtgagccaatcataaatgttggaaaatatagactctgttacctttcaagacttcatattaaaacattgtccctctcttacttcatcttacagcaacgtttacttagatatggaatccatttcaaataacctgtggaaatacaaccgctatcgctacatcatgacctaccacgagaagccctggctgcccccacctctcatcctgctgagccacgtgggccttctcctccgccgcctgtgctgtcatcgagctcctcacgaccaagaagagggtgacgttggattaaaactctacctcagtaaggaggatctgaaaaaacttcatgattttgaggagcagtgcgtggaaaaatacttccatgagaagatggaagatgtgaattgtagttgtgaggaacgaatccgagtgacatcagaaagggttacagagatgtacttccagctgaaagaaatgaatgaaaaggtgtcttttataaaggactccttactgtctttggacagccaggtgggacacctgcaggatctctctgccctgactgtggataccctgaaagtcctttctgctgttgacactttgcaagaggatgaggctctcctggccaagagaaagcattctacttgcaaaaaacttccccacagctggagcaatgtcatctgtgcagaggttctaggcagcatggagatcgctggagagaagaaataccagtattatagcatgccctcttctttgctgaggagcctggctggaggccggcatcccccaagagtgcagaggggggcacttcttgagattacaaacagtaaaagagaggctacaaatgtaagaaatgaccaggaaaggcaagaaacacaaagtagtatagtggtttctggggtgtctcctaacaggcaagcacactcaaagtatggccagtttcttctggtcccctctaatctaaagcgagttcctttttcagcagaaactgtcttgcctctgtccagaccctctgtgccagatgtgctggcaactgaacaggacatccagactgaggttcttgttcatctgactgggcagaccccagttgtctctgactgggcatcagtggatgaacccaaggaaaagcacgagcctattgctcacttactggatggacaagacaaggcagagcaagtgctacccactttgagttgcacacctgaacccatgacaatgagctcccctctttcccaagccaagatcatgcaaactggaggtggatatgtaaactgggcattttcagaaggtgatgaaactggtgtgtttagcatcaagaaaaagtggcaaacctgcttgccctccacttgtgacagtgattcctctcggagtgaacagcaccagaagcaggcccaggacagctccctatctgataactcaacaagatcggcccagagtagtgaatgctcagaggtgggaccatggcttcagccaaacacatccttttggatcaatcctctccgcagatacaggcccttcgctaggagtcatagttttagattccataaggaggagaaattgatgaagatctgtaagattaaaaatctttcaggctcttcagaaatagggcagggagcatgggtcaaagcgaaaatgctaaccaaagacaggagactgtcaaagaaaaagaagaatactcaaggactccaggtgccaatcataacagtcaatgcctgctctcagagtgaccagttgaatccagagccaggagaaaacagcatctctgaagaggagtacagcaagaactggttcacagtgtccaaatttagtcacacaggtgtagaaccttacatacatcagaaaatgaaaactaaagaaattggacaatgtgctatacaaatcagtgattacctaaagcagtctcaggaggatctcagcaaaaactctttgtggaattccaggagcaccaacctcaataggaactccctgctgaaaagttcaattggagttgacaagatctcagcctccttaaaaagccctcaagagcctcaccatcattattcagccattgaaaggaataatttaatgaggctttctcagaccataccatttacaccagtccaactgtttgcaggagaagaaataactgtctacaggttggaggagagttcccctttaaaccttgataaaagcatgtcctcttggtctcagcgtgggagagcggcaatgatccaggtattgtcccgagaggagatggatgggggcctccgtaaagctatgagagtcgtcagcacttggtctgaggatgacattctcaagccgggacaagttttcattgtcaagtcctttcttcctgaggttgtgcggacatggcataaaatcttccaggagagcactgtgcttcatctttgcctcagggaaattcaacaacaaagagctgctcaaaaattgatctataccttcaaccaagtgaaaccacaaaccataccctacacaccaaggttcctggaagttttcttaatctactgccattcagccaaccagtggttgaccattgagaagtatatgacaggggagttccggaagtataacaacaacaatggtgatgaaatcacccccaccaacaccctggaggagctgatgttggctttctctcactggacctatgagtacactcggggagagcngctggttttagatttgcaaggtgttggagaaaatttgacagatccatctgttataaaacctgaagtcaaacaatcaagaggaatggtgtttggaccggccaatttgggggaagatgcaattagaaacttcattgcaaaacatcattgtaactcctgctgccggaagctcaaactcccggatttaaaaagaaatgactattcccctgaaaggataaattccacctttggacttgagataaaaatagaatcagctgaggagcctccagcaagggagacgggtagaaattccccagaagatgatatgcaactataaaaagggaggagcaagaagatcccagtgcttgccctgcctgccaggaactctgtgataacatagattgatcaacgtgatgttgattacatcagcgtctccttgggacacgccttctgagcctcacatctccttctgttcaaaggcctcattggtatatgatcaatgggttctcctagacactgacctctgtccagggcactttgcagctccatcctcaagttccacacgaagatgcttggatgagtcagctgggaatattgttcttgtgtacctcattgctttagctggtcacttggaactttggagcagaatcctgcacattaaaggatggggttgggggggatacatttattttattttctcactatgtatgcagactggaccccctactactatttgtcacctcacccacagattgtatttatgtctatatatatgttcataaaaagttatgtgat

SEQ ID NO: 262546 - DNA, 3738 bp, Homo sapiens
agacaaggagcttgagatcaacctgagcaacatagggagaccccatctctacaaataactgaaaaaaaaaaaaagctaggtgtggtggtacatacctgtggtcccatctactcaggaggctgagacaggaggattgcgtgagcctggctcaagacaaggcgtgccggtcgtggggctggtggtggaaggcggtcccaacgtcatcctgtcagtgtgggagactgtcaaggacaaggacccagtggtggtgtgtgagggcacaggtagggcggctgacctcctggccttcacacacaaacacctggcagatgaagggatgctgcgacctcaggtgaaagaggagatcatctgcatgattcagaacactttcaactttagtcttaaacagtccaagcaccttttccaaattctaatggagtgtatggttcacagggattgtattaccatatttgatgctgactctgaagagcagcaagacctggacttagcaatcctaacagctttgctgaagggcacaaatttatcagcgtcagagcaattaaatctggcaatggcttgggacagggtggacattgccaagaaacatatcctaatttatgaacaacactggaagcctgatgccctggaacaagcaatgtcagatgctttagtgatggatcgggtggattttgtgaagctcttaatagaatatggagtgaacctccatcgctttcttaccatccctcgactggaagagctctacaatacaaaacaaggacctactaatacactcttgcatcatctcgtccaagatgtgaaacagcatacccttctttcaggctaccgaataaccttgattgacattggattagtagtagaatacctcattggtagagcatatcgcagcaactacactagaaaacatttcagagccctctacaacaacctctacagaaaatacaagcaccagagacactcctcaggaaatagaaatgagtctgcagaaagtacgctgcactcccagttcattagaactgcacagccatacaaattcaaggaaaagtctatagtccttcataaatcaaggaagaagtcaaaagaacaaaatgtatcagatgaccctgagtctactggctttctttacccttacaatgacctgctggtttgggctgtgctgatgaaaaggcagaagatggctatgttcttctggcagcatggagaggaggccacggttaaagccgtgattgcgtgtatcctctaccgggcaatggcccatgaagctaaggagagtcacatggtggatgatgcctcagaagagttgaagaattactcaaaacagtttggccagctggctctggacttgttggagaaggcattcaagcagaatgagcgcatggccatgacgctgttgacgtatgaactcaggaactggagcaattcgacctgccttaaactggccgtgtcgggaggattacgaccctttgtttcacatacttgtacccagatgctactgacagacatgtggatggggaggctgaaaatgaggaaaaactcttggttaaagattattataagcattattttaccacccaccattttgacactggaatttaaaagcaaagctgagatgtcacatgttccccagtcccaggacttccaatttatgtggtattacagtgaccagaacgccagcagttccaaagaaagtgcttctgtgaaagagtatgatttggaaaggggccatgatgagaaactggatgaaaatcagcattttggtttggaaagtgggcaccaacaccttccgtggaccaggaaagtctatgagttctacagtgctccaattgtcaagttttggttttatacgatggcgtatttggcattcctcatgctgttcacttacaccgtgttggtggagatgcagccccagcccagcgtgcaggagtggcttgttagcatttacatcttcaccaatgctattgaggtggtcagggagatctgtatttcagaacctgggaagtttacccaaaaggtgaaggtatggattagtgagtactggaacttaacagaaactgtggccattggcctgttttcagctggcttcgtccttcgatggggtgaccctccttttcacacagcgggaagactgatctactgcatagacatcatattctggttctcacggctcctggacttctttgctgtgaatcaacatgcaggtccatatgtgaccatgattgcaaaaatgacagcaaacatgttctatattgtgatcatcatggccatagtcctgctgagctttggagtggcacgcaaggccatcctttcgccaaaagagccaccatcttggagtctagctcgagatattgtatttgagccatactggatgatatacggagaagtctatgctggagaaatagatgtttgttcaagccagccatcctgccctcctggttcttttcttactccattcttgcaagctgtctacctcttcgtgcaatatatcatcatggtgaacctgttgattgctttcttcaacaacgtttacttagatatggaatccatttcaaataacctgtggaaatacaaccgctatcgctacatcatgacctaccacgagaagccctggctgcccccacctctcatcctgctgagccacgtgggccttctcctccgccgcctgtgctgtcatcgagctcctcacgaccaagaagagggtgacgttggattaaaactctacctcagtaaggaggatctgaaaaaacttcatgattttgaggagcagtgcgtggaaaaatacttccatgagaagatggaagatgtgaattgtagttgtgaggaacgaatccgagtgacatcagaaagggttacagagatgtacttccagctgaaagaaatgaatgaaaaggtgtcttttataaaggactccttactgtctttggacagccaggtgggacacctgcaggatctctctgccctgactgtggataccctgaaagtcctttctgctgttgacactttgcaagaggatgaggctctcctggccaagagaaagcattctacttgcaaaaaacttccccacagctggagcaatgtcatctgtgcagaggttctaggcagcatggagatcgctggagagaagaaataccagtattatagcatgccctcttctttgctgaggagcctggctggaggccggcatcccccaagagtgcagaggggggcacttcttgagattacaaacagtaaaagagaggctacaaatgtaagaaatgaccaggaaaggcaagaaacacaaagtagtatagtggtttctggggtgtctcctaacaggcaagcacactcaaagtatggccagtttcttctggtcccctctaatctaaagcgagttcctttttcagcagaaactgtcttgcctctgtccagaccctctgtgccagatgtgctggcaactgaacaggacatccagactgaggttcttgttcatctgactgggcagaccccagttgtctctgactgggcatcagtggatgaacccaaggaaaagcacgagcctattgctcacttactggatggacaagacaaggcagagcaagtgctacccactttgagttgcacacctgaacccatgacaatgagctcccctctccgcagatacaggcccttcgctaggagtcatagttttagattccataaggaggagaaattgatgaagatctgtaagattaaaagtaaggaataaacatttaaaatatcagcatt

SEQ ID NO: 262547 - DNA, 606 bp, Homo sapiens
agggcaagggcatgtgcattgaggctgcatcataccagagttaggtaatcttccctgctgatgactgctcagtaaggtaagtcccacttttgctgtattgtgggggatcaatggcctctttttccctaacaggttcctggaagttttcttaatctactgccattcagccaaccagtggttgaccattgagaagtatatgacaggggagttccggaagtataacaacaacaatggtgatgaaatcacccccaccaacaccctggaggagctgatgttggctttctcttccactgggaaaccttatgagtaacacctccgggggaaggaagctggctaggggtttttaaagaatttttggccaaaggggttggcactttggaactgggaacattggtggttaaggaggggaacatttttttgggaattaaacacaatgcaaaggcattgaagggcaaaaggtggtgtaaagagatcttgcaagaaccaggatgggtaatatatggagttgctctatttagctttgaagggaggtgggcacatttatttcagagacattgtacagtgataatcatggaatctgctatgttatttcccacttaggtaggg

SEQ ID NO: 262548 - DNA, 1177 bp, Homo sapiens
agtcccagaaatcctggattaaaggagtatttgacaagagagaatgtagcacaatcatacccagctcaaaaaatcctcacagatgtactccagtatgccaagtctgccagaatttaatcaggtgttactgtggccgactgattggagaccatgctgggatagattattcctggaccatctcagctgccaagggtaaagaaagtgaacaatggtctgttgaaaagcacacaacgaaaagcccaacagatacttttggcacgattaatttccaagatggagagcacacccatcatgccaagtatattagaacttcttatgatacaaaactggatcatctgttacatttaatgttgaaagagtggaaaatggaactgcccaagcttgtgatctcagtccatgggggcatccagaactttactatgccctctaaatttaaagagattttcagccaaggtttggttaaagctgcagagacaacaggagcgtggataataactgaaggcatcaatacaggagtgtccaagcatgttggggatgccttgaaatcccattcctctcattccttgagaaaaatctggacagttggaatccctccttggggtgtcattgagaaccagagagaccttattggaaaagatgtggtgtgcctgtaccagactctggataaccccctcagcaagctcacaacactcaacagcatgcactcgcacttcatcctgtctgatgatgggaccgtgggcaagtatggaaatgaaatgaagctcagaaggaacctggagaagtacctctctctgcagaaaatacactgccgctcaagacaaggcgtgccggtcgtggggctggtggtggaaggcggtcccaacgtcatcctgtcagtgtgggagactgtcaaggacaaggacccagtggtggtgtgtgagggcacaggtagggcggctgacctcctggccttcacacacaaacacctggcagatgaagggatgctgcgacctcaggtgaaagaggagatcatctgcatgattcagaacactttcaactttagtcttaaacagtccaagcaccttttccaaattctaatggagtgtatggttcacagggattgtgtgagtatgacgagttgatgattcaactgacttaagaactgctaatttataaacactgtaatatttattttcac

SEQ ID NO: 262549 - DNA, 444 bp, Homo sapiens
agagaacatccattcattctaatggaatttccacgtagtgaaggtatgcagatatataatagggaacaaaagagtgtgttctctaagatgttaggaaataacaaaatgcacaatgagatcattagaggctcttgttgggtgctaatcatggagagaaacagaggcatggatatttggtaggacacaacattatatttggttttcattattgtctagaaataaaatattgttaccactataatctcccctccttttgttttattttaaaaataaaataataacgtgccagagagtgaccagctttgttcaaaacctttcccagcaccagagacactcctcaggaaatagaaatgagtctgcagaaagtacgctgcactcccagttcattagaactgcacagccatacaaattcaaggtaccatttacttgtttttcaacttgaaa

SEQ ID NO: 262550 - DNA, 475 bp, Homo sapiens
aaggtgcagctgtgagatgtagttatacacaggacggaatggtccttgactgaagctgcggctttccaatactgtattaaaaaaaatcccaaaacactgatggcactttggtgtttctgggtttgtctgttttgtcccctgcactcccctcttctttttttcccatgaagatgagtgaatctagggctacatgacttgactgtgtaacctggtggccattctgcaaaatgagttaggtggacaaaaattgaagccaatttacctgaatcattttcccactcttcagataatcatatttgttatcagtttcacttgttattgatgatggcgtgatcagaactttggtttatttgtcattgaattttttttctcactagtcgtttaacagaccttggttcggaattttggaaatgatctttggtgtttaagaagccaccatttaacaaaacattttcatttttttcatatattcttt

SEQ ID NO: 262551 - DNA, 315 bp, Homo sapiens
taagcagggcagagacttaggaaagagttgcagttgtgttcaaaagcagtcagctggctgaatttatcctcacttggaaaagctcctgttattccagttgaggagagaccatatcacattctagagatggctgcatgcaagcatttgaaacctttgagagaatacagtgcactctggagactattattatgactattgggagaataatatcaagagtttggaatatgcaccttcctcaagatccccataaaacaaacctcctaaaatcaaatggatcaaataatgagctagataaagaatgtactcacttggaaa

SEQ ID NO: 262552 - DNA, 575 bp, Homo sapiens
tggagggcatctttaagtaatattagtgatctcaggcttataagtagctcaaaataattagcaaattactgagaaatgagtggtttcttatagcatgttttgaattatcgtaggttatacaatctgttttacaattggagagtagtatggactgttttgcaatgtaaatgtgatatacgtgcactggtcagtctgaatgatttcctttaatgatgtatttagaggaatcgtggtgctggacacactgctgtcttagggggactggtagaaagccaatactataatgtcaaggtgacgctgggcagtctgttcacattagccaggtaccctcaagagataccaaccaagaagttcccatacctataagatgaaggctttacggcgaaatgaatagatttcccaaagttaagctccatattgttatcagtgaatttgtaatgattctttcagcctaagttgttgaaggaaagaaggaaaggagggaggaaggaagaaaagaaggcagacacttgtatatatttctaaaggcacctttgctttcatagcaggattattagctatttgagaaaaaaaaa

SEQ ID NO: 262553 - DNA, 366 bp, Homo sapiens
ggtttcaccatgttggccaggctggtctcgaactcctaacctcaggtgatctacccacttcagtctcccaaagcgctgggattacaggtgtgagccaccgtacctggcccatgtacttcttacttagtttttcttcccgcgtcttatgtttacatttgcaattatgtcttcttctttcaacaaatattacaggttttcataatctcaaatatttgtttttagagcatgatgtaatgttcctttgcattaggtacactgattgtgggtttccaacaaaaagttttcaggtctaaaaatgatcacatcatgcagtatacccaggaatcaaacctgcacatctatcccctaagtctaaaaatgaaagtt

SEQ ID NO: 262554 - DNA, 687 bp, Homo sapiens
aatttaccaccctcgttcaagaactgaaagaagagacatcctccagactctccaggcaacaagaggagctggtagagatgctaacaacgctggaggccctgggagaggccatgagagccaccccgtcacaaggagcttttccacacctgccatgcagctgagagccaagccctgctgctctctcccccacgagggggctgggtcttagagcagcactgttcttttcccctccacccaggcctcccgagctgccaggctctgtgctcccacactgactccatctgaggggtccttgaggccagtggatctggagtaccccgcccctggcctggagttcctcctccttctcacgctgacactgcagccagctcctcaatgggcggtgcctccaaatctaaagaatatggaggtcctggagcacaccaagaaatgagggactttttctttgcagaaagtttgaattctgtcttaatgagacagaatgccatacttgagcacctcatcttttgctcaaattgaaatgtcatcgaactgtatttctcaagtcaatggtctgtaaatatgatttatgtattaatctcctaagtgaacaatttatattttatcctctacataattatcgtattatgctttaaatatatatttagtttatcaataaagacattcagtactcaatagcaacttttt

SEQ ID NO: 262555 - DNA, 338 bp, Homo sapiens
aatctaccttaaaacaattaaaaatgttagctccaaactggataatgacagactgcgttgttctttaaacttttggaaatgtgtgttttctttgaatagtatgctataatgtgattggacaacatatgattcctaagtttatttgaataatattggtgtttattatgcatctttcaaaaaaaaagttaaaaagttcaaattaagaagtattatagtcaatctcttccaaggaagtattccaagtaatagtggagctggcccacagattgactaactgctatatgaaattgagacctatgctttagggctttctatggctcgtaatcatatatttataa

SEQ ID NO: 262556 - DNA, 465 bp, Homo sapiens
caaatatttaaatctgttacaaaacagccagtagaatgggaggttgtgtgtgtgttcaaagtatcccctcaaaatgcagatgattggaacaaaagcatgaagggaaaaaacggggacagctgagctgcaactgattacgcagttttcttttatgctttctgaattccaaggtgaaaacgatgactgtgagtctaacctgttacagaggctaaaagtggcttcaaaagcaatgtctaaaagagaacaaatacatgatacaagcattatgtagtcaacatggcactgaaattctttgggctcccggagagtttaggagaaaaccttaactgatttttcttcattctaattattgtcctaacacttagcataatatttgagaaaggaaataatagacaactcctgctcattctccatcaccacaatgagtacttttccttccccttaaataaaatggctccatcaaaa

SEQ ID NO: 262557 - DNA, 500 bp, Homo sapiens
ctaatgtgacaaaaaaacacatggtataataatcattgcattcgtgaattataaagcagcatttcagataagtcctagacactggagaaaacctgaaagactggccaagaagagaaagacatccactcatggcaagaaaggcacctctcttggcacctgccattgctctctgaggtttggtcacactactcatttttataccagcagtgtcctatcagattgtcttcaagcataaagccaagctttgcacaaaagcagaaggtctgtaacaacacatggcccctcacaagaggctatgcacagatggaataagagctagaaacatggtctgcagcagggagaggaataacaattaccatcaaaagtcctctcaggccaaacgcgtggctcatgccggtaatcccaacactttgggaggccaaggcaggcggagggcctgagctcaggagtttgagaccagcctgggcagcatggtgaaaccccgtctgtactaaaatata

SEQ ID NO: 262558 - DNA, 447 bp, Homo sapiens
tccttaaataatgatgctttatataattctaagaaaactcaaaaattttctgaaatcctgccccccaagttcaagatagttttaaatgaggttcttcttcccacattgaggaaattcccacaatcatctaataaattcactctgatatatccattgtgtgatacactcctctgttgttccaacctttatttcacttgatatgaacacagttatccccaaatatacactgtactcccttgcttgccctctgtggcaggttttcagaattttcctccaattgctcctcaaagagcctccagcttcacccatcagagcatacacacccagtttctcctgtgcaggggctggtggagtcagatggctctacttgtctaggaccacatatactatgttcatatttgaatggaaaagggagaaaaagctaaaatacattaaagtgaatggcaa

SEQ ID NO: 262559 - DNA, 358 bp, Homo sapiens
cctccaaccctgtgaatggccattccattcacaggcccattgtgcagagactgcctgacctgccctagctgaatcatcccatttgctctgtgctctgctgcggatgctgtctgccgggcaggcatttgtgtaagacacatagatgggccaaatactgtttgtgtgaggagcatgtgtgagttcttgagctgagaggctgtgatatccacagcatggttatgcagctgcttcctggccaccctcctctccatccagctcttatgtttctccagcaggtctcctacctttgggaatttctgcaccaaaagcaggcacatactcttggtcacatatagtcctgagggcagcccaactccgc

SEQ ID NO: 262560 - DNA, 474 bp, Homo sapiens
gacttcagccattgtcagcgacatgattgtggtggccaagtggaacagccccagggtagatgatgttgtgaagtcgatgtaccctccgttggaccccaagctcctggacacagggacgactaccctgctcctgtctgtcagtcgcctggtgctggtgacaaggaatgcctgccatctgacggggggcctggagtggattgaccagtcactatcagctgctgaggagcatttggaagtccttcgagaagtagccctagcttttgagccagataaaggcctcccaggccctgaaggcttcctgcaggagcagtctgcaatttagcgcctacagaccagcagctagtcctgaagacccctgccgccatcactgggtggctcagattagccttccactttttcctgtagaattagttgttctccacggctcaagagttcagctgtgtgtgcatagtaaagcaggagatctctgtcagt

SEQ ID NO: 262561 - DNA, 702 bp, Homo sapiens
aacataggagattgtactgatttgcactctcactagccatatatgagcatgtcaatttctcctacatctcaccaacacagtatattagcaagattctgatatttactaatctggtaggtaagaaatgtttgtctttttaataatttgatgacccagctggttttcctcagttcctctcgttcctgctttcctcttctcttccatgttccactcccatctctttctgtctatcatcaggtatttttggttgagattttcacgtgcttaaagccattgattgggaagcatccacggaacagatgatctggaagaacccagagttcagatatttgcaggaaactgaattcaacgaggatgatgaaaaaaagcaatgaatcactcttaagaactagacagcagcaaattatcgattcaatacacagttgacctacaattccacagtttctgagatgaggtattataaggtgagacctcagggttactgaagtattgataaggccttctggtcaacttgtcttgtcatagccaaagaatacatgtttggccttaaatggcctaaaattaaaaatatatatatagatatttagcagcatgtccagcacacataactgcaatctagaagagttgcagatacacaaatcaaactcagccagtgggttagcaaggaagctgaaggtgccttgtcctgtgataagcttcctc

SEQ ID NO: 262562 - DNA, 694 bp, Homo sapiens
aaaaaagtttaagaaaacaacagtggtatatgaatttaaaaagaaaaattaagacagtgagatgtagataaagagacagggtagagttctcacttcctggtctaatcaggcattctaaagaatgtacgtaaaaggaaccagagttaagaactctgtcctatatcatgaattaacttgcatgtttcaaagaatttgggactatagaacatattttgggattaatatagtctgaacttagtgtagtagttacttctggtttaaaatagtatctcaatttccttttcaccttaaatagacttaaggaacaaatatatgtgtagtttgcttgacgttttacataaaagaaatttaatatatgaattaaattataattgtgtatttttaggatatatcacattaattaaaacagtgaataatgtggtacatacatataatggaatatatttgacctcaaaaaggaagaaaaattttgacacatgctacaatatagatgaagcttgaagacattatgctaagtgaaataagccagtcacaaaagaacaaatattgtattatttcagttatataaagtttctagactagtcaaattcatagaaactaggatgatagttgctagggtcagggagaagaggggatggaaaggtattgtttaatggatgcagagtttcagtttgagaagatgaataaaaaaaaa

SEQ ID NO: 262563 - DNA, 386 bp, Homo sapiens
gcttgccacccttaccctgcttgactcccaataatgctcatcccccgggaacctactcattatgtttattacgcatggtcagtcttctccagctgaagtggaaactccacaaggcaggaatcttcatcccttttgttactctcccctatcccatgtgcatgccagaaacagggcctggcacattgtaggctctcagagcttgttgactgaatcattaaatccatgctcccccactccctctgcttttgatatagaaacaaaggtcactgaaattgctcatggaaacttgggagttgcagttaaaatagatccctcttacctcgtgcatacatctaatttcattcttccattattttggggtttatatataagcctggttcttgctg

SEQ ID NO: 262564 - DNA, 363 bp, Homo sapiens
ccacttcacacccttctggtgccatgtataatggcatcgtattaccatggccttttgattatcttgaacacctctttggtgctgtcatttgctgagattcagtcatagtggacaggatatgtgtttttattttttttaaagatgactaacacactgtgcatataattctaattacctacccttgacattttatgcgcttagtgcaataaattattttgctagtttggtctaagaattgacgacctgactttagatgtatttatttcgcagcgtggctcatgggtgatgtgataacaagctatgaaacattggaaagcaagcattttattctttaacaccaagttccaaatgggaaaagtacag

SEQ ID NO: 262565 - DNA, 486 bp, Homo sapiens
catcccaaatcaaatgttttttgttcaaatatgaaagagcaataccaaaagttatgttttattttgaagttttaagctaagcttcataaattcaagtaacctataatttttcacaattcaaattttgaataaggacaggagctggctacagaggaaagcaaagtatattattttttcacctacttttgagaattttaagaatcaccagttcagctatacatttttgttaataatatttctcttgcattaagtagcaaactacatcttatagtagcaaatgtagacattcaaggagaaatcaacaaacccatttctctagtaaaaattatatttaccaggaaggtatagactgttcaacaaataggccaggcacagtggctcatgcctgtaatcccagcactttgagaggccaaggcgggcggatcacctgaggtcaggagttcgagactagcctggccaacatggtgaaaccccgtctgtctcaaa

SEQ ID NO: 262566 - DNA, 383 bp, Homo sapiens
tacatgctttgtgtgcattttaaaaaattaatgttctctttattgtattgaaataatgattatatcttaatgcggtcatgttgtgttgatagatttgacctctctgtaggagatgagaattgacagtgaccatcatttggggaagggtgcctttggtggcaagtttgtgctggttcctctgaggctgtctttgagggtactttaggtgttggaagttaaagactgccgctgccctttgtagttacatatataatgttaatgttggctggggtggtgggtcacgcctgtaaaaccagcactttgggaggcctaggtgggaagatcacttgaggccaggagttccaagtccagcctgagcgacatagcaaaaccccatctctaca

SEQ ID NO: 262567 - DNA, 435 bp, Homo sapiens
aaggagggcttttggccaggcatggtggctcagcctgtaatctcagcactttgggaggccgaggtgggaggatcgcttgagtccaggagtttgagacaaggctgggcaacatggtgagaccccttctcaacaataacaacaaaaattagctgggcgtgatggtgcatgcctgtagtcccagctactcaggaggctgaggtgggaggatctcttgatcccaggaggtcaaggctgcaatgagctaagatcaagccactgcattccagcctgagtgatagtgggagaccttgtctttaaaacacacacacacacacacacacacacgagggcctttgaccactcttgagtagaagactcgagaagaacaaagtagaaggccagagaagaacaaagttacttgaaagatctcttattaaagagaatgtacaagctatg

SEQ ID NO: 262568 - DNA, 388 bp, Homo sapiens
gttggacctcatgaagccccatggaccctgttgccccattaacaggggctaaagttcaaaaattagaatgatgagttaagctccatactcttaatttcttcctttaaaaaaaaatcaattttggctgggcgcagtggctcacgcctgtaatcccagcactttgggaggccgaggtgggcggatcatgaggtcaggagatcgagaccgcggtgaaaccccgtctctactaaaaatacaaaaagttagccgggcgtagtggcgggcgcctgtggtcccagctactcgggaggctgaggcaggagaatggcgtggacccgggaggcagagcttgcagtgagccgagatggcgccactgcactccagcctgggtgacagagcgagactcgtc

SEQ ID NO: 262569 - DNA, 617 bp, Homo sapiens
ccatgttggccaggctgtgtttgaactcctgacttcaggtgatccacctgcctgggcctcccaaagtgttgggattacaggcatgagccactgctcccggcctactgtcacttcttaacatattaatctttgtatttctgaccacctcaatatccacagtactcagtccccatgctactctcaccatgtaaggaaagacacttgcttatctgtaggacggctttctcagaacacagcctaaaccgatgtctgctctgtacgatggtggacataccgctgtctaggaaggattaccaagtgacatggtcagcaacacaaccccgttcttgtagctcccttgaaatgattcctttctatgcatctatttgccatgtcgtgtcgtgttgtgcaggtttgtcgtgtgggtatatgtgtgccgtggtggtttgctgcacccatcaacccatcatctaggttttaagccctgcatgcattaggtatctttcccaatgttctccctccccttgccccctaccccctgataggccctgctctatgttgcttccctccctgtgaccatgtgttctaatcgttcaactcccacttatgagtgagaacatgcggtgtttggttttctg

SEQ ID NO: 262570 - DNA, 473 bp, Homo sapiens
ccatctttgtaagatccctgaaagaccacgagattgggattataggaggggtctgaaatctgctaagatgtaggcttagttaaataataacctgccattgttccatagcttgctttcttataatccctaatcattcaggattcatgaatccagacttcacaagatttgtgacttccccaattgctcatatagatacccaaagggggccttttgagatgtttttcagactattgcattcttacaactaactccatttggacccatgactcagtactcaacccagtcctgtggtccccacccaaaggctgactcagctcacgaggacagttttccacacccctatgattttatcttcaaccaataagcactacccattgcttagcccctcccggccaaattatccatgaaaaccctagcttccaagctttcaggaagactgatatgagtaataaactcctatctcttgcttaaaa

SEQ ID NO: 262571 - DNA, 385 bp, Homo sapiens
tccatagcaacttctattctgttcaattaactgcctaatgtgaatatatgaataagtttctgtgtttaaggagaaacccccaaacaacagggtgatttaagagtttgcagttacagatgtaagcatgtcaagtttaccttattttctactttatttttggaaatacatttttgatgtttttaggttctggacataactattggtgaagctgaataaattttaatgaatttctaaatggcctactgaaccagattctcccagtccctcagctactccctggttgtaaattatgcaaatgtacaagctgccttaactctttcaggacaccagggtaccatttggcaagtagctactccagggaacaaatccatcatggaaaaagaaa

SEQ ID NO: 262572 - DNA, 281 bp, Homo sapiens
cacatggaagcgtgagaggaagcaagagagaggggggaggaggtgctaggttcttttaaacaaccagttctcttgtgaactcagagaaaactcactcattactgtgaattcatcgcgcccccatttttaagtgaagctgtgaagctcctttctactactcatcatgcgataaataactatatccggtattagctattgtttccaatagttatcccagtcttaaaggtaggttaggtaccgtgttactcacccattcgctactgaatgtattgctacatccc

SEQ ID NO: 262573 - DNA, 538 bp, Homo sapiens
ctgaaggacacaaccttccccaaagtcctgacgtcgctgtttgctggcaacaaatagagtcaaaagaagagaggcacagaatgtgccaggggtgtgctgcgtacagccccgatgaccacaaggccttcttgggtcaagttctgccatctctggttaagatgggctcaccctctaggaccctgattgagtcctcggaccaccaagagtgccccaccaagagcctccctcttctggtgactcgtgcctgcttcccgtggagagctccagaagggaggaaactgtgaggaggtggagaacgtggcagggatcctaactttcttactgaaggaagttcttcacaagtacccatctgccttcagggaagaaaacataactcattttggtctttcaaattcagttctcaaaaccaaatcctgttgtcagcaatctgtgtcccaacgccttcttcagcaacagcattttccctgtggaattagtttccaatgttctttcttaaataaaccactgaagattaaaaggaatccagatacccaccaca

SEQ ID NO: 262574 - DNA, 562 bp, Homo sapiens
atagtttggcctaaataatggaaagccagccaattcatattcttgaggtattattatttaattgtcaacctgacaattattaccaaaaaagatagaaaattatagaccaacattacgttggtctgtaaaagctgtaaaagcaaatatactagcaacccacactgaaaaaagaaaataatctgccaatcaagtagagtttattctaggattgcaaaagggagttaaaattaagtaatctatcaatataataaattacttcattatagcaaattggaagaaaattgtatggttgcttagtagaagataaaaattcattcattatcatttaaaacacattttcagtaaaatgttttaaaactcatattgatataactcaataaaaaatatcaatctgaaatctgcagccacttatggagaaacaatatagacagtcttatcaaatttggcaaaagaaaaatatgctcacattgtttagtactattctctaagctttagctcttgtaagaaattatgagattagagatattgggattgaaaatcatcatcatttgtagactacaag

SEQ ID NO: 262575 - DNA, 550 bp, Homo sapiens
aagtcaataagtcttagagtctcacgcaaggcctatagtatacttcctgggtatcactactggttattcagggcccaagggctctttagtcagcacatggtaagtcctggcaggactgggtttttcacttcaaggcaatggatttccttctggcccagggtgtgtctagaaatgtcattcaggatctagggcctggaaatgagaactcacaactctgattggtgtcctattttactgtgactgagctggtatccgtgatgcaagacagagatgtctttactctcccctctcctctcttcaagtggaaggaagggatttattttggaactgcaagctgtgcagcttggggttgggggacaagtggtacaagcatttccttagcttccccagctggagtctcagtagctcacatatccccctgagtctactggctcttagccaagtttagcactaggacttgccttgaatttgcagtccttgtggcccagactgcttttctatttttttgacggcaatattagatttattaaagttccatatttaaaaacgc

SEQ ID NO: 262576 - DNA, 897 bp, Homo sapiens
ttgagtttctactccattcttactggacttttttcaatcctttaattttttagtttttgttccagtcaaagtttttagttgcatgaaacagaaactaactctgcctgatttaagtaggaaaagaatttgctgagaggctattgagtagctcacaaaatcatggagcagcaggctcagaaacagtatttttgagcagtggctccgaaggcaccgtcttcttcaagaagtttatccggaagccaatgcacccattggacataaccgggaatcctacatggttccttttataccactgtacagaaacggtgatttctttatttcatccaaagatctgggctatgactatagctatctacaagattcagacccagactcttttcaagactacattaagtcctatttggaacaagcaagtcggatctggtcatggctccttggggcggccatggtaggggccgtcctcactgccctgctggcagggcttgtgagcttgctgtgtcgtcacaagagaaagcagcttcctgaagaaaagcagccactcctcatggagaaagaggattaccacagcttgtatcagagccatttataaaaggcttaggcaatagagtagggccaaaaagcctgacctcactctaactcaaagtaatgtccaggttcccagagaatatctgctgatatttttctgtaaagaccatttgcaaaattgtaacctaatacaaagtatagccttcttccaactcaggtagaacgcacctgtctttgtcttgctgttttcactcagcccttttaacattttcccctaagcccatatgtctaaggaaaggacgctatttggtaatgaggaactgttacttgtatgtgaattaaagtgctcttcttattttaaaaaattaaaaa

SEQ ID NO: 262577 - DNA, 420 bp, Homo sapiens
aagtcccaataaaattttatctgtttaagagacataataaatgtctctactgtgagctactgtctaaagatctacctaacgtaagccaaaataaacaaaagctgggaggagtatgagggagtattgccaaagacaggtacacattaccaaaaaaaaatttaaaaagcaacaacaaaaaaggtctttctaataactagccaaccaccacttcagtgaaaccaagagactgataattactaatactttcaagtttcttctgccttacttggtcatttattatatttgcagttataactgcttaacaccctgaaggattgtgtacttgtttctgaaacagaaggatatgctgaggttttgtaatctgcttcacattgggtatgaaaggaaaaggaacctaggtgaaaaagagacaggagcaaa

SEQ ID NO: 262578 - DNA, 775 bp, Homo sapiens
agccaagaagagaaatatgcaagataattaagaagaaatagactatacttacagaggcaaacaaacacacgattttattggtggtagatatggctgattcatattttgattaaacatcacattgacttaacatgtacatagagttgcagatttacatccaaaatcataatacgtaggtaaaaccaaactcacaaaacacgaatgtcaaggaacttaccaaaaaagaaaaaaaaaatagtaatatgaaatttcaagaaagaatgagagaaacaacgaaaaaactcctatataaaacatagatttacaactaagaaagaatcctcctagataactacaatcttcagctgtgactgtgcatccgtggtgagcagggattttgaatcaagactgcgttaggaagaggctcaagggggcagacagtgccacctccagagaagccactgctcctactcctgcctctcctgctactgccgccacggtcctctgctcctgcagcccccactgggcgccggattccttcttggagtgcggaggtcctgttccttcaggaacgacagacagcttttctccccgtctcctcgtttgctcagccggcaggtgcaggactggagatctgaggtggtcctgcgtctcgaggagccgggcgcccgactgtgagaaggaggaggcaagctatggggagagggggcgacaggaatgccaggctcatgaggccggcggccgcggcccaggcagggctggctgctgcctgggccggatggtaagagatactgtg

SEQ ID NO: 262579 - DNA, 514 bp, Homo sapiens
gcggccgctttggccgagtctgcccaggctttgactcagcagcagcctcccgttcgtgggaaaccggttgaaggctaggaggaccgggcagcaggcctggctgcctttcctccgccccacccggagtggtgaacattccagtccctgccgcctcctggtggagtgtcaggccacctacaaattttgtgggacccctggccgtgtcttcagatacaaattgggtggttggccacacgtgtgcccagggcagattcggaggcaccttttaatccgtcctctctctcctgcaggggccctggctgggagcgaaggcaccgcttactctcccaagatggaagactgggccggcgtgaaccgcacggccttccccgccacccccgcagtgaatgggctagagaaacctgccttagaggcagacattaaatacactcaggtaaccaggaggcacgtgaggccgtgaccttaagtagggaagcagaaggtttgggcaagtggggaaaaagagagagaaaga

SEQ ID NO: 262580 - DNA, 979 bp, Homo sapiens
gcggccgctttggccgagtctgcccaggctttgactcagcagcagcctcccgttcgtgggaaaccggttgaaggctaggaggaccgggcagcaggcctggctgcctttcctccgccccacccggagtggtgaacattccagtccctgccgcctcctggtggagtgtcaggccacctacaaattttgtgggacccctggccgtgtcttcagatacaaattgggtggttggccacacgtgtgcccagggcagattcggaggcaccttttaatccgtcctctctctcctgcaggggccctggctgggagcgaaggcaccgcttactctcccaagatggaagactgggccggcgtgaaccgcacggccttccccgccacccccgcagtgaatgggctagagaaacctgccttagaggcagacattaaatacactcagtcggcctccaccctctctgccgtgggcggctttctccccgcctgcgcctacccggcctccaaccagcacggcgtgtacagcgccccgggcggcggctacctcgccccgggcccgccgtggccgcctgcgcaaggtcctcctctggcgccccccggggccggcgtagctgtgcatggcggggaactcgcggcagcaatgaccttcaagcatcccagccgagaaggaagcctcccagctccggcagcaaggccccggacgccctcagtagcttacacggactgcccatcccggcctcgacctcctaggggcagctctccccggacccgagcccggagggaacggcaggcggacccgggcgcacaggtctgcgcggcggccccggcaatcggcacgggcaggatcggaggactcgcggaggaggaagccagtgccggcccgcggggtgcacgcccagccagcccccaggcccagccctgcctctggccggacccaccacacttcctttattggtctgggtttttaggcttctctgaacttgggttttag

SEQ ID NO: 262581 - DNA, 1506 bp, Homo sapiens
tctgcgcccttgcccactccaagccagacccaggcggtttgcccttggactccgagctgtctggggacccacaggtcacctttggaagtgcgcctgggtgcagtccctcgctccgcgtggggacccttggctaacccgccgggtgttttctccccctccggctcactcttgtctggcgcatccgcagagcagacgtatggcgaggtgaaccagctgggcggtgtgttcgtcaacggccgccccctgcccaacgccatccgcttgcgcattgtggagctggcgcagctgggcatccgaccctgtgacatcagtcggcagctccgcgtatcccacggctgcgtgagcaagatcctggcgcgctacaacgagaccggctccattctgcccggggccatcggggggagcaagccccgcgtcaccactcccaacgtggtcaagcacatccgggactacaagcaaggagaccctggcatctttgcctgggagatccgcgaccggctgctggccgacggcgtctgtgacaagtacaatgtgccttcggtgagctccatcagccgcatcctgcgcaacaagatcggcagcctggcgcagcccggaccgtacgaggcaagtaagcagccgccgtcgcagcctacgctgccctacaaccacatctaccagtacccctaccccagtcccgtgtcgcccacgggcgccaagatgggcagccaccccggggtcccgggcacggcgggccacgtcagcatcccgcgctcatggccctcggcacactcggtcagcaacatcctgggcatccggacgtttatggagcaaacaggggccctggctgggagcgaaggcaccgcttactctcccaagatggaagactgggccggcgtgaaccgcacggccttccccgccacccccgcagtgaatgggctagagaaacctgccttagaggcagacattaaatacactcagtcggcctccaccctctctgccgtgggcggctttctccccgcctgcgcctacccggcctccaaccagcacggcgtgtacagcgccccgggcggcggctacctcgccccgggcccgccgtggccgcctgcgcaaggtcctcctctggcgccccccggggccggcgtagctgtgcatggcggggaactcgcggcagcaatgaccttcaagcatcccagccgagaaggaagcctcccagctccggcagcaaggccccggacgccctcagtagcttacacggactgcccatcccggcctcgacctcctaggggcagctctccccggacccgagcccggagggaacggcaggcggacccgggcgcacaggtctgcgcggcggccccggcaatcggcacgggcaggatcggaggactcgcggaggaggaagccagtgccggcccgcggggtgcacgcccagccagcccccaggcccagccctgcctctggccggacccaccacacttcctttattggtctgggtttttaggcttctctgaacttgggttttag

SEQ ID NO: 262582 - DNA, 495 bp, Homo sapiens
acacacacttcactccctggcttgccttgtatgggggtgagtatggaaccccgcagggactctgggctctccccacagagtcccatctagacctaaatgcagtcccaggtcccacaccccaacccccctccccccaccactgccacttccaaacccgccccgcagtctactgtgggaaggaggtggggtaggagggttctgagtgcctcccacacccagggcatgagctcagcagcctcagggttctggtgcttcctaggcctgactttacaatctctgcaggatctctcagtgagcatagctaccccaagcccctgagaatcgtgaatcccagagacagatgcctggagctgcttccagccctggggcaggcctcaaggggctacccactaggacccgtggccctccagggatgggaatgattgttttaatcacttttattttctaaatattaaagacattcttccttagtgaaggatatttggaaagcattga

SEQ ID NO: 262583 - DNA, 618 bp, Homo sapiens
gtcacacctctcagtagcttccctcatccacaaagctggtaatacaagcacgtggaagtgcattcatcgtacggttggagctcctgatctgtgaaaggactggaaatgtaaaatgcgctcttcaagtacaaaggcagagaggatccataaacaggcacaggctgccctttggtataaactgttcacattaaatcttgttatctatttattacatactaattcaagattttttctcagggtggcatgcatattcagtagtgtttgtgtattgtactaaaccctgttcttactgaactgagattttgcattttttataagcagagcttggaagctgaacccttaagtgtctaccctggtcttgtggcatttcatgttgagagcaccaaaatattccctgtgtcatgggaagggtagattatgagagaaagagcagataaactcctgggccctagggtggttttttttttttgtttgtttgtttttatatcatgtatccacaatgatcatttggaaggaatccaagtgaatcaagtgtgagtcaaacagcattgtttatagatgctgttgtagtctgttctatgctgccgtagtggaataccacagactgggtaatttaca

SEQ ID NO: 262584 - DNA, 530 bp, Homo sapiens
aataaacagtccctttattaaaggctccttaaattaccaaagtcaggtttgccatctgttccctgccacgactctaaatgataaaactgcttttgaaattttaagttgctgtctaaatgcaaggtatttctcgtttatctctgtgtagcactttacacaaagcagattgctgctattaataataaatggtgaaatgaatatatgcaagaatgaatgagtgaatgatcctgcccccttccactttagttacagtcttatgctggggatatatccttgtcaccttgattagattttgtaatgccctgatttgatttgggaggtccccttttcccttggaactcaccgtctcttagagtatctgcagaaatgtcagcccttgtatatttctagtggtttaacttgaaagggccaactttgtttccaatttctagaattatcccccttctctaggctgcacatttacttgataccaaaaataggttacttatttgtttattcatattttttcttcttcaacataaaaactggca

SEQ ID NO: 262585 - DNA, 214 bp, Homo sapiens
ggtacacatactattccttttactgcccgatagataaaagactggattaggacccagagagacctcccttattgaaaagatagtcaaagaatttgaccttattgccatcttttaatagtatataaccgatattgtgtgttctttcatttctatctgtgcctctctgtagggattagagatggggaattagctttatcaagcctttgggtaaaat

SEQ ID NO: 262586 - DNA, 364 bp, Homo sapiens
aaagaggtaagtctattgaaatagagatttaatttgcctcttttattgttaatttcaggacattcaacttggaaaatgtccatttctaaagcattacgtatagaaaaacactatttgggccaggcatagtggcttacacctgtaatcccagcactttgggaggccgaggcaggtggatcatttgaggtcaggagttccagaccagcccggccaacatggtgaaaccccgtctctactaaaaatacaaaaattagccgggtgtgctggtgggcaccagctactcaggaggctgaggcaggagaatcacttgagccctgtaggtggaggttgcagtgagcagagatggcgccattgcactccagcc

SEQ ID NO: 262587 - DNA, 1181 bp, Homo sapiens
tgcacttcaccaagttccccacctgattctggatgtccaagaaccactggtacctgggctgattagggaaggcctcatggtggggcgctgccagatagagactctgaaaaatgaccaggactgtggccaggaaagacattccagccagaagcatggagtgagggtgggaagcacctactgtatggcaggcaccgttccgcacacacatttgttaatgcacacagttccatgtcagtcctatgatgtaggtgctattcttatcctccctgctttccagataaggaaacaggcactgaaggggcaactgacttacctactgtcacagtggtaagtagcacagcccagattccaacccaggcagtcctggtgtacatgttggcatatactgagaagtcgtagcaaatgaggttgaaaagataagagtggggctgaaccatgcaaagccttgaatgctaatacaaggtaaatttggacctcacaacaagcagaggtgggccattggcgggttttgagtgagacagtaacttgattcacccccaaactaaggagtccttatctatgtgatcagtgccatccatgtcctgtgctgtagggtacatggccggcttcccgagcagggttggtggcagctggcagtggttggtgaatgtccaggaagtcttaactcaagccaccccaaggctgtgattcagaacattttcgtggtccgtctcatctccacctcacgggacagagctggaaggctgtttggtttggccagcgaccgaaagcagagggagccaagagtcacagagtgaagggcaatgtgtgccttcaacagggccctccctctccgccccactctgccttgccccacccctgtccctgggaagggcatcttttagagttaacttttctcattgccatccaaaaatagcttgcttgtttaactagtttgttgtttaaaaaataaacataaaagcaataatacagtcataattttaaaattcaagtactaacaggaaaattaagtaacagactaacggtcccacttctgacttcttagtccactccccagagataaccaatatgaagtttttggtgtatccttccaaaatttttctgtgtatgtgtcacatgtatgtatatatatatgcatccttttagtccttttttacataaatggcatcataccgactaat

SEQ ID NO: 262588 - DNA, 365 bp, Homo sapiens
tattaaaacagccaataaacatatgaaaaaaaatccttaacatcactcatcagggaaacgcaaatcaaaagaaagagatacaggtctggtgaggtggctcatgcctgtaatcccagcgctttgggaggcaaggtgggtgaatcacttgaggtcaggagtttgagaccagcctggccaacataccgaaaccctgtctctactagaaatacaaaaattagctaggtgtggtggtgggtgcctataatcccaggtacttgggaggctgaggcaggagaattgcttgaacccgggtggcagaggctgcagtgaaccaagatcacgccactgcactccagcctgggtgacaaagcaagactccgtctcaa

SEQ ID NO: 262589 - DNA, 865 bp, Homo sapiens
gtcgaggcgggtggtgaatcggcaccgagggtgtgacagtattgggaggtggtgcctttaagagatgattagatggttaagagggatgaatgccttactcttgcagtgagttcttgttctctcagttctggattagttcccatgagagtgggttgttataaagcaaggctgccttttgcgtttggtctcttttgcttgcccgtccacttttctgccacagtataatgtggcaggaggccctcaccagatgcagctgcctgatcttgaacgtcctagtctctagaactgtgagcctaataaacctctttcctttataaattacccagtcttaggtatattgttatagcaacagaaaacggattaagacatatgttgtacttgaaccttaatgtacttgaacttgaagtttgatggctgcagcagctatagccatcttacttccatgtgaagcctaagaattaagcaacacatggaagggaacacatcttttgagccccaatttggccatgagttgcccttagatttttttagttatgtgagccaatacatttcctaaaacaggtaaaattatgtttttagacactgataaccaaaacaggtcaaactatgcttacggcaatttgctttaaaagagaactagacagagagaatttgttgccttttgaccaatgcttccatgagagagctgatattctgattcctgacctcaaccactatttgattggcagatgtacacttacacactgcataatgacattttggtcaatgatgggcgcttgagcccaggaggtcaaggctgcagtgagctgtcattgtgccactgcactccaatctaaatgacagagtgagaccctgtctcaaaaaa

SEQ ID NO: 262590 - DNA, 597 bp, Homo sapiens
ggacatactctgtggtaagcaacgtgtttgtaacctctttcctttataaattacccagtcttaggtatattgttatagcaacagaaaacggattaagacatatgttgtacttgaaccttaatgtacttgaacttgaagtttgatggctgcagcagctatagccatcttacttccatgtgaagcctaagaattaagcaacacatggaagggaacacatcttttgagccccaatttggccatgagttgcccttagatttttttagttatgtgagccaatacatttcctaaaacaggtaaaattatgtttttagacactgataaccaaaacaggtcaaactatgcttacggcaatttgctttaaaagagaactagacagagagaatttgttgccttttgaccaatgcttccatgagagagctgatattctgattcctgacctcaaccactatttgattggcagatgtacacttacacactgcataatgacattttggtcaatgatgggcgcttgagcccaggaggtcaaggctgcagtgagctgtcattgtgccactgcactccaatctaaatgacagagtgagaccctgtctcaaaaaa

SEQ ID NO: 262591 - DNA, 861 bp, Homo sapiens
gagatggagtctcgctctgttgcccagtgtgacagtattgggaggtggtgcctttaagagatgattagatggttaagagggatgaatgccttactcttgcagtgagttcttgttctctcagttctggattagttcccatgagagtgggttgttataaagcaaggctgccttttgcgtttggtctcttttgcttgcccgtccacttttctgccacagtataatgtggcaggaggccctcaccagatgcagctgcctgatcttgaacgtcctagtctctagaactgtgagcctaataaacctctttcctttataaattacccagtcttaggtatattgttatagcaacagaaaacggattaagacatatgttgtacttgaaccttaatgtacttgaacttgaagtttgatggctgcagcagctatagccatcttacttccatgtgaagcctaagaattaagcaacacatggaagggaacacatcttttgagccccaatttggccatgagttgcccttagatttttttagttatgtgagccaatacatttcctaaaacaggtaaaattatgtttttagacactgataaccaaaacaggtcaaactatgcttacggcaatttgctttaaaagagaactagacagagagaatttgttgccttttgaccaatgcttccatgagagagctgatattctgattcctgacctcaaccactatttgattggcagatgtacacttacacactgcataatgacattttggtcaatgatgggcgcttgagcccaggaggtcaaggctgcagtgagctgtcattgtgccactgcactccaatctaaatgacagagtgagaccctgtctcaaaaaa

SEQ ID NO: 262592 - DNA, 346 bp, Homo sapiens
gcatcttcttaggttagcattcccagatagcttcatcagaaaagttcaaagatatccatgtcaggtgtgttaatgaaaataaaaaagctgggtgtggaatcccaggactttgggaggccaaggcaggtggaacatttgagctcaggcattcgagactagcctgcgcaacatggggaaactccatatttacaaaaaaattacctgaacatgatggctcatgcctacggtcccagctactcagaaggctgaggtaggaggatccttgatcctggaaggtcatggctgcagtgagcctagatagcacgactgtatgccagcacgggtgatagagtaagaccctgtctca

SEQ ID NO: 262593 - DNA, 508 bp, Homo sapiens
gagtagctgagactacaggcacacgtcaccacacccggctaattttttgtgtttttagtagagacgggggtttcactatgttggccaggagggtctcgaactcctggcctcaagtgatccgtgtgactcggcctcccaaagtgctaggattacaggcctgagccaccacacctggccaagattttcttttttgttcctacgtataagtgaggacatgtaatatttgtcatgctgtgcctggcttatttcacttaatatacagacctgtaatctcatccatttttttctgcagtggagaggattttactcctttttaggctgaataatacttcattatgtgtgtataccatagtttcttaattgaaacaaatttctaaaaagcaaatatttttaaaatgtctcagaatgcgaaactttagggatactgtgcccattttattcttttctacttcccattttatgtatatgcaagtgtatgtaataaagcagcaatcaatgtatcaatcta

SEQ ID NO: 262594 - DNA, 245 bp, Homo sapiens
gagaaagatactctgctagcttcagattcattagtactaggaaatggagagataggaggtataatgtattagggaagcaagggattcagaaccaggtgcccactgactctgagaagcactggatgcacagagggtagcagacaagcaagagggtggaatttgcagcatctcatcttggtgagacagttggaagacttttctgccaattatagtggttaaacactgactcaacatcaaacaacggc

SEQ ID NO: 262595 - DNA, 196 bp, Homo sapiens
ctccagagccccctatggaggcagaaccttctccaatccagcaggaggccacagttcagactccagagccccctatggaggtagaaccttcaagccagcagctggtcccagctcagcatccagagtcacctaaggaggttgcagctcaacctccagtgcatgagatgacaattccaatagcaggccaggaccaagc

SEQ ID NO: 262596 - DNA, 297 bp, Homo sapiens
acccttggtttggggtcctgccctcctgaagccaggacagataagagaaaccactcccagcaaaaagttcccaggggtaggtgcaacagctcatgccggtactcccagcactttgggaggctgaggcaggaggattgcttgaggctgagttcaagatcagcctaggcaacatagcaagaccccatatcttttctattttttaaacagggtctcaccctgtcatccaggttgacatgcattggtatgatcttgactcactacagtctctgcctcctaggctcaagtgatcctcccacc

SEQ ID NO: 262597 - DNA, 1018 bp, Homo sapiens
cggccgcccgcctccccggacgagccgtcggtggccgcgtcgtcggtgggcagcagccgcttgccgctcagcgcctcgcttgccttctccgacctcaccgaggagatgctggactgcgggcccagcggcttggtgcgggagctggaggagctgcgctcggagaacgactatctcaaggacgagattgaggagctgcgggccgagatgctggagatgcgggacgtctatatggaggaggacgtgtatcagctgcaggagctgcgacagcagctggaccaggccagcaagacctgccgcatcctgcagtaccggctgcgcaaagccgagcgccgcagtctccgtgccgcccagaccggccaggtggacggcgagcttatccgtggtctggagcaggatgtcaaggtctctaaggacatctccatgcggctgcataaggagctcgaggtggtggagaagaaacgggcgcggctggaggaggagaacgaagagcttcgtcagcggctcatcgagactgagctggctaagcaggtgctgcagacggagctggagcgaccgagagaggtgaggacctcatgcatccagcagggccagcctagggcaggtgggcacatgcaagcccccccaagccagtgtctctgtgagcccccgcttgtgggaaatgggcagcttatgcctccctggcaaggttgtttattcattcattcctccaacatgcatttcctgagcacctactgtgtaaattgtgtgctggacactaaggttacaatggtgaacaaaacacacccagttcctgtcctcagggagctcacggggtaatgagagagagagtcattcatcaaagaaccacagccgctgtgggaggattaactgagaaaacatgcaacaatgtcaggcatggggctcagccctctgtgcctcagtttccttacctatacaatggggcagtggtgccctgagtcattgtgaggaccaacaggaataacgcatgtggagtggctgcaagagactgcgagatcct

SEQ ID NO: 262598 - DNA, 603 bp, Homo sapiens
cggccgcccgcctccccggacgagccgtcggtggccgcgtcgtcggtgggcagcagccgcttgccgctcagcgcctcgcttgccttctccgacctcaccgaggagatgctggactgcgggcccagcggcttggtgcgggagctggaggagctgcgctcggagaacgactatctcaaggtgggggcgcccgggtagaaagggaggtcgcaggggtcgccggctgtcacagtcccgcgggcctgaggcaccagccggccctccttcccactgaacaatccggagaaaggggcccaagccctctggggaccactctgaggtggatctggggctccctcattccccccgccccctctcaactttatttgggaagcgcgctcctgaaaaagaccttggaactggctacagggccctaacctgggagcggggacttgagaaagctttggagcgttctgggaggcgttgctgaggtgggggtgggtagccagggaagggatggatctctgccttcagctgcccagaacctccacgcccaggctctccttcttgggacgggattgatagacaccgccgccagggaaacctgtggccatcccctgcccagga

SEQ ID NO: 262599 - DNA, 953 bp, Homo sapiens
ggctaacacggtgaaaccccgtctctactaaaaataaaaaaaaaaaattagccaggcgtggtggcgggtgcctgtagtcccactttctggggctgtgctgtgatacagatgctgagagcttgcggtacctaggtttgggttttggttctactgcttccttcatgagtttcttggtctctttgtgcctcagtttgctcatctgcagcgtggcagtgatgcgataggaacctgcctgtctctagggttgccctgctgtgaaagtcgggtggtcagtgggacttgcagtgggggctctcctcagcctgctcacatccttctctctcccacccctgcacaggtctctaaggacatctccatgcggctgcataaggagctcgaggtggtggagaagaaacgggcgcggctggaggaggagaacgaagagcttcgtcagcggctcatcgagactgagctggctaagcaggtgctgcagacggagctggagcgaccgagagaggtgaggacctcatgcatccagcagggccagcctagggcaggtgggcacatgcaagcccccccaagccagtgtctctgtgagcccccgcttgtgggaaatgggcagcttatgcctccctggcaaggttgtttattcattcattcctccaacatgcatttcctgagcacctactgtgtaaattgtgtgctggacactaaggttacaatggtgaacaaaacacacccagttcctgtcctcagggagctcacggggtaatgagagagagagtcattcatcaaagaaccacagccgctgtgggaggattaactgagaaaacatgcaacaatgtcaggcatggggctcagccctctgtgcctcagtttccttacctatacaatggggcagtggtgccctgagtcattgtgaggaccaacaggaataacgcatgtggagtggctgcaagagactgcgagatcct

SEQ ID NO: 262600 - DNA, 622 bp, Homo sapiens
gttatttcaggtgaacatgcagatttattttctctgcctacggctacttcgttgtctattccttccctgcccatcattatccttccctctcttttatgacacttgtatgtctccatgtccatctggctggggtccctttgatgaccctgttctccctgctcttgaattagagaccggtggctattgctgagcctgtccccgccacagggccttcttcccatggtgccctctccttggactttcttcttccagtttttctcatgggtggctgctcagcattcaggtcatgtcagctcaaatgtcacttcccccaggaggcctgccctgatcacctccctgccgagggagcccgtccttgcccaggcacaacctccgtacctgggtatctccctcatagtgcagctaactttctaaatgatgctgttttcgtctttgccatccttcttcccccagcactggaatgcaagctctgcaaaactgaattcctggtatccttaaaagtgactggcacacaattggcactcaatatatatttgttgaagaaataaatcagaggcagagacaatgtgcaaacacagggcctcctgacccccaggccactgtcttgtgactacgcgatgtg

SEQ ID NO: 262601 - DNA, 428 bp, Homo sapiens
tgagggtaagtttgaaaaatgattacatacctattttaagtacctttgaaactgcattttatgagtgcctcttaaaaccaaagacgagtgtaaatgccattgtgttaagttgtctctgaagtaaacttaattatccacatgtttggcctgcacgttaccttgacccatagccagaaactaactcagggaaacttcagagataataggaccctagagggcagatacaggccaaggttagagtacagtatttgtcccatcctgaattcacctaggaaggtttgctgtataatgcttatgttccaattttgttacaggaatctagattctggtttcctttcttatcctaacactaagcccacaatagaaatagtgaataattcattctagcattcagaaaataatcaaaatgcatttttcttatcaatata

SEQ ID NO: 262602 - DNA, 226 bp, Homo sapiens
atggtccaatgactccagcttccagacaaagtacagatatatcctgcacatccactgttcataaatgatatgccaccataatggctcttgaaaataccttcttttgggccaggcacagtggctcacccctataatcccaacactttgggaggccgaggcaggcggatcacctgagatcgggagtttgagaccagcctggccaacgtggtgaaaccccatctctact

SEQ ID NO: 262603 - DNA, 792 bp, Homo sapiens
ccacctctctttggaactgtcataattctaaaggtttggggaggaaaccttagttctcttcatatacattaagttttaaatatgagttggtttagctatggcactggcattaacacaagccagagataggtggaaagtccatcaagccctatagcctagcataatcaaacctgaaccccggggtacagcacacacccagcagtccataaagcgctcttcagtaaccgactttgtcaaaaataaaaaaataacctggaagaataaacagtcctctttggaacagggcagactcttggatctgttaacctctttaagcctcagtttcctcatctgtgaaacagaaataacctcctgggaagaggttgtaaggtttaaagagaaaatgaagagccttccacattgtgtaggggagagttcctggtccattagcccttcataaaaaccagtgcctgccctttccttccaacagaagaagggggtggaggcagataagacaagacacgaaaacgtgaattccatcgattgactgcgaggggctagggttcacagcaagcagaacgtcctgggtttctcttcaataccacctcctcctctcctgttcagatgctgagaaacatctggcgcagtagagatgctgcctctgacatttctatgacaaaacgcgtgcctgtgctagggtttgcacaggcacaagttatcacaacctcgggatggggctggggatggcggacaggagctcctttaatttccccagctggcctctccccttgtgaggaacttctcattgcaata

SEQ ID NO: 262604 - DNA, 922 bp, Homo sapiens
tttaattcctaccatcttggccattagaatactgggctttaaatttaagagaaagggaaatggctgaaaggcccaccacaaaattacacagtggcaaaaccaggagaaaagctctacagttctggagctccttgtaaactccttgggcgactggaccaagttttccatcactaccaacctttccctagccccaacttgctgagagaaggaggaatcactaactgtactatattgccatattcactaagaacagtcagttcagggcaactaagaactactttacctctctggatgaggggaggaagggaaggattctgttcttaaacatcatcattattagttaacatttgttgaatagcaactatgtgctaggcactgtgccgagtatctcatgaattatctaatttagtcctcatggtttgaaaccaggaggcactattattattcctagcttgttttgtttagtttttttacagacagctgtctagctctgttgcccaggctggagtgcagtgatgcgatcatagctcactgcaggctcgaactcttgggctcaagcgatcctcccacctcagcatcccaagtagctaagaccacagaagaagggggtggaggcagataagacaagacacgaaaacgtgaattccatcgattgactgcgaggggctagggttcacagcaagcagaacgtcctgggtttctcttcaataccacctcctcctctcctgttcagatgctgagaaacatctggcgcagtagagatgctgcctctgacatttctatgacaaaacgcgtgcctgtgctagggtttgcacaggcacaagttatcacaacctcgggatggggctggggatggcggacaggagctcctttaatttccccagctggcctctccccttgtgaggaacttctcattgcaata

SEQ ID NO: 262605 - DNA, 420 bp, Homo sapiens
ggcttggctgctggcttctgtggttctgctactcccactacctagagaacgccccgggccgcgccgatcctcaccagctcaggagcttcttgtccgtaggagaggctttactggatgtggggttcggtgtttatggagatgcagcccttctccctccagcttcgtgcgtgtgtgcacagacagcgagtgaggccgtcagggtgggctcctgccacgtcttggcccctccccagagtcgctggacttaggagctagtctgcatgtgacagaccttcccagtcagtggcaggcgtttcccgggacagtgtctgtgtggcggtcggcgtgtgtgcagctgcctgtacatgctggaccccagactcccttgtccttgcgatgttcatgccagggtaatgcaagttgaatcaaatcgtggtgcca

SEQ ID NO: 262606 - DNA, 464 bp, Homo sapiens
cagccacatcagggagaagaatcaatggaaatgaagtctgtccatggactaagtatgggcccctatgttcctggaactgtgtaagcctgtgattcttgtaggattccatgcaggggagtaaaagggcttgaataataactgagatttgatttcctgcaagatatgcaaaagagggctcaaagtgggtgacatacggcttagaataataaggaatataacctgtcttacactctggtgttatgaactcagtgatagctacaactgattacataagaaactgagaaactgagatcaaggcatgttccatgccatctccagaggtccccgcccagaagtgctcaaccaaattaattccaaattaaggagattttgtattacatgtgtttataaaatggaagaaatttttgcctcttcccttcccttttcctctaagactaatttaaatacaagtaatttaaaagtta

SEQ ID NO: 262607 - DNA, 346 bp, Homo sapiens
tcggcataatttgggaagtggttaataagggagtatttataaaggcatggcttagggaaacctggaacctagaatgaagttatattgagagggttaccttcatcagagctgagatcacccacatggagggagctggaggaataaataccctgacctcactcctcaattccactctgccaggactttttcttggccatactcaaccagaaaccaggaagcaagagaacctattgatacggtctataagggtcaatctccaaataatggagcagggtggatgatctgttgatctggaggggcaaatggaagaactgcattaataaataatatcatttcccatttgtct

SEQ ID NO: 262608 - DNA, 120 bp, Homo sapiens
tttctcatctgtaaagtgactaaatgttaatgaggtgaatatatcagagatggctttgattctaaaacttctatttctaaaactgtgcaataaatataaaaatgcttaccaaataatcta

SEQ ID NO: 262609 - DNA, 367 bp, Homo sapiens
cagggggcaagaacaatggggagtcattgtttaagggggacagactttcagttttgcaagatgaaaagagttcttggctgggtacagtggctcatgcctgtaatcccagcactttgggaggctgaggaggcaggtggatcacttgagctcaggagttcaagagcagcctcggcaaaatggcaaaaccccatctctacaaaaaatacaaaaattagcaaggcatggtggcccgcacctgtagtcccagtcactctggggggttaaagcccgaggatcgcttgcaagtcttactgggagactgcagtgagtcacgattgtgccactgcactccagcctggtgacagagtgagcctctgtctcaaaaaaa

SEQ ID NO: 262610 - DNA, 2303 bp, Homo sapiens
tggcaaccttgcggcttgagtctgtcgacctgcagagctccaggaacaacaaggagcaccacacgcaggagatgggcgtcaagcggctcactgtgcgccgcggccagcccttctacctccggctgagcttcagccgacccttccagtcccagaacgaccacatcacctttgtggctgagaccggacccaagccgtcagagctgctggggacccgagccacattcttcctcacccgggtccagcccgggaatgtctggagcgcttctgatttcaccattgactccaactctctccaagtttcccttttcacaccagccaatgcagttattggccattacactctgaaaatagagatctctcagggccaaggtcacagtgtgacttacccgctgggaactttcatcctactttttaacccttggagtccagaggacgacgtctacctgccaagtgaaatactgctgcaggagtatatcatgcgagattatggctttgtttacaagggtcatgaaagattcatcacctcctggccctggaactacgggcagtttgaagaggacatcatagacatctgctttgagatcctgaacaagagcctgtatcacttaaagaacccggccaaagactgttcccagcggaacgacgtggtgtatgtgtgcagggtggtgagtgccatgatcaacagcaacgatgacaatggcgtgctgcaggggaactggggcgaggactactccaaaggggtcagtcctctggagtggaagggcagtgtggccatcctacagcagtggtcagccaggggcgggcagcctgtgaagtacggacagtgctgggtcttcgcctctgttatgtgcaccgtaatgagatgcttaggtgttccaacccgtgttgtttccaatttccgttccgcgcacaacgtggataggaacttgaccatcgatacgtactatgaccgaaatgccgagatgctgtcaactcagaaacgagacaaaatatggaacttccacgtctggaatgagtgctggatgatccggaaagatctcccaccaggatacaacgggtggcaggttctggaccccactccccagcagaccagcagtgggctgttctgctgtggccctgcctctgtgaaggccatcagggaaggggatgtccacctggcctatgacaccccttttgtgtatgccgaggtgaacgccgatgaagtcatttggctccttggggatggccaggcccaggaaatcctggcccacaacaccagttccatcgggaaggagatcagcactaagatggtggggtcagaccagcgccagagcatcaccagctcctacaagtacccagaaggatcccctgaggagagagctgtcttcatgaaggcttctcggaaaatgctgggcccccaaagagcttctttgcccttcctggatctcctggagtctgggggtcttagggatcagccagcgcagctgcagcttcacctggccaggatacccgagtggggccaggacctgcagctgctgctgcgtatccagagggtgccagacagcacccaccctcgggggcccatcggactggtggtgcgcttctgtgcacaggccctgctgcatgggggtggtacccagaagcccttctggaggcacacagtgcggatgaacctggactttgggaaggagacacagtggccgctcctcctgccctacagcaattacagaaacaagctaacggacgaaaagctcatccgcgtgtctggcatcgcggaggttgaagagacagggaggtccatgctggtcctaaaagatatctgtctggagcctccccacttgtctattgaggtgtctgagagggctgaggtgggcaaggcgctgagagtccatgtcaccctcaccaacaccttaatggtggctctgagcagctgcacgatggtgctggaaggaagcggcctcatcaatgggcagatagcaaaggaccttgggactctggtggccggacacaccctccaaattcaactggacctctacccgaccaaagctggaccccgccagctccaggttctcatcagcagcaacgaggtcaaggagatcaaaggctacaaggacatcttcgtcactgtggctggggctccctgagacccgccctccagctgccctccctggcacccctgccccacctggctcctttctactcctggctatgtcgtcttggctccacctctgtcctctctctagcctgcctgggaatgaatgaagctctgttagaaacaccgtgtgctttgggaagagacaataaagatgtctttatttaaaaaa

SEQ ID NO: 262611 - DNA, 679 bp, Homo sapiens
ctgaaaaccatcttatccagcacacccagatttactttccttgtctcctccaatcaggcctcaaatcctctcttcagcctgccttccactccctgcccacctctagccatgctctccttctaggtgtcagccctgtgctgggtactggaataacaaatatatggactagccaagccccaagcacacagcctcctagagtagacacatgtaaaaataaagaatagagcacagcaagacaagcgctgatagtggtggatacaaggtatagaggtgcccggaggaaggggcctgcaggtcttgatggagagagggaagtcagggaaggcttctcagaggaggggctgtttgtgctgtcaagaggatgagctgtcattcaagtcatgtattaggccattatcacgttgctataaagaaatacctgagaatgggcaatttatatgaaagaaaggtataacaggctcacagttctgcaggctttataggaaacatggtgctggcatttgcttggcttctagggagggctaaggaagcttacgctcatggtggaaggcaaagggggagtaggcacatcacatggtgaaaaggagagataattaagagggagacgccacacacttttaaatgagcagatctcacgacaactcacaatcatgaagacagcaccaaaccacgagggatc

SEQ ID NO: 262612 - DNA, 300 bp, Homo sapiens
cactgaaggacgtttggattgtttctaagttttgactgtggcaagtaaagatgctatgaacattcatgtacacatgaatttgtaggcatatgtttttattttgctgggagaaaagcccaagaatgcagttgctgggttgtatggtattgtatgattgtttttcttttaagaaactgccaaattattttccagaatgactgtaccactgtacattcttattagctatgtatgagagatgtagtttctccaaatcctcaccagcatttaatattgtcaggattaaaaaaatgttttttactt

SEQ ID NO: 262613 - DNA, 380 bp, Homo sapiens
gtatgttatcctgctttgaaaactgccacaataagtcaccaaaacacgtaatgtaaaatacgaaagtggtggcaaagatcacctgacagaatggtccactagagacaaatggcagtagtgaaggagtctgtgtgtgtgtgtgaatgtgtgacatttattatgggtgttctttgtgctgagcatttcactgttgtttacttaatcatcacaattttgtgagatgcatgtcttattcctgttttaacaaggacaaaacaggtgcacagagattcagtaacttggacaagcccttagttgacaaatgggatttgattctacatctctctgactttaaaagttgtgctttcccattataagatgttatctgctattacattata

SEQ ID NO: 262614 - DNA, 536 bp, Homo sapiens
taggatactatatcactattagtttggacttcaactagtctatagatttttttctttattatttattttattacaggtaattggccttttaattgctattatatatgagagcaaaatagaagactgacattttcttattagttccaaataactagataagttaatttgcagatgtataaaatttattgaaatcacctttgacgtgttgtaacatttttaaaaaaatcattagttattgtgctgctgcttctcagatatttttcagtgccacgaaagcttttattatcagttcagtccctgcccttaaggttcatctgacctcccttccccttccacagatttgtattaagtgaatgattttttctgtataagcattgggggggattgggggaggtgggatttaaaggtgaataaggggtaggcccttcactaaagaagcgtatctcctgttaggaaactgactatctaagcatagagttgttgggttagctttgaagttgaagactgtgaatctgtgtctcaagtaaaaatctagt

SEQ ID NO: 262615 - DNA, 375 bp, Homo sapiens
caggcctgtactgggccacacaacaggaggtgagtaagggtgggtgagcgaagcttcatctgtatttacagccgctccccacattaccacctgatctctgccttctgtcagatcagtggcaacattagattctcatgtgagcacgaaccctattgtgaactgtgcatgcaagggatctatcttgctctgtccttaggagaatctaatgcctgatgaactgtcattgtctcccatcacccccagatgggaccatctagttgcaggaaaagaaggtcaagactcccactcattctacattatggtgagttatgtaattattttgttatatgctacaatgtaataataatagaaataaagtgcacaataaatgtaatg

SEQ ID NO: 262616 - DNA, 436 bp, Homo sapiens
ggttcaagcaattctcctgcctcagcctcctgagtagctggtagctgggactacaggcacctgccaccacgcctggctcattttttgtatttttagtggagacagggtttcatggtgctagccaggatgttttcttgatctcctgaccttgtgatccgcttgcctcggcctcccaaagtgctgggattacaggcatgagccaccgcacccagcctcctttactttcttaataaacttgctttcactttatggattgactcaccccaaattctttcttgcccaagattcaagaacctcttggggtctggatcgggacccctttcccgtaacaatgacaaagcacaggaaaccatctgagaagaagcattcactttgttctatgcctgcttttaataaacatttttaataataaagccatcttcctatgttaaatatt

SEQ ID NO: 262617 - DNA, 208 bp, Homo sapiens
acattaaaaatagaattaccatagatacagcaactatactctggatatatatccaaaagaattcaaagcaagaacttgaagagatgtttaaacagccattttacttacatcaccatagccaagagatggaagtaacgcaaatgtttatcaacagatgaatggattaaaaaatgtaatatgtacatacaatggaatgttgtgcagcctt

SEQ ID NO: 262618 - DNA, 677 bp, Homo sapiens
acatgctaccaaaatttattttaccattgactgctgccctcaatctagaacactaaaagaaatatttgttttactgagcaggtgtgccttaacctccctactcagaaagctccacatcaataaacatgacactctgaagtgaaagtagccacgagaattgtgctacttatactggttcataatctggaggcaaggttcgactgcagccaccccatcagtctgtgccaggcatggtgtcctcccaggaggcaaatccagagtctggctatggggaaagtgaccactttgtgctgactcgatcggttaaggagctgtccaataaccttccaagtacctgagtgagtgtgtaacttattgggttggccaagcctggtaaagctgttggactgagtacgtgattctttttaagtaggaaaataaagatatttgtacagaaaaaaaagtacttttattttactgtggacagctgctagagatatagtgataccactctcttctatatttgaattatcaaagtatgactttatgttactttgtatatttaattacaaaagaagactgtcctctgtagctttaaaagatgctgaaccctaccctttcccaatgtttacattaatgacaactgttaaattttgtttttataaagtaaatactatctacttaagacatgaagtctg

SEQ ID NO: 262619 - DNA, 427 bp, Homo sapiens
gttcttcctagatttcaaaacttaattcaaaaatatttattttgtgcctataaggacacattgcttgaatgagccaacaacataaatgttacactcaactgtgctttgcctgtagctcttaagatttttccccttaaattagtaaaacatacaaaattcagatggcagcatatggtgccttccatggaaacatttcctttaaattattgagaattctgcaatctgattccactttaataaacacatgaaaactacctcttacattataaatgtgtaactagctagattaagtattttcatatgctttgctgatttttccaataccttcaggagttagactaaatgctttatgtttaatcgaaaggtatgatgcatgctatttatcgtctattaagcatcaacttgaatatttccaaaatatgaaagg

SEQ ID NO: 262620 - DNA, 321 bp, Homo sapiens
caatatatataaacatttttatgtcatcaccaagtggaatttatcccaggaatacagggttggtttaactcccaaaatcagttaatgtaatacattatactaataaaggtcaaaacccatatgataatcaagacagaaaagcacttgacaaaatctctttgtgataaaactaggcataaaagggaatgtattcaaaagctaagaatcttgcttaacattgaaagactgaatgcattccccctaagatgggaagcaaggctctcaccacttttttttgaaattatactggaggtgcaacattgcactggaggtgcaatcagg

SEQ ID NO: 262621 - DNA, 667 bp, Homo sapiens
agtcacatgtaggtaaatgataacttaaaatgtggcaaatgtaacaggagcttctgcttccacccaagatgaataaattgggacaagaattgtcctcatgctataaacaactagaaaaatgaaaaaaaaatgtatgaaacaacagttccagatgttggagaaaggacagaggaggatatgctgccagagaaaagtctccacagtaaacctgctggaatgaatactattatttactcctcattttgcagagaagaaactggaattttagcgagaaaaagaagaaatctgtaaagggagaaaaaatgtaaatggtattttttggtgacagaatgcgtttcttcagctttgtggcaaactgcccctaccaccacccctccagcaaaaaaaaattgttggtgaagaacgcaatcacaaatagctttataaagagatgaaaatattgcctcacttctaagtgaggctggattttcagaatttttttttttgcaactttcatatgatgtccggtctggcaacacatgtggcaaaaatgaaggctacatttttccctagatagaagagcacatccaatgtttccaacatgatagttcagaagattcaacaactgtgaaaagtgctaatctcagaccattttaagagattatagagaaaaaaatgaaaaatctgg

SEQ ID NO: 262622 - DNA, 902 bp, Homo sapiens
aggtaatcttcaagagaaaattaaaagggagtgccatgacttgactagctacatataggttgtctttgtttaaaaaaaaaaaaagtattctctggaggctgaggcaggagaattgcttgaagctgggaggtggaggttgcaagtgagccgatatgacgccactgcattccagcctgggtgacaaagcgagactccatctcaaaaacaaacaaacaaataataagtaaagaaaagtataactcctaattttataggctatttttcttctctaattcatcttctgttgttaatttatgaaatttaaaatcaaagatggcttaaagtaaaaatatatctagaatttcattcaacctgacctacaaaaaaaaaaaaataaccctctggtaatgatgaccataaatactgtcttttcaggagcttctgcttccacccaagatgaataaattgggacaagaattgtcctcatgctataaacaactagaaaaatgaaaaaaaaatgtatgaaacaacagttccagatgttggagaaaggacagaggaggatatgctgccagagaaaagtctccacagtaaacctgctggaatgaatactattatttactcctcattttgcagagaagaaactggaattttagcgaggtcagtgatttgcacacaatacagagttctctacctgccttagcagagcacaggtgtttgaagcactaaatgaactccatggaaattttctattcccaacatttcccctaaagtcacctcaattttacatttccctttcttttcagtccttctgcccttccccactggaaagacctaatcatttaaccacaaaactgagcagagaactttcgcaattgaactggcaagaattattttaaatacatggcattaaacttctcttg

SEQ ID NO: 262623 - DNA, 553 bp, Homo sapiens
gtacggttcccagcagaactgagctggagtggccctgatgcaaatgaacttagatcccagctgcttgtgatggaagccaatcccagctttcccaagcttacaggttttttccagaagaagccaacttgatctcccggaacacgaattcagcaggctctcatctcagaactgcctccaatccatcccataccccttcacacttcagtccttggtattttctccgatcacaccttccactcctccttcatatttgcaagtctctccctgcagaatctgccccgaggagcaaaggacatttttccatggggaacagaattttagaatttccctttgtacccagtgagaaagactaaagtttggtataggaaataacccaaagacaaatctatacactgcatagaacacaggaagcctgggctctgaaaacataaaagacaccaaatcattcctggagcacttgtgaagttttggaaaattcctttaacctctctaaacctcagtctcctcatttgtaaaatgaacataataaatattttttcttgcctatgtcaat

SEQ ID NO: 262624 - DNA, 132 bp, Homo sapiens
gggaggaaaccaagactccagggtggagtgattggctgtatgtttcacctgcagccacgcgaggcccagaagtcttccagtgctttggaggttcacaagaaatatggtgactcaactggaaccacattagag

SEQ ID NO: 262625 - DNA, 435 bp, Homo sapiens
ctctagacctatcgtatactacacttgtatgcaacgtctgcaggataaactttgaaagggttgggattgccacagcaaaggatatgtgtgtttatttttttattttttatttttttgagacagagtcttgctctgcactccagcctgggcaacagagcaagactccatctcaaaaaatatatatattattattattattatttcacagagggggttggaagtttatttttgcattgcaagccataaactaatcaagaggattttactagtttggtggataatatgggtaaacaaaatcccagcgattactcttcacactttcatcgtgagtatcaatatgctgtctccaccattcagatgccagcatttcagtctgagaatcgctttacgtggaaagtggcattggtaagaattggactaaaaggtaaaaaaaaa

SEQ ID NO: 262626 - DNA, 449 bp, Homo sapiens
  misc_feature (128)..(128): n is a, c, g, or t
  misc_feature (137)..(137): n is a, c, g, or t
  misc_feature (142)..(142): n is a, c, g, or t
  misc_feature (144)..(144): n is a, c, g, or t
  misc_feature (149)..(150): n is a, c, g, or t
  misc_feature (152)..(152): n is a, c, g, or t
  misc_feature (173)..(173): n is a, c, g, or t
  misc_feature (177)..(177): n is a, c, g, or t
ggatactaatgtaatttaatagcccatcaacagtcatttgagagtaccatgtttgtttatactgaacccaccatgcagataattaactacttagaaattttgatgactgctaatccttttctcatttntaactcatnggccnantgaanncnccctggcccaaattctccaanctgnaacaattaaacatcttcatatattcatatatatatagttacctttaatcatgtaattcaacaggaatagagaggacggggactatgaaatctcagctgtgatgcaattatgtctgcagctcaaaatagatgttcttttctccatctcaaaaataaaaaataaaaatttaaatggctttatagtacagcttatttaattttactaaacctatttgcttttctcctaacaagagcataggtgttttactgtgtgatccctgggatttatctcac

SEQ ID NO: 262627 - DNA, 206 bp, Homo sapiens
atcaacagaaaaatgggtaatcaaaatgttcatattcatacagtagaatattcagcaataagaaagtaaaaatattgataaaactcagcaacatagatgaatctcaggatattattatgctgagtcaaagaagccttacacaaaggagtacatactatgtttccacttacataaaattctagaataggcaagacaatggtaaaaaa

SEQ ID NO: 262628 - DNA, 359 bp, Homo sapiens
tatggtatctgcccaagattcaggagtgatgatgggaggagatccaacagaactttgttgtaaggcaatggttagagaaaaatgaagccctcgctttctggacttagttcattcaataaaccagtttcggccaggcacgttggctcacatctataatcccagtactgtgggaggctgaggcaggtggatcacttgaggtcaggagttcgagaccagcctggccaacatggtgaaaccctgtctgtactaaaaatacaaaaattagccgggtgtggtggtgtgcacctgtagtcccagctactcgggaggctgaggcaggaaaatcacttgaacctgggagacagaggctgtagtgagct

SEQ ID NO: 262629 - DNA, 795 bp, Homo sapiens
agaaaatgaatttgtgttatttaaatgctatttgtggtaaattttttaaatgctgtttgtggtaattttttttcctgcagcaatcaacaactagtacagttttcatggaaaataattcaacccagcaattccattactgggtatatactcaagagaaaataaatcattctacaaaatgggcacagatgggtgccatcgtgtggtagattggataaagaaaatatggtacagatacaccatgaaatactacacagtcatgtcttttgcagcaacacagatgcagctgaaggccatcatcctaagtgaattaatgcaggaacagaaaactaaatactgcatattctcacttgtaagtgagaggtaaacactggatacataaagatgacaacaataagccactggggactgctagaggagaaagaggggaaggagggcaagggctgaaaaactacctattagatactatgctcactatctggatgatgggatcatttgtaccccaaaccttagcatcatgcactatatctatgtcataaatctgcacatgtaccctcagtacctaaaataatagtttaaattatataaaaaataaaattaatgcatttgcaacaatcgttgtatctgctatactggaaattccaagatggttgaaaaatatgtatagacatcagagagaaaagcctgaaatcaagaatcctatacccacttctctaggtgtaagaaaattatttcaggaaatataaggattaaaagagtacacattccatctgagaaaaatacacagggaagaataat

SEQ ID NO: 262630 - DNA, 511 bp, Homo sapiens
ctgcatcctgcgtccaacccttgtctcatgctttatttttaagggaacgcaaactgaaacatagggggtcttaaaaatcacctcatccagctttccgcttaaagacaagactcccctccatatctttgcaagatagctgttcctcatcaacccaaggactttccagcaaaggggaatgtatcacctaataaagtaactcattccaattggtaatattgaaggtgttagaaagttatttattttgaagccacaatttacagtgttctgtgctctgggggtaccagagggaaaaaatctcccttctgcatttcagctcctcaattatccgaagacagcaggttctgccatctcttcctttcctcatccatcatttcccttgattttcttctcctgacctggtttccagctgtggtcttttagggctgaatagtgtgaacctctcttctctcttcgcagtgtgattttttcacagcttatggtccaacttgttcttttagtagatttatattta

SEQ ID NO: 262631 - DNA, 498 bp, Homo sapiens
cctctgcagctaacattttccatgtagaaagcagttttttaaattcccgaaaataatgcacataagaaaaatggctagaccatctgatctaaaactctttgttttaaataattaattttgaaaattgtaaacaaaaagggacagcgattcggatatattccccctagcaaacaaagaaggcaaatcctagctgctgctgggaacaaaaccaaaacttggggctctgaaagcagcccgcgacgggtgcgaaatcacagggtgaaaaaaggacctagaaataaactgagctctgcacacgcctggctcttgcctcgggagcacgcacctcccagccccgctctcagcagctctcactatttaaagccggatctggtgtttaaatggagaggcggtgacgtaggcctgaaaagcaccttcccatcctggcagagtctatattagagagcggcaatggctctatataaacagggcagccaaagggaggaggaccacaaggct

SEQ ID NO: 262632 - DNA, 2433 bp, Homo sapiens
  misc_feature (90)..(90): n is a, c, g, or t
  misc_feature (96)..(97): n is a, c, g, or t
  misc_feature (244)..(245): n is a, c, g, or t
  misc_feature (263)..(263): n is a, c, g, or t
  misc_feature (268)..(268): n is a, c, g, or t
  misc_feature (283)..(283): n is a, c, g, or t
  misc_feature (293)..(293): n is a, c, g, or t
  misc_feature (730)..(730): n is a, c, g, or t
  misc_feature (1182)..(1182): n is a, c, g, or t
  misc_feature (1241)..(1241): n is a, c, g, or t
  misc_feature (1263)..(1263): n is a, c, g, or t
  misc_feature (1293)..(1293): n is a, c, g, or t
  misc_feature (1296)..(1296): n is a, c, g, or t
  misc_feature (1336)..(1338): n is a, c, g, or t
  misc_feature (1767)..(1767): n is a, c, g, or t
  misc_feature (1883)..(1883): n is a, c, g, or t
  misc_feature (1885)..(1885): n is a, c, g, or t
  misc_feature (2041)..(2041): n is a, c, g, or t
caacacaataagtaactgctgaactgagtatcccctatcaccccacttgaggaaagggggcctcatgaacccaattcttacacttttttntgtctnncccgcggccccgctgcctgccctgctccaggctccacctgcgccgccgatcgcccgggtatcgcgggggcccaggccagctgagtccgttttccgcgccggggtggcgcccctccaaccgtcctaacgccgggccggcagcaagganngttcctgggacctcaganaccangctcagagcctgacntccctgcgangggacagcctcatccgcccaggccagtgggggtctctacaagtgcccaggctcaggtgcagcccccagcaatgcatcgccggagactggccctgggtctggggttctgcctgttggcgggcacaagcctcagtgtcctgtgggtgtatcttgagaactggctgccagtctcctatgtcccctattatctcccctgcccagagatcttcaacatgaagctgcactacaagagggagaagccactccagcccgtggtatggtcacagtaccctcagcccaagctgctggagcacaggcccacacagctgctgacactcacaccctggttggcgcccatcgtctccgagggaaccttcaacccagagcttctgcagcacatctaccagccactgaacctgaccattggggtcacggtgtttgccgtggggaagtgagtantgggctggggaaggggagggaggtctccctgagccacaggagtttatagttgggaagagaccagaccagacgtgcacacaggaccctgctgggcacccaggaggctcggaaccaggtgccaagcagatagaaagtacagtgtagggtgtgatagtgggatgggagcttcctggagtaggggatctggctctagcatagacaggatgcagagtccaggtgaggggacagcaggagcctttgtcaggaggcccccttgcccctccctgtttcatctagacccctcctctgcccttgtctctcccatgaccccacctggccttcctttaggagctgccgcttggcagccttcctctgggcctctgggactccttcctggaacttcctggggccctaaagcatgaccagatgatgaatggtccacctagggtcaggtgacccccttgtccaatganttttggcctgggggcagggctgtgtcaaccacacccccctccatgcccccagcatctanctcaacttgccttcccttgatncgtccacttacctgcttcttcactactttnttntctgtgatcctcaatgttcctgcctgtaaaatgggcatgnnnatgcagatcaaagatcataagaattcttagaacgtcgctgggcacttagaaattgctcagtaaaagttcacctggcctaggagcataagaatctctaccaggaacatgcttacaacagccgtaagaggctggtactagcattttgggaattggacaaatgaggacccagagggccagagcagagtgacatcttgagatggggagctggtaagtggaccccagcctggctgaccccagcacacagtggggaccctggcaggctgctggtgtagcagtgggtgaccgggtgatcatcactaggtacactcatttcatccagtccttcctggagtcagccgaggagttcttcatgcgtgggtaccgggtgcactactacatcttcactgacaaccctgcagccgttcccggggtcccgctgggtccccaccngcttctcagctccatccccatccagggtcactcccactgggaggagacatccatgcgccggatggagaccatcagccagcacattgctaagagggctcaccgggaggtggactacntnttctgccttgatgtggacatggtgtttcggaacccgtggggccctgagaccttgggagacctggtggctgccattcacccaagctactacgccgttccccgccagcagttcccctatgagcgcaggcgtgtttccactgcctttgtggcagacagngaaggggacttctattatggtggggcagtcttcggggggcaggtggccagggtatatgagtttactaggggctgccacatggccatcctggcggacaaggccaatggcatcatggctgcctggcgggaggaaagccacctgaaccgtcacttcatctcaaacaagccgtccaaggtgctgtcccccgagtacctctgggacgacaggaagccccagccacccagcctgaagctgatccgcttttctacactggacaaggatatcagctgcctgaggagctgaccacggagctgggggttgccatggatggggacccaaagacctgcagccaccagtgcttcactagcgtgcagaccagccctgtcccgcctccctgtcagtcaggcgaattc

SEQ ID NO: 262633 - DNA, 408 bp, Homo sapiens
caagaaagaaaaaactgctgcaaattaaactataatgtgacagtgattgtttaagacctactgaaatttcagaaatgttaacatgaggaaaaaaatgtacgtcttagaattggtatactaggaccggccgggcacagtggctcacgcctataatcccagcactctgggaggccgaggcgggtgggtcatgaggtcaggagttcaagaccagcctggccaagatagtgaaccccatctctactaaaaatacaaaagaattaactgagtgcagtggcaggtacctgtaatcccagctacttgggagactgaggcaggagaattgcttgaacctgggaggcagaggttgcagtgagccgagatcgcaccaccgcactgcagcctgggcagtaagagcgaaactctgtctca

SEQ ID NO: 262634 - DNA, 1833 bp, Homo sapiens
  misc_feature (1630)..(1630): n is a, c, g, or t
agcagaaattcatttgatttgcatttaagaaaaaatgaaaattaaaaaaaaaacaaaaaagatacatacattttgcattcactttgaagagaacagaagagattgctggcttgttttccatctttgatgtttaatgacctggccattttgtatagagtgttcactgcagcatgattgcgataatgactttaagtgatggtatttcttggtgaatttgttcagaaattagatgcctcctcaaatcatagctctatgtacaataagttgtgtaccaaatggaagttatcttttactttttcccatcaaatgctcagcaagttagatatttttctgttccaatttttctgtacataagggaaaagatattttttaatgacttttaaaaatcacagtggaaaaagcgtgctggttttattttattccttgcctaacgatggaggctttggttgctaagtcagcgataggttttttcctatgtaagaaaataaccagagcttggccaggcgcggtggctcacgcctgtaatcccagcactttgggaggctgaggcaggtggatcacaaggtcaagagatcaagaccatcctggccaacatggtgaaaccccgtctctactatactaaaaatacaaaacttacctgggcgtggtggtgcgcgcctgtagtccagctacttgggaggctaaggcaggagaatcgcttaaacccaggaggcagaggttgcggtaaactgagatcatgccactgcactccagcctggtgacagagtgagactccatctgaaaaaaaaaaaacaagcaaacaaacaaacaaaaaaaacagagatcataaacttaatacagcaactactacagctagacagcccagtaggtactccccttagctgatgagtttaacaagctggaagccaggactcattggattcagggatatggatttacacccctttatagcggtggttctgaactggggatgatttattccccaagaacatttggcagtgtctggaatttatcataacttttatcataaatgcggaggtgctgctagcatctggtagggccagagatgctgctaaacatcctatacaacagagccccccacccatcacaacaaagaattatccagcccaaaatgatagtagtgctgatgttaagaaaacccagctttatggcaggattttaaaattctgccaagatccttcttctttttatcatctgtattaaaatttgggggtcttaaacattgcttcaacaatgggctactgattaaggctatctacaacgtagaatacgtcagaaaacctaatcactgtctttcaaactggattccttagggtgctagggcttcctcggggtagatagagctgagcaaacaggcgcaattctggggcactgtctccattctagccagagcacctctgcttttaacttgagcctgagtttttttagtaagacctgatttcctaaaaaggaaggagggagggaaagaggaaggaaggaagaaaaatgggaggaaaagaaggaggtagttatcatctttaaaaaagtttgaggccaggcgtggtggctcacgcctgtaatcccagcactttgggaggccaaggcgggcagatcacaaggtcaggagatngagaccatcctggctaacacggtgaaaccctgtctctactaaaactacaaaaaattagccaggcgtggtggcgggcgcctgtagtcccagctactcgggaggctgaggcaggagaatggtgtgaacctgggaggcggagcttgcagtgagctgagaccgcaccaccacactccagcctgggtgacagagcgagactctgtctc

SEQ ID NO: 262635 - DNA, 1517 bp, Homo sapiens
  misc_feature (1314)..(1314): n is a, c, g, or t
tatgtgtgttattttctttaacagacagtgaaacagcagttttcatgtgccaggcattgtgttagggactttataaatattgactcatttaatccaatgtaattcatttaataccaattctatgcagtaggaaactgaagcacagagcttaagcaaattggccatagtcacacagctgctgagcgtgttgttaagcctgattcccttgtgtagttaagagcagtcagatgcaaattttcttttgtttgtttgagacagggtctcactttgtcgctcaggctagaatgcagcggcatgatcatagctcactacagcctcaacttcttgggctcaagcaatcctcccacctcagccacttgggaggctaaggcaggagaatcgcttaaacccaggaggcagaggttgcggtaaactgagatcatgccactgcactccagcctggtgacagagtgagactccatctgaaaaaaaaaaaacaagcaaacaaacaaacaaaaaaaacagagatcataaacttaatacagcaactactacagctagacagcccagtaggtactccccttagctgatgagtttaacaagctggaagccaggactcattggattcagggatatggatttacacccctttatagcggtggttctgaactggggatgatttattccccaagaacatttggcagtgtctggaatttatcataacttttatcataaatgcggaggtgctgctagcatctggtagggccagagatgctgctaaacatcctatacaacagagccccccacccatcacaacaaagaattatccagcccaaaatgatagtagtgctgatgttaagaaaacccagctttatggcaggattttaaaattctgccaagatccttcttctttttatcatctgtattaaaatttgggggtcttaaacattgcttcaacaatgggctactgattaaggctatctacaacgtagaatacgtcagaaaacctaatcactgtctttcaaactggattccttagggtgctagggcttcctcggggtagatagagctgagcaaacaggcgcaattctggggcactgtctccattctagccagagcacctctgcttttaacttgagcctgagtttttttagtaagacctgatttcctaaaaaggaaggagggagggaaagaggaaggaaggaagaaaaatgggaggaaaagaaggaggtagttatcatctttaaaaaagtttgaggccaggcgtggtggctcacgcctgtaatcccagcactttgggaggccaaggcgggcagatcacaaggtcaggagatngagaccatcctggctaacacggtgaaaccctgtctctactaaaactacaaaaaattagccaggcgtggtggcgggcgcctgtagtcccagctactcgggaggctgaggcaggagaatggtgtgaacctgggaggcggagcttgcagtgagctgagaccgcaccaccacactccagcctgggtgacagagcgagactctgtctc

SEQ ID NO: 262636 - DNA, 431 bp, Homo sapiens
acatagtcttatcttcttaaaaagacatcagtcattggatttaggcccaccctaattaattatgacctcatcttaactaaaaacttcttcaaagactgttttctaaggatacattctgaggttttagatgggcattaactgtggagcaagcactactcaacttagtacaccaataacacattaaaccccttgctgctttcagaactaagccagttctcagtccagagtctattgtttgaagaggaggtcatttttcacaaagtaagccctgaaagaccaatggtaagtgtacatgttagtaactctctccatcctctccacaatggatgtatagcatatattcagataactgtacactgtgttaaggggaattcccaaacattttcaagaatgacatgaatagggtctggggagacactgatatgtgagaa

SEQ ID NO: 262637 - DNA, 357 bp, Homo sapiens
agctagctccataacatatttttagagtggaggaagctgagtcatgtggggaagtgtgtgtggcttaatggtgttgatgacagaggacttcatggtgagtgaaacaataacatggaatcggaaacctttggcccagatttcgtttctggtgctaatcccagggtgctcacccttgggaaagccactttacctctttgagctctgttcttttatgagtaaaatgtagtcatcaagactaattttatagaacttctgtaaggatagattagaagatagttaatgcagaacatagcacatcttggtaatttaagaaatatttcttgggagtctgctttcaatcttttacttgtatttaag

SEQ ID NO: 262638 - DNA, 201 bp, Homo sapiens
tgtggcaggtgggggcagactgaccacaaggcagtgaggacccgatctggtccttctgtgtctcccaggacctgcacagagcaagtgcctgataacatctggggtgggagccacgaggagctacacacacactcggtccaccagactggtttccccagccagacctctgagcttacaatactgacagagcagcatgctctg

SEQ ID NO: 262639 - DNA, 631 bp, Homo sapiens
atcccagcactttggaaggccgaagcaggcggatcacttgtggccagaagtttgagaccaccctgaccaacgtggcaaaaccccatgtctactaaaaatacaaaacgggtgtggcggcacatacctgtaatcctagctacttgggaggctgaggcaggagaattgcttgaaccagggaggcggaggttgcattgagctgagatcatgccactgcactcctccagcctgggcgacagagagagactgttctccctggaagcttagaacgtacaaagcagactctgaatgtctttccaggatcacactctggcttccagcttcccctggaaggttcaggagagtatttgtcgcctggttgcttttacatcatgctgattagacctgcacacccgggcatgaaatgagtgtgattgcatcattttcatagaacctaatggcagctgtatgtacgtctaagacttcttttgtgtaagtcgaatgttcttcgaagtttccccacgtcatgatttatgtgattttccgtcttgatcaggaccttctgaaggagctcaagtatgtggctgctccacggttgatgagtctctggttaagcatggccttccagttcagggctaggggggccgtcacctcc

SEQ ID NO: 262640 - DNA, 371 bp, Homo sapiens
agggagatcgtacatttcctcaagcaagattcattcttatcttaccccggcacagggcacctagccgcatcttaaaggctgtcagaaattctttagtaagtagggaaactctttggagttttgcttcctggtaaggatgcaaaccaagattctgctggaatgccagacaccgtttaccaaaaggcgggtttgcttttcttccatgcgtaatgtccaacttggttctttctattcccctaactacaagtaaggccttgttaagagcctgtatctgaatcgtaggctctggattacagaattctacagttatttattaagtctcaggaaatatatttgtggtagttgtcacataaagctgatatactttagtt

SEQ ID NO: 262641 - DNA, 407 bp, Homo sapiens
agcactgggcggctggagtgcaggatcaggtggggagccctagactgcttcagtagatgtgtgaatctggatgtttctgagcactgcctctttccttcagtagtctccctgagaagcaccacatggctatgcaaaggataaacacgttgtgggggcgagacgggtctgagtctaaggaacaaatgacatgtggcttgaggccacactccagacacggaattgggtttgctgaaagccttgagttggggtctcagctagaccactgacttgctgtgtgatccttgggcaagttccttcaccatctcagtcctacatggagcttaataaaacctgctttgtcctgatgactaaatggagtaaggcagggaggatacactgtgcttggctcattaaagacatttaacaaa

SEQ ID NO: 262642 - DNA, 389 bp, Homo sapiens
gtgaagtgctgctgtgcacataggaagctggaaccccgcttgactctacccacaggacgaagtccttcaaactcacaggacctcttgagggaagcccagtcacccaaaggaacagatgattctctaacttcagatggcccacaccgcattccccttcgaggcagcccagcaacctggggaaggaacatagtgtggcgggaagagtcctgcccaaggccaccagcccaaaaggggcagaattggcacttgcactcaaggactttgcttcagccctgaacacagcctctaatcctgtactgtccaatgacaggcactagccccatgtaactatttaaatttgcagacattaaaatttaataaaataaaaattttacttcctcaaggtacta

SEQ ID NO: 262643 - DNA, 300 bp, Homo sapiens
aggtcttgcttgttcccaccacccaggctagtcttgaacacctggcctcaggtgctcctcctacttcagcctcccaaaggaaggattacaggcgtgatccaccatgcccgaccaccacccctgaaagtgcttgagtgtgccttgaacatacaaccttcccgtaagtagacccttctcctaatatgccctccttcaggcctcttcctggtgaacttacatcatcataaacattggactgggagtcaaaaaaaattggttgataaggtctactttttgccacgccatagtaccagtgatcag

SEQ ID NO: 262644 - DNA, 614 bp, Homo sapiens
cccccatcttcaaatccagcagtgtagcatctttagtggtttttttttttctttctttctttctttgagacagaatcttgctctctcatccaggctggaatgcagtggtaccatcatagctcactgcagtgttgattgctcccaggctcaagcagtcctcccacatcagcctcccaagagactatggtgtgtgtcaccacacctggcttttatttttattttttatttttattttttgcagagaatgcactaataataacaacaactgcagctaccattggtcaagtgctccatgccaggcactgttctaagagctgcgtgtgtattcctcatacattctcacaacagagaggtagtaatattatgatgttctttggtgtacaaatgaggacactgaggcaccaagaggtttagtaacttgccccagagcagtgagaagctggagatggaggacctgcatgaaatagaccatggggcagatgagggaacgttgctcagaagtgggggccatggtgagagagtcgggggcatgggcttatttgtgaattttttttactatctgtctcccaactagagagccagctccatgactgatccatctctgctgaacactc

SEQ ID NO: 262645 - DNA, 498 bp, Homo sapiens
tcgttgctcaggcggtcactctccccggacccgttctccacggacttgaggccggtcagctgctggcagctcatgaccgagtcgatcatcttcatctggttctccagggcggcaatgctggagatgaccgagggcggggagggcgggcaggaccccgcgtaggacaggagtggcttggccgggtcggtggccgcgtccttcagctcagcgtcgtcctccatggagttctcgtccatgtcgtcatcgtagctgctcagagtctccgcgttcttgtcgtcgtaggccagctcggagtccatggcatcctggaagccctccggcagcggcgtgttggggatctggccgcccatgtgcatgcggatgtgctgctgcaggaccacggcgttggtgaacttcttctggcagatggggcaggagtgctgcacgcgcaggggcggctttgcacggtgcacgccgaagtgcgtcttgaggttgcccttggtggtgaaggcgcggccg

SEQ ID NO: 262646 - DNA, 1026 bp, Homo sapiens
gtcacaaggttgattgattagttggggtgaggcaggaacaaatcacaaaggtggaatgtcatcttttgtggttcttcagttgctccaggccatctgggtgtatatgtgcaggtcacaggcttagcttgggctcagaggcctgacaatttataaaatacttcattcaacaatagcagaccacacattcttctcaagttcacatggaacatttgccatgacagatcacattctgggccataaaatacaccttagcaccttttcaaagaatagaaatcataccaagtactctttcagaccacagtagaattaaactagaaataaataaataacaaagttaactggaaaatcccaaaatatttggagattaaacaaaacactactaaataacacatgaaccaaagaagtctcaagaggcataaaaatattttaagctaaacaaaaaatataacttatcaaatcttgtgggatgcaggaaaagcagtgcttagagggaaatttatagtattgactacatagattagaaaagaagaaagatccaaaatctacaagcttcaacattaggaaacgtaacaaaaaattaataatcaacattagaacagaaattaatgaaattgaaaacaggaaatcagagaaaattttaaacatcaaaagctggttctttgaaaaaaaaaatcaataaaatcaataaaactttagccaggctaaacaagaggaaaagaaaagagacacaaattccaaacatcagaaataaaggaggggcatcactactggtaacatggctaataaaaagattaaaaggaatatcatgaacagccctacacccataaacttggtaacttagataacattggccagtttcttgaaaaacgctatctaccaaaactcaaacaaggagaaatataatctgggtgggcctacatcaattaaaagaaatggaatccataattaatactcttccaaaacggaaagcacaagactcagatgttttcactggtgaattctaccaaacatttaaggaaaaaaaaa

SEQ ID NO: 262647 - DNA, 356 bp, Homo sapiens
gatagtaggcatgttctccagaaagccccctctgacccacccttcacccccaaccaggtggtgccaagacatcctggcttccctcccacagcatgtaccacattgaattcaaatgactcatttgcttggtttcaagaacaggatttatgtattgttcgcttttgtattcccatcacagtatctggcagagtcattcccaataaccatttgttggattagtatataaatctttttgcactacagaatagcctcatttaacaaatatttgaactataagaataatttatggagaacaagttttcttcacagacttcaatatgctactcatggtccttgactccagtagtccaaaaaaa

SEQ ID NO: 262648 - DNA, 1616 bp, Homo sapiens
gagccaagctccgtcgcctggtcagaggcccgaagcaggctctggagttgcccagtgatcgggaagtcttgcacccgtttgttcgaagacatgccctccaccggaactccctagagggtggacacacagaaagtaacacaagtttgccaagcggcatccaggcttctctcacctccattagctctttaccttttgaggaggatgagcgggaggtggcactcactaagttaaccaagtctgtatctgctccccacatcagtagcccagaggaggctgctgaagatgcggacaccaagcagcaagatggaggttttgctgaaccttcagatattgcacagcaagagccaaggttccccaggatctttgctctcaactttgtggtgactctggaacagatgctggagcagaccatcccctggtggagatagttttagatgctgacaaccagcagggccctggatacatagacatccccaaagggaaagggaagcagtttgatgctcaaggacactgtcttcctgatggcaggactgagaacactccaggtgttgaaaccaaaggtcttaatttaaaaataccacgcgtcatagcacttgaaaaccccaggaccagatctcttcatagagcacttgaggaaaccccaaagggcatgcctaaagacttgaatgtgggtcagcaagctctttccaacagtggcatctcagaggttgagggtctctctcaacatcaggtgcctgaattgagctgtacgtcagctgctgatgccatcaacaggaactcaacaggccagcaaagccaaagcggttcaccttgcattatggatgacacagcatttaatagaggagtgaatgccttcccggaggctaaacataaagcaggcactgtgtgccccactgtgacccattccgttcattcccaggttttgaaaaaccaagagctgaaggcaggcacttccatcatggggtcccatctgacttctgcagagaccgttactctggacagcctgaaggctgtggaggttgtgaacttatctgtgtcttgcactgccacctgtctccctttctcatctgtgcccaaggagacccctgccagggctggattctcttccaaacagaccctgtttcccatcacccatcagcctttgggatcctttggagttgtttctacccattccagcacgttggatgaggaagtcagtgagaggatgtttagaggaagaggaagaaaatttggaagatggaattcacctggttgtctgtgtccatggcctggatgggaacagtgcagacctccggctggtaaagactttcatagaactggggctccctggaggaaaactggacttcctaatgtctgaaaagaatcagatggacacatttgcagattttgatactatgacggatcggttattggatgaaatcattcaacacattcagttgtacaacctctccatatcccgaattaggtaaaaggaaaccacaggtagttaatgctgggggaagaggggggacatttttgagtgtttgctgtataaaagcaataatatgatgccttctgtataccactgagctaagctaacttgtgacttttaataaattacttttaaagcagaagta

SEQ ID NO: 262649 - DNA, 1500 bp, Homo sapiens
gagccaagctccgtcgcctggtcagaggcccgaagcaggctctggagttgcccagtgatcgggaagtcttgcacccgtttgttcgaagacatgccctccaccggaactccctagagggtggacacacagaaagtaacacaagtttgccaagcggcatccaggcttctctcacctccattagctctttaccttttgaggaggatgagcgggaggtggcactcactaagttaaccaagtctgtatctgctccccacatcagtagcccagaggaggctgctgaagatgcggacaccaagcagcaagatggaggttttgctgaaccttcagatattgcacagcaagagccaaggttccccaggatctttgctctcaactttgtggtgactctggaacagatgctggagcagaccatcccctggtggagatagttttagatgctgacaaccagcagggccctggatacatagacatccccaaagggaaagggaagcagtttgatgctcaaggacactgtcttcctgatggcaggactgagaacactccaggtgttgaaaccaaaggtcttaatttaaaaataccacgcgtcatagcacttgaaaaccccaggaccagatctcttcatagagcacttgaggaaaccccaaagggcatgcctaaagacttgaatgtgggtcagcaagctctttccaacagtggcatctcagaggttgagggtctctctcaacatcaggtgcctgaattgagctgtacgtcagctgctgatgccatcaacaggaactcaacaggccagcaaagccaaagcggttcaccttgcattatggatgacacagcatttaatagaggagtgaatgccttcccggaggctaaacataaagcaggcactgtgtgccccactgtgacccattccgttcattcccaggttttgaaaaaccaagagctgaaggcaggcacttccatcatggggtcccatctgacttctgcagagaccgttactctggacagcctgaaggctgtggaggttgtgaacttatctgtgtcttgcactgccacctgtctccctttctcatctgtgcccaaggagacccctgccagggctggattctcttccaaacagaccctgtttcccatcacccatcagcctttgggatcctttggagttgtttctacccattccagcacgttggatgaggaagtcagtgagaggatgtttagtttttatcaggccaaagaaaaatttaaaaaagaactgaagattgaaggatttctgtacagtgacttaactgtactagcttctgatataccatatttcccaccagaggaagaggaagaaaatttggaagatggaattcacctggttgtctgtgtccatggcctggatgggaacagtgcagacctccggctggtaaagactttcatagaactggggctccctggaggaaaactggacttcctaatgtctgaaaagaatcaggtatgatgatacaaatatcagaactggaa

SEQ ID NO: 262650 - DNA, 940 bp, Homo sapiens
gtgaaatgctatgtcagggattttgaagttagatttcctgtcttatataattaaacagggagcagaaatgcttttaagacagtagggctgtccttccctaccatttactgtgagacactaggaaagttatataacctttttgtgcctcagttacctcatctgtaaataagaagtaataatagtgccaaccatataaagttgtgagtgcctggcatgcagaaagtaggtatttagtaaatgtgagcaggtattattttagaattaagcttcaaaaaattttaaaagtgagattaaataaatatgattaaaatgaatgcatatatattttattttcatttttattctcttttcttcataggcagttaaaagaagaaaataacaatggaaaagaaaaattaaggatcatggcagtgaaaacttcagaagtcatggcacaactaactgaatctagacaaagtattttgaagctagagagtgagttagagaacaaagacgaaatacttagagacaaattttctttaatgaatgaaaaccgagaattaaaggtccgtgttgcagcacagaatgagcgactagatttatgtcaacaagaaattgaaagttcaagggtagaactaagaagtttggaaaagattatatcccagttgccattaaaaagagaattatttggctttaaatcatatctttctaaataccagatgagtagcttctcaaacaaggaagaccgttgcattggctgctgtgaggcaaataaattggtgatttcggaattgaggtacaattttcagattctgcagttatagcaaatagaatgttttttattggtaattaagacccttaattggccgggcatggtggctcatgcctgtgatcccaacactttgggaggctgaggcaggcggatcacgaggtcaggagttcgagaccagcctgaccaaca

SEQ ID NO: 262651 - DNA, 325 bp, Homo sapiens
cataagtttacatatgtttgtttttaaacttgcagttaaaaagagaattatttggctttaaatcatatctttctaaataccagatgagtagcttctcaaacaaggaagaccgttgcattggctgctgtgaggcaaataaattggtgatttcggaattgaggtacaattttcagattctgcagttatagcaaatagaatgttttttattggtaattaagacccttaattggccgggcatggtggctcatgcctgtgatcccaacactttgggaggctgaggcaggcggatcacgaggtcaggagttcgagaccagcctgaccaaca

SEQ ID NO: 262652 - DNA, 590 bp, Homo sapiens
gttagataatacattccccaaaataatttagcatgtgataaaaattattccatggagagtcagaagggactcagagaggtgtccaaaggcttgagggggagactttaagaactcctttaacatttctggatgatcttgtttgtgccacagttaagagcatatggttaagagcatagctcaggagcaggtctacatgggatgaattccatggtagctgtgtgagcttgggcaagttactggtcctctccaggcttcagtttggacaccagtagaacagggatgctagcaggaccactaggtggaatcctgtgaggattcaatgcattagtaggtgggaagtgcacagtaggtgcatttaagtgcaatggcccctggctggacaacagctctacaaaaaaagaataaaggaaatcaagaagaaagccaagactaaaaaggttagcaactgctcaacatcaccctcaaacctatttctaaacccagggctttctacagtaatgcactgctgccatgagaccaggggcccataactagaaggaatcaagtttagtttcatttcctcttgccatgctctatgacagggtcattaa

SEQ ID NO: 262653 - DNA, 283 bp, Homo sapiens
aagctgcccacatgaagagttgccctaggcccccgaatgtgactaaaacacagcccaagaaggccgctacagctgcaattccatgcctgtgctgaggcccctgcgtgtctagcgccactgtactcttcgactccaaggtgtaccattcatgtggaaggctatgtaaatcatgcttcttggagggaggccaggccacagccctgcaggtgggcacatcctgtatcagtccattctcatgttactgataaagacatacctaagagtgggtaatttctaaaggaaa

SEQ ID NO: 262654 - DNA, 538 bp, Homo sapiens
caccccccgtggcggtctggcttactgttaagaagggtaaccttaaaaaatacatttcccactccagaaaatactcatatgtggcctgttagcagcacaagaagggtgaaagcaatgcccattcctgcctccctccccctgctcacctccacgtccctgtttgcccctttgtaggtgaagtgagtatattcagcgtcttcatggcaggggagagggtgtattaatccgtctatgtccgctggaaaggcagtctctgagcgggccacaagggttcagccatggcccatccaataacctttttgatgacttggatgaagagacaaacattccaaccacattcaaagatccagacctccaaagtgtggctcatttggtagataatggaattatatttggaaagcatttcccgcagctgggatgatgggtcaaaaacagatagcattttaccagatcatatttgtgtgtgtgtgtgtgtgttttaaattcagtttcccaactacaggatggcatttgtagcctttcctaaaaatcaagttta

SEQ ID NO: 262655 - DNA, 350 bp, Homo sapiens
cttcaccttaaaaacaggaccaatactgtccctcttagggataggatcagtaaacacatcccagccttgtgctcagtggatggatatcactccctagaagtagccattagtatttattagtttttctaatgcaataccagaatactttttccattgaaataagatgctattttgcaatgctaaatttgttgacatcgttttccaacccaagaaatcttaatagcttcacaacctttgcctgcccatggtttatcattgcccaatctgctaattcctttactcaatgttttgccagtaagttgagtattagtcagactagtgactgccccagggttgtgctttctcattag

SEQ ID NO: 262656 - DNA, 239 bp, Homo sapiens
ttcttgctgactgaggatattctcagatcttagaggatgcctgaagttccttccatgtggctccctcacacagagttttacagatcctctctcaacagagtaccttacatcttcaagaccattaggaaaaacaaaatttctgacttctaaatcctcttttaaggggcttcttgagccacatttggtccacgagccatggtttgccaatacataggtcacagaaactttatatacatatg

SEQ ID NO: 262657 - DNA, 446 bp, Homo sapiens
atctgcaacatgaatgaacctggaaggcattatgccaagtgaaatatgccagagaaagacaaatacaactggcccttgaacaacacaggtttgaactgcacatgtccatttacacccagatttttctcaaccaaatgcagatcacatttgcagatgtgaaacccacatatttggagggctgaattttggatgcacaggttctgcagagtcaacttctggacttcagtatgtgcgaattttggtatacatgggggtcctagaaccagtcctccgagcataccaagggacaactatactgtatggtaaccaaactcacagaaacagagagtagaatgctggttgccagggataagggggtaggtgaaatgggaagatgttggttaaagaacacaaactttctgaggatctaatgtacagcacatggtgactatagctaataatactgg

SEQ ID NO: 262658 - DNA, 469 bp, Homo sapiens
agctggcccggcgaagacagacctcctggacttgaggccgacttcaccaaatccgccccgggaaaaggcgagggcaaaggcggggcggacagacccagctgcggctgagggactgcggtccctagcaaggagcagagatggggagctggatccgcgcagaaccccggaaaagcgccagcaggattgcaccgagaacaaatcctccgcaccctcgcccagggctggggcgcagtgcgctggtgctcctctagctgggcggtccctgtgctccaaacgagaagatagctgacttccgaatccttcactctttgatcctgacccaagccactcgtgccactaggagcgcatgcctatggaatactcgctcctgtctccttgtggtgaagccttccgctaatgcccagagcctcccaggctggattagtgggtaggagcaaaacaggatagtggagacaatcagcagagcagc

SEQ ID NO: 262659 - DNA, 532 bp, Homo sapiens
gtaaaacttctcacagaaaacatagggggaaagcttcttggcattggtcttggtaatgactttgtggtttgacaccaaaaacaaaggcaacagaaccaaaaataggcaagtgggacatcgtaataaaagctctgtacagaaaaggaaacaatcagcaaaattaaaaagcaagctgaagaggccgaggcaggcagattccttgagcccaggagctcgagaccagcctggacaacatgataaaaccccatctgtacaaaaaaatacaaaaagtagctgggtgtggtagcatgcatgtgtagtcccagctgcttgggaggcccaggtgggaggatccattgagcccaggagatcaaggctacagtaagccatgattacaccactgcattccatgctgggaaacagcaggaccctgtctaaaagaaaaaaaatgtgagataaaagtaaggaggctgaggcaggtagatcacttgaggtcaggagttcaagaccagcctggccaacatggtgaaacctgtatctactgaaaaaaaaa

SEQ ID NO: 262660 - DNA, 118 bp, Homo sapiens
acaaaatgcactggaaatttcaacaatagaatcaaacagaaagaagaacttcacacgttgaagacaaggcttttgaattaacccaatgagacaaaggcaaagaaaaaagaatttaaag

SEQ ID NO: 262661 - DNA, 249 bp, Homo sapiens
ccagggctgtttgagcagctctcccctaaacagctgtctggtggggtgtgcccaccggccacctgaggctgtgggtgagctgggcctctgggcggagtggcatctaaccgacttttcggtgtgggcacaaacggcctcccctgctcttacctagttaccacctgcctgaacccatgcggtctctacctggtgtttaggggtagtcactctctggctatacaggggcctttcagccccaaccttggggga

SEQ ID NO: 262662 - DNA, 376 bp, Homo sapiens
ccacagtcaaaatatttacaaagttcactccttctccctttgcagcctatctctcctcctctcacccccacagccccgactccaggcagccactgatctgatttttctatctataggcagctttgcttgctcaagaacttcataaatgtgataatacagtttatgatcttctgtggtttctttcgccgagtctgatctacctgggattcacctatgttgttgaatatgtgagtgggtggctcctttcattgctgagtagtatgctagtgcatgagtctaccaccatttgcctatccatttacccactgatgaagatttggattgtttccagtgttaggccattctgattaaagtctttatgaaaatttttgtaaaa

SEQ ID NO: 262663 - DNA, 442 bp, Homo sapiens
ttctcagactatcccatgccttcttcctgcaaaccacagctctcaagctccccaacagtttgacaaggatcatacaaaggggaaaggaagcaaggaaagaatcaaggtctttctaagcaatttctctacgctctcaggggataggcattttctggccgtgactgtgtctcctccatagttccaacttccacaggacaggtccttccctccatagtcacagttcttcttgggtagcctcctccacacttctgaatggcccatctgaatggccacagtgactcggcgctgatgtcacccctcctgcctgttgtaccccctgccctagagaggagatgcctcctgctgatgctaatctgtggattgcttcattctctggtttctcagcttttccatcccttatgccatcaattgcccgaattaaactcctactatttaaaatacc

SEQ ID NO: 262664 - DNA, 196 bp, Homo sapiens
tcctgagctcaagtgatcctcctgccttggcctcccaccaagtactcggattacaggtgtgagccaccatgactggcccctccactctttctgtacttccaattgcctgatcccaggttccagtgatatctgctgtatcactttccttagttaggtggaaatatcaccaattaggatagtcaaaaaaggaaacggg

SEQ ID NO: 262665 - DNA, 705 bp, Homo sapiens
ttacgcaggacatggataccccagtcccagctgtgctgaagtgtcaggaagcctcccccgaccccaccctgaacaacagtgaggggggttaggtgtcctcaaaagatctactctgtcaactggagttgttgagaaactcaggaaagggaactaaaaaggataagaaagtggtgcattccagtgtcttcctgttctctgttgcagagagccagctggtggaccgcagagacagacttccagccagggccaagcccttcaggaagggagtcatgcaccaaactcagctaacagaccaccagggcaccactgggtctcctgctggggaacagcacacctatgggtgggctctaggggtggggtggcctggttgctggttctgctctgccacttcttagctggacttgagcaatttgtaacatttcttggctcagtttctccacctgcacaatcaaaatatcactaccttcctccaagattgcattaagtgtgacaatttatgtaaagcacttagtccagtgcctggcacctagtaagtactgaatagtgaaaacaatttaagtctaacaaatccacacaccatgacgtcagacaaattaggcatctttcattgctgttgtgaaaattgcgctaactctaaactctaacgtacatctggctcactgtctttctgtaagaccagtcagagcagcagctccttccttggta

SEQ ID NO: 262666 - DNA, 955 bp, Homo sapiens
gcccaaggagcagccggcagcttgacacagtgaccaattggaagcacagcagccacacgccatgaaacaagacggagtttcgctcttggctggagtgcaatgtcgcaatctgggctcaccacaacctccacctcccgggttcaagtgattctcctgcctcagcctcccaagtagctgggattacaggcatgcaccaccataccagactaattttgtaattttagtagaaacggggtttttccatgttggtcaggctggtcctgaactcccgacctcgggtgatcctcccacctcagcctccctatattattaatcttaagtctaaatgttctattagaaaagttacaatcacatatgcagcttgcattacattgctaatggaacacgctgctctaaaccagggattggcaaactatgggcagtggacaacttccagcccactgtctgtttctgtacagctggtaaacaaggaatggttttcacatttttaaatggcagaaaaaaaataatttgtgatacgtgaacattaataaaattcaaatttcagtgtccatgaagagttatattggaaaagagaacctacaaccattgcctctcccgctgcgtaagttcggcaaaggctcacgcttttgtcttttgttggatgaatgactaccaacacctaggacagtgcctgcacaaattaggtgccctataaatatttgttgagtcactaaattttaaaattctagattatggggactgtgtaggaaggacctcattctttagagaacatgaattacccactactacaactcgctgtgtccatccctaagccagaagagcggaggttaagaccccaagcaagcccacacgtaatgacacaggaatggaaagctgatgctcggcctggtctcctgctgagcctggacacaggcataggcactgctgcaatggcaagagaagctcaaaaagt

SEQ ID NO: 262667 - DNA, 572 bp, Homo sapiens
gcccaaggagcagccggcagcttgacacagtgaccaattggaagcacagcagccacacgccatgaaacaagagagccagctggtggaccgcagagacagacttccagccagggccaagcccttcaggaagggagtcatgcaccaaactcagctaacagaccaccagggcaccactgggtctcctgctggggaacagcacacctatgggtgggctctaggggtggggtggcctggttgctggttctgctctgccacttcttagctggacttgagcaatttgtaacatttcttggctcagtttctccacctgcacaatcaaaatatcactaccttcctccaagattgcattaagtgtgacaatttatgtaaagcacttagtccagtgcctggcacctagtaagtactgaatagtgaaaacaatttaagtctaacaaatccacacaccatgacgtcagacaaattaggcatctttcattgctgttgtgaaaattgcgctaactctaaactctaacgtacatctggctcactgtctttctgtaagaccagtcagagcagcagctccttccttggta

SEQ ID NO: 262668 - DNA, 239 bp, Homo sapiens
gatccacctgcctcagcctctcaaagtgctgggattacaggcatgagccaccgcgcccagccaaagttcatttgtttgttttttaagtctgagttactttctttctgttcagagccttttatgatgaaggctcaacgtaatggaaagtagagttcactctttaacctctttttcctttatacaacaaaatggtccaggctttagggtaatcagactcctaaacatatatagtatgtgac

SEQ ID NO: 262669 - DNA, 253 bp, Homo sapiens
gatacttggggagctgaggtgggaggatggctccagccctggaggcagaggttgcaatgagccaagatagtgccactggaggccagcctgggtgacagagcaagaccttgtcttaaaaaaaaaaaattgtgtcctgctagaaataaacactgaagagtttattttgtatctaagattaggtgtcttttactatcatgaaaacagtaaatggattacagaaaacaaccaaacagtagcccacttatttttttct

SEQ ID NO: 262670 - DNA, 386 bp, Homo sapiens
ttactttctgtgcagcgtacgcgtcctttttcctaagagcgccctaaacaagaattgaaaatgaagcaattcctggctaaaatattccttaacatgaagatcgctgaggccccaaagactcattagtttcccgaggtcacagactaattttactaaccacacaacctttagaatttcagtctcctcccacatgaagaaacgccggcaccttacaccgacaggaaaactacaattaagtgaggctgttctcctcaagcccgactgagttctctgtaattgtagggcatacctacaccctgttttagcattatgagacctgaaatacttttaaattactggcaccatttctcatctctgaattataagtttataatgctctatccctt

SEQ ID NO: 262671 - DNA, 234 bp, Homo sapiens
ctgttccccagcccctctcattggctctgctccaggtggagaagggggatgatgtctctgtcagttctgccggtttagcctagcaggaaaagaagcagagcccagaagcagggcctggtacccagcctgcctaacaagggagaatttgtaggctttgtggacagaaagatctgggactccatgtcacccactaacttgctgagacattagtaaaatcagttttcttttctgaac

SEQ ID NO: 262672 - DNA, 1596 bp, Homo sapiens
ggccacgagagggcgggggaggagtgaagaggttgaggcgccccgcccagtcagcaaggttgcgcgtgccctgtgagaccgccaagatggtggtgggcgcgttccctatggcgaagctgctatacttgggcatccggcaggtcagcaagccgcttgccaaccgtattaaggaggccgcccgccgaagcgagttcttcaagacctatatctgcctcccgccggctcaactgtatcactgggtggagatgcggaccaagatgcgcatcatgggcttccggggcacggtcatcaagccgctgaacgaggaggcggcagccgagctgggcgcagagctgctgggcgaagccaccatcttcatcgtgggcggcggctgcctagtgctggagtactggcgccaccaggcgcagcagcgccacaaggaggaggagcagcgtgctgcctggaacgcgctgcgggacgaggtgggccacctggcgctggcgctggaagcgctgcaggcgcaggtgcaggcggcgccgccacagggcgccctggaggaactgcgcacagagctgcaagaggtgcgcgcccagctctgcaatcccggccggtccgcttcccacgcagtgcctgcgtccaagaaataggagcttgctggatggaacctgaatttggacatggcctatgtacctaacgtggccttcttcccgcaccacccttgcctgcgctggcccagtggaaaccaccaggatcttgatgcaacttggcatttggttacccctgctgataagagcagccattacctgccactgggaccagcaggtgaagcgttgcaacatagccccctccatcatccttcacctcctatcccccactccaaaccaggacgacctgcaaggtcccagccagcaggacaccgtgggcactctggcaaatgaaaaaatggaacctggtcttgagctgaatcaatgtgttattgttacccccacccccggtttacctgatcagtgttaacctttactgggacactcatctgttacactggaacaccttcttctttttgtcaatcggcacagaccactgtaaggaaatgcagtgtgttgcagtggccttttctccccctcaccttctaaggtcagctctagctgagcatcagtgctctcttaaggaggaaaaaaacggtgcggctgggagcggtggctcacgcctgtaatcctagcaccttgggaggccgaggcgggcggatcacttgaggtcaggagttccagaccagcctggccaacatggtgaaactccgtctctactaaaaatacaaaaattagccgggtgtggtggggtgcgcttgtaatcccagctactcgggaggctgaggcaggagaattgcttgaacccatgaggtggaggttgcggtgagccaagatggcaccattgcaccctagcctgggcaacagagcaagacaccgtcttaaaaccaaaagttaaccgggcgtggtggtgggtgcctgtaatcctagctacttgggaggctgaggcaggagaattgcttgaacttgggaggtggaggccaagattgtaccactgtattccagcccgggtgacagagcaagactgtgtctc

SEQ ID NO: 262673 - DNA, 1284 bp, Homo sapiens
  misc_feature (36)..(36): n is a, c, g, or t
  misc_feature (45)..(46): n is a, c, g, or t
  misc_feature (85)..(85): n is a, c, g, or t
gacctaaggatcctaagtacttgttctcgtgcccanccccgcggnncatttggccttcctgctagctgagaggaacagtctaggnaccacccttttctactgggtttctcttccaggatctgccactgaagcgggagggggtgggtcccagtagcctgcagtctgtccttccgactgtagctctctcattagaggagctgcaaggtgatgaaggcgccctggaggaactgcgcacagagctgcaagaggtgcgcgcccagctctgcaatcccggccggtccgcttcccacgcagtgcctgcgtccaagaaataggagcttgctggatggaacctgaatttggacatggcctatgtacctaacgtggccttcttcccgcaccacccttgcctgcgctggcccagtggaaaccaccaggatcttgatgcaacttggcatttggttacccctgctgataagagcagccattacctgccactgggaccagcaggtgaagcgttgcaacatagccccctccatcatccttcacctcctatcccccactccaaaccaggacgacctgcaaggtcccagccagcaggacaccgtgggcactctggcaaatgaaaaaatggaacctggtcttgagctgaatcaatgtgttattgttacccccacccccggtttacctgatcagtgttaacctttactgggacactcatctgttacactggaacaccttcttctttttgtcaatcggcacagaccactgtaaggaaatgcagtgtgttgcagtggccttttctccccctcaccttctaaggtcagctctagctgagcatcagtgctctcttaaggaggaaaaaaacggtgcggctgggagcggtggctcacgcctgtaatcctagcaccttgggaggccgaggcgggcggatcacttgaggtcaggagttccagaccagcctggccaacatggtgaaactccgtctctactaaaaatacaaaaattagccgggtgtggtggggtgcgcttgtaatcccagctactcgggaggctgaggcaggagaattgcttgaacccatgaggtggaggttgcggtgagccaagatggcaccattgcaccctagcctgggcaacagagcaagacaccgtcttaaaaccaaaagttaaccgggcgtggtggtgggtgcctgtaatcctagctacttgggaggctgaggcaggagaattgcttgaacttgggaggtggaggccaagattgtaccactgtattccagcccgggtgacagagcaagactgtgtctc

SEQ ID NO: 262674 - DNA, 772 bp, Homo sapiens
ggccacgagagggcgggggaggagtgaagaggttgaggcgccccgcccagtcagcaaggttgcgcgtgccctgtgagaccgccaagatggtggtgggcgcgttccctatggcgaagctgctatacttgggcatccggcaggtcagcaagccgcttgccaaccgtattaaggaggccgcccgccgaagcgagttcttcaagacctatatctgcctcccgccggctcaactgtaccactggctggagatgcggaccaaaatgcgcatcatgggtttcaatgccgctgccatcaagccgctgaacgagggtgcagccgccgagctgggcgcggagctgctgggcgagggcatcatcttcatcaccgcctgcagctgcctgatgctggagtattggcgccaccagttgcagcagcgccgcaaggaaaaggagcgacgtgttgccagggaggcgctgcggggcgaggtgggccacttggggctggcgctcgaggagttgcaggcgcaggtgcaggcgacgtcgacgcagctcgccctggaggagctgcgcgctcagctgcaggaggtgcgagcccacctctgcctccgagacccgccgcctgcacccccagttgcgccggcgtccgagaaataggaggtctcggggccctggtcttggaggtgactgctgtctggactgcgaagtctctgtcttggcctattctccgcactgtcccatcctggaccggcccagctgacaccacccagtccttcgggggcgccggagagatcctgggc

SEQ ID NO: 262675 - DNA, 541 bp, Homo sapiens
gaatctgatgtttgagggcaggaagcatccagcatgggagaaagatggaggccagaagactcagcaaatctgctctttccaatcctacttttatgctggcaactgattagatggtgcccacccagatggagggtgggtctgcctctcccagtccactgactcaaatgtggcaacactctcacagacacacccaagaaaaatactttgcattcttcaatccaatctagttgacactcagtattaaccatcacacctgccttgtctgtctttaaaactctaagcaacatttttaatttatcttatccacatttccaagatagggctataccttggccttgtgagaacaagcagaatttaaagggtaaaataaagagcaattatggaagactaaaaataaaaatagaaaacaaattttgagctaccttacttcagtgagagttattgagctactggctaaactgagctgtcctgactaaaaatggagtaaatatgggcaagcaatttcagctctgagtgcaatggcgccttataaatcaactgg

SEQ ID NO: 262676 - DNA, 468 bp, Homo sapiens
ttgaatattgacatcttgtaccaaatcaaacaaatgctttaatcatactactataaacattatgaaatgaccttaaagattccccccaaacctggatacttaaatgaagacattaaagtttaagaagatctgtttagggcctagtgactattaattcttgaattcagaatttaaaaatgcgtgcttgaggccaggtgcagtggctcacgtctgtaatcccagcactttgggaggctaaggcgggcagatcacgaggtcaggagatccagaccatcctggccaacatggtgaatcctcgtctctactaaaaatacaaaaattagctgggcttggtggcacgcacctgtagtcccagccacttgggaggctaggcaggagaatcacttgaacccgggaggtggaggttgcagtgagccaagatcgtgccactgcattccagcctggtgacagagcgagactctgtctcca

SEQ ID NO: 262677 - DNA, 273 bp, Homo sapiens
atcttatgaaataagtagtagtattctaattttacatataaggaaactgaggctgagaaagattaagaaacttccttcaggacacaaaattcctttagggtgggtacaggatagcagtggcaatgcttggattcagacctaggcctatgattccaaacctcatgctctttcaactacattctctgtcacagtgagtgccaaataaatatttgaattaccataaactgctgtctcaagtgatactgcagtacagatgagtttacacatgggtaa

SEQ ID NO: 262678 - DNA, 341 bp, Homo sapiens
cggggagtttataagttgtctgtgagaggttcagaacaatggaaactactaagtcattaccagaattagaattctctttcctacctttattttttaaggcgaaaggatagcatttttaaagtagagtgtcgtgatcaccatgttcctgtcaatattagtgatcatttctgtcaatggaatacataattcagaaggaattgctaagcgtaaagatagaaactgcttaggccaggcggggtggctcatgcctgtaatcccaagcactttgggaggccgaggcaggtggatcacaaggtcaggagttcatgaccggcctatccaacatagtgaaaccccatctc

SEQ ID NO: 262679 - DNA, 378 bp, Homo sapiens
ctcagctcatttcaacctccgcctcctgggttcaagcgattctcttgcctcagcctcccaagtagctgggattacaggtgcttgcaaccatgcccggctaatttttgtatttttagtagagacggggtttcaccatgttggccaggcttgtctcgaactcctgacctcaggttatctgctcatctcagcctctcaaagtgctgggattacaggcgggagccactgtgcctggcacctggacatttttacactctgtttcttagggactattcttggtatccactgtctttttttttttttttttgagacgggagtctcgctctgttgccccaggctgtagtgcagtggtgcaagcccacctcccaggttccagcaatt

SEQ ID NO: 262680 - DNA, 699 bp, Homo sapiens
ctggtcataggccaggcttatgaactagataccatgttgtatttagatgctgggatggcctggtctagatgctgggatggcctggtcagagttatggggctctcagtacttttttcatttcatgaagatgcaacagtcacttttataaagatgataattaatgagaaaaatattttttatcaagtacctaccatatactaaggcattgggacagacatttttcaagcattatctactgtatttaaagtttgccttgtgaaataggttacttattttgtagcaaaggaatacttattcctttatctttgagacagtttggaaacctctctctgaaaccgtgatatcactgttctcactgtggattttggatccttccagactcagcctacaataactatttctccatctgcccaccagtcccctttctcagctctccaaatttcaatcacacccttatttgtatcagatctaccgtcatctctagtttgtgagctcctctgagaacagatagactcttgttcttctctgtatcacatagtgctgagctcaatgccttgtgcacatgggtctcaacaatatcctcagagctcatttcttaaaagcagaatcaaaaggtttgaataacacctttcaagggcatgtccttttgtactcagagtaaaggtagatttccatttattttaaatgaacatataagca

SEQ ID NO: 262681 - DNA, 729 bp, Homo sapiens
ctggacttgtaaacgaaaagcttcataagtccctctttgcttagtacttttctcgtcctttccccagggtgcacgtaaccctcaagcactaggaccgtgcggaatccaggctgcgatggcaccttcatttaccgcccgcattcagttgttcctcttgcgggcgctaggctttctcataggcttagtaggccgagcagctttagtcttagggggtccaaagtttgcctcaaagacccctcggccggtgactgaaccattgcttctgctttcggggatgcagctggccaagctgatccgacagagaaaggtgaaatgtatagatgttgttcaggcttatatcaacagaatcaaggacgtgaacccaatgatcaatggaattgtcaagtacaggtttgaggaagcgatgaaggaggctcatgctgtagatcaaaagcttgcagagaagcaggaagatgaagccaccctggaaaataaatggcccttccttggggttcctttgacagtcaaggaagctttccagctacaaggaatgcccaattcttctggactcatgaaccgtcgtgatgccattgccaaaacagatgccactgtggtggattactgaagggagctggtgccattcctcttggccataaccaactgtagtgagtagtgtatgtggtatgaatccagtaacaagatctatggccgatcaaacaacccatatgattacagcatattgtaggtgga

SEQ ID NO: 262682 - DNA, 379 bp, Homo sapiens
tagacatcttatacctccttagcttcatattttgcctcatgggggactacactgtgtaattcactgaaagtgtctcaaaaaatgattaatgtacataggagtctttcaggaaatacttgttgaatgaattgtttagtgaataaatggctgctgactaaagtattgtattttgcaggtgaaatgtatagatgttgttcaggcttatatcaacagaatcaaggacgtgaacccaatgatcaatggaattgtcaagtacaggtgagcatttccactctctcaaggagtcatttatggtggtttttgttctacttctgtggtcatgccaccttagcatatttcctagattcttctttctctttgtccttcccttgttctcact

SEQ ID NO: 262683 - DNA, 575 bp, Homo sapiens
gcaatttaacaaacacatgataagccagcagctactgtatgccaggcatttttggtacacaaactctctgagttctcacaacaatcttaggtgacaaggatgaagaacataaggttcaggaagtctagtaactctcccaggatcacacaggtggttccaagacatacacacatgctctgaacttcatactgggagctggagaggcttagtaagaccaaggtctgaggtcacgtcatcaagagatggagaaatcaaatggaaactaaacagatctagccctttttcccccagatggctcaatgttgggccaggccaactcaactcactgaggtagactgtccttggtcttgaaagggccagagcctgttgattcaggtctggtcttccgttgtccttctgtattttgtcagggcagtaccctctgaaaggacttgggtccctcttagtgagcttcaatgtcccttccagcttctggaaggtcttatcctggtgtcctttcagattcctttatcagagtcttcttcccttcctgaagcctgagatctggtcctggtagagaggacacactttaaaaa

SEQ ID NO: 262684 - DNA, 365 bp, Homo sapiens
cctcaggaaacttacaatcatggctgaagaggaaggggaaggggaagcaggcacatcttacatggctggaggaggaggaagagagtgaagggggagggctacacactagtaagcaaccagatctcgtgagaactcactatcacaagaatggcaaggtggaaatcacccccatgattcaatcaatcacctcccacaaggcccctcctccaacattggggattacaattcgacatgagatttgggcagggacacaaatgcagaccacatcagatggggacttcatgttactctggaaaatccattgctacttagtatggaaccccatgaaatattaataaacctaaaatcagttaatacataatctt

SEQ ID NO: 262685 - DNA, 318 bp, Homo sapiens
tgggctgaccttgaacccctctactaccagccaagtactccttaaattcccctacagcataaatatgattgtttccacaccaaggatcgaggctaagagagctaagtctcagagattagagaatcacagtagaaggaagacaggcagagcatcatgggaagagtcatttctgcattaacacatggctcctacacatttcctttttgtgtgggtgtttgccttatctgtcaattcaactatgaagtccttgaagataaataccgaggttttttcctacgtttgtacacaacaataaattgttaaatttacttctcttct

SEQ ID NO: 262686 - DNA, 421 bp, Homo sapiens
gttcataatttttttcagaaattaaaaagctgagggacgctttacaactttttaaaataaaaagtatgtatctgaagaatacataacctacaaaaccttcctctttagtagggtatctgaaatttaaaaatgatgcaactatgtactagagtgcatattatcagcggttttgtgtttgaacaacttcattttgcctcgaataaaggatctgcgcatggtgaatgcatgctgccttctaaagcctgcagtcgttaaaagaacattaatcatttaaacaaggtcacaagcaacaaaggccaacgagggttcaaagtttacaggtccagggatttatcaggtagaaataggctacatttcaatattttgtaaaatatccttttatgaaagagctatcagtcatggtacaaggctggtaaaactc

SEQ ID NO: 262687 - DNA, 280 bp, Homo sapiens
tgcccctcactccgcctcccccagagccgctgctttgcctcgcttctcgccctcttgacgggcgccgaggtgcgtgggcttctgagcattgaacaatggttctgcctcctctgccaggcgcagtgttgggaaggaggcagagggccaagacgtgtgcggcagcctcgggcgcaccctcgaaccccggggagtgcgggagcggacggggggagaaggtgagcgcctccggggacgcggagcgccaggggccggccgggcttctgagtcttccggcggccgc

SEQ ID NO: 262688 - DNA, 300 bp, Homo sapiens
gatttatccatttttcactttctcttcctccttgactctaagcttcatgaaagtagaagtgtctttttttttaaattttatctttgcattgcagttccttgcacacagtagagactcaataaatacttcctgtatctgttgttaactactcagaagatcatcagaataacattctgattaagcaatggtaaatttatttgatttatatgagaaaaaagaacagcacataaatagagccttagcagtgcttcagatagacataatgggagattgtttatagggttgtgtggcctggactgt

SEQ ID NO: 262689 - DNA, 678 bp, Homo sapiens
ggatgagactgaagactattattctaagtgaagtaactcaggaatggaaaaccaaacatcatatgttctcactgatatgttgggattaagctatgaggatgcaaaggcgtcggaatgatacaatggactttggagacttgtggggaaggagggggcaccaaaatctcacaaatcaccactaaagaacttactcatgtaaccaaacaccacctgtacaccaataacctatggaaaaataaaacataaataaaaataaagtcccctaaatttatagaagtccaattttgtttgttgctttttttttttttttttttttttcgtagagacagggtttcactatgttggcaaggctggtctcaaactcctggcctcaagtgatccacccacctcagcctcccaaaatgctgggattacaggtgtgagccactgggcctggcctaatttgttatttttttgtagagattggggtctcaccatatttaccaggctggtcttgaactcctgacctcaagcaatcctcctgctttggcctcccaaagtactgggattacaggtatgagccactgtgcccagcttgttgcttgtgctttgaatgtaatagctaagaaaccattgcctaatctaaggtcataaagatgtatgcctatatatagctttagctcttacatttagatcatc

SEQ ID NO: 262690 - DNA, 226 bp, Homo sapiens
tgggggtggaataatttatacatgtgtaaaaacatttatttttctacatatttacttcaagcatgtgttaaaatatctgcaaacaactccagaccccctccccatcttatttttatcctaaaggcagtgttacatggatatccaaatgtttagagaggacaatcttaaatatacaaaagaatgataaataaataaataaataaataaataaataaaaaaaagattt

SEQ ID NO: 262691 - DNA, 440 bp, Homo sapiens
cttttgtaaattgtccagtctcaggtatgtctttatcagcagtgtgaaaatgggctaatacagtgcatttatttttttgaagcatgtccatactttccattggattctcaaagggattcaggacctggaaactttttgaaatactgctccatagtaaatggcacaaatctctctgaatcaaggatgtctctagccttaggcaaagctaggttgaaggacagaacagagagtcagcctctggagtgccctctataaggaaaaagaaaacattactagagtaagttgataaagtataaattcatctcactcctactggacactgcccttgagtgaaattaaaaactgaaaaatttttgacatatcttttgagcatttttgtaaaatacgcatgtagctatggccaaaattctggaataaaatggtacatatagccttaggta

SEQ ID NO: 262692 - DNA, 200 bp, Homo sapiens
ggaggtggattagttcccaatcttcaccctgataaaactcagtgcatctaactgagagatcccctagccacattaatcaaagctggggcctcagcccaccattgtgtattgtatctaaccacctgctttagctgcaactggtttctatctagggatacttcccctactggcctgaagcctggatcatcaagagagtaagt

SEQ ID NO: 262693 - DNA, 313 bp, Homo sapiens
agtcacccagatctccactttctatgtgggtgcagtcacctgggagaggtcttactaccattctgctagagctctatctaagcagtgtgtgatgctccggccaccttgactcaccagtggctgtcacggaaagtctgaaagtggcaaagagctacaagcagtaaaagataatatttcgtggctggaaaaactcttttaacctgtgatttgatttctcttttgtttccatttatggcagagcctccatcttggcaaggcacgtaatcttatccaagctgtgcaaaacctgtccaaagtgtatgtacaataacat

SEQ ID NO: 262694 - DNA, 370 bp, Homo sapiens
atgtatagtgctttggtcatcttgtttggaatgtctttccaagtttaaataatgggattataattaaatttaattaacatgaaaatgttgtagtgcttttgggtataaaaatcaattatcactgggctagagaagtgctgaagtgcctgttcacagagatttctggttagtagaatgtaggtagtatagttttttttttttaattgtggttgttcactcacaattcatactttttacaagtgatcagaattgtcccgacagttaaaataagtgtgagcgggccgggcacggtggctcacgcctgtaatctcagcactttgctaggccgagatgagcagataacttgaggtcaggagttcaggaccagcct

SEQ ID NO: 262695 - DNA, 485 bp, Homo sapiens
cctgaggctggggatgggagtgggaggagtagatgggctccaggaggcaccgaagcagggcgtcagtgggtgcctggacctaaggtgactgtggtggcagggagcggtgaggaaggtggggtccagagcatcagagggcctgtgtgccctgctatggggtttgaacttgaccgtggcttttcactgaagattcctcagaagggtgcagtgccacggctgaggcctgtaattcagtgctgtgggaggcagaggcgggagaatcacatgatgctaggagctcaagacagcttgggcaacacaggagatgctgtctctctgaaatgaaaaattaacaaattagtcctgcatggtgccgtgtgcctgtagtcccagctacctggaaggctgaggcaggaggatcacttgagcccaggggctctaggctacagcaagctgtgatagccccaaagcactccagactgggtgacagagcaagacagtttctc

SEQ ID NO: 262696 - DNA, 422 bp, Homo sapiens
ataagagctcaaaatggaaaactcagaaaaatattaatatttgatgtgctagaaaaattggagattccaaaaggctcttgagaggttatggtaaaaagcaaaaagtggaaaaggagagccatagaaactaagggacaaaaaaggttaagacatccaggctttaagatatatataagacagatctgaaaacatatacaccaaactctcaggaatggctagctttaggaggtggcgttgaagataatagcaaaagaactgggaatttcaattttgtatttgaatgtttaaaacctgttctatatatattataacttcttgagaacttagtattttaaaataaaaagttaaaaagatcctcttaaaattgaagttatagtcaattgaaaataaaaatagatgaatcaaataagcttaatcagaac

SEQ ID NO: 262697 - DNA, 392 bp, Homo sapiens
tactcaatttcatgttcagaaatccaaagagcccgaggaacacatttcacagacttctaccagcaaaggaagcttgcatatttactctgcgatttggcaatttgagtttatttctgtcacagtaagatgttacaggaggaggagcaaactactagtgggttctccttttgaatctggaatgaatttactgatggttcatcatcttggccctgaaaaatactgttgtaacaatgaaactatatgtttttaaagtatttttaatggaaataacatagataaccataagaatatttttaaaaattaattttcatttttcttgcatacctttgcatttactttttatattcctagtagtggcaggagtattaataaagcaatgatgatttttgtca

SEQ ID NO: 262698 - DNA, 672 bp, Homo sapiens
atatggatgaaagggaagcatctttgaatataatttgttacacagttttgaccttggaatcatgtaaatgttttacatactcaaaattaaatcaaagagaaaaaaaatctagtgatcctcatacagctaaatgcttcatgtgataatggaacactgatatgttgcctatgccccattttattaaaatgaaccagactataaccttgacctagccaaatcatttttcttcagtaataaagtttccctgctatatttacttatgttttgctccaacatatctaaaagctaccatctgtaggtaataagaacagaacactatcacatattgttttaatttcctgcctgttatcagcagcaagaaggtaaccctggaaacagggatttatggcattctgtttcctacggttggtcacaaccacaaacaaaatgaaagcagcctccacaagttaaaggtttgtctacaacaacaccacacaatgtcagttttcaggtatacctttctcatgtcattcataattaagcaatgtcaacaaataacactgctgggtaacatccctcaagtatttagtctgccagacccttttctgaaagtatagtaagacaggcccacaatacaagcccaagtgcttttttttttctctcgagacagggtctccctctgttgcccaggct

SEQ ID NO: 262699 - DNA, 630 bp, Homo sapiens
aggatattttgtctggagtattttctagtagcaagtgatcaggtggacagcccttttttaagagcgatcttttcagggaggagaatggcagctaatgcggccagatggcaaagggatcctcagatcagagattttagggttaagaacaggaaggggttagagaccatttagtcaaaaccagtcattttatagaagagaaaactgaagctctgaaagttgaatggacttactcaaggttaatagaaactaacaactttctacccgatatctgtctcctcttcttccttactaacaaatccttgattttgtttagagtggcaatgttcccagaacaaaataatcacctccccagccttccttggagctaggggatgcatattacccatttctcacaaaggtgtaagtggaggtcactggatggggctgggggaagctttttaaggggaaacaaatgtcttgtgtgctcttgtctctacgttcctccttcctgcttgtaatgcagacataagattagctgttcagctctaacactgtggtttttaatcaggtgccagaatccattctgggtgtgaaaaaatgttcacttttagagcaatatctctttctggtaatccatcaagtgttgctaat

SEQ ID NO: 262700 - DNA, 358 bp, Homo sapiens
gagagaactagtctcgagaacctgggaggcggaggttgcagtgagccgagatcgcgccattgcactccagcctgggtaataagagtgaaactccatttaaaaataaataaataaatataaataaaaataaataaataaatacagaaaagcctgggagtttccttgacttcctttttccccctccctcttcttattcatcaaacatttgttgattgcctatataagccaagcactgtaataggtgctggtcatgacgacacaacagattatcactacaccagagacaaagaccaaagtcataacctctgaagcaggaagacctcactgattttagtgtcttcttctactttactgtgta

SEQ ID NO: 262701 - DNA, 414 bp, Homo sapiens
acagagagaaggattctattgcttgacacaactactgacctatctggcttgttttgtccatgtcagctctgctgtcctcactgccgatcacctatcctaagacttcaaccatgaatacttgcccaactcctgcttccattacttaaacatttccacatctcctgcagccactctatttgaggtggtttaaaaagagataaagtgagggaggctggactagaatgggtgctgctgacacttcaagcatgtgtgtgcacgcccttgtataattgtggtggtgctccaggttacattactctaccataaaaacctagtagtgttagttttgatctcctaagaacccagaatatcctccttcttccagaactactatctggatctagtagaaggtgaagtgtaactctgcacagtgaa

SEQ ID NO: 262702 - DNA, 566 bp, Homo sapiens
caggagtttgagaccagcttgagcaccatagccagaccctatatgtagccaggcaaaatggtgtgtgcctgtgaagggaggattcacttgagtccaggaggttgaggctgcagtaagtggtgattgcgccattgtcctccagcttgggtgatagagtgagactctgtctcaaaaaaaaaaaaaagaaaagaaaaaaacctcatatttatatagctctaaaccactgtgagttaggtagaatttgggggaaggctctctaacctattcttagtatggccagaccaccctttcctcctttcagatcttactgttttgtttgcagagatggacttcaaggccaaaaggcatactgtgttagggtctgtgtcaggcagccccttttgggttccaagagcagaggaagatgaggctgtgtgagggaagaccataggatgatagagaattggtaccgggcacagtggctcatgcccataatcctagcactttggaaggttgaagcaggtggatcacttgaggccacggcactccagcctgggtaatagagcaagactcagtctcaaaaaaaa

SEQ ID NO: 262703 - DNA, 966 bp, Homo sapiens
ttttctagaaacatacacaatgaagtcctgagagaagaacttttccctgtattcaccttagggttgtatgtgccgtagggcattcagatgaggactgagaaaaagccattggattggccattaggaggtctttggtgacttttgctgacaatcagggggaaaggatggggtgggagccctggtgtcctataaactgagcagagagttaatcaggtttgcaggcacattgagaaatgggtagtgatgggcagagtgaggttgggcttggaaagctttttgtgagaaaagtcagtttcaacacttcgataggggcagacctggggggatcattgacaaagtgacagttacattggataaactgaacttgatgaagagctgcctgcagtgttgagctggtgacaacttccctgcagagtggtatttgggagcctctagtctagtcgagtcctatataccggacatagctgcccctctttaaatatatcttcttaggaaatcctcactccttgtaattaacttctctaacagtcgagaagtttccttttgctgtggctccatgccttgtggagcccctcactcagtgagtttgtatagttccccaacccctagctttgtctgctgtaaattaaagacatttggtttcttatcgaactggaagggaggcctcagaaccaatgtttctttaggtgatagcagaacgttgcagatcatttttgatttgtgttttgctgctttaatatatttttctgacatatatgttcaaattcattcctttcataatttgtttttcttcctgaaatatctacctttaattccccatgttctcatcttgtgacttttatctatgtctttgcattttaattctgtcttccaaagtgcactctattgtcaaaaagtattgtaagtaccttttacaggtaagtgtcatcgcaggtagatttatgcttggttcttaaaacttaagca

SEQ ID NO: 262704 - DNA, 377 bp, Homo sapiens
tgtaaaaatattctcaggcatatgaaacatcacaggctttgccaaagacccaaatcaaaacatattcaaaggaaattctcattagttaatcggtccagaagatgctgtgtgaagttgaggtggtatagcttattgctaattaaaatttgagacattactaatataataggaaggggagacaatattggcatggcaatatgctaaaatacttattttactaggggaaagatatacatattaatcgttttaagaataaataggattaaataattttaagtatatacaagaaacccagccataaacaaaaatagaatatgtaatttttaagagacttgaagggtactcaagctatctaaccaagaaccaggagtgagggg

SEQ ID NO: 262705 - DNA, 447 bp, Homo sapiens
caccaccttccttagatctgaaggggggtgggtatggcattacctgaggtggtggtagccggaccccaggagactgacccctgctagaagctgctgtcagaaaagaaaccaagaacaactgagaggttagaaagttgtagattaaagttactttgacctctcttttctcctgcctttttgtcccctgctgattcttccctttggtcaaacccaaccagaatccagagggcaggtggtggtattgccctccagggctcagcctccagcccagagcacagtgagaagaacagacaatggacagggaggaagaggggcaaatggagagtacccactactcgggaggctgaggaaggagaatcgcttgaacccaggagacagaggttgcagtgagacgcgatggcaccactgcactccagcctgggtgccagagcgagactctgtcccaga

SEQ ID NO: 262706 - DNA, 414 bp, Homo sapiens
aggggtacactgtctttccaaactgttcctgctggttactttgttgcttagttttgagacagggtctcactctggttgcccaggctggagtccagtgggcaaccagagtgagactggggaaattaataaaacagtaagcaaacatacagaaaaaaaaaaatcaatgaaaccaaaaggtggttctttgaagagacagaaaattaataaatccttgccaaataaatataaggtataaggactgaaaaagaaataaaactcattattcacagatgctatgtccatatatacaggaaagcccaaaagaatctaaagataattagtaaaagtgagtttggcacagttgctgaatatgaggcatatatatatctttctaaaagatatataaaaatgcaaacaatccagaatagccaagac

SEQ ID NO: 262707 - DNA, 459 bp, Homo sapiens
gatggtttcagtaagatggaaaatcaggtcaacctatttgcagttcaacaataaggcccagatgttgttttcaggaagattcgtcagcaacgtaccctttgagggtgttgttaatgatcacacctaccagttattcagtctttaagatgccagatactctcttggattttttttccaatttttcttatcaaggtataatttacatagcatataacacccttcgatagctcaggtggtaatttacatagtgtatcttctgagtatcttccatctgttagttcatttaatcctcacaactgtgtcagaggggtactatgatagccccattttatagacgagaacgctgaggcacagttagcttaaataacttgcccaggttcccactgctaatacatgtagggatgtgcgtaagaacacagccagtgtagctggtttaacatcagcaagcagaacagtaaa

SEQ ID NO: 262708 - DNA, 639 bp, Homo sapiens
aacaggtaattgaggaatatttttaattcaatcctgtgagttcttgactcagttgctacagtgttgagtggttttggatagactttttgaagacaaaaaactttaaataacattggaaatgcgtgtactaagtgactagaacagttaacaagaatggaatagcacctgcaggtgggatagctgcagagttgggctatgtgtactgtgtgagagggagtgagggagcatggtcttgccttatgttccattggcagttcagaatttcaagagtttcaagcttgtttatattctcatttctgtacttccttttataatttttaagatgagctccttcattactgccaagagtatgttttctttttgcctttaccttgaggctgtcttttcacctgaggtacaaccaatatagggctttaaaaggctggctgcttgttatttcaaatggggaactttatgtataatagtttgctgtcatgtacctgtacttcaaaactgtattaagggaagacaactgtctcaataaaatcaccatgagaaaaattctttgctttgttatttcaaaatgttattgttttaagtctgcctttaatcatagctttaaaaatatttatttgctaataaaagaaaatgttgaatggt

SEQ ID NO: 262709 - DNA, 564 bp, Homo sapiens
ccatacaggagagatggagaatgctaggaaggtgtgtatgtgctaggggaatctggcccagtctcagagtgtcagggaagacttccctggaaacctgtcattggatccaggtggtaagtaaggttaaccatacacagatttgggagaatagccaagctgagaaaatagcttggatagaggccccatgaggagagggagcctatgggtgggaatacgaagattctgagagaaggccagtgaggctggatgtgtgtttggatgaaaggttccgaccattcctgaccaggggtcaacaaattatggcccatgggctgaattcagctacaatgatagagctgagtagttgcaacagagacattatgacccacaaaggtgggaagaaattcagaatgctgtctagaaaatgtattgtctgccttttatagaaaaagtttgcagccaggggcagtgtttcacacctgcaatcctagcactttgcgaggccaaggtgggaagatcatttgagctcaggagtttgagaccagcctgggcaatatagagagacttcatctctcctgaaaaatt

SEQ ID NO: 262710 - DNA, 971 bp, Homo sapiens
ttaaagcttggaactaaatctgtgactaattagaatggagtgttccaccacctttaagtcaccaactaaaatccactgctccatgtcccggtgcgcacgaggccttctgggtgaccagctcaaaggaaaattattgtctcaacttaggtctctgtgtgtaggtacccacagaatggaaatcgctttacttggggaagaacaagaggacaagatgagataaaaaggaagcatgtttaaatggataaaagaaggtacttttttcccccactacacacaattgacctggggaactcactgcagcaggatattaagatcaatggtgaagatttgtgttttaaaggattagacatttcacatgcatatcatcaacagtgaggctcaataggataaaagtacagcggatgaaagttctcaagcttcagtgtataagttgatcaccaactgggtcaggcaaaaagaaaaaagttgtctacctgattatctaagatgtcaagggacggtgggtttgggggtatttgggcattccagttaccactactgtgtaacaaaccactccaaattagtggtgtaaaacaagagccatttaattatgctcacggatgctgcaaatcaggaagcgggagagggcacagtggggatggctagtctctgccccatgctatctggggcctcagatgggaagacttgaacgacagggagtggcttgaggctgggggtagaatcatcagggagcttctttagtcatgtgcctgacacctggcctgggatgaccccgtctctacaaagaaaacaaacattagccgggcgtggtggcgcatgcctgtagttccatctactcgggaggctggggtgggaggattgcttgagcctgggaggttgaggctacagtgagccgtggtcgtgccactgcactccagcctgagagacagattgagaccccgtcgcaaagaaaaaaagaaaaagaaaaaatg

SEQ ID NO: 262711 - DNA, 468 bp, Homo sapiens
  misc_feature (225)..(225): n is a, c, g, or t
  misc_feature (237)..(237): n is a, c, g, or t
tggtggggaggggagtcagggagctgctgctttaaggcaggagtcttcttggcatgggtctgtcaacctcttctctcccccgggtctgtgcttccaaatgctggtgctgtttgcacacttgtgtctttggccttcactggttctgcttagaatctcccttccatgggtatctacctgaccatctgctcctcttctttccagtctgaaaaaaaaaaagaaaaaagnaattaaaaagcnaatatatatagagaaaaccttttaatggtaaaatgttcatttttaaaatctagatgcagggcagaaaagtcttgtcatgtttaaactcctctgggtttgaagtttctggaaatgaaaggtgtgggaacaggtctctggagcagcagtgtggaagacggggtactgaggctgaagtgagccgagatcgcgcccctgccctccagctgacatgagagaacaaggccctgtctg

SEQ ID NO: 262712 - DNA, 660 bp, Homo sapiens
ggaagcccaaccaagatcagcagagctgtctatccaaccccaagttcactgcaaattcactgcagagacaggaatgagcccacttgagactggaagagtcagatggttttatctgtagacttacgaacacaaataaatgcttaggccaggagctgtggcttacacctggaatcccagcactttgggaggctgcagcaagaggatcacttgaggccaggagttcaggaccagcctggccaacatagtgaggtgccagctctacaaaaaaaaaatggaagcagaggtaggaggattacttgaacctcagaggttgaggctgaagtgagccatgattgcaccactgcactccagcctgggcgacaaagtgagaccccaactccacactctctctctctcacacacacacacacacacacacacacacacacacaaataagataaaataaaaatgcttagtgcttgaagtcattggctgcagggctacttgttacgtacgcagcagtagctgactgatccaaccagcaatagcgtcatcatcaccatcccccacaatgggcacccacttgccttcaatatgaatctaagaggaatcattcaactgattctctctaaattaagaagttctgctcaaggagcttagctgtctccactgtacaaagg

SEQ ID NO: 262713 - DNA, 360 bp, Homo sapiens
ggaatatccccaactcagaagaaaggggaacatcgtgccttcaaatacgttgtctcaaatatttaaaaaaaaattacaacaaaaagggcaattttatgccactttgctttctgttttcttcaagttcagaattgaattattatagttatgtattccctcccaaaaggggcaaatgactttgtcacagataaccaacataacaaatcattcaaatagaaaactatggtgtgcgtgcctgtaatcccagctactcaggaggctgaggcaggagaatcgctggaacctgggaggccgaggctgcagggagcctagattgtgccacgcactccagcctgagtgacagagagtgactctatctca

SEQ ID NO: 262714 - DNA, 480 bp, Homo sapiens
gggacttctctgtttcagcaccatatagccaaggtatcttgagccttacctagttcatgcaatgcttggagccttgattctccatacacgaaagggaaataaaactctgtcttacagggccagcttgaaaatgtctacaaggggccaaggcaaatccctctcatgactatttcatctggaagtaaaaacttgtccttctctgaatgcccagaggggataaatagcagaagtagaatgactcaacttccttaataagatattggttgaaaaccaatcttctcccaacttcctcttttaagtcttcagcttgcctgccaccaggccacaataggcaaacctctgcctactcaaagtgcggggctgggctgggtgcggtgtgtcacgcctgtaatctcagcactttgggaggcaaggcaggaggatcacttgagaccagcagtttgacaccagcctggacaacatagtgagacttcatctcta

SEQ ID NO: 262715 - DNA, 321 bp, Homo sapiens
gaggtgccttccaggtgatcaccatggaaatgcctttcactggggtctccagagatgaaaaattcaggatatgtctatgtgaaatatggtcttgtaaaccatgggatagggatgggaaaagttggcttagtctctctctctctctccacctctggagtggcagctgtgtgactccctgtaaactttcaaatggtggttcttcatgcccggggatgattccgtgtgtcaacaagtctgggcagtctttgatgtagccaccagcgtctaggccaggaggcacactgctgctgcctggtgccctcatgatcattctctgtgcct

SEQ ID NO: 262716 - DNA, 394 bp, Homo sapiens
gcaacatctccctccaaaccagtattcagattcttctttcctctctaaactcttttgcctgaaaagagtgtaaagcaccactctggagacaatatagctgcatggaaattcatcaatatgaagttcctattatggaagaatggcaaggaaacgtgaaggactcatgaaacaaagtgttcagcagccatatgaataatcaattagatggagagccacctgatgctgcacatttggcggagcctccagctgccaccagttttctgccctgtcagtatcagcttaaaaaaatctgttccctgtttatcacgactatactcagtaaaataatctattcttttgcacctcaccccatattttcctacttgctaattagagatgcaaatgttgataaata

SEQ ID NO: 262717 - DNA, 445 bp, Homo sapiens
gaatgctcaaataagctaagggtagaagtagaaatagatctcaggtcgtgctgtgatgcgagtgatacatgtataggcatttgcttttgaggagcacaagtaatacaggagtacattctccttgtttagtattaaagatgtaaagaggggccgggcgtggtagctcacgcctgtaatcccagcactttgcgaggccaaggcgggcagatcacttgaggtcaggagttcaagactagcctggccaacgtggtgaaaccctgtctcaactaaaaatacaaaaattagccaggtgtgttggtgggtgcctctaatcccagctactcaggaggctgaggcaggagaatctcttgaattcgggaggggaggttgcagtgagccgagattgcgccactgcactccagcctgagtgacagagtgagactctgtcaaaaaaataaaaataaat

SEQ ID NO: 262718 - DNA, 447 bp, Homo sapiens
ctcacagctgaggcaaagatcaatttatgtgtattttatttttatttatttatttatttatttgaaatggtctcactatattgctcaggttggggtgcagtggtacggtctcagctcaccgcaacctctgcctcctgggctgaagccatcttctgattttagccttccgagtagctggaaggtgcatgccaccatgcccagctaatttttgtagtttttgttgaggtgggaggattgcttgaggccaggagttcaagatcagcctagacaacatagcgagaccctatctctaaaaataataatagtaattattattatttaaaaaaccaagctgggcacagtgtgtgtgcctgcagtctcagctactcagaaggctgaggcaggaggatcgcttgaacccaggagtttgaattcagcctgggcgacatagtgagaccttgtctctat

SEQ ID NO: 262719 - DNA, 426 bp, Homo sapiens
catttccttcatttgggcaaataatacattaacttggtaatctaagacaaattcttaaaaatcaataagctaatcaaaataataaatatacatgtttaaaaatcaaatgacattaaaagccttgtaatgggctgggtgtggtgcctcacacctgtcatcccagcactttgggaggccgaggcaggtggatcacttgagggcaggagttcaagccagtctggccaacacagtaaaaccccatctctactaaaagtacaaaaattagctgggtgtggtggctcattcctgtagtcctagttactcaggaggctgagccaggagaattatttgaacatgggaggcggaggttttagtgagctgagatcacaccactgcactccagcctaggcaacagagcagagcaagactccatctcaaaaaaaaaaa

SEQ ID NO: 262720 - DNA, 484 bp, Homo sapiens
gagaggtcaaagagatcagaagtgtgagaaagcctcattggctcattggctttgcagatgaagggggttaccagccagggaatgtgggtgacttcagaagctggaccctggtcaacagccagcacggacatgaggacctcagtcttacagccatgtggaactgaaatctaccaaccacctgaatgaggctggaagtggattctcccccggagcctccagatcagagcccagcctggctgacattgatttcagccttgtgagattcagagcagagcctctgagcttacctggacttctgacctatggagctgtgagatcataagggagtgttcttttaagctgccaaattttggggaatctgttatagcatcagtagaaagcaaacacatgtgggaagccagctgtcaagttatgagcatacaaaggaaattggggaagtgataacgtcaagcattcatcatgataaggcttatgttattgaata

SEQ ID NO: 262721 - DNA, 1632 bp, Homo sapiens
atgggggactggaacttattgggtggcatcctagaggaagttcactcccactcaaccatagtggggaaaatctggctgaccatcctcttcatcttccgaatgctggtacttcgtgtggctgctgaggatgtctgggatgatgaacagtcagcatttgcctgcaacacccggcagccaggttgcaacaatatctgttatgatgatgcattccctatctctttgatcaggttctgggttttacagatcatctttgtgtcttctccttctttggtctatatgggccatgcactttataggctcagggcctttgagaaagacaggcagaggaaaaagtcacaccttagagcccagatggagaatccagatcttgacttggaggagcagcaaagaatagatagggaactgaggaggttagaggagcagaagaggatccataaagtccctctgaaaggatgtctgctgcgtacttatgtcttacacatcttgaccagatctgtgctggaagtaggattcatgataggccaatatattctctatgggtttcaaatgcaccccctttacaaatgcactcaacctccttgccccaatgcggtggattgctttgtatccaggcccactgagaagacaattttcatgctttttatgcacagcattgcagccatttccttgttactcaatatactggaaatatttcatctaggcatcagaaaaattatgaggacactttataagaaatccagcagtgagggcattgaggatgaaacaggccctccattccatttgaagaaatattctgtggcccagcagtgtatgatttgctcttcattgcctgaaagaatctctccacttcaagctaacaatcaacagcaagtcattcgagttaatgtgccaaagtctaaaaccatgtggcaaatcccacagccaaggcaacttgaagtagacccttccaatgggaaaaaggactggtctgagaaggatcagcatagcggacagctccatgttcacagcccgtgtccctgggctggcagtgctggaaatcagcacctgggacagcaatcagaccattcctcatttggcctgcagaatacaatgtctcagtcctggctaggtacaactacggctcctagaaactgtccatcctttgcagtaggaacctgggagcagtcccaggacccagaaccctcaggtgagcctctcacagatcttcatagtcactgcagagacagtgaaggcagcatgagagagagtggggtctggatagacagatctcgcccaggcagtcgcaaggccagctttctgtccagattgttgtctgaaaagcgacatctgcacagtgactcaggaagctctggttctcggaatagctcctgcttggattttcctcactgggaaaacagcccctcacctctgccttcagtcactgggcacagaacatcaatggtaagacaggcagccctaccgatcatggaactatcacaagagctgttccattctggatgctttctttttcctttctttcttcctggggtgtgtatgtatgtttgtgttgacagagaggcagatggagggggagattatttatggagagataaaattattcattcgatacattcagttaaattcaattcataa

SEQ ID NO: 262722 - DNA, 205 bp, Homo sapiens
ttaaaacaaagacagcaataagactaaaagtacttcagggcacatgagagcaaatttcaatcaatacttataggagagggaagttaattttgcctgaagagaagatctggcctgcattatgcattaattagtattagctaaaaactatgtggacctagcccttatcattaaaataaaacactcaagggtttacaaactattgaaa

SEQ ID NO: 262723 - DNA, 430 bp, Homo sapiens
agtaaataactctccaaagtctcagggtaattctttgtgttggactttttcttttttcttaagccttctcaaacctatcaggtttaagattctagttagtgatatttcctacttgcgatagctgagaaaatttgaggtgcaagacttgaccaaccttctcttgagtgtgttcgaggatgggagacttgaatgcatgtgtcaaaagatgtccatggagaagcaggtaataaagatgcaagaaaaacgagttgctagatctccaaacagggagagagggctgagatctagttttggttggtaaaggaatatagtacttctctagcattaaagaaaggataaactacatggacatctagaggaaacttcaagtgaagaagtgatccatgttggatttttgtctttgtttgtttaattaaataataatactgtt

SEQ ID NO: 262724 - DNA, 891 bp, Homo sapiens
cgttgcccggggatgggtccctgagacttggcgaagtaggagccctgtgtgatcgtgcgtcagagtcggggctgagaccagtcctggccagggcagttaccaggacggtctccggaggccgggatgcgcggaggctccaccagcaggaagaaacgccaggaggaagaaacctgagacagatcgccggggacgcagcgcgggatcccagcctcaggcttgcgcggacggtgtgcggctacccaaggtgcgaaaaggaaagaaggccaaagggaagaaggtggtgccgacccttgctgtcttgaaaaagcaggagaccgtgaaagtggtgaatcttccgtttgagaaatttggcactggacaggacattttggcattggacagaacatccagcccaaaaggcacctcacttgctttgtcaaatggccccattatactaggttgcaacagcagagagccatcctctataagcagctagaagtgccttctgtgattaatcagttcaccagggccttggaccaccaaacagctgctcagtggggtaagctggctggcaagtacagaccacagacaaagcaagagaagcagcagagactgttggcctgggctgagaagaaagcaaaggagacatccccactaagagatcacctgtccttttaacgggggttaactctgtcaccaccttagtgaagaaaaagaaggctcagctggtggtgactgcacaggacatagatcccattgagttggttgtcttcctgcctgccctgtattgtaaactgagcgttccttactgcattgtctaatggaaggcaagcttgagacatctaggattaaaaaaacaaacaaacgaacaaacaaacaacaactctttaaaatattcttttaaaacttcta

SEQ ID NO: 262725 - DNA, 465 bp, Homo sapiens
ctgcagccagccggcatctccacgcaggccttagcgtgtgaaggtgaggggaccttcacctctaccaaggcatccaactcctgggctttttatgcagctctgaaagttgggactgttccctttttttttaagttgctttaaaatgtcaccactacaggggatttttagagtgacaaaactatttgtatgatactctagggctggatatttttctttacattttctttacatttgtccaaacccatagaatattcaacaccaagagtcaaccctgatgcagactgtggactttagttaataataatgtatccattttggcttatgggttgtaacaaacataacacgccaatgcaagacgagaataataggggcacggggaggattagaggggaactctatttctgctcagtttttctgtaaatgtgaaactactctaaaaaataaagtctagtaatttaaaaaaaa

SEQ ID NO: 262726 - DNA, 560 bp, Homo sapiens
gtgaacctggactctgaagaatgtgccgtgtatgtaacaagtttttaataattcaactaagctattttataatgaagtgaatgtcacagaagatggaaatcaataaaattcattaactagggccccttcatggataatgtttggataagaattaatagcactggcttcttgatttcccaatatgaccaccagttgctatgtagcgctaaccaaacgactttacctctcataatctcgtatccaactccaaagtttactgtgatgattaagataatatttatatgacccacctatataaaaatttctcaatgaagatagcaccctccatattcactgcctacttctgttttaatgccagaaagagttttgagctatgaaataactcatgtctacctaactgtgctgcactgaaagcagaacacttgtgactcaactgaagagttaggcttaagagctgaactagcacatgttcagagaaggagataatttataatgatggataaagaataataatacttgctggatatggtggctcacgcctgtaatcctagcactttggg

SEQ ID NO: 262727 - DNA, 232 bp, Homo sapiens
catagagataggattaattttatcctccaaagtaatagtggaggagaacaaatgatagcatgtcaattttaacacaaaatttccaaatatattttgacttctgcttttaatactcttccagatcatgctttttgcctaatttttttttttttttgagacagagctagactccgtctcaaaaaaaagaatcgcttgaacccgggaggctgaggctgcagtgagccgaaattgc

SEQ ID NO: 262728 - DNA, 439 bp, Homo sapiens
gactgaagatagaagtctgaggaatggattattttggacgtggtaagagctaactgtggctcgaactaaatttggtctcattaacataaaaagaataaggatattgggaagcaatgcattgttaggccttagcagaggatcgaatataggatatgtgcacctatagtaggacctttgtgttagagatgaagtaataatcatttcttactaacatcaagatactgacataaaaaggatgcatctctgtattgttttgaattggggattttttgttttgttttgtttttagaggcgggatatcactctgtcacccaggctggagtgcagtggtgtgataatagctcactgcagcctcgaactcctggactcaggcagtcctcctgcctcagcctcctggaacattgggattatggtgtttgaattgtagcgtctctagtag

SEQ ID NO: 262729 - DNA, 317 bp, Homo sapiens
atgacatttccaaaaaatttttttcctttcaaaacccactcctctccatcctactaaatggcatcgccattcattcagttgctaaggcctttaaaaaatcttggaatctggccaggtgcagtggctgacgcctgtaatcccagcactttgggaggccgaggcaggtggatcacgaggtcaggagatcgagaccatcctggctaacacggtgaaaccctgtccctactacaaatacaaaaaaattagcagggtgtggtggcgggcgcctgtagtcccagctactcgggaggctgaggcaggagaatggtgtgaaccca

SEQ ID NO: 262730 - DNA, 907 bp, Homo sapiens
ggggatggtcctgcctctctcggtgaagttactcactcggaacgggtgagctttgtgatacgtgctctgcgttcagtagcgctgttacagtcgtaagtaaaagcagtaacgtcagcgccgacccagcgcagccctctccagaccgggtgcggagcccgtcacgtctgccccgccggcgaggagcagagcccggcaagaaccctcctccagaggggccccgaccagggctgtgcctccgggagcaggtgctgcttacacagagggacgccaggacgggcagccccacacctccagtgacctcccgtcccccagagctgaagacatggcctgactaagcggcgaccacatcgacgcaccagttttttcttttttgaaacagggtctccctttgtcgcccaggctgcagtgcagtagcgcgatctcggctcactgcagcctctacctccccggcacaagcgatcctccagcctcagcctcccgagtagctgggactacaggcgccaccatgcccggctaccttttgtattttttgtagagatggcgccttgccaagttccccaggcattaacccggaaacaacctggcgggtcagggagagcctcttctgctcagaggtcattgtgcccagacttgagccctggctgtgaagtccctgaggcccctcactccaggacgggaagcaccaaagatgtgatgtttcctcctcggtttctgagactgcctggaagcggggggtggatagtggtgagcagccgtctcctcctttcctgagaacataaatcagaaacgctttctgaggccgggcacggtgggtcatgcctgtaatcccagcactttgggaggctgaggtgggtggatcacctgaggtcaggaccagcttggccaacatcgtgataaccccctctcc

SEQ ID NO: 262731 - DNA, 424 bp, Homo sapiens
gagagagacaacgatacacagagagagaaagacagaaagagagagagagacagataaagagacagacggagagagacagataaagagacagacggagaaagacagagatggacagagacagagagaaacagaaagagagagaaacagacaggaagggagagagacaggcagagagagagagacaaacagacaggcagacagacaggcagagaaagagagtaagacagaaggcagacacacacacacacacacacacatacacacacacacacacacccccacagagagagagagacagagagagagacagagacagacagagagacagagagaaagagacagagagagaaagacagacagagagaaacagacagaaagagagacacagacagagacagagaaacagccgacaggggggagagag

SEQ ID NO: 262732 - DNA, 444 bp, Homo sapiens
tggcataaaatgccataaagtcagaacaaagagtgagcccagggccttgatgggtctgctgcttcctgccgcgcagagaatacaagcgattgtttcaaagccagtggtgaggcaagtggccaattagcacggccttcacccccacagcctgtaaatgtgattcggaccatcagaatgggattctgctattcagatcaattgctcaaaggaagcgagtctgttctcgctgccaaatttagaagcccgagacagcaaaggtgacccaggttatggctgcagctctcgtcaggatgaggctgagccctgccaatgcttagcactcacccagccctcagcacctctgcccattttcctgcccctttaaagtggtgtaagggattcctagaacgttgctgcgactaggaggttatacatctgttcacaatcgtattggaaaaaacaaaa

SEQ ID NO: 262733 - DNA, 433 bp, Homo sapiens
attttatgtacatgttggtacaagcattttaggaaacaatatgacattatctggtaaagttgaagatgtgcatgccctacaatctttcaaatccactcttatttacatgcattgtgaggagccatgtctttgagtgtttataacatcaatatataacccatattgggaacaacccaaatgtttattcacaagacagttgtaatatatttattcaacaactaaaatttgtactatattcaacaactagaatacagtagcaaaaatgaatgcttactgagaatcttggggggtaatgaagtggactatatcttgattaagtagtgggtatatatatatgtaaatgcatatatgttaaaaatcatcaaagtatataaaatgggtgcatttattctgtgtaaattatacctcaataaagtcaactttaaaaataaat

SEQ ID NO: 262734 - DNA, 385 bp, Homo sapiens
ctgggattacaggagtgagccactgcatccagccccacatctggaattctttgcctcttgatgactctaggatccctgtaactgagggcagaggcaatggatgttaaaatgtgcatattctttggtccagcaaccccatttctaggcatttattctccagaaatataacaccaatgcataaagatatatgaacaaaaaagtcatgaagcagggtttgcaaccgcaaacatctggacgccacttcaatgtccattacaaggagattagttaaatatatcaaaccatggaatactatacagcaatgacaaagaaggtctttagtcttgatggaaaagggggtttgaggcatattgttaagtgaataaagcgggctgcacacaacaaa

SEQ ID NO: 262735 - DNA, 401 bp, Homo sapiens
gaaaagaggatctctgccctcaggaagctctcagccgaggggcaggcgagctgcctctcaaagctcgccagctccccttgcctagaagtccagggctgtctgtgaacaaagcttaggacctcttgggtgtcctacccactttcctgaacatggcctcccctgaccctcacaggccacccccttaacttcatcactccctctgggctcctgccttctcaagagcctttccaaacaccccatgggaagccagagagccagcagatcccaggatccttccagaaagtgagctccatgaacgtctggcctctctcaggaatgcattctccaggtctggcctttcccctgccagactgcaacatccctgaccaggagagatttagaccactccatcccggggcctg

SEQ ID NO: 262736 - DNA, 181 bp, Homo sapiens
gctgaggaatacagggcaaagggctcaagacctttagtagcaagcaatgaaaagtcacttccctttcttgtggggtggggaagatattacactgaaattgtcctctggccatcttgacctacttatttgagtatatgaccagttacagaaatagctcagtaccaggagacagataagcctt

SEQ ID NO: 262737 - DNA, 136 bp, Homo sapiens
ggatatgggggaaaataatctataggagccctttcagttctccagccctgctccatgcagccaaatctccagccccaattatcacacttatgccaagcctccctcccaagcctcccacaccagcagcctccctcac

SEQ ID NO: 262738 - DNA, 168 bp, Homo sapiens
atggggagagaggaggacctactttcaaatggaactgtgacacatatgttctgcaggaataccggcccaccagaaccctcaaccccatggcccctctctggctgccccatagaagcttgtacacaatacagcctctgtttgccagtttgagtgctttgctccatctga

SEQ ID NO: 262739 - DNA, 641 bp, Homo sapiens
tatatatatacatacatatatatatatgtatatatatatatacatacatatatatatgtatatatatatatacatatatacatacacacacacaaaaattagcaaggtgtgatggcacacacctgtagtcccagctactcaggaggctgaggttgaaggattgagcctgggaggtcaaggctgcagtgagccatgagtgtgccactgcactccagcctgggccacagagcaagaccctgtctcaaaaaagtaaaattaaacatttaaaaaagcagaaatgatagccaaaacatttaacaactgatacagggtgggcacataaaccaatcagaatggaagatggaaccacttaaaacaaaggctggtcattaaaacctctcattcagccaatatatcaaatgaatatcaagactgctaaagagttacatttgcaaagatgtatctttaaaaatcatcatcctggagcataaattaacttgaaagagtaaggattccatgaagacaaacaaaaatagtccaatacttgacagtcttaattatatacatcattatataaagacaacagatagaggagttgtatgtgaaatacatcatatgacaaaagctaaatctaaatctaaaactattttgtaacattacta

SEQ ID NO: 262740 - DNA, 681 bp, Homo sapiens
gagatatatcttttagtcaccactttctgtctgtaaaaatttcctaagtatatagaattgctgttgtatattttgtaacaggaccctaaatcgtgaatcagaaaataattgttccttattttccaagatatctgtagatcacatattcacaggtagacaatgaatgtattcatatagcacacatatatttagagaaatgtttctttttagttttcataacaagaatgcagatataacaagtcgtatcttttccttatttaagatacccgaatctcacttatattgagcagtacaaatcagcactaacccacaatcagaacaaggcatgagcctaaaagaaataagagctgtaggtaagaaatgatttcttctgattttattacataatttacattacaatactgaaggaaatagctaaggaaataaaaataatctacaaaggtactatattactattattttcattctcatttctatacagtttgtctatatgtacatattttacacaaaataaacatttttcttgttgctacattattcttcacaatgatcacaatgattatcctgttaagattatgaatcctaatttgccaaaccgttgccctatttgagggtatttactttttcaccattctaagtcctaatgtaataaacactttcatttatgccactttttccctc

SEQ ID NO: 262741 - DNA, 428 bp, Homo sapiens
ccacagtggaactcagctgctctgactctttcctggtctgcttgttctgaaggatacaagcagaggcacaagcctcatgcattttccaagccctgcaagccaccccatgctccaaagtagagaccaaagttatatacactttcacaaaactggcagaaataagccagaactgcatccaaaatgattcttcatcttcagtgctgtttcccaaggtttcaacctccccagcctaaccaggatacttgaaacttttcttggagaaacagtcactatgaatgtttccccaggtgattttaaaatgctttcaatgcacagtttcttatttcactaaataaaatataaaattgcctggaaacgattcaaccattttgtaagttgaattccaaaaggagaactgtaatgttctccttatatatttcatagctctc

SEQ ID NO: 262742 - DNA, 623 bp, Homo sapiens
gagagagagagagaactagtctcgagttttttttttttgtacactctattctgccattcagtaggtgcttaggaaatgtttgttcgatgaatgaatgaatgtactaaagattgagaaactgcttggaagcatggcaccggggaaagaacactggaccaaaagccagaagacctgcactctaggcctggttatgtcatttatttatgtgacttagagaaaatcacttgacctttctgactctcagctttctagtctgtaaaggagggataataatatctgccctccttatttcaaaagtccacagtaagtgtcagatgaaaatcacttggaaatattttgtatagctctaagcaggctgtacagatgtaagaataatttatgtttgtgtttactctcatcccttgaaatgcctataaaaataaatcacttattacacgaatgacacagggagaaggaagaacgacagaatgccagtctaaggagatcaaccagtgggatatgggctcctggaatgactgcagttaactcagggaaaagagctaacaaatgccctggttatcccatatccattaccacatgcatttcccagccaaatgggaagataaaaatctgttctcgagtga

SEQ ID NO: 262743 - DNA, 505 bp, Homo sapiens
ggggcctctaattacattttgacatctacattctgggtagattcatataattttaagaacatttaaaaatactcaagtccccagaagcaaaaaatttaggaaactctaaaacaacaaggaagatgcacaacacacatacataaccagagagcagcaaagaatcaaaggtgtctaacagctattttgaatttctgacccttgttattctgtcaaattgatatttggattaaaaatgagggatgttgtttacttaataggcaatactcacaaaattgacctcttttggtccggaattaaagtattccaaggccagaatacaaaaaaagaatctactccagaatgctactattaaattacacaaagaaataacatagcttatcaagtacgaatttatagccaaaaaacccttaacgggaagaataaatattaaaaaggaaacaaaaagtaataaaattaactatccaagtgattggattatcagtaaaactatttttaaagagccatg

SEQ ID NO: 262744 - DNA, 449 bp, Homo sapiens
tgagatgacttgcccaaggtcccacagccagtaatttgaatgcaggcagtcaaaccaaggaggaagcagggagcagctgtgcctggatgggcgagggtggaggactgcacaggtcagggagctcgttctggctcctgccaggggagtcggccatgcagtgtgtgaaaggtctcctggttcctgggagtgttggctgtgatgacatcatcctagaagtcactgactggattggcaatggggctgatgctgagtgcctggcacgctatgtgctgggcactgggctacacaacggacactgaatactttccatagacaaccctgcacgatgcatgaccttgggcaagttacttgacctttgtgggcctcagttgccttgtcagtaaattggggataataataggactcacttcccaggaataaatgactttctccaagtaaagcaaaaaaaa

SEQ ID NO: 262745 - DNA, 515 bp, Homo sapiens
tttccaaaacaaatacgcatcaggaagacagctcgagataaactctgaactaggattcaggcatctggatgaatgcatcttcttcagccagttccaccattaactcgatgacgatgcgcaggtgcttgaggcgagtcagtgcgtccttcttggtgtctagcaccttctgggtggacttcttcacgtccccgtgcggcttcttggagaacatcctgccgctgccactgccactgccactgccactgccacagccggctcccagcggcagaaagtggagggagtggacggggaggagactagccagagaggctcattagctccccagccttgcgggccagggcagagccgactcctccccgatccaggccagggccgccacctccacccgcctcgcgccgcggctccaaggcaccttcggccccagctccaatatggcggatccctctcccggccctgcacggagcgaggtagacccgggctggccgcctgccgccgccgctcgtctccagcggccg

SEQ ID NO: 262746 - DNA, 526 bp, Homo sapiens
gaagaacaatctaggggccattttaaaattaggtggatttttttttaacttacagcagtggtaatatttgatcaacagttagaattttccagcttctcttcctttttgaatattttgagatggacttcactattcagataacaggttaagatcctcattgtcatttctctttccttggctgtcttaaagaaaacaatcatctcaggtagaggagtattagcgggagggaggaatgatccttggggaaaaatttataggtgttttgttttgttttgaattaggtaaatccattaactgcctgcactccgcagccctcactccccaacactttccctgagtttatttaagtggttgcccatagcaaccacctacactttaagtagctgagctgagtattgcggggagacagcttggcaagcctctgtctagcttccatgatcattcactgtgccccggaggtaacaatgtaaaattcaaatgataattttaaaatattaacaatgtttttgtgtttcctgtatttaaa

SEQ ID NO: 262747 - DNA, 376 bp, Homo sapiens
ctgtgcactctctgagggcaggtgcttgttcacagctgtgatcctgcagctgatgcagcgcctggctcacagtaggtgctcggtaaatgttgaatggatgaaacatgaatgagcaagtcagagaaccagtgcctgtgcccatttgcccctgttgttcccttggcctggcacattcttctctaggctttggcacaagccacagctcacattcttcctttgagtatcactctgtgaagcttaggaggccaccagggctgtctttgggggctcagagatctctaggctcaggcaaggatgcccagtaaaaatagtttttgtagaaatgagctccagtactgagaccctgagagaggctctagacgtgagagacttgggc

SEQ ID NO: 262748 - DNA, 396 bp, Homo sapiens
ggaagtagtgagacagtggaaggaggggagagagggggagaaagggaaaaaaaagtgcacactctatctgcagcgtgcatccagtgtaatgagaaaatatggacaggcacaatttcacaagttgtaaattctggtagccttcagttgtaaattctggtggaggctgttttactcggctatctgataatgtgtgaaaatatttgtccctttgcttcacaggcatgggcattttttttaaatcatagaccctctaaaaacaaaatgagaatttgtgattgaaatgaaatggtaactgatttttttttaaaaagattctccctaaatcagacctagtgtttgacagaacagtagaatgactatagtttacagtaatctattgtatgttttgaaatagct

SEQ ID NO: 262749 - DNA, 396 bp, Homo sapiens
cagactggagtgcaatggcacaatcacagctcactgcagcctcaaactcccgagttcaagtgatcctctgacttcagcctcccgagtaggtgggtctcaaggtgtagagactgggtcttgttatgttgcccaggctggttttgaactcctggcatcaagcaatcctcccacctcggcttcccaaagcaatcctttaactctaaaaccacatttcccttctctgaaagtcttccttgaccctcctttatgctgctctccattaagaccttcatacaaatggctgggtgcagtggttcacacctgtaatcccagcactttgggaggccaaggcgcgcggatcacgaggtcaggagatcgagaccatcctggctaacacagtgaaacaccatctctact

SEQ ID NO: 262750 - DNA, 320 bp, Homo sapiens
gggtacctcttggttatcagtgctcactgatccctatataatcagactctaatccctgtaaaaagattacttggtgctagccaagctagcacctttgggtcttcccaaacatacaccactaatccagactctaataacttcatttcctttaaattacaagatcagagctgaaataggccttagaaagctagtctgggctgggcgcaatggctcaggggaggcggaggttgcagtgagccaagactgcgccactgcactccagcctgggcaacagagcaagactccatcttgcaaaaaataaataaataaataaaaatatg

SEQ ID NO: 262751 - DNA, 270 bp, Homo sapiens
gtatttttagtagagatggggttttgccattttggccaggctggtcttgaactcctgacctcaggtgatacgcccgccttggccccccaaagtgctgggattacaggcgtgcgccactgcgcccggctgcattccttaactcatgctccctgcttccatcttcaagccatcttcaaaccaccctaatctctgcttccatccccacccctcctccacggaccctcctgcctgcctcttccccatgcaaggactgttgtgatgacattgggc

SEQ ID NO: 262752 - DNA, 549 bp, Homo sapiens
agatgctattgttttatgtttcctcttcagccactggctgtgattttaattgtgctggaggatcttcattagtattaacacatggggagatttcacaaagctgcttcattaggaaaaaaaaaaagcttggcagactcggtctttttgcatgcactgagaatgtcagccttacctcggtcatttgtaacataataagtgcaagtacaatgattgcaatgcaggagcactgggggaagggcagaaatactgcctgtctaatagggatatctgaaaagaaggctgctcattacagagtaaaatgtatgctaaaaattagtgaagatgatgtctcaggagactgatgctaaataaattaatgtgctgatatgtttttaattattatttttgtagtagtttatttcattctcaggattcacattgagcagcaaagctgtgctagcacttattgattttttttccctgccacattcccggaatacagattttaatcatttcactacaccacactcagtaatttcattaaaaactggaatcttccatccccagaaa

SEQ ID NO: 262753 - DNA, 367 bp, Homo sapiens
aatagtaagtatgcagggaaaaaaagatttttgtaacattgtaactatgtgtgtaatctactcttatcctaagtagaaatctagacttagaatctaatgctgccactgatctgacaggaggcggaactcagacagtaatgttcccttgcctgctactcacctcctgctgtgtggcccagtttctaacaggccacagactggtactggtttgcggcctgggggttggggacccctgggttatcagatagaattgcaagcctcatggtaacctcaaaccaaaaaacattcaatgaatacacaacaaataaaaagcaagaaagtaaattatatcaccagagaaaatcagcttcacttaaggaagacagga

SEQ ID NO: 262754 - DNA, 402 bp, Homo sapiens
taggaactcaacatttcagaatcgtccctgctgggctttgaccatctgatggaattttgagacagcatgatgcgactagttctagggttaaaaagacgcactttaatgtcacctgaacataacacttcagaagaaggtgataaacttttacacccacccaggctgaagctggaggggagtggagtttctgaagctgtggcacatggtgcacaggtccagcaagttctcgggcaccagcagtgcccacggtggaagacaggcaggacagacgagggtggaggaaggagcccagggcagagccaggacaaagcttgctggacagtgtcactcatggagtgcccctagcttcaccccatctgtgacaaatattttcaagatttccattaaaaaaatttactgaaa

SEQ ID NO: 262755 - DNA, 400 bp, Homo sapiens
tgagacacagtctcaccactctgtcacccaggctggcaggctggagtgcagtggcataaactcagctcactgcagcctctgcctctcaggttcaagcaattcacctggctcagtctccccaatagctgggattacaggcgcgtgctaccacacctggctaatttgtatttttggtagagatggggtttcgccatgttggtcaggctggtcttgaactcttgatctcaagtgagccacccgccaagcttcccaaagtgctgggattacaggcgtgagccaccatgcctggccagaagtcatttaaattctgcgtcttagtttcttcctctgtgagatggagagactaacaggattgctctcccggggttgttgggaggattccatgagatgaagctgggga

SEQ ID NO: 262756 - DNA, 400 bp, Homo sapiens
actggatccctaactattaccatatacaaaaactaactcaagataaagatttaaattgtagacccagaactctaaaaccactaaaagaaaatacaggggaaacacttcaggacattagtctaggcaaagattttatggctaaggcctccaaagcacagacaacaaatcaaaaaacagacaaatgggactgttttaaactaacaatcttctgcacagcaaaggaaataatcaacagagtgaagaggcaacctgccgaatgggagaaaatatttggaaagtattcatttaacaaggaaataatatctagaatatacaagaaactcaacaaaactcaacagtaaaaaaaaaaaaatctccctactaaaaaaagtgggtaaaggacataaatagacatttttca

SEQ ID NO: 262757 - DNA, 301 bp, Homo sapiens
taatagtgacacaacctatcaaaacctctgggatatagcaatggttgtgctaagaggaaagttcataggattaaatgcctacatcggaagtctgaaagagcacaaacatggacctggagaaacaagaacaatccaaacccaaacccagcagaagaaaagaaataatgaagatcagagcagaactaaatgaaattgaaacaaacaacaacaacaacaaaaatacaaaagataaatgaaacgatatgctggttctttgaaaagataaaaaaaaaaagaagatagaccattagtgagattaacc

SEQ ID NO: 262758 - DNA, 799 bp, Homo sapiens
cctttatcagtgactttgtcatgttccctatctccatgttcttgtttaggtgatactattttctgaggtggtcggaagaaaatgtactcggtgtagctgctccagatcttgtcgtcgcggtactggttgacgaaggcggcggtgcccgaggagttacacgccaccatgtggaagccggcctcggacaggcgatcaaaggcctgctccaagtaggtgaacttgaggtagaagcgggacgtgtacttctccggctgccggtcggggtcgcggctctcgttgagcgtgtccccgaagacctccttggccagcgcgatgcgcccgcacaccatgatgcgcgccacacgccggaatttggcgtcggcctggttgtcgcgcacggtggtgtaggagccccggtagcccagcgtgaggaagcccgagcgcttgtcctgcgcgccgccgccgccgccaccaccgtgcgctcccgggcccgagggcacggcggccgccgccccgcgcagcagcagcgcgtcgctgctaccctgcgagacgttgtcctccaggtcgctctggcagccctcgtcgttgagagagttctgcttggtgaccttgggcgacagcagcttgaccaagtcggtgagctggaaatactcggcctcgcgcagcagccgctccttctcggggaagtgctccggcagcgcgagttgcttgtcccgcagataatccagcacgtacctgaaaaggaagccgtcccggtcgatgaagaagcgcgcccggctgtccctgggcagctcgccccggcgccgggcgccgccacggg

SEQ ID NO: 262759 - DNA, 296 bp, Homo sapiens
cactagatggggacgtgcgattgttacagggctgaaggcctatttattttttatttggccgctagagggcacgcctgcactgcacttaaagttgactacttttaaggaaagacaaaagaattcttggatttctccattttcctcatcacctgtgcttatcagagaattccaggggcaagctaccctttccaattcatcactaatttataaacaaaattctaaggagtaaggaatgcttcttacttcctataacatatgtaagaatgaacgctcaaaataaaagtaatttatttaaa

SEQ ID NO: 262760 - DNA, 521 bp, Homo sapiens
gacaggatcttgctttgttgcctaggctagagtgtaatggcacaaacatttcatttcagcctcaacctccagggctcaagcaatcctcttgtctcagcctcctaagtagctgggactacaggcatgcaccaccacactcagctaattgttttatttgttgtagagatgggagtctcaccatgttgcccaggttggtcttgaactcctggcctcaagtggtccccctacctcagcctcccaaagtgttgggattacaaatgtgaggcactgcacccaaccagaaaagtttttgaacctctccatacctctgtttcttcatttgtaactgagaggtactcatgcttcatagtctcattgtgaggcttaagtgagatcatgcatgtaagcacttagcattttgcctggcacataggaagccctaattgttagaaccaagagattgaaaggagagcagggttataatctttttttttcatcaaaataactggtttttattacattaagttatacctgtatatgta

SEQ ID NO: 262761 - DNA, 348 bp, Homo sapiens
gacaggatcttgctttgttgcctaggctagagtgtaatggcacaaacatttcatttcagcctcaacctccagggctcaagcaatcctcttgtctcagcctcctaagtagctgggactacaggcatgcaccaccacactcagctaattgttttatttgttgtagagatgggagtctcaccatgttgcccaggagttcgagaccagcctggctaacatggtgaaaccctgtctctactaaaaatacaaaaattagctgggtgtggtggttgcgcacctgtatccccagctactcgggaggctgaggcaggagaatcgcctgaacccaggaggtggaggttgcagtaagct

SEQ ID NO: 262762 - DNA, 221 bp, Homo sapiens
tggccatagcagtcatgagttaggctgtaaaacataagttaaacgcagagtgtcctatattgaattagaccctaaaatgtgctatattttcgggtctaattcaagtaacaagtgctataatcacctttccataggctaacagaatgaaggctgtgtcaaatctatgcttttatttctcccaaatgcgttccagtcctggtactcaataaatagtcatcaca

SEQ ID NO: 262763 - DNA, 527 bp, Homo sapiens
gtagagataggatttcaccatgttgcccaggctggtctcgaactcctgggctcaagcgatctgcccacctaggcctcccaaagtactgggattacaggcgtgaaccactgcccggctgagaaggaggttcttccgcgagagaaggctatgcagaggggaggatctcaggcctgaagggtctagaagcccactggaaggtcttccagacacttgggacatctagctcctgaagagtagaaagaggagctgctgccgaagaggtaagacagagagaggggcacaggatgtggagtccgcccctctgtcctcagggagtttctttggagagagaagagaatgaggctgggctcagaggaagttcctcccactccgtggagctcaaactagtccagtggtggcagctgccctggctggaataaagcatcgacccacagtggcctcacatctctgaggcctttgcaggttaagagtctcctgccatgataccccaccacagtggaacccgttgttgggccagcgtgttctca

SEQ ID NO: 262764 - DNA, 563 bp, Homo sapiens
cagcatgaagtttttaaaaatgtaaatcagtgttacttccctgcttaaaacactcgaagaacttcttattattcttaggatcttagataaactttttactattattcttttagtgatttgaccctcatctgcctctctgatcttattttgtccctcccttctccttcttctccatgctgtggactcactgacctttcagttcagaagaatatggtgtctattctgcctgttcttttctaaagatgctgtgctctgccttttttgttgatctctttttctctatatagctggtgtctgtatttctggtttctgttcagatgatttctcctatgagtaactttcctttctgtctctggtacatgtatttttctttatgtcattttattactgtttgaaatttgattagcttctgtttccccctccagaatgtgtaagctatttgagagtgatgattttgtctgtttactactgtaaactcagaatctagaatagggccttgctcatggttggcaggcacttatcgattattgttgtatgaataaacaaataagtgtttccatctg

SEQ ID NO: 262765 - DNA, 376 bp, Homo sapiens
tccatcagtctcagccaatgtgtaggaagaggcagatgaataatattgaaccaccattagcatggcacttctttacttcacttctttactcctaatacctagaacaatgtctagcacattgtatgttctcaataaatatttggtgggtggttagagggatgaatgcatgaaaggatgaaaggaacacatgaaaggaaggaacatcaaaggagctgagcttgagtcttccctttgccctttattacctgagtgactttaggcaagtcagttgatcttcactgaacctttcgtcttatttagaaagttaggggataaaataggtcctattctgataaaataggtttgttctgagaatcagatgagagaataaacatat

SEQ ID NO: 262766 - DNA, 376 bp, Homo sapiens
ctgttgacatcttgatgagactgtattagacttctgacctacagaactgtaagtcaactggggagctcagtgagattctcctgctatactctcatcagttttaagagaggcccttatctgcattggtaagtacagctaaactccacggatccagactgaagcaatttacctggaaactacttcctttccttcaaaagtttgcctaggccattcggatttggaagatttctgagcaagatggctgagtgctgaatttaacagccaagatgattctccaatctctgtgcttatgtctgcacacatcagagactctcctttacctagccctgtttattcctgaacacaaagtaattaatacttcaaagtgttaggtatg

SEQ ID NO: 262767 - DNA, 301 bp, Homo sapiens
tgtatttctgcaggcttatttttagagtaaattcctagaagtgggatttctggaacaaaagagatggagtctatctatgtcatctaggctggtctcaagctcctaagctcaagcaatccctcccgtctcagtcctccctgccctgtctcttaccagagacttcaggataaactccagggattgagtgctggtgtcaaataaacttcaacatgggaaacatcggaagaatacattctgcacttcttccagacttggaaagaactggggccaattaaaagtgaacttttaagagaaatgaaca

SEQ ID NO: 262768 - DNA, 464 bp, Homo sapiens
ggacaacagtcacattggattagggcccacccggatgacaagctttaaccttagcttgttaaagactgtatccccaaatatcatcacattctgaagtactggggtttaggacttcaacaagggaatttggtgaaatacaattcagcttataacagcctccacatcagtagaagtacggcttccatcaagagttttaaaataacagaagttcagatttgtatacatgggtatataaatgaaagggatcaacctggaggacattattaagtgaaataagccaggcacagaaagacaaatattgcacgatctcagtcataagtggaatcttaaaaagatgccttaatagaaatagagagtagaatagtggttatcagagcctggagaggggaggggtaaggggaaacaaaagaggttgatcaatagatacagagttgtagttaggaaggaagaataaattccagtgt

SEQ ID NO: 262769 - DNA, 596 bp, Homo sapiens
gcccatgactttgtgctgttgttgcctgctgcctttggaagggagataattgtaaaataattcaaataaaatttaaaagagaaaagtaaacagaacagtaaatggagcagataaggtatattctgtttggctcttgggagcacataatttaatcagtcatcaaattctgattgcataaataccgttcatgggtattccagccgtttggaagcaatgtctgcctgacaaatggctcattttcccaaatggtggcaattcttagccccaccctgcttcctctcgcgggccttagctgaaatgtgtcagaacgttacagctgtgacataaaagcctcaacatctgaacaacactgggctgtgttggaaattcagccttctctataaggctgttgcttgttactcacattggggtcacaaggtcacacaggtatggaatttttgcattaggaacaactgcaaaaaaaaaacaactctagtctattgtattataatcttaggctgggacaaactgagccagtctcactgagtgactgagccttaaatcagctgaagacttgattgtttcagtaactactgaaataaagcaaaaattttcca

SEQ ID NO: 262770 - DNA, 367 bp, Homo sapiens
aagtaattcaaatgtttctagcaagaagaaaagatacatatttaaggtgactgatagcccgattactcttatttgatcttcatgtattttatgaatgtattgttatcacagatacttccaaaatatgtatatccattatgaatgaatacataaataaatgactttggaattaagataatattggtcataggttttgatgggcctggttatccaggccaagtttatttattaagttgggatagaaatagtacctactatttttataaggattaaacaagttgctctaaagattaagtaatactatgtctattaaataattaatgcctacaactgaaataaaaaaaaatttgctttgcctttttttaaa

SEQ ID NO: 262771 - DNA, 653 bp, Homo sapiens
cactggttagatacatacatactggttttgcatttgtaagatccaaagtctttaaatttatgaaatgccaaaggataggactgtgcttaaaattttagaaatttaatccaatatttttcatgtgatagtaagtcaatgcaatagactacattgtttgaatttctatagcaactccaaaaattacaggcattcagggaaaaacagaatctgaggagacaaagcaatcattaaaccagactcaggtacgacactcagttcaaatgttaaaactgtatgaaataaaataacaatgattaatatggttaaaggggttgatggaaaagatataaaacgtttaagatcgaataggtaatttcagtgaagagattatgagaaagaatcaaagagaaatcctagaaatatacaaacatagtaacagaaataaaaaacgcttttgatgctatgatcagcagtcttcaaacagttaaggaaagaatacgtgggccaggcatggtggctcaggcctgtaatctcagcactttggaaggctgaggcaggtggatcacctgaggtcaggagtttgagaccagtctgaccaatatgggtggtcaaggctgcaatgagccatggctgcactgcactacagcctaggtgacagaccaagaccctgtctc

SEQ ID NO: 262772 - DNA, 330 bp, Homo sapiens
catagggcatgaagggttgcggatggctgggtgtcccaacctgttccctctttccctttgcaactgaagacttagagtttatgatgtgatatgccaataagagaatgacgtgggctgtggagatccaggtagagctaaatgaaggctacaaacacttctgtgatgtgtagaacccaccaggcccacctcacatctagcctcatgagaagatgccttctgaggggattcctgcatcctgcctacaatgcccccttctcaatttcttctcttctccattttgctagcgttgaccatttctaacttctcatggagatacttgtgccaggccca

SEQ ID NO: 262773 - DNA, 331 bp, Homo sapiens
gaaatgtgcatcgcttcttggtgggatgcagattgccttgcctatggctcagcttatacgttttcctaccatcctatctagtatcagtaaacgtggcctgctttcatttttttctccaggtaacactcgtgaagcagcaaaagaagatccacgttattccagaaattaatgccagcgaagtcaatcgtgtacatcaagttagcacaatttctttctgatggtcctgaaaatatagggggacttggagttaacacctgtgatgcagaaactaatctgccattcatttgatgtgccatgttggtcaaatatgttaagcccacacttcctgact

SEQ ID NO: 262774 - DNA, 375 bp, Homo sapiens
aggctgtgaggcagtctcatatattatagggcgataagtcaggatgctggaaccagctgcttggtgtcataaacctgtagtcagtcatatccaggctccaacactccttggctatgtgaagcttaacatctcgatgcctcagcttcctcatctcgaacaggaggatgctaataatacttagctcatagagttgataggatcacaacagtttcaaaacgtgtaaaacacttaaaacggcgaatggctcatagtaaattctctactaaaagttaattgtgtctgggcacagtggctcataatctcagtgcttcgggagatcaaggaaggaggactgcttgagacaagcctgggcaatataacaagaccccagttcta

SEQ ID NO: 262775 - DNA, 305 bp, Homo sapiens
aacatggcaaaaccccgtctctactaaaaatacacagattagctgggtgtggtggtgttcacccgcagtcccatagtcccggctactcgggaggctgaggtaggagaatgacttgaacctgggaggcagaggttgcagaaagccaaaatcgagccactgcactccagactgagcaacagagtgagactccaattaaaaaaaatctgaacagaccaatgagtaaagagatcgagtcagtgatttttccaacatctcgaatcaaagtccagaacttcatggcttcactactgaattttatcaaaaat

SEQ ID NO: 262776 - DNA, 341 bp, Homo sapiens
  misc_feature (77)..(77): n is a, c, g, or t
  misc_feature (329)..(330): n is a, c, g, or t
  misc_feature (334)..(334): n is a, c, g, or t
  misc_feature (336)..(338): n is a, c, g, or t
  misc_feature (341)..(341): n is a, c, g, or t
gcctgtaatcccagcactttgggaggccaaggcgggcggatcacgaggtcaggagatcgagaccatcctggctaacncggtgaaaccccgtctctactaaaaatacaaaaaattagccgggcgtggtgttgggcgcctgttgtcccagctactcggaaggctgaggcaggagaaagtcatgcatccgggaggcggagcttgcagtgagccgagatcgcaccactgcactctagcctgggcgacagagcaagactccatctcaaaaaaacacaacacttgggagaaaagtctaaacttgtcattcagaacctcacaaaaataatcatttnnaaancnnncan

SEQ ID NO: 262777 - DNA, 520 bp, Homo sapiens
ctaagtcaggctgaagaataacagctacatgtcatatagcaggacttgagagctaagtttggtgtgtccctatagtgctatataatttaaatagccaactaattgttgggatccctgttccaatactcctcaccattctctcataaatgtctgcatcccacctgccatctttaaacataatcttttgcatcctccccagaaacagctctcattatcttgcagtgaagctgtctggcatttgtagagatacttgtgattttcagtttgtgagcattttacacatatgtgttggtttacaggtgtcatgtttggattttaccataagcttcattgtattagtttgctagggcttgaaataacaatgtcccagtttgtttacccgggaaagtacgtctagattgtgtggtttgcctcattgtgctatttgcccactttccttccctgaagaaatatctgtgaaccttctttctgttcagtcctaaaattcgaaataaagtgagactatggttcacctgtaaaa

SEQ ID NO: 262778 - DNA, 531 bp, Homo sapiens
aatgaatcctacaatgaaatggagttcccagtatggttacatctagtctcaattcatctgcctaatatttgagggatgattgcacaggaagggaaactgttgaataaagtcacgaggctgaccataaagagtctacaagctcgaaaagtgctacacctcactccctttccagtggttcagccactggaaaccaaatgcctacacctatatgttttggacctaatattttcatttagcaaatccgtaagaaaccttccatgtctgggcctaagacatcaagtacattcattttcagcaatcatcaaatcaatgagattcttccagaatacagcagagtgaacatatgcttttcattccaggatagctttatataatccctggcaacacaaaataccatatttggcccacagtaggggctcaataaataattcaatatatataatattaatcaggaaattagagcagactgtagactttctgggcctttgctctttgttagaatcaagatattaaaaagaattattactttat

SEQ ID NO: 262779 - DNA, 383 bp, Homo sapiens
ttttcattgtaacattttaaatgactgttaaggagttagagtgaccatccacagcacacatggaaaaatgctgcttagaagcatgggacattaataagtgaactgatatttatatcttagaatttgtttacttttttgagaatctcattagaaacctatgctgggatataaaattctttaggcagatttcactaagtagagccaattgtcctttgtttcttttgctgaacccagtattgcataaaactgccaatgcacaaccaagctgtaggctgatggaaaacaacatcagccaagagattcacctagaagccagctaacggagctgggttcccttttggtgtgaaggcatcagaagaccatcagctctagaaataaaactg

SEQ ID NO: 262780 - DNA, 490 bp, Homo sapiens
taaaatggaaatgtcttctttgtacaaaattgtagcagtgtaaacaggttgacaaaaaatgactagaagatacaaacaaaaaatttacagtttaaccttgagaatgattggcttgaatagcactcatcttcataggttcctttattttgtattgttaatcttaatagtttgattacagacctgttatgtacatatacttgctaaagtctgtgttaaaagagataaatagtgtaactttgggaccctgaagattttgtactaatactgatgctaatcattggttgtagagcagtactgtcacccatggcatttaatagtatactaatgatttgattcctggctttatcactttctagtgggtgtctagacatgctacttaatttctctaaactgaagtaatggtagtagtactactgataatagaggcataccttggagctattgtaggtttggttccagactactgcaataaagcaaatataacaataaa

SEQ ID NO: 262781 - DNA, 998 bp, Homo sapiens
aagagagaatttgtgaattggaagataggtctgaaaaaattactcctgatatatcacagggagataagaaaatagaaaatatgaaagagatgttaagtgatatggaagaatgagaaatactaacttaaagaagctgaacatggataaaagaaatgaaagagttcacagatcagaaagcatgacatgcatcaaacagaataaagaaatccacttacacatattgcaaggaaaatgcggcacaccaaaaataagaccttgaaagtaaccggagggaaaaaactgatgactaacagagaaaactaaggcgagaatgggagtaagcttttcaacagtaacaacggaagccagaagagagtagtctatctccagaatgctaaagaaggtagctataaaccttaaattacagcagaagtttgaaatatttctacaatgaaaacaccagaccatgtggtttttattggagtgataccaagctttttaaaacagatcatttcaatcctatacaaatgccttcagagatgagaaagaggaaatactctccaactcatttggtgaggctaagagtagcctaaatcctaaaatcagacaagaagagagaaaggaaaatgaagccaaccctattcattacatagatgcaaagatctttctaagatgtgtaaagtgagatgatggacatgttaatttgttccactatagagtaagtcctcacttaacatccttattaggctcttggaaaccatgactttaagacaacaacttctaacaaaaccagtgttttttctaatcaatgctgtaacgaaacagcattgaaggaaatgacgttattcaaggacctggagttgcagtttccaggaacctgtcgatgatgttgagggctcactacatacatgtgtcttacaacatcatgttgtatacctttacgcaaaatttttaaaaatgtacaaatctgaatctagcaatatatttcaaaaagataacatcatgccaccaggctttaa

SEQ ID NO: 262782 - DNA, 365 bp, Homo sapiens
gcttacttgagggtataagacatgttacttgggggtataaaacatgttaaaaagaaatattgcaagtttaaaaatagtagaaggccgggtgcagtagctcacacctgtaatcccagcactttgggagcccaaggcaggaggatgccttgagcccaggagttcaagaccagcctagacaacatgacgaaacccaggtgtctacaaaaatacaagaagtcccagctatgggaggccgaggtgtaaggacggatcgcttggtcccaggaggtccaggctgcaatgagccatgattgtaccactgcactgcagcgtgggtgacagagtgaggccctgtcctccctccctcaccacaaaggaaaaaaaaa

SEQ ID NO: 262783 - DNA, 379 bp, Homo sapiens
ctcctttatggcagcactaactccattaatgaaacttctgctccatggcttcatcaccatccaaaggcccgccttgtaaaaccatcatctgggggctggggtttcaacacagacattctggggggacacaaacattcagtccactgcagccaaggagaaccagcagagaaccagtcagcctcagaaagaacacttgctgtccagctgcaccggtcttgctgtctgcgcatgaaccttgctcacccaatctgccctaagggtgtctgctaagccctgctcacccctgcctataggggaacaggccttttctgtatgattttgagatgcttgcagattctgagtgttcagccttttggcataaagtttctccttttccatt

SEQ ID NO: 262784 - DNA, 1398 bp, Homo sapiens
gtatttttggagttaatggagtcagaaggacctccagagtcagagagttcagaatttttctcacagcaagaagaggaaaatgaagaagaagaagcccaagaaccagaggaaacaggccctaagaacccccttttacaacctgctctcacaggggatgtagagggtttgcagaagatatttgaggatcctgagaatcctcatcatgaacaggccatgcagcttctcttagaagaagacatcgttgggagaaatttgttgtatgcagcttgcatggctgggcaaagtgacgtgattagagctttggcaaaatatggtgtgaatctgaatgaaaaaaccggtacacactcttacattgtgctgcagcctggggtcgtttggaaactttgaaagcactggtagaactggatgttgatatagaagctttgaacttccgggaagaaagggctcgagatgttgctgctagatattctcagactgagtgtgttgaattcctggactgggcagatgcaaggctgactctgaaaaaatatattgcaaaagtctctttagctgttactgacacagaaaagggatcagggaaactccttaaggaagacaagaataccatcctcagtgcatgccgtgcaaaaaatgagtggttggaaacccatacagaagcttccattaatgagctttttgagcagagacaacaactggaagatattgtgactcctatcttcacaaaaatgactacaccatgtcaagtgaaaagtgccaaatctgtaacaagccatgaccagaagagaagtcaagatgatacctccaactgaacatacgttctgtaaaaggccacattttcttttagtatctgaaaggcaaacctattcatgccatttgaaatcgagaaaacagatgtgggtttctttaagtatttaagtacaacattacatcgcccttgttttgtttgacctgttcagcatgcttatgtccggactctggcctcgcctctgctcctccaagcacagccccatgtgagtttcacgtgctccttcaggaaagcacttgggtataaatcattcgtgaagaccatgtggaggctttaagaactactcagagaatctaataattttctgtgtaattgaggcattccatataaaaggacatatttggctatttccagagaaaaaatttgttctccctgcctaaaaaggaaatcttatggaatgacacttggagcaaggaaatattaagaccagcttggattaggagcctctgggtacaactatcactttttatgtccaaaattaaatttcacctgtgaggtggggtatacctctgagtaaaacccctctttatctttgacctccttctatctgtaaattaataaacacaaatctgtatagttttatacttagaaga

SEQ ID NO: 262785 - DNA, 707 bp, Homo sapiens
gtatttttggagttaatggagtcagaaggacctccagagtcagagagttcagaatttttctcacagcaagaagaggaaaatgaagaagaagaagcccaagaaccagaggaaacaggccctaagaacccccttttacaacctgctctcacaggggatgtagagggtttgcagaagatatttgaggatcctgagaatcctcatcatgaacaggccatgcagcttctcttagaagaagacatcgttgggagaaatttgttgtatgcagcttgcatggctgggcaaagtgacgtgattagagctttggcaaaatatggtgtgaatctgaatgaaaaaaccaccagaggtattttgtcttttttctctcatcagtattacttatgactacctaaagatgcaatgtaatatctttaaggttagatatatttgatgtgcctgttttatactttacatatatgtgtatatacatctatatgggtgtatgtatgtgtatacatgtaaatgtatcaatgttgatattacatagtatagtattttagaacatagactttactatttattagctgtgtgacttggcaagttacctgatctttttgtgtatctgtttttccatctgcaaaatggggataataattatattttccttatagggtataatgaggattaaataggataaaataaatattttagtgcttggcatatcgtaaatt

SEQ ID NO: 262786 - DNA, 661 bp, Homo sapiens
gtatttttggagttaatggagtcagaaggacctccagagtcagagagttcagaatttttctcacagcaagaagaggaaaatgaagaagaagaagcccaagaaccagaggaaacaggccctaagaacccccttttacaacctgctctcacaggggatgtagagggtttgcagaagatatttgaggatcctgagaatcctcatcatgaacaggccatgcagcttctcttagaagaagacatcgttgggagaaatttgttgtatgcagcttgcatggctgggcaaagtgacgtgattagagctttggcaaaatatggtgtgaatctgaatgaaaaaacctacctaaagatgcaatgtaatatctttaaggttagatatatttgatgtgcctgttttatactttacatatatgtgtatatacatctatatgggtgtatgtatgtgtatacatgtaaatgtatcaatgttgatattacatagtatagtattttagaacatagactttactatttattagctgtgtgacttggcaagttacctgatctttttgtgtatctgtttttccatctgcaaaatggggataataattatattttccttatagggtataatgaggattaaataggataaaataaatattttagtgcttggcatatcgtaaatt

SEQ ID NO: 262787 - DNA, 457 bp, Homo sapiens
cagtgaaagatttccatttaaaaacaaagaaactattttcattttagttctcaaaaaatacttagaaaagtagaaattactggagtttagatgacaatatattgaagctcaaaacaaaaataaaatttaactcctaacatgcgtacacacgcacgcacataaaaaactcacatgtgtggccgggcgcagtgactcatgcctgtaatcccagcactttgggaagccgaggtgggcggatcatgaggtcaagagatcgagaccatcctcgtcaacatggtgaaaccgtgtctctactaaaaatacaaaaattagctgggcgtggtggtgcatgcctatagtcccagctactcggaaggctgaggcaggagaatcatttgaacctgggaggtggaggttgcagtgagctgagattgcaccactgcactacagcctggcgacagagccagactctaaaaaa

SEQ ID NO: 262788 - DNA, 452 bp, Homo sapiens
ctataggatccccgtgatcttctgtgccctcgggaagggaatgtgtggtcaaaaagattgggaaatgtttggttaaacaattctgaacagattcttttgcaataagacttctcagaaccttaaataggctgatatgcctggtaaatcactaagaagggccacagaggtgatattttcttaaataaacaatttcttatttgcctaaaaaaccctccttttaaaccactagatctctggccaatcatttagggaactttttcccctaaactctgacagcagagaaaaaaggattgaattaaaaaaaaaaaaaaaaacctggccaatgggagatgggttaggaggctgtggtcatactgcaaaaggaaaatgatgaggacctggactaagagaatggtgttgggaatagagataaatcaacgtaattgagtacatctaaggagacagagtcaata

SEQ ID NO: 262789 - DNA, 379 bp, Homo sapiens
gcaataggaataggaagtgtctgggagaggcgagcaggatgtgcagaagaggctggcgactggacatggcagaagttccagttttccaagtctgaactgggggtcaggaatctagtcttctgctgggaaaagaaccagagacgaacactggactaaatggggccagtcttcagtaggtgaaaccccagctccttgctgaaggtggggacactctgacaagacagaaacaccccagctgtcctcgccacagctcaccgtccatcaaggtgattggtacggagctattttagctcctgacattccagtggtccaggaagaggactggcctcaagccttcaggagttcaacattcaagtatatcctcatcctaaaggtggaa

SEQ ID NO: 262790 - DNA, 2592 bp, Homo sapiens
aaaaagcagcagaacctggaagtccacggggagcttggatgccaaagggaggacggctgggtcctctggagaggactactcactggcatatttctgaggtatctgtagaaaaccacagcctcagatactggggactttacagtcccacagaaccgtcctcccaggaagctgaattcagcaagaacaatggaggccagcgggaagctcatttgcagacaaaggcaagtccttttttcctttctccttttgggcttatctctggcgggcgcggcggaacctagaagctattctgtggtggaggaaactgagggcagctcctttgtcaccaatttagcaaaggacctgggtctggagcagagggaattctccaggcggggggttagggttgtttccagagggaacaaactacatttgcagctcaatcaggagaccgcggatttgttgctaaatgagaaattggaccgtgaggatctgtgcggtcacacagagccctgtgtgctacgtttccaagtgttgctagagagtcccttcgagttttttcaagctgagctgcaagtaatagacataaacgaccactctccagtatttctggacaaacaaatgttggtgaaagtatcagagagcagtcctcctgggactgcgtttcctctgaagaatgctgaagacttagatataggccaaaacaatattgagaactatataatcagccccaactcctattttcgggtcctcacccgcaaacgcagtgatggcaggaaatacccagagctggtgctggacaacgcgctggaccgagaggaagaagctgagctcaggttaacactcacagcactggatggtggctctccgcccagatctggcactgctcaggtctacattgaagttgtcgatgtcaatgataatgcccctgaatttcagcagcctttctatagggtgcagatctctgaggacagtccaataagcttcctggttgtgaaggtctctgccacggatgtagacacaggagtcaacggagagatttcctattcacttttccaagcttcagatgagataagcaaaacttttaaggtcgatttcttgacaggagaaattcgactaaagaaacaacttgatttcgaaaaatttcagtcctatgaagtcaatatcgaggcgagagatgctggaggcttttctggaaaatgcaccgttctgattcaagtgatagatgtgaacgaccatgccccagaagttaccatgtctgcatttaccagcccaatacctgagaatgcgcctgaaactgtggttgcacttttcagtgtttcagaccttgattcaggagaaaatgggaaaataagttgctccattcaggaggatctacccttcctcctgaaatcttctgtggggaacttttacaccctactaacagagacaccactagacagagaaagcagagccgagtacaacgtcactatcaccgtcactgacttagggacacccaggctgacaacacatctcaatatgaccgtgctggtgtcggacgtcaatgacaacgcccccgccttcacccaaacctcctacaccctgttcgtccgcgagaacaacagccccgccctgcacatcggcagcgtcagcgccacagacagagactcgggcaccaacgcccaggtcacctactcgctgctgccgccccaggatccgcacctgcccctcgcctccctggtctccatcaacacagacaacggccacctgttcgccctcaggtcgctggactacgaggccctgcaggcgttcgagttccgggtgggcgcttcagaccgcggctccccggctttgagcagcgaggcgctggtgcgcgtgctggtgctggacgccaacgacaactcgcccttcgtgctgtacccgctgcagaatggctccgcgccctgcaccgagctggtgccccgggcggccgagccgggctacctggtgaccaaggtggtggcggtggacggcgactcgggccagaacgcctggctgtcgtaccagctgctcaaggccacggagcccgggctgttcggtgtgtgggcgcacaatggcgaggtgcgcaccgccaggctgctgagcgagcgcgacgcggccaagcagaggctggtggtgctggtcaaggacaatggcgagcctccgtgctcggccaccgccacgctgcacttgctcctggtggacggcttctcccagccctacctgccgcttccggaggctgccccagcccagggccaggccgactctctcaccgtctacctggtggtggcgttggcctcggtgtcttcgctcttcctcttctcggtgctcctgttcgtggcggtgctgctgtgtaggaggagcagggcggcctcggtgggtcgctgctcagtgcctgagggcccctttccagggcatctggtggacgtgaggggcaccgggagcctgtctcagaactatcagtacgaggtgtgcctggcaggaggctcagggacgaatgagttccagttcctgaaaccagtattacctaatattcagggccattcttttgggccagaaatggaacaaaactctaactttaggaatggctttggtttcagccttcagttaaagtaa

SEQ ID NO: 262791 - DNA, 1225 bp, Homo sapiens
tttcagtgacaggagttgaaattttatataacagtattgcagtttctctgaaataataagtgagcttaacaaaattttcagataggttgagtgaatctttgtgactaaaagaatgatgatctcttttatttaattagcatattaattccttctgttaatttattgagagaaatcaatacaagtaataaccttgggtctcctggtacttgagatcatttgagatatataaaaattgatgtgcatctatcgtttctagatttttatttctgataataacatttgtctaaagagatttgataactgtacttaaattatccttctgtcttctggcatgtacaccaatgagtttattggaatgtgactaaatttgtttcactgtttgaaaaagtatgatgttctacaaaataatatgaatgtgatcaatggataatcttccctagaagcagatattttcaggatgaatcagtgcaatgacggatatatagtgttactgccaagagaatttaagaatatccaattttgaatgtgttaatcattaactattcaagttcttatgggtagaatcaccattgtttatcctaagagaattgccaggtattacatatcatatttgcagtcaaaaacctgagagcctgcttgtggttaaagggacatggatggagccggaggccattatccttagcaagctaccacaggaacagaaaaaccaaataccacatgttctcccttataagtgagagctaaatgatgagaacacatggacacacagaggggaacaacacacactggggccgtttagaggctgcagggtgggaggagggagagaggatcaggaaaaataactgataagtactaggcttaatacctgggtgatgaaataatctgtacaacaaaccctcatgacacaagtttacctatgtaacaaacctgcacttgtaccactgaacttaaaagtaaaaaaatagaacaaaacagtcagaaccatgcaccaatttgggatcgataacacataaaggcagcatatcatgttatttaagtgagtacgctttggagccagactgaatttatctcctggatcagccattttctggctatgtgaccttgggcaagttacttttaaaggtatagtccttgacctcagtttcttctattgtaaaactggaacatggcacttacctcattgggtttttgggagaagaaaccactcaaatacataaaaacattt

SEQ ID NO: 262792 - DNA, 681 bp, Homo sapiens
agcagctcctacactgtacatactttgtctgcctccatgccaattctcagctccacgaggccagggcctgtctttgtctatggctctactgccagcactttgccattatcatcccctgaaggaggagaccagagcctcggaccaccaccagcctgggcagggagaccggatgctctactctgacaaataagtggcctggaaaccacccacctgcacgccctgctccaacactagacatcccgacgggccagcagctgccaggggatgaggacccctcagttgctgaggatccagctatgcaccaaccactcacaggggaaagacagtggcttcgttttggagcttccaaggaggggaactggcatactgcacggctgccctactttgccagcctccttcctaatgctctctaaattgtgccacaggattgcatgacctggaatacccaatggcgtcttgtcagggaccggcaagtgcaggaaaagaaagtgccagtgctacactcgggccatgcggccaaatgccactaactgagtggtgacaattcactccagacacccaagtgccttgtttaacctgagagggcaaagacaaccttactgttacaagaaggaaaaaacagatggcatcagggtccctagttcaagattccagctatcactggcagttgtggggtcaagg

SEQ ID NO: 262793 - DNA, 470 bp, Homo sapiens
actgttatagtattcttttcttttttaactccacatgataaagatattaaaattacaatattgacttgttatcagtatatgtgtatgtatataccaattttctttgtttagtaatagtcattcctgtcctttatcccttacatcctaacctatttaacccaaagcttgattagtttatgatttaatctttctgtgattctttttggaaaaaataaacaaataaataactattggcttatctcccctttgttttcattctagcttaagtaaatgtttaggaattcccttgaggtccagaaacgtggagtcacatcaaattgtgttctattttgcatttttgaacatgactgtggataaatcgcttattttacctgcttttatcagtgtcctgttgggagacaggagcagaaaccactttgcatgtttttaaaaaggaaggaatatgatttttagggaataaggttacaaat

SEQ ID NO: 262794 - DNA, 464 bp, Homo sapiens
ggcagttccagggttcctttaaagatgaatcactccagtgaaccagggaataatatgatgaagctacttaaccaaccagtctggtggaatctctaaaaaggaccttcaacgcccttcatcctgagctttaggttgtcctgaataccagaaagccgctggaacatagacggtctcataccgatttctcgtctaaggtggtctgacacccaatggcagggatattgaatcaaactaattgttggtctacacaaaattacaaagccaggctgtgaaggaaaaaaccagaattcttccaaagctaccaggacaggaagtgggaacaacatagttgtactctatcttaagtacatgtcccacacacactgtgcaaacagccaagccggttcccagaaaggacagaaaacatggtgacagaaagtagaatccgctaacccaattcttaagaaataaacatgattcatgga

SEQ ID NO: 262795 - DNA, 624 bp, Homo sapiens
ggtaaatatgaaaagcaaaagataacttaaaattagaaaatggcttcattaagaatgacttttgacacagttcctcactctctaatatagagcagcaacaaagcatagaataacaacttcgaaactgaaagtttacccaaggcagttttttaaattggccttattgaatggcaagtccaattcggaacgtttcttagaatcataaaattaggaatactgtcaagagaaatcatttagtttacctcattaggcagaaatacatgtataccagcattttgtaaagttacaaaagatgttagtaagtattacatgtaactactagatggctcagaatctttaatatgcaaatgtgtactgtgaacattggggatatttcccagtggtatttgaccttgcaattcttaagtcatggagcacctgtagggatcaatattccaccagtctggaaaatactaatttatgccatattaaaccaatagactctgtcattttttaatagtttccaaaaaatccataattatcttttggtgaagctgcttctgtccccatttttgttgttttgttttattttgtttaatattttcagctatatatcacatttggcaccattattgagtggtctgg

SEQ ID NO: 262796 - DNA, 460 bp, Homo sapiens
gttgaatgttaagtcattagcaaaactggactaatttttctcggttcattattagtatattcataatactatctctaagtatttttaatatagtgggaacttgccttgaaattaatataaatattttacgtctttcttggtttgcatggtaatgtactcaggaaacctttttagtaatttggtaagaggcattggcaaagtacctcttttgctaagatttgtagcatcatttgggatgttagtgagtacaggcataccttgcacttcactttattatgcttcacagatattgaaatttttccaaattaaaggtttgtagcaactctgctttgagtatttttccaatagcatgtgctcactttgttagctttttttttgtttttgagacggaatctcgcactgtcgcccagggccaggttcacaccattctcctacctcagcttcctgagtagctgggact

SEQ ID NO: 262797 - DNA, 616 bp, Homo sapiens
aatgacaatagtgatgcatgcagacagtgttgagaaacttagagagtcgatggaaaatttagtttattttaatttaggctgtatgtagctcaaacatatgctgagcttttataattaaatggagtttctttcgaaagtgtgacagctctttgctttctttctacaagattgaaattagagttggaggacttgtgacttctgaggacagagaagaatgtaagcagcagaaagtttctgggaaactttctagattatgatttgaggcgattatttcactgcctataccccagacacctgctacttcctgtttgatggtaaacttttcccttcagtttttataaagagatatggcatctgggacaattgcttggtcacatgaatttatttgagggaggtcagcatttctagacaactttgatatttaggtgatggaatgaaagtcaaaaaaaccagcattgagattttaatttgaaaatactgagttaagtctttagtgttaatagagctatgtttcccagttttgggatttcatgaggaatatgcttgtagagctgaggaatgatgcaggcattatgaacagaattgaaacaaaccatataaaaaaagctctcatcaa

SEQ ID NO: 262798 - DNA, 394 bp, Homo sapiens
gttttcgaactcctggcctcaagtgatctgctcacctcagcctcacaaaattctgggattacaggtgtgaaccactgtgcctgcccagcatcctgtatttttgacaatgtagtttgaattgataacaacttagcttcaacaacatgcaaattctctgctcctatacagctgtgctccctctttatattgttattgctacagtttccatttgtagatactgtgtgttcattgacatagattcataattattgtttaatgcatttaaaaaaatcacatgtgaaagagaggagttacaaagcaaacaacccaataacaatagcttttatattttgctatgtaactagcattgtttatttcttcctatggcttcgttaaatacagtgctctttctttt

SEQ ID NO: 262799 - DNA, 261 bp, Homo sapiens
gcacaggggccggacacaaggcaacgaagtcacagctctctcccaaacgcggcagggcggactcgcagggggcatgggcgtgggtgccacagagcgaggcgagtgggctctcgccgcgtcctcgcaagcccaggacgtccgcccgcaggccacgggcctcccagtctcggcggggcctcccagtctcggcggggcctcccagtctcggcggggcctcccagcgcgcgcgcgcccgcccgccctcccggcccgcggccagcg

SEQ ID NO: 262800 - DNA, 438 bp, Homo sapiens
agcttactctgcagtttgacataccagatgtttctggttcaaattaatcagaaagttgcttgaatttttcagtttttaatcagctgtatatacagcctatggaattcttaaagcaaatagtgttttttaaagaatatattttgaggctgggaactgtgactcgtacttgtaatcctagtgctttgagaggctgaggcaggaggattgcttgagaccaggagtttgagaccagcctaggcaacatagcaagacaccatctctacaaaaaaaaaaaagttttttaagttaattgggcatggtggttcacacctgtagtcctagtttctcgggagactgaagtgagaggatcacttgagctcaggagttggaggctgcagtgagctacagctgtaccactgtgcttcagcctgggcaacagagcaagaccctgtctctgaa

SEQ ID NO: 262801 - DNA, 458 bp, Homo sapiens
tcttacatgatatattcttaaagttttttcttcctaaaaacaactctattccttgaaaaagttggaaaatatagacaaatgtagagaagaaaatcaagcacatgtaatttcatcacacggttaccactaggttactctgttttaattatttagttggttgctgcttgttagtataaatattctctgaaaaatatggcaaagagaaagctcaacaactcccacaatcttaccttgtaccttattaaagtcagagatagtcctgtatcttgctgttaatacgtttttggaggtatgtgggtaacttataaacatgtcagtagaatccaagttaagtactgtattgcctggcaaaatctggctagttcttgagaatcacttgaacctgggaggtggaggtagcagtgagccgagatcacgctactgcactccagcctgggtgacaaagctaggctccctct

SEQ ID NO: 262802 - DNA, 634 bp, Homo sapiens
ctgtttcattccctgtccacctcaatttttatgagttcattgcccgccacggcagaatgtgtgtctcactggttttctcaggtgcaatgtgaacttcatgctacttggttcatctcgtctacctgtgtccttaaaagctagcaccaggctttataggaagaattaacatgttttaatgagagaatgaaaacagtctgcaagttgttttgtggtgtgtctcatggagcgtccttatttatcctccaagtgattagcgggcatcgattctgagttaaggactccatgaggttttgggctaaaacagtgaacaagatactcaagaacttttttattataacttttttattatcttttttattatagaacttccaatccagccagaattaaaaagacaaaattgggtcgggcgcggttgctcacgtctgtaatcccagcaccttgggaggccgaggtgcgtggattaagaggtcaggagatctagacaatcctggctaacatggtgaaaccctgtctctactaaaaatacgaaaagttagctgggcatggtggcacacgcctgtagtcccagctactcgggaggctgaggcaggagaatcacttgaacctggcaggcgttcaaggttcaaggtggcag

SEQ ID NO: 262803 - DNA, 520 bp, Homo sapiens
tctgcctcaaaaaaaaaaaaagaaaaagacaaaaacttactgttttaccagtgttgttcctaatctcttactgtgcctgatttacaaattaaactttagcataggtatgtatgtgtaggtacgtatgttgtactatccacagtttgagatatgcagtggggttcttggagagtataccccatggatagagtgggtgatactgtagtcaaaaggagaactacctaaggtcttgagactggagaagtggtaaacgagagaaagtatgtttcttcagcataagtcacaaaaatagttggtggctatctgtgcttacaaaagcagtgggtagcagtcatggagtcaactgatgaaacttgcgtgtaaatgcatcttagtgtaataacctcacctaattttttaagccttaattttaaaatttgtggacacaagaaaagttggattttaggttaatatctcttcaagtaatgttaaatttacctatctgaatttaaataaacacttctatgttttttaaaaaaaa

SEQ ID NO: 262804 - DNA, 379 bp, Homo sapiens
gactatggctgaattcttctaattttttttgaataaaattagtccttaatgccttgaaatgataagcaaaattatacctatgcgcatttggacattattctagggcttttatcagctcttcagaaacaggtgactcaaaaatgtaagtcctttctaacccaaaggtcaatacggttggcaaagttttctgtaaagagccagagtgttaaatattttagggtgtgtgagccacatacagtctcatgcattttttttttaactccctttattttttttttttctgagacaagagtttccgctctgttgctcaggccggagtacagcagcgtgatctcagcccactccaacatgggcaacagaacaagacactgtctcaaaa

SEQ ID NO: 262805 - DNA, 423 bp, Homo sapiens
attactttttagatggaaagtaacctcctcatggttaaaaaaagaaacagttcaaaagggtaagaaaaatctccctaccacagggaggaaatcagtttctgctctcttataggactgtccgtagctataaagtccctttttaaaagcatatggggcctggcatgcacactgctgtacgcctttctcttcccactcatcacactgctgacaaagatctcctgagtgggaggctttgaagcactgcccccacagagaggtacatgatacccaagaaatgcccagggctggctttggggcccccagattcttaaacgctgccagagcatgtaattgccccagttccttactctaaaattcctattttctggctctctgacttgttttgtttttgtttttttgagactgagtatctctctgttgccc

SEQ ID NO: 262806 - DNA, 334 bp, Homo sapiens
agggttgggtgtgtgtgtgtgtgtgtgtgtgtgtgtgtgtgtgtgtgtgtgtgtttgctctaggcatttagggaaatctgccaaaccactagctaaccacaagctaacaaaatagagacttcagagtccatacaacaaaatatatagcctttaaaaatagtccggaaaaatgagcaaagtgtttgaatagacatttatccaaagagatatttaaatggaaataaacacatgaaaagatgcataacatcagtaatccctcaggaaatgtgaatcaaaaccacaatgagataccacttgacaccatttggatagctattattgataataaataaat

SEQ ID NO: 262807 - DNA, 387 bp, Homo sapiens
gattctgagttaactaacattttagcctagtttcaggcactccccagtggcccaatgagccaccccttcttgcaggcctcaaaatgcactgtgataaaactgcatagtattttcttttccttattttcatgttctaagaaatattattgtccgggcacggtggcttacacctgtaatcccagcactttaggaggccgaggcaggcagatctcttcagcccaagagttcaagaccagcctgggcaacatggtgagaccctgtctctaataaaaatagaaaaagacaaaaccctggtgtggtgatgcatgcctgtggtctgagctactcaggaggctgaagtgggaggatcccttgagccctgggggtggaggttgcagtgagctgaga

SEQ ID NO: 262808 - DNA, 4390 bp, Homo sapiens
  misc_feature (136)..(136): n is a, c, g, or t
  misc_feature (1836)..(1836): n is a, c, g, or t
  misc_feature (2187)..(2187): n is a, c, g, or t
tatcctatccctatcctagcttttaacctgagccagagctcactacacaggttcctggctatcgagtctgaatctgcactactcaacttataaactgtctgcagacacctgttagggaaattgctgatcatgggcngcaggatctgaactcgctttaccttctcgtttggagcacagggaccgcccagctagaggagcaccagcgcactgcgccccagccctgggcgagggtgcggaggatttgttctcggtgcaatcctgctggcgcttttccggggttctgcgcggatccagctccccatctctgctcctacacacacaaaagaaaacaactctcgattggaagttgtggaattttctcagcccctacgaggcgcggggattctccagccccggccctcctcccgccagcctgaggtctccttcgctcgcctgccttgctagggaccgcagtccctcagccgcagctgggtctgtccgccccgcctttgccctcgccttttcccggggcggatttggtgaagtcggcctcaagtccaggaggtctgtcttcgccgggccagctctcgcggaactggggggtagagagcaaagggagagattcgtggaagggaagggaggtaggggtggcgcaaacgcccagagtatcaaacttgggggtggcacagtaggtgacagcagcagctgcaggtggtggctggggacccgcgagggggcgcccctctgggtagggtctggctgagcgggcttgcaagcccgggaggcggctgagagaccctggacactgttcctgctccctcgccaccaaaacttctcctccagtcccctcccctgcaggaccatcgcccgcagcctctgcacctgttttcttgtgtttaagggtggggtttgcccccctccccacgctcccatctctgatcctcccaccttcacccgcccaccccgcgagtgagtgcggtgcccaggcgcgcttggcctgagaggtcggcagcagacccggcagcgccaaccgcccagccgctctgactgctccggctgcccgcccgcgcggcgcgggctgtcctggaccctaggaggggacggaaccggacttgcctttgggcaccttccagggccctctccaggtcggctggctaatcatcggacagacggactgcacacatcttgtttccgcgtctccgcaaaaacgcgaggtccaggtcagttgtagactcttgtgctggttgcaggccaagtggacctgtactgaaaatgggtccaataggtgcagaggctgatgagaaccagacagtggaagaaatgaaggtggaacaatacgggccacaaacaactcctagaggtgaactggtccctgaccctgagccagagcttatagatagtaccaagctgattgaggtacaagttgttctcatattggcctactgctccatcatcttgcttggggtaattggcaactccttggtgatccatgtggtgatcaaattcaagagcatgcgcacagtaaccaactttttcattgccaatctggctgtggcagatcttttggtgaacactctgtgtctaccgttcactcttacctataccttaatgggggagtggaaaatgggtcctgtcctgtgccacctggtgccctatgcccagggcctggcagtacaagtatccacaatcaccttgacagtaattgccctggaccggcacaggtgcatcgtctaccacctagagagcaagatctccaagcgaatcagcttcctgattattggcttggcctggggcatcagtgccctgctggcaagtcccctggccatcttccgggagtattcgctgattgagatcatnccggactttgagattgtggcctgtactgaaaagtggcctggcgaggagaagagcatctatggcactgtctatagtctttcttccttgttgatcttgtatgttttgcctctgggcattatatcattttcctacactcgcatttggagtaaattgaagaaccatgtcagtcctggagctgcaaatgaccactaccatcagcgaaggcaaaaaaccaccaaaatgctggtgtgtgtggtggtggtgtttgcggtcagctggctgcctctccatgccttccagcttgccgttgacattgacagccaggtcctggacctgaaggagtacaaactcatcttcacagtgttccacatnatcgccatgtgctccacttttgccaatccccttctctatggctggatgaacagcaactacagaaaggctttcctctcggccttccgctgtgagcagcggttggatgccattcactctgaggtgtccgtgacattcaaggctaaaaagaacctggaggtcagaaagaacagtggccccaatgactctttcacagaggctaccaatgtctaaggaagctgtggtgtgaaaatgtatggatgaattctgaccagagctatgaatctggttgatggcggctcacaagtgaaaactgatttcccattttaaagaagaagtggatctaaatggaagcatctgctgtttaattcctggaaaactggctgggcagagcctgtgtgaaaatactggaattcaaagataaggcaacaaaatggtttacttaacagttggttgggtagtaggttgcattatgagtaaaagcagagagaagtacttttgattattttcctggagtgaagaaaacttgaacaagaaattggtattatcaaagcattgctgagagacggtgggaaaataagttgactttcaaatcacgttaggacctggattgaggaggtgtgcagttcgctgctccctgcttggcttatgaaaacaccactgaacagaaatttctccagggagccacaggctctccttcatcgcattttgatttttttgttcattctctagacaaaatccatcagggaatgctgcaggaaacgattgccaactatacgaatggcttcgaggagataaactgaaatttgctatataattaatattttggcagatgataggggaactcctcaacactcagtgggccaattgttcttaaaaccaattgcacgtttggtgaaagtttcttcaactctgaatcaaaagctgaaattctcagaattacaggaaatgcaaaccatcatttaatttctaatttcaagttacatccgctttatggagatactatttagataacaagaatacaacttgatacttttattgttatacctttttgaacatgtatgatttctgttgttatttacctttttaaacagataaatatttttttttcattttagagtagcggaatctaatcttaatctaatcttttaggagtatatttcagagaaattccaagcacaccagtatgaccatccttatttcagaaatgacaatgcatagaggaaaagtaatatgtgcaaagcctccgaagaggatggttaagtaaagacttaggttaccagtatcaggctttcgtttttgtatgtaggtagctctactgcctcctcttaaaaccaacaaaggaaagagagactggctgcaaacttttagaaggaatggcttcgaatagggttcctgggaggaatcccgaggaaatagacgctgctgctctgctgattgtctccactatcctgttttgctcctacccactaatccagcctgggaggctctgggcattagcggaaggcttcaccacaaggagacaggagcgagtattccataggcatgcgctcctagtggcacgagtggcttgggtcaggatcaaagagtgaaggattcggaagtcagctatctggagagagagagagattgtgttttattcgtgtcccatagctttcctatcctatccctatcctagcttttaacctgagccagagctcactacacaggttcctggctatcgagtctgaatctgcactactcaacttataaactgtctgcagacacctgttagggaaattgctgatcatgggcggcaggatctgaactcgctttaccttcttgtttggagcacagggaccgcccagctagaggagcaccagcgcactgcgccccagccctgggcgagggtgcggaggatttgttctcggtgcaatcctgctggcgcttttccggggttctgcgcggatccagctccccatctctgctcctacacacacaaaagaaaacaactctcgattggaagttgtggaattttctcagcccctacgaggcgcggggattctccagccccggccctcctcccgccagcctgaggtctccttcgctcgcctgccttgctagggaccgcagtccctcagccgcagctgggtctgtccgccccgcctttgccctcgccttttcccggggcggatttggtgaagtcggcctcaagtccaggaggtctgtcttcgccgggccagctctc

SEQ ID NO: 262809 - DNA, 4274 bp, Homo sapiens
  misc_feature (136)..(136): n is a, c, g, or t
  misc_feature (1710)..(1710): n is a, c, g, or t
  misc_feature (2061)..(2061): n is a, c, g, or t
  misc_feature (4265)..(4265): n is a, c, g, or t
  misc_feature (4269)..(4274): n is a, c, g, or t
tatcctatccctatcctagcttttaacctgagccagagctcactacacaggttcctggctatcgagtctgaatctgcactactcaacttataaactgtctgcagacacctgttagggaaattgctgatcatgggcngcaggatctgaactcgctttaccttctcgtttggagcacagggaccgcccagctagaggagcaccagcgcactgcgccccagccctgggcgagggtgcggaggatttgttctcggtgcaatcctgctggcgcttttccggggttctgcgcggatccagctccccatctctgctccttgctagggaccgcagtccctcagccgcagctgggtctgtccgccccgcctttgccctcgccttttcccggggcggatttggtgaagtcggcctcaagtccaggaggtctgtcttcgccgggccagctctcgcggaactggggggtagagagcaaagggagagattcgtggaagggaagggaggtaggggtggcgcaaacgcccagagtatcaaacttgggggtggcacagtaggtgacagcagcagctgcaggtggtggctggggacccgcgagggggcgcccctctgggtagggtctggctgagcgggcttgcaagcccgggaggcggctgagagaccctggacactgttcctgctccctcgccaccaaaacttctcctccagtcccctcccctgcaggaccatcgcccgcagcctctgcacctgttttcttgtgtttaagggtggggtttgcccccctccccacgctcccatctctgatcctcccaccttcacccgcccaccccgcgagtgagtgcggtgcccaggcgcgcttggcctgagaggtcggcagcagacccggcagcgccaaccgcccagccgctctgactgctccggctgcccgcccgcgcggcgcgggctgtcctggaccctaggaggggacggaaccggacttgcctttgggcaccttccagggccctctccaggtcggctggctaatcatcggacagacggactgcacacatcttgtttccgcgtctccgcaaaaacgcgaggtccaggtcagttgtagactcttgtgctggttgcaggccaagtggacctgtactgaaaatgggtccaataggtgcagaggctgatgagaaccagacagtggaagaaatgaaggtggaacaatacgggccacaaacaactcctagaggtgaactggtccctgaccctgagccagagcttatagatagtaccaagctgattgaggtacaagttgttctcatattggcctactgctccatcatcttgcttggggtaattggcaactccttggtgatccatgtggtgatcaaattcaagagcatgcgcacagtaaccaactttttcattgccaatctggctgtggcagatcttttggtgaacactctgtgtctaccgttcactcttacctataccttaatgggggagtggaaaatgggtcctgtcctgtgccacctggtgccctatgcccagggcctggcagtacaagtatccacaatcaccttgacagtaattgccctggaccggcacaggtgcatcgtctaccacctagagagcaagatctccaagcgaatcagcttcctgattattggcttggcctggggcatcagtgccctgctggcaagtcccctggccatcttccgggagtattcgctgattgagatcatnccggactttgagattgtggcctgtactgaaaagtggcctggcgaggagaagagcatctatggcactgtctatagtctttcttccttgttgatcttgtatgttttgcctctgggcattatatcattttcctacactcgcatttggagtaaattgaagaaccatgtcagtcctggagctgcaaatgaccactaccatcagcgaaggcaaaaaaccaccaaaatgctggtgtgtgtggtggtggtgtttgcggtcagctggctgcctctccatgccttccagcttgccgttgacattgacagccaggtcctggacctgaaggagtacaaactcatcttcacagtgttccacatnatcgccatgtgctccacttttgccaatccccttctctatggctggatgaacagcaactacagaaaggctttcctctcggccttccgctgtgagcagcggttggatgccattcactctgaggtgtccgtgacattcaaggctaaaaagaacctggaggtcagaaagaacagtggccccaatgactctttcacagaggctaccaatgtctaaggaagctgtggtgtgaaaatgtatggatgaattctgaccagagctatgaatctggttgatggcggctcacaagtgaaaactgatttcccattttaaagaagaagtggatctaaatggaagcatctgctgtttaattcctggaaaactggctgggcagagcctgtgtgaaaatactggaattcaaagataaggcaacaaaatggtttacttaacagttggttgggtagtaggttgcattatgagtaaaagcagagagaagtacttttgattattttcctggagtgaagaaaacttgaacaagaaattggtattatcaaagcattgctgagagacggtgggaaaataagttgactttcaaatcacgttaggacctggattgaggaggtgtgcagttcgctgctccctgcttggcttatgaaaacaccactgaacagaaatttctccagggagccacaggctctccttcatcgcattttgatttttttgttcattctctagacaaaatccatcagggaatgctgcaggaaacgattgccaactatacgaatggcttcgaggagataaactgaaatttgctatataattaatattttggcagatgataggggaactcctcaacactcagtgggccaattgttcttaaaaccaattgcacgtttggtgaaagtttcttcaactctgaatcaaaagctgaaattctcagaattacaggaaatgcaaaccatcatttaatttctaatttcaagttacatccgctttatggagatactatttagataacaagaatacaacttgatacttttattgttatacctttttgaacatgtatgatttctgttgttattcctattggagctaagtttgtctacactaaaatttaaatcagactagagaataatttttgtggcatgttgtaacatttcacagtatttacaagctatttttgcacaggtacatagctctcatgtatttaaagaacactgcagtgttattttctttgaaattcatcctccacggacccattcatactaaataaaacaatgtaattacattaaaatggacctatctgtaagaggtactaaaaacactggattcatttcatcttgcaaatgttgtatttcaaaccagtttcacataagttatttgtcttcttttcaaaataattagctatatttttatataatatgaatatatacataaaaattgtttctataaattgtagaacatagatgctacagtattttttatttaattatattatgaataaaattgttatttcaatagtacccaaccaaagatgcttaaaaaccttctatgttcataaaaaataacaactgagatgttaaaatagtcatacgtctttagatgctattaaagtttcattagtcatatttttgtaaatatgacagaatttgtgaatatatttttaaagcaaaaaacttcaacatgcatatgatatatagttacaacattaattttatgaactggagagctttactttgtggatatatttaaaattcatattatagctcctattaaattccttccatgatagatataaaggactggtttttaagtgcactgcacttctggaatactgaaaaagaatgaaaacaatatgttagattaggtgtaagactttaagaagcgaacaaaaagtaatgtatatctgtaatatataatcaaatgattcatttttctgttagactaggcaaattgttcaaaaataacctttttgtcttttaagtagcagtcactttgcttaagatgctaatagaaaactgtggttaaagatttaccctccctcttggtgaattattacactgtaagaaatgtatatgctactgtgttacatgttgtattagtaaattattagaatccaattaatgattcaattaacatatatcttatccaattcattatgtcaattcattaataaaataccttttatgtagaggctttatgttgcaattaaaaagttgggaaaatgaganaaannnnnn

SEQ ID NO: 262810 - DNA, 3558 bp, Homo sapiens
  misc_feature (994)..(994): n is a, c, g, or t
  misc_feature (1345)..(1345): n is a, c, g, or t
  misc_feature (3549)..(3549): n is a, c, g, or t
  misc_feature (3553)..(3558): n is a, c, g, or t
aattcatagtggttatacaattcataaagtttataatattcattccacttaaaatgaaattaatccatttgatagcattcactttgaaattatgtctatactatcggtattatactttaccgtcatagcatatatttcagaaacctgatttaattgatccatatttgacaatagacttattaaagggtctatttcattaaaatgttttgctatgcacaattttagagagtagaggatattttgatccctaaccaaaattaaaccagtccatttgtgaaatttctttgcttcacctttgtgttttcctcgttccattggtttttgttgttgttgttttgttttattttgtttttctttttaggttgtagactcttgtgctggttgcaggccaagtggacctgtactgaaaatgggtccaataggtgcagaggctgatgagaaccagacagtggaagaaatgaaggtggaacaatacgggccacaaacaactcctagaggtgaactggtccctgaccctgagccagagcttatagatagtaccaagctgattgaggtacaagttgttctcatattggcctactgctccatcatcttgcttggggtaattggcaactccttggtgatccatgtggtgatcaaattcaagagcatgcgcacagtaaccaactttttcattgccaatctggctgtggcagatcttttggtgaacactctgtgtctaccgttcactcttacctataccttaatgggggagtggaaaatgggtcctgtcctgtgccacctggtgccctatgcccagggcctggcagtacaagtatccacaatcaccttgacagtaattgccctggaccggcacaggtgcatcgtctaccacctagagagcaagatctccaagcgaatcagcttcctgattattggcttggcctggggcatcagtgccctgctggcaagtcccctggccatcttccgggagtattcgctgattgagatcatnccggactttgagattgtggcctgtactgaaaagtggcctggcgaggagaagagcatctatggcactgtctatagtctttcttccttgttgatcttgtatgttttgcctctgggcattatatcattttcctacactcgcatttggagtaaattgaagaaccatgtcagtcctggagctgcaaatgaccactaccatcagcgaaggcaaaaaaccaccaaaatgctggtgtgtgtggtggtggtgtttgcggtcagctggctgcctctccatgccttccagcttgccgttgacattgacagccaggtcctggacctgaaggagtacaaactcatcttcacagtgttccacatnatcgccatgtgctccacttttgccaatccccttctctatggctggatgaacagcaactacagaaaggctttcctctcggccttccgctgtgagcagcggttggatgccattcactctgaggtgtccgtgacattcaaggctaaaaagaacctggaggtcagaaagaacagtggccccaatgactctttcacagaggctaccaatgtctaaggaagctgtggtgtgaaaatgtatggatgaattctgaccagagctatgaatctggttgatggcggctcacaagtgaaaactgatttcccattttaaagaagaagtggatctaaatggaagcatctgctgtttaattcctggaaaactggctgggcagagcctgtgtgaaaatactggaattcaaagataaggcaacaaaatggtttacttaacagttggttgggtagtaggttgcattatgagtaaaagcagagagaagtacttttgattattttcctggagtgaagaaaacttgaacaagaaattggtattatcaaagcattgctgagagacggtgggaaaataagttgactttcaaatcacgttaggacctggattgaggaggtgtgcagttcgctgctccctgcttggcttatgaaaacaccactgaacagaaatttctccagggagccacaggctctccttcatcgcattttgatttttttgttcattctctagacaaaatccatcagggaatgctgcaggaaacgattgccaactatacgaatggcttcgaggagataaactgaaatttgctatataattaatattttggcagatgataggggaactcctcaacactcagtgggccaattgttcttaaaaccaattgcacgtttggtgaaagtttcttcaactctgaatcaaaagctgaaattctcagaattacaggaaatgcaaaccatcatttaatttctaatttcaagttacatccgctttatggagatactatttagataacaagaatacaacttgatacttttattgttatacctttttgaacatgtatgatttctgttgttattcctattggagctaagtttgtctacactaaaatttaaatcagactagagaataatttttgtggcatgttgtaacatttcacagtatttacaagctatttttgcacaggtacatagctctcatgtatttaaagaacactgcagtgttattttctttgaaattcatcctccacggacccattcatactaaataaaacaatgtaattacattaaaatggacctatctgtaagaggtactaaaaacactggattcatttcatcttgcaaatgttgtatttcaaaccagtttcacataagttatttgtcttcttttcaaaataattagctatatttttatataatatgaatatatacataaaaattgtttctataaattgtagaacatagatgctacagtattttttatttaattatattatgaataaaattgttatttcaatagtacccaaccaaagatgcttaaaaaccttctatgttcataaaaaataacaactgagatgttaaaatagtcatacgtctttagatgctattaaagtttcattagtcatatttttgtaaatatgacagaatttgtgaatatatttttaaagcaaaaaacttcaacatgcatatgatatatagttacaacattaattttatgaactggagagctttactttgtggatatatttaaaattcatattatagctcctattaaattccttccatgatagatataaaggactggtttttaagtgcactgcacttctggaatactgaaaaagaatgaaaacaatatgttagattaggtgtaagactttaagaagcgaacaaaaagtaatgtatatctgtaatatataatcaaatgattcatttttctgttagactaggcaaattgttcaaaaataacctttttgtcttttaagtagcagtcactttgcttaagatgctaatagaaaactgtggttaaagatttaccctccctcttggtgaattattacactgtaagaaatgtatatgctactgtgttacatgttgtattagtaaattattagaatccaattaatgattcaattaacatatatcttatccaattcattatgtcaattcattaataaaataccttttatgtagaggctttatgttgcaattaaaaagttgggaaaatgaganaaannnnnn

SEQ ID NO: 262811 - DNA, 518 bp, Homo sapiens
gcttctcactctgactccaacagggtgagcttgctatccttgtggcacagggccttttgcattgtggatgatggagcggctcgtatagtccataagttttgtgcgtagctgtgtaccctgtccctgtgagctggttctgcccggcacctcggtgacctcgaggaaagaagctgagagacagagtcttgctttgtcacccaggctggagggcagtggcaccatcatagctcactgcagactcgaactcctgggctcaagggatcctcctgcctcggcctccaaaaatggtgagattatggacatgagacactgcactgggcctattgtgtatcttgttggcctaaaattgaaacatgccttgtgagcgtttactgcaacttcaatgagtgattattatgttgcctttaatcctgagagactgtattacttgtgcactttttttttttttggatagggggaaattagatttattccctatatgttttagaaaattgaagttttaaatatcagactcacta

SEQ ID NO: 262812 - DNA, 475 bp, Homo sapiens
gaaggggattgagcctggtctaggtcatcagggcaggcctgccggaggaagtgactttaggtggtagtttgaaggaccagtgggggttgccaggaagaggaatagagagaaccgcggggagacccctgggtgtgagcatgggagccccatcacagtgtcttgggggtgtaactgtcatttaagggataagggccaggaaagtcaaaacatgcacagagcagacccacatgatgagcagttgggttggtatcagcttcttgtgaagtggtgatagaggatggtgtgcaggggaggagtggaagaaacaagaccatgggatgggaggggtgggcaaaagccaggccaggcaggccacagaagccaggtctgggctgcgtgctcagggcagcagggcctctggagggtgtagatggtgaggcgacaggcagatttgtgtttggaaagggcactgtcttcactatggaaaatcagtttg

SEQ ID NO: 262813 - DNA, 294 bp, Homo sapiens
gtggataacgtaaatgcccaagcgctttctattcagtcctcaaatgcaaagcagacccttgctaataatggtaataatccgaatgggtttaactgcagcattgtaagaaaaggcaggcagtactcttagactacaggggtggatctcatcatttgattttcccgactccgccaggaaataagaggggccttggcttggggagaggtgtgtggggaggcgtaaggggtgggccccccggaaatcctgctgcgctgtttaaacctaaggtgacctaacggatggcgggagcggccg

SEQ ID NO: 262814 - DNA, 450 bp, Homo sapiens
gtacaacatactagcagataatatggaatactcatgtgttttaagtgattagccaatcaaggaggcttcattgctccttagagaaaaggatcagataacactggatataaagctggtttccttctagggaggaatcccaatagtaactcaaatgccagacttaagtatttctcaataaagactctgatgaaataattcctagcttttatttgccaatgttttgtcctaatcatatctgcctgtgacagataaattctggtgtaaaatcatcaatgaaaacaggtttttttctcatcccatatttagaaagactcttaatgctggcaaatctccacacaaatatctagaaatgtttgactgatttttaaaaaggattacatattccactggtaatcgccaaagaccgggctcacaagaaagaaaggagaattcctgggtgccagccaggaa

SEQ ID NO: 262815 - DNA, 377 bp, Homo sapiens
ctgagaaatgtgtgtctctatctgtggtgcgttgggtgagtgtatgggctctaggtcagacctagttttaaattctggtactgccatatattagctatggaccttggatagttacctaaccgatgctttggtcttctcatttgtaaataattcatactgtaaagaattcatactggtaatcacagcctggtgagcgtgaagattaatcaggttatacacgcacagggcttagaacagttatgctacaggtaggaagtgctcctgtctatttgcttttcctacgattataattatctcatgtactacttatttatgtgtaaaccatacacagggctagaaaggaagggatttaaaaataaatataactaagtgttctg

SEQ ID NO: 262816 - DNA, 683 bp, Homo sapiens
  misc_feature (503)..(503): n is a, c, g, or t
ctgcctgtcatgcccacctagcctcacccagccccacaggccatggtacacgtggctctgtgatttgggacacccttgcatttgtattaaatgagccacagtcacctgctggcaaaggacaatatcaccatgctaagatcaacagggggactggtggaagaactgtggggcaggagaatctcaatggcattgtctgggtacccagctttgacttgtccttgacacagttaactgcatgtgtctctactctgcttgtaaaataaaaagtgaccactgtattctgtaaaggcaaggacacaagtctttctacctgatgccatgaatatgcctggatatattgacatatgacatggatatatgtccacaaagatggatacatgtgatatatacatgatcatttaaaaagtcgtaaagaaaaatacacgcgaccaacaagtttgtcgtcatgggtatgttgggatgaggtggaaggatggaacattcaataggacagggggttgttnttttttcttttttttttccctcttcctttctctttctctctccctctctctctttcttctctctctccctttctccccttttctcccttctctctcctcctttcttctttccttcccttcccccccttctctcctcttcctcttctccccctccttctccccttcctttctttttcttcc

SEQ ID NO: 262817 - DNA, 477 bp, Homo sapiens
tatacctatgtaacaaacctgcaccttcagcacatgtatcccagaacttaaagtaaggtaaaatagtgtacctgaatcaaaaaaaaaaaaaaagaaaaaaaaagaaaagaaaagaaaagaaagaatagtatcttcatcaaggagaactagaaaagatagcaaaacctagataccaaatcccaagggaacagaaggccttagaaatgacaagaagttggatgagatgaagcacctggaattgatgttgttgttgttgtgtggctttttatgtgcttgatttgtttgaaagagcaggctgcatttaaaggacttatttttcaagattgtatgctctaccaagaaaacagacatgtacacaatgaatttaagacgcactataaaaaaatgtcattttagagatgcaatagggcaaggataaaaagcaaaaaaaacccagctcaaaaagagagaaagaggatgagttagcgagagtgttcc

SEQ ID NO: 262818 - DNA, 148 bp, Homo sapiens
ctaactggtttggggcagcagagttatcatttggaaaaaaaatacagttagattaaccccctataggttaaggtttaaccccatagagattaaggtttaactgaaacagatgaagccttggaagtactaaaaaaaaggacaggcaaat

SEQ ID NO: 262819 - DNA, 531 bp, Homo sapiens
aaggtctggggtctctgccaagtagaaaaaaggcccagagccaggcaggcagctcagggcaaaagtcaggatgccccgattccagtcccaggggcaggagagtacagctgcccaagcaggcacactgcagacggccctggcactgcctcccacctgctacaggaccttgagctggtgctgatctctcagcctgtttcctcatttgtgaaggggaagatgtttaagtactattagtaatagtcacatcatccctaactggtttggtcattgaggattattcattcattcagcaagttttcattgaacaccaggtacttcacagacatgctccctgctcttggaaatgtagcgtttagttaactgcttgaggtgagaccttgggcacatgacttattctctcagagcctcagtttcatcatctgtaaagtggaggtaagtattcctacctcactgagtgaatttgagaattaaataatacttgtaaaacacttaggacagtatcaaataaatggtgagtgataaatgtgaact

SEQ ID NO: 262820 - DNA, 458 bp, Homo sapiens
actgtttggcaaagtgggttgggacacagtacattttgcagcttagcagcattgtgtttttctgagcaaagacttcgcacaggggctggggccacctttagggactgctgtggtctgaatgtctccccaaagtcacatgttgcaacttaatcaccaatgtgatagcactaacaagtggggccttcagggggtgattaagtcatgatggtggagctctcataaatgtgatcagtgaccttataaaatgtgattagtgaccttattagtggctggaggtaactagccccctttcgctgttctgctcttctgccacgtgaggatacagcattctaggcaccatcttggaagcaaagacagaggccctcaccagacactgaacctgctaatgccttgatcttggacttctcagcccccagaactatgtggaaataaatttctgttcttttataaatgacctg

SEQ ID NO: 262821 - DNA, 694 bp, Homo sapiens
acatgacatgaatgctttccatgtcattaattaggcatctctattagtttcattatattaatttattatctatataggatttataatttatttaatcaagctgctattgttgaacattaaggtatttctactttcctggacataaagaataaggctgtgaataatatgtctttgttcaggcttcatatttttaggcataaattcttagaaatggaattgctgaatagatgaatataagcttatctatatttttaaggttttttgatatgtttaatatgccattttacatatttttaaaaatctatgtacacaaataactatagaagtgtagaagtaggtgtgtcttttaccccacatcttagtttacactaggtactaccattaaaaacatttttcattgtataatataatccagatacaaaaacacacatgcatatatatgtatatgtgtatatgaaatataataaggcaaatagccttgtcactatacccagatcaagacgtacacatccagctacccagaagcctttctgtgtgttccatcctgatcacaactactctctactttcctgcagaggaactgtgaaaatatccagggactctccttacttttgtatcaatccctttcttgcatttctctgtggcttcatcaccaactatgtatttataggcattggggttcactctcgctcat

SEQ ID NO: 262822 - DNA, 340 bp, Homo sapiens
gcaactcattctttttcaaaccaaaaattattagacccaaagctaaacagcaccttgtctaaacacataaaacaaacttaaaaaaaaaaaaaaaaacctcttcctggcatttcccctcattatctaatatccaagtgacctgcatatttctgattgctctctttctcccctcccatttttccctcttaagccttgccactgagagataatacatcagtttttcagaaaattagcagcagcagcagcatgtccactttttctaagttgctttagttttgtttgagttttaagataaagcctatttccagggaatattttctttcctgtgttgttttacact

SEQ ID NO: 262823 - DNA, 369 bp, Homo sapiens
gtagtcatatctacatagaatggtcaggagtgggaaactttacttatgctgtttggcataggtaacattttaataggcaaacattgcttgctcaaagtgttccagtctgagaaaatgtgcaggaggaacagcgtggaatcagtgtatgtgggagacagcatgtgttgtaatttggagcattgaggctatatatgagagaacacatgagagaagagtggaaaggcagggctgggtctggtatgctaggggaaagcctttgggctttattgaatagatcacttggagatactgccttaggtttggtgatggggaatggatacacgatactgaaggaacagtcataagcataggctttcaagagatgtggag

SEQ ID NO: 262824 - DNA, 704 bp, Homo sapiens
gagcctttttcacttgaaagtgctcatatttagacctgtgacattactttcaaaggaggttttatatacaaattgtagtcacagagatcccccagcagaactggaagatcttcttcatataacttaatacttttatcttgtttctaggtcacatcctttatagtgtactagaatttaattatttctataaatcttgtaattatcttgggaataacagaattatattccccccccacctttttttttttttttttttaatttaaatggagtctttctctgttgcccaggctggagtgcagtggcatgattttggctcattgcaacctccacctcctgggttcaagtgattcttctgcctcagcctcctgagtagctgagattacaggcactcaccaccatgcctggctaatttttatagttttagtaaagatggggtttcaccatgttggttaggttgatctcaaactcctgacctcaagtgatccacccgcctcagcctcccaaagtgctgggattacaggcatgagtcacagagtgcagtggctctgccctgtatttttaatgcctctcccaaagccattaattacatctaaggtataccataattgttatcaattctgttttgcatttttttcttaaaactgttagtagtttatgcctgtcctgatctcagagagctcctgggcttaggacataagaatttg

SEQ ID NO: 262825 - DNA, 500 bp, Homo sapiens
taatttacagagagaaatgtaactgccaaagggaccggatacacgtgtcctccagccaacacgtcagctccctgcaggcacactccgcagaaagccaagttcaaatcaaaatggtgcttggcttgcttctcccaggcaggctgcctgatggttcctggatatgccgtgtgtgtccacacctctgggcctctgctcagtgtagagatggcatacaggaactgaatggatgagcaggtcactgagcagacacgctggggaaagcaccacgtggagggaatcaagagagctggattctcattccagtcttctggctcctcaggaaataacacaatagagacaaagctgaagtccctttatctactacccaagtcccacagataactaatgaatttggtgtatatccttctcattattttccaatattttaacatacctatccatatatttagcatttgatattgatttatgtcttaatttacataaatggtatcatatgattc

SEQ ID NO: 262826 - DNA, 377 bp, Homo sapiens
tgtggacctcattactgactcccatccactagcttctggtaggctttggcccttgggagccatcagaaaggcaagaaatcagacggcaggagtagagggatactggtatttattttcagttttctctctccacgttgccctaggttggctccatcccttcaccaaaggccacagctccagccagacggtgtcctctccatggaaaactaccttttctaggctcagggaaacagctccctttccttgcctctttgggactagggatgggaagggcccccactgttgctagtcccaagggactgcactctcctccttggtttctctaaacctgcccacacctttataaagagtcgctgttattaaagtcctgttacatt

SEQ ID NO: 262827 - DNA, 324 bp, Homo sapiens
tcgtctctccagcacgagggagagagtggtaactccctccttgagttgtcgtgaggattatttattgctgcagttaaggtgcttagggcagggctgagcacaaggtaagcatcagcccgttagccggcattatactttgccttctatactttgccttctcgactagtgatacaagttatcttaatttaaatagaatccattctgtactactgattctttttcccctttacatttttttaaaccaaataaacaatagctttccatattccacaaaaattgtgtcatatttgtatcacacatgtatgatgatcttatgtttacgat

SEQ ID NO: 262828 - DNA, 357 bp, Homo sapiens
cagactgtggatacctttttaagaaactgacttgcagatggactagatgaagggcaaggagaggagtcaaggaagaggccaaaaatacttggcctgtgtgattcaaagaatgtacgtactatctgagatgggagaggctatggtaggagtagtttcagtagagagggggtgtattagtcctttctcacactgttatgaagaaataaccgagactgggtaatttataaagaaaaggccgggtacggtggcttacgcctgtaatcccagcactttgggaggccaaggcgggcagatcacaagatcaggagatcgagaccattctggctaacagggtgaaaccctgtctctactaaaaat

SEQ ID NO: 262829 - DNA, 451 bp, Homo sapiens
acttagaagcagatccttccccatctgacactttatatgagactcaacttctggccaacactccaactgcagctttgataaaggccataaatgcttgctattttaagccaataaatggtgtgatcttgactcactgcaacctcggcctcccaagttcaagcaattctctgcctcagcctctcgagtagctgggattataggcgcccaccaccacacccagctaatttttgtatttttagtagagacaggtttcaccatcttggccaggctggtcttaagctcctgaccttgtgatccaccagcctcggcctcccaaagtggagactatttatttaaataaacaaagttgaaaacacttgcattaaactgaatcacaatagaagaatgctatatgcctaattgtaacttattccagaaatgccaggatggttccattcataggttaaaaggg

SEQ ID NO: 262830 - DNA, 424 bp, Homo sapiens
tatgcagggaagcagtgcctccccagagctcagaggctgatgagggaggcaggcaatgagcaaggaaacagtccatctccagctcggggccagctaaggacggccttctccaactctcccctcttgctccagacacagtctatccatttgaggttgctgtgcaagaggctgccccgggggatgatgcccggccctgtgcacaacacaggctgcctctctgctttacacaaaggctccttaccagctagttctgtgattctcagaggcccacagcatcctcaggcttttgacaaccaggctctggcacccactgtgtgccagaccctggcatctgcctggctcaggggtggtcactcacgtccccagctgctggccttggagcaactgctaccagggtccagctgcaagcaggagcctgcggccg

SEQ ID NO: 262831 - DNA, 937 bp, Homo sapiens
tttagtatcttgtaaccacgttttttacttcaactatccaaaaaaaaaaaattgtgggtcagactaaaacatgcaaagtgtagaagtcagttacaatataggcagaccctttttttcttatgtgccaggtggaaatagtttccatgtgttattttacacatgcttccgacgtgaggaaatactagctggaaagcaactttaatttccagagaaatgcatgtaaataagaaactacttatctatcatccagttttcccaattgggtgaagggatttggggcaagagcacagggcatgaagagagtaaacagtggggaggttgtgggagagttgaagtgggaagtggctcctgtggaccaaagacatggctggcaggacagagaatctatgaagacacagatggggtaagcccagaaaagcatcccaaggcacacacataccttgttttttgtaaatctcctttatcttttattaccaaggtaaattataatctcagatttgactttgtggtcactattttgattaagaaaacaaaaatagcattcactccttaagaacttacacgtctgtgactaatgcctacagtccttgttttttacgcctagacactccaggccaaatcacaaatgacggcccagaacagcaaggctagttcaaaaggagcataaaggactacttgaggatggagctcactctcttcagcttccggccctcaacagtggcatctgtaaaggacctcccagataagactgtctggcttcagagagcggatcagctgtttagcccgtggggcagtcctttgaggcctggtaaccattccaggtgatgtgggtagtgagaccaagttcagaccacttagaaaaatataattgcaaagtcccatttcctctgtaccattgtcaccccactcaactttgtataaagcccaccccccatca

SEQ ID NO: 262832 - DNA, 696 bp, Homo sapiens
cactctggctctggtgttctgattctcacgtgttgttcccctcccgttctccagtggcaggacctccacctgaaggagaacgtccctccttcccttttgctcctgtcccgcaccttctacctgatagatgtgaagcccaagccgattgagataccactcagtggggaggctccaaagactgatattcttgtggaattacctactttcactgaatctaaagagaacatggtggatcttgcacctcaactgaagggaactaaggatgaagactttatacagccgccaccagttacatcatcacccataacaccatcaacacctatttcattacctaaaggacccatcacttcttctgaagaacctacactccaggccaaatcacaaatgacggcccagaacagcaaggctagttcaaaaggagcataaaggactacttgaggatggagctcactctcttcagcttccggccctcaacagtggcatctgtaaaggacctcccagataagactgtctggcttcagagagcggatcagctgtttagcccgtggggcagtcctttgaggcctggtaaccattccaggtgatgtgggtagtgagaccaagttcagaccacttagaaaaatataattgcaaagtcccatttcctctgtaccattgtcaccccactcaactttgtataaagcccaccccccatca

SEQ ID NO: 262833 - DNA, 420 bp, Homo sapiens
ttaatctctagctctctctgatgtagaagtcctctactcaccacttaaactatttcattactaaaggaccatcacttcttctgaagaacactccaggccaaatcacaaatgacggcccagaacagcaaggctagttcaaaaggagcataaaggactacttgaggatggagctcactctcttcagcttccggccctcaacagtggcatctgtaaaggacctcccagataagactgtctggcttcagagagcggatcagctgtttagcccgtggggcagtcctttgaggcctggtaaccattccaggtgatgtgggtagtgagaccaagttcagaccacttagaaaaatataattgcaaagtcccatttcctctgtaccattgtcaccccactcaactttgtataaagcccaccccccatca

SEQ ID NO: 262834 - DNA, 2163 bp, Homo sapiens
tccggatttgcagggtccgaaggagaatacatcaaagtgatgtcattcatgactccgaaatggttaccatggcgactatcagacatattaagctgtcagggaaagagcctgtttaatccagtcttcaatcacgggtttcctcgggcgttagccactgcctgcggagtgtggactggcagaaaaacgtcaccttcgggccccccagcaccaacgcgccttaaaccaagccccacaaagaagtcacttcggcgatgtaaacgcgactttgcggcttcctgggctgctaaggtgaaggacgcccgccctccccagaacttgagagcttattggttggcgatgtcgtcactcagagtgacgtcaggggcgaggaaagaagcggaaccgtagagacttggcttcgggcccttctagcttgggggtcccgggaaggagctgggaggacctaggcggccgttccgcggagcccggccgaggaggtccctatgttaactacttgagacaaaaataaatatggccttctacagttataattcagttctggctattgctcgaacaagattccctagccattttgtccatcctacctgctcttcttattccccatcatgtgcatttcttcacttgccagattcccatttaaataagacatgtatgaagaactatgagagcaagaagtactcggatcctagtcagccaggcaatacagtacttcacccaggaactagactaatacaaaagctacacacatccacttgctggctgcaagaagttcctggcaaacctcagctggagcaagccacaaaacatccacaggtgacaagccctcaggccacaaaagaaactggcatggagattaaagaaggcaaacaatcttatagacaaaaaatcatggatgaactaaaatattattacaatggattctacttactttggattgacgccaaagttgctgccagaatggtttggaggctgttgcatggacaggtcctgaccagacgagagagacgaaggctgttgagaacttgtgttgatttcttccgcctggttccatttatggtgttcttaattgtacccttcatggaattcttattaccagtgtttctgaaactcttcccagagatgttgccatcaacttttgaaagtgaatccaaaaaggaagaaaaacagaaaaagaaaatggctgtaaagttggaactagcaaaatttcttcaagaaaccatgacagaaatggcaaggaggaacagagccaagatgggcgatgcctctacacagctctcatcctacgtgaagcaggtccagacaggccacaagcccagcacaaaggagatagttcgcttctccaaactatttgaggaccagctggccctggaacacttagatcgccctcagctggttgccctttgcaaactgctggaattgcagacatttggaaccaacaacctgctccgctttcagctcctgatgaaactgaagtctataaaagcagatgatgaaataattgccaaggaaggggtgacagcattgagtgtatcagaactacaggctgcctgtagggcccgagggatgagatcactgggtctcacggaggaacaactgcgacaacagctcacggagtggcaggacctccacctgaaggagaacgtccctccttcccttttgctcctgtcccgcaccttctacctgatagatgtgaagcccaagccgattgagataccactcagtggggaggatgaagactttatacagccgccaccagttacatcatcacccataacaccatcaacacctatttcattacctaaaggacccatcacttcttctgaagaacctacactccaggccaaatcacaaatgacggcccagaacagcaaggctagttcaaaaggagcataaaggactacttgaggatggagctcactctcttcagcttccggccctcaacagtggcatctgtaaaggacctcccagataagactgtctggcttcagagagcggatcagctgtttagcccgtggggcagtcctttgaggcctggtaaccattccaggtgatgtgggtagtgagaccaagttcagaccacttagaaaaatataattgcaaagtcccatttcctctgtaccattgtcaccccactcaactttgtataaagcccaccccccatca

SEQ ID NO: 262835 - DNA, 2078 bp, Homo sapiens
tccggatttgcagggtccgaaggagaatacatcaaagtgatgtcattcatgactccgaaatggttaccatggcgactatcagacatattaagctgtcagggaaagagcctgtttaatccagtcttcaatcacgggtttcctcgggcgttagccactgcctgcggagtgtggactggcagaaaaacgtcaccttcgggccccccagcaccaacgcgccttaaaccaagccccacaaagaagtcacttcggcgatgtaaacgcgactttgcggcttcctgggctgctaaggtgaaggacgcccgccctccccagaacttgagagcttattggttggcgatgtcgtcactcagagtgacgtcaggggcgaggaaagaagcggaaccgtagagacttggcttcgggcccttctagcttgggggtcccgggaaggagctgggaggacctaggcggccgttccgcggagcccggccgaggaggtccctatgttaactacttgagacaaaaataaatatggccttctacagttataattcagttctggctattgctcgaacaagattccctagccattttgtccatcctacctgctcttcttattccccatcatgtgcatttcttcacttgccagattcccatttaaataagacatgtatgaagaactatgagagcaagaagtactcggatcctagtcagccaggcaatacagtacttcacccaggaactagactaatacaaaagctacacacatccacttgctggctgcaagaagttcctggcaaacctcagctggagcaagccacaaaacatccacaggtgacaagccctcaggccacaaaagaaactggcatggagattaaagaaggcaaacaatcttatagacaaaaaatcatggatgaactaaaatattattacaatggattctacttactttggattgacgccaaagttgctgccagaatggtttggaggctgttgcatggacaggtcctgaccagacgagagagacgaaggtgtttctgaaactcttcccagagatgttgccatcaacttttgaaagtgaatccaaaaaggaagaaaaacagaaaaagaaaatggctgtaaagttggaactagcaaaatttcttcaagaaaccatgacagaaatggcaaggaggaacagagccaagatgggcgatgcctctacacagctctcatcctacgtgaagcaggtccagacaggccacaagcccagcacaaaggagatagttcgcttctccaaactatttgaggaccagctggccctggaacacttagatcgccctcagctggttgccctttgcaaactgctggaattgcagacatttggaaccaacaacctgctccgctttcagctcctgatgaaactgaagtctataaaagcagatgatgaaataattgccaaggaaggggtgacagcattgagtgtatcagaactacaggctgcctgtagggcccgagggatgagatcactgggtctcacggaggaacaactgcgacaacagctcacggagtggcaggacctccacctgaaggagaacgtccctccttcccttttgctcctgtcccgcaccttctacctgatagatgtgaagcccaagccgattgagataccactcagtggggaggatgaagactttatacagccgccaccagttacatcatcacccataacaccatcaacacctatttcattacctaaaggacccatcacttcttctgaagaacctacactccaggccaaatcacaaatgacggcccagaacagcaaggctagttcaaaaggagcataaaggactacttgaggatggagctcactctcttcagcttccggccctcaacagtggcatctgtaaaggacctcccagataagactgtctggcttcagagagcggatcagctgtttagcccgtggggcagtcctttgaggcctggtaaccattccaggtgatgtgggtagtgagaccaagttcagaccacttagaaaaatataattgcaaagtcccatttcctctgtaccattgtcaccccactcaactttgtataaagcccaccccccatca

SEQ ID NO: 262836 - DNA, 1608 bp, Homo sapiens
aaaaacaaacaaacaaaaaaacaattttaagtaatacaatgctattaaagtatggaccctctaacatagatgaagtctaggagatgccaataatatttttattgtcatagatttccttcaagatagcccctaaaagttacttcagagctatggtaaacaggaaaaccctgcctcttcattttataaacagctgcagaaaacctgtcttgggtttttaacactttaagaaccaagctgagcatggcacatatgcctgtaatcccagctccttgggaggctgaggtggaaggattgcgtgagcccaggagtttgaggccagactgggcaacatagtgagacactatctcttgaaagaaagaaaatgaaacaagacagggtttttttggttttgtttttcatttttgtttttggcatgccctaaaataatgaatattgcatatgcatttaattctatagctgttgagaacttgtgttgatttcttccgcctggttccatttatggtgttcttaattgtacccttcatggaattcttattaccagtgtttctgaaactcttcccagagatgttgccatcaacttttgaaagtgaatccaaaaaggaagaaaaacagaaaaagaaaatggctgtaaagttggaactagcaaaatttcttcaagaaaccatgacagaaatggcaaggaggaacagagccaagatgggcgatgcctctacacagctctcatcctacgtgaagcaggtccagacaggccacaagcccagcacaaaggagatagttcgcttctccaaactatttgaggaccagctggccctggaacacttagatcgccctcagctggttgccctttgcaaactgctggaattgcagacatttggaaccaacaacctgctccgctttcagctcctgatgaaactgaagtctataaaagcagatgatgaaataattgccaaggaaggggtgacagcattgagtgtatcagaactacaggctgcctgtagggcccgagggatgagatcactgggtctcacggaggaacaactgcgacaacagctcacggagtggcaggacctccacctgaaggagaacgtccctccttcccttttgctcctgtcccgcaccttctacctgatagatgtgaagcccaagccgattgagataccactcagtggggaggatgaagactttatacagccgccaccagttacatcatcacccataacaccatcaacacctatttcattacctaaaggacccatcacttcttctgaagaacctacactccaggccaaatcacaaatgacggcccagaacagcaaggctagttcaaaaggagcataaaggactacttgaggatggagctcactctcttcagcttccggccctcaacagtggcatctgtaaaggacctcccagataagactgtctggcttcagagagcggatcagctgtttagcccgtggggcagtcctttgaggcctggtaaccattccaggtgatgtgggtagtgagaccaagttcagaccacttagaaaaatataattgcaaagtcccatttcctctgtaccattgtcaccccactcaactttgtataaagcccaccccccatca

SEQ ID NO: 262837 - DNA, 1070 bp, Homo sapiens
aaaaacaaacaaacaaaaaaacaattttaagtaatacaatgctattaaagtatggaccctctaacatagatgaagtctaggagatgccaataatatttttattgtcatagatttccttcaagatagcccctaaaagttacttcagagctatggtaaacaggaaaaccctgcctcttcattttataaacagctgcagaaaacctgtcttgggtttttaacactttaagaaccaagctgagcatggcacatatgcctgtaatcccagctccttgggaggctgaggtggaaggattgcgtgagcccaggagtttgaggccagactgggcaacatagtgagacactatctcttgaaagaaagaaaatgaaacaagacagggtttttttggttttgtttttcatttttgtttttggcatgccctaaaataatgaatattgcatatgcatttaattctatagctgttgagaacttgtgttgatttcttccgcctggttccatttatggtgttcttaattgtacccttcatggaattcttattaccagtgtttctgaaactcttcccagagatgttgccatcaacttttgaaagtgaatccaaaaaggtatgattttttaactttaataaaatttaataaaccttattagaggagtttttaggtttacagaaaacttgggcagaaagtactacttctccccacccaaccccatcccaatttctcctgtaattaatatcttgcattagtgtgctatatttgtaatgattaaaaaaaccaatattgacatgttattattaaagctcatactttagggtccactcttcatgttgaagcatttctgtgggctttgcaaatgcataatttcatgtatccaccatcacagtatcatacaaaatagtttcactgctctaaaaattccctgtgggccaggcacagtggcttatgtctgtaattccagctccttgggaggctgaagcaagaggatcacttgagcccaggaggtcaaggctgcaatgacctatgatagtgtcactgcactccagaggcactgggtgacagggggagaccctgtctca

SEQ ID NO: 262838 - DNA, 1607 bp, Homo sapiens
tccggatttgcagggtccgaaggagaatacatcaaagtgatgtcattcatgactccgaaatggttaccatggcgactatcagacatattaagctgtcagggaaagagcctgtttaatccagtcttcaatcacgggtttcctcgggcgttagccactgcctgcggagtgtggactggcagaaaaacgtcaccttcgggccccccagcaccaacgcgccttaaaccaagccccacaaagaagtcacttcggcgatgtaaacgcgactttgcggcttcctgggctgctaaggtgaaggacgcccgccctccccagaacttgagagcttattggttggcgatgtcgtcactcagagtgacgtcaggggcgaggaaagaagcggaaccgtagagacttggcttcgggcccttctagcttgggggtcccgggaaggagctgggaggacctaggcggccgttccgcggagcccggccgaggaggtccctatgttaactacttgagacaaaaataaatatggccttctacagttataattcagttctggctattgctcgaacaagattccctagccattttgtccatcctacctgctcttcttattccccatcatgtgcatttcttcacttgccagattcccatttaaataagacatgtatgaagaactatgagagcaagaagtactcggatcctagtcagccaggcaatacagtacttcacccaggaactagactaatacaaaagctacacacatccacttgctggctgcaagaagttcctggcaaacctcagctggagcaagccacaaaacatccacaggtgacaagccctcaggccacaaaagaaactggcatggagattaaagaaggcaaacaatcttatagacaaaaaatcatggatgaactaaaatattattacaatggattctacttactttggattgacgccaaagttgctgccagaatggtttggaggctgttgcatggacaggtcctgaccagacgagagagacgaaggctgttgagaacttgtgttgatttcttccgcctggttccatttatggtgttcttaattgtacccttcatggaattcttattaccagtgtttctgaaactcttcccagagatgttgccatcaacttttgaaagtgaatccaaaaaggaagaaaaacagaaaaagaaaatggctgtaaagttggaactagcaaaatttcttcaagaaaccatgacagaaatggcaaggaggaacagagccaagatgggcgatgcctctacacagctctcatcctacgtgaagcaggtgtccatcttttatgtaatgccgaacaacttcggggctgggcgttctatgaaaaacgcatgtcatcatggatttcccaaattgttcaccatctttggaattgcaaatatctaaattatgaacatataatattgtaaacatttaatattataaacattgatagtagtttgcagaaaagcctgtcttaaagtaatcaacgttttgaagacattgataacttcttggagagaacagtagatttagagtcaaacttccaaactcctgatttttcagctgatgtagtttgacttcagatggatatcttttctttatac

SEQ ID NO: 262839 - DNA, 468 bp, Homo sapiens
cgttattacatgatgtagggatgagcaataacaaggagacagttatttttctcccatctttatctaccaatttacaatcacgaaggattgagtaacttttattcttctaccattaaggaagaaaaacagaaaaagaaaatggctgtaaagttggaactagcaaaatttcttcaagaaaccatgacagaaatggcaaggaggaacagagccaagatgggcgatgcctctacacagctctcatcctacgtgaagcaggtgtccatcttttatgtaatgccgaacaacttcggggctgggcgttctatgaaaaacgcatgtcatcatggatttcccaaattgttcaccatctttggaattgcaaatatctaaattatgaacatataatattgtaaacatttaatattataaacattgatagtagtttgcagaaaagcctgtcttaaagtaatcaacgttttgaagacattg

SEQ ID NO: 262840 - DNA, 2256 bp, Homo sapiens
tccggatttgcagggtccgaaggagaatacatcaaagtgatgtcattcatgactccgaaatggttaccatggcgactatcagacatattaagctgtcagggaaagagcctgtttaatccagtcttcaatcacgggtttcctcgggcgttagccactgcctgcggagtgtggactggcagaaaaacgtcaccttcgggccccccagcaccaacgcgccttaaaccaagccccacaaagaagtcacttcggcgatgtaaacgcgactttgcggcttcctgggctgctaaggtgaaggacgcccgccctccccagaacttgagagcttattggttggcgatgtcgtcactcagagtgacgtcaggggcgaggaaagaagcggaaccgtagagacttggcttcgggcccttctagcttgggggtcccgggaaggagctgggaggacctaggcggccgttccgcggagcccggccgaggaggtccctatgttaactacttgagacaaaaataaatatggccttctacagttataattcagttctggctattgctcgaacaagattccctagccattttgtccatcctacctgctcttcttattccccatcatgtgcatttcttcacttgccagattcccatttaaataagacatgtatgaagaactatgagagcaagaagtactcggatcctagtcagccaggcaatacagtacttcacccaggaactagactaatacaaaagctacacacatccacttgctggctgcaagaagttcctggcaaacctcagctggagcaagccacaaaacatccacaggtgacaagccctcaggccacaaaagaaactggcatggagattaaagaaggcaaacaatcttatagacaaaaaatcatggatgaactaaaatattattacaatggattctacttactttggattgacgccaaagttgctgccagaatggtttggaggctgttgcatggacaggtcctgaccagacgagagagacgaaggctgttgagaacttgtgttgatttcttccgcctggttccatttatggtgttcttaattgtacccttcatggaattcttattaccagtgtttctgaaactcttcccagagatgttgccatcaacttttgaaagtgaatccaaaaaggaagaaaaacagaaaaagaaaatggctgtaaagttggaactagcaaaatttcttcaagaaaccatgacagaaatggcaaggaggaacagagccaagatgggcgatgcctctacacagctctcatcctacgtgaagcaggtccagacaggccacaagcccagcacaaaggagatagttcgcttctccaaactatttgaggaccagctggccctggaacacttagatcgccctcagctggttgccctttgcaaactgctggaattgcagacatttggaaccaacaacctgctccgctttcagctcctgatgaaactgaagtctataaaagcagatgatgaaataattgccaaggaaggggtgacagcattgagtgtatcagaactacaggctgcctgtagggcccgagggatgagatcactgggtctcacggaggaacaactgcgacaacagctcacggagtggcaggacctccacctgaaggagaacgtccctccttcccttttgctcctgtcccgcaccttctacctgatagatgtgaagcccaagccgattgagataccactcagtggggaggctccaaagactgatattcttgtggaattacctactttcactgaatctaaagagaacatggtggatcttgcacctcaactgaagggaactaaggatgaagactttatacagccgccaccagttacatcatcacccataacaccatcaacacctatttcattacctaaaggacccatcacttcttctgaagaacctacactccaggccaaatcacaaatgacggcccagaacagcaaggctagttcaaaaggagcataaaggactacttgaggatggagctcactctcttcagcttccggccctcaacagtggcatctgtaaaggacctcccagataagactgtctggcttcagagagcggatcagctgtttagcccgtggggcagtcctttgaggcctggtaaccattccaggtgatgtgggtagtgagaccaagttcagaccacttagaaaaatataattgcaaagtcccatttcctctgtaccattgtcaccccactcaactttgtataaagcccaccccccatca

SEQ ID NO: 262841 - DNA, 1592 bp, Homo sapiens
agcggattaaccgccgcctcaggtgtcgtctcctgcccgcgaaacaccacccaccgttagtgtccctatgttaactacttgagacaaaaataaatatggccttctacagttataattcagttctggctattgctcgaacaagattcccatttaaataagacatgtatgaagaactatgagagcaagaagtactcggatcctagtcagccaggcaatacagtacttcacccaggaactagactaatacaaaagctacacacatccacttgctggctgcaagaagttcctggcaaacctcagctggagcaagccacaaaacatccacaggtgacaagccctcaggccacaaaagaaactggcatggagattaaagaaggcaaacaatcttatagacaaaaaatcatggatgaactaaaatattattacaatggattctacttactttggattgacgccaaagttgctgccagaatggtttggaggctgttgcatggacaggtcctgaccagacgagagagacgaaggtgtttctgaaactcttcccagagatgttgccatcaacttttgaaagtgaatccaaaaaggaagaaaaacagaaaaagaaaatggctgtaaagttggaactagcaaaatttcttcaagaaaccatgacagaaatggcaaggaggaacagagccaagatgggcgatgcctctacacagctctcatcctacgtgaagcaggtccagacaggccacaagcccagcacaaaggagatagttcgcttctccaaactatttgaggaccagctggccctggaacacttagatcgccctcagctggttgccctttgcaaactgctggaattgcagacatttggaaccaacaacctgctccgctttcagctcctgatgaaactgaagtctataaaagcagatgatgaaataattgccaaggaaggggtgacagcattgagtgtatcagaactacaggctgcctgtagggcccgagggatgagatcactgggtctcacggaggaacaactgcgacaacagctcacggagtggcaggacctccacctgaaggagaacgtccctccttcccttttgctcctgtcccgcaccttctacctgatagatgtgaagcccaagccgattgagataccactcagtggggaggatgaagactttatacagccgccaccagttacatcatcacccataacaccatcaacacctatttcattacctaaaggacccatcacttcttctgaagaacctacactccaggccaaatcacaaatgacggcccagaacagcaaggctagttcaaaaggagcataaaggactacttgaggatggagctcactctcttcagcttccggccctcaacagtggcatctgtaaaggacctcccagataagactgtctggcttcagagagcggatcagctgtttagcccgtggggcagtcctttgaggcctggtaaccattccaggtgatgtgggtagtgagaccaagttcagaccacttagaaaaatataattgcaaagtcccatttcctctgtaccattgtcaccccactcaactttgtataaagcccaccccccatca

SEQ ID NO: 262842 - DNA, 1171 bp, Homo sapiens
aacagtaggtatgatttagtcagcccaacagacagttcagcagcccctgagaagagggagccttcactgagtgtggcagtcactgtgccggtgagaaaacagaggcagctccttccttctccccgttctgtgccactctactagacagcgttgacagcatatggaagaaaaacagaaaaagaaaatggctgtaaagttggaactagcaaaatttcttcaagaaaccatgacagaaatggcaaggaggaacagagccaagatgggcgatgcctctacacagctctcatcctacgtgaagcaggtccagacaggccacaagcccagcacaaaggagatagttcgcttctccaaactatttgaggaccagctggccctggaacacttagatcgccctcagctggttgccctttgcaaactgctggaattgcagacatttggaaccaacaacctgctccgctttcagctcctgatgaaactgaagtctataaaagcagatgatgaaataattgccaaggaaggggtgacagcattgagtgtatcagaactacaggctgcctgtagggcccgagggatgagatcactgggtctcacggaggaacaactgcgacaacagctcacggagtggcaggacctccacctgaaggagaacgtccctccttcccttttgctcctgtcccgcaccttctacctgatagatgtgaagcccaagccgattgagataccactcagtggggaggatgaagactttatacagccgccaccagttacatcatcacccataacaccatcaacacctatttcattacctaaaggacccatcacttcttctgaagaacctacactccaggccaaatcacaaatgacggcccagaacagcaaggctagttcaaaaggagcataaaggactacttgaggatggagctcactctcttcagcttccggccctcaacagtggcatctgtaaaggacctcccagataagactgtctggcttcagagagcggatcagctgtttagcccgtggggcagtcctttgaggcctggtaaccattccaggtgatgtgggtagtgagaccaagttcagaccacttagaaaaatataattgcaaagtcccatttcctctgtaccattgtcaccccactcaactttgtataaagcccaccccccatca

SEQ ID NO: 262843 - DNA, 334 bp, Homo sapiens
ataaatcttacctttcatgagaaaatgaaagacaatactggcttatcaggtaaactctggaaatttcctgtcacatagagctgaatacaatctctcagtatgtgttcagttattatgtttgattatgtattattaaaacaaaagtttctgtttctgagaaatatctatttactgtgtttgtgtttttaaagaagttggattctatacaaatggataaaatgtttcttagaaatagcctatttaactgagtttttcaaataagttgtatactaacaaatgtcaatctctgttttttatttactgggagaatgtattaaaatattgaaaattgcca

SEQ ID NO: 262844 - DNA, 305 bp, Homo sapiens
aaatatatatatactggtttgacacagatgctaatgtgatgattaatggaaagcacaaaatgatttttaaattttagttaagtagctcagatcgggaaaaaaaaagtcttaagaatacctttatgtagtttttcccaacactagatggcaggcaaaaacttcattctgaattgtttacatattacttgccagagtcagtcagtaatataactgactagggttggatcactggtgggactttttaagtacattttatttttaattattttacattttatttcaggagaacatatttgctgattttt

SEQ ID NO: 262845 - DNA, 399 bp, Homo sapiens
agctcctctcccattctaaggaatgagttatataactcagaaatctcaggacagagggaagcacagacctgcagaacaccgctagctggaagggaccatcgagacgacctagtccaagtcatttcagaggagaaaaccagggctcagagagggctagtgatttgcttgaggtcacatagctagcaagctgaggctggaagcaggagccagtctgcaggagggctgctgaggtgtctcagagtcccaggacatgcacttgctgctccagagaggcaggtttccctgctttccttcccaaacacttcgatggaagtctccctccagctccagccagggccagggtttcactgcagctggatctcagtgctctgagatgggagaggctggcactaatgtttg

SEQ ID NO: 262846 - DNA, 428 bp, Homo sapiens
aaaaaaaagaaagtaatagtttagtaatggtattgtgtaacttacactgtcaagagacgagaaagttagtgcttttaaaatctgggtagttggaactaactaggctttagagagagtacattatttggtgaatctaagatagaatttagctctttgaagtgatttaaacaaattgtgtgatattcaaaatagaaaatgcaatagatctaggatgtattatataattttattgtaactgatataattctttctccattttaaatatcagataatcctgtcttttggtatttgcatatcactattaaaatgattttcattcgttatgaaagagcaactgctaacagctaaccccacagaatgagagcagatttaacataaattgctctttcttaaataaaatgccagcagagggagcccaagaactattt

SEQ ID NO: 262847 - DNA, 444 bp, Homo sapiens
atgctggtttaggtttaggttaatctggatgttctgtaatgaaaccacattatagatagacacaggaaaattggctagtaggtcttgtgtcccctcggaatccattctgtcttcttgctgtaaaagctgagacttgatgcccaacagcagcctcatctagagcatcctgcctttgtaagcctgctgaattgtgattcacagttccctgggtgaggggtggtgataaagcatttaaagaggactgataataactaggaatacttatgctaggaagtgccagaagactttcagagcaatttgtctttaagccaggtgtagtggcccacacctgtaatctcagcactctgggaggctgaggcaggagaatcacttgagcccaggagttcaagaccagcctgggcaatatagtgagacccctatctcttaaaaaataaaaaaggaaag

SEQ ID NO: 262848 - DNA, 2195 bp, Homo sapiens
  misc_feature (42)..(42): n is a, c, g, or t
  misc_feature (44)..(44): n is a, c, g, or t
  misc_feature (1076)..(1076): n is a, c, g, or t
gcgatggcaggttcgccgggtgtgaggcttcacagcggtccngngaccaagtcgagatggtgagaacaagaccaagattggaaagccagcttcagaggagggaattacagcaaaaattgaaccattgacagaagagtctagcagtctcagaatgttctccaggattctgaaggcaaagaattctgtgaatttggggataaattaaatgaaaaagatcagaacgtctttaaaaggagacctcataactgtgacgaatatgggcaaagctttgtttggagtacaagcctttttaggcatcgaaaaacgcactgtgagaaaccttatgaatgggataagtgtggaaaggccactggggagaaaccttattcctgtaattggtgtattaaaagtttcagttggagctcagaccttattaaacaccaaagagtccacactggtgaaaaaccttataaatgtgatgagtgtgggaaagccttcagtcagagctcagatcttattatacatcagagaatccatataggagaaaaaccctatcaatgccgtcattgtagtaaaagttttagccagcgctcagatctggttaaacatcagagaatccatactggagagaagccttatacttgtaaccagtgtaacaaacattttagtcagagttctgatgtgataaaacatcaaagaatccacactggggagaaaccatataaatgtgatgtgtgtgggaaagccttcagtcagagctcagatcttattctgcatcagagaatccatactggggagaaaccatatccatgtaatcagtgtagcaaaagtttcagtcagaattcagaccttattaaacatcgaaggatccacactggagagaaaccctataaatgtaatgagtgtgggaaagcttttaatcagagctcagtccttattttacatcagaggattcatactggagagaaaccctatccctgtgatcaatgtagcaaaaccttcagtaggctttcagatcttattaatcatcaacgaattcacactggagagaagccttacccatgtaatcagtgcaataaaatgtttagtcgaagatnagatcttgttaaacatcacagaattcatacaggtgagaaaccctatgaatgtgatgaatgtgggaaaacctttagtcagagctccaaccttattcttcatcagagaatccacactggagagaaaccttatgcatgtagtgattgtactaaaagctttagtcgccgttcagatcttgttaagcatcaaagaatacacactggagagaaaccatatgcatgtaatcagtgtgataaaagttttagtcaaagctcagacctcactaaacatcagagagtacactctggtgaaaagccttatcattgcaatagttgtgagaaagccttcagtcagagttctgaccttattcttcatcagagaattcacactggagaaaaactattatctgtgcacacagtgcagcaaaagtttcagtcagatctcagacctcattaaacaccagagaatccacactggggaaaaaccatataaatgcagtgagtgcaggaaggctttcagtcagtgctcagctcttaccctacaccagagaatccacactgggaagaaaccaaatccatgtgatgagtgtggcaaaagctttagtcggcgttctgatctcattaaccatcaaaaaatacacactggtgaaaagccgtataagtgtgatgcatgtgggaaagccttcagcacatgtactgatcttattgaacaccagaaaacccatgctgaggagaaaccctaccagtgtgttcagtgcagcagaagttgtagccaactctctgaacttactattcatgaggaagtccattgtggagaagacagtcaaaatgtgatgaatgtgagaaaacctttagtgtgtacaccaactctattcagtaccagagacactgtaccagaaaaaaatctaatgaatgctgttgattattgatgagtatgaaaaaggttttaatcagtgttcaactcttatgctacattaaaaccgcactggatccggatacgtgtggtggctcacgcctgtaatcccaacactttgggaggcagatgtggaagcatcatttgagcccaggagtttgaggctgcagtgagctatgattccaccattgcactccagtctgggcaacagagcaagaccctgtctattt

SEQ ID NO: 262849 - DNA, 2189 bp, Homo sapiens
  misc_feature (1070)..(1070): n is a, c, g, or t
atggagatccagttcaattatgaatctcaggaacaccaccttctgtcgagatggtgagaacaagaccaagattggaaagccagcttcagaggagggaattacagcaaaaattgaaccattgacagaagagtctagcagtctcagaatgttctccaggattctgaaggcaaagaattctgtgaatttggggataaattaaatgaaaaagatcagaacgtctttaaaaggagacctcataactgtgacgaatatgggcaaagctttgtttggagtacaagcctttttaggcatcgaaaaacgcactgtgagaaaccttatgaatgggataagtgtggaaaggccactggggagaaaccttattcctgtaattggtgtattaaaagtttcagttggagctcagaccttattaaacaccaaagagtccacactggtgaaaaaccttataaatgtgatgagtgtgggaaagccttcagtcagagctcagatcttattatacatcagagaatccatataggagaaaaaccctatcaatgccgtcattgtagtaaaagttttagccagcgctcagatctggttaaacatcagagaatccatactggagagaagccttatacttgtaaccagtgtaacaaacattttagtcagagttctgatgtgataaaacatcaaagaatccacactggggagaaaccatataaatgtgatgtgtgtgggaaagccttcagtcagagctcagatcttattctgcatcagagaatccatactggggagaaaccatatccatgtaatcagtgtagcaaaagtttcagtcagaattcagaccttattaaacatcgaaggatccacactggagagaaaccctataaatgtaatgagtgtgggaaagcttttaatcagagctcagtccttattttacatcagaggattcatactggagagaaaccctatccctgtgatcaatgtagcaaaaccttcagtaggctttcagatcttattaatcatcaacgaattcacactggagagaagccttacccatgtaatcagtgcaataaaatgtttagtcgaagatnagatcttgttaaacatcacagaattcatacaggtgagaaaccctatgaatgtgatgaatgtgggaaaacctttagtcagagctccaaccttattcttcatcagagaatccacactggagagaaaccttatgcatgtagtgattgtactaaaagctttagtcgccgttcagatcttgttaagcatcaaagaatacacactggagagaaaccatatgcatgtaatcagtgtgataaaagttttagtcaaagctcagacctcactaaacatcagagagtacactctggtgaaaagccttatcattgcaatagttgtgagaaagccttcagtcagagttctgaccttattcttcatcagagaattcacactggagaaaaactattatctgtgcacacagtgcagcaaaagtttcagtcagatctcagacctcattaaacaccagagaatccacactggggaaaaaccatataaatgcagtgagtgcaggaaggctttcagtcagtgctcagctcttaccctacaccagagaatccacactgggaagaaaccaaatccatgtgatgagtgtggcaaaagctttagtcggcgttctgatctcattaaccatcaaaaaatacacactggtgaaaagccgtataagtgtgatgcatgtgggaaagccttcagcacatgtactgatcttattgaacaccagaaaacccatgctgaggagaaaccctaccagtgtgttcagtgcagcagaagttgtagccaactctctgaacttactattcatgaggaagtccattgtggagaagacagtcaaaatgtgatgaatgtgagaaaacctttagtgtgtacaccaactctattcagtaccagagacactgtaccagaaaaaaatctaatgaatgctgttgattattgatgagtatgaaaaaggttttaatcagtgttcaactcttatgctacattaaaaccgcactggatccggatacgtgtggtggctcacgcctgtaatcccaacactttgggaggcagatgtggaagcatcatttgagcccaggagtttgaggctgcagtgagctatgattccaccattgcactccagtctgggcaacagagcaagaccctgtctattt

SEQ ID NO: 262850 - DNA, 161 bp, Homo sapiens
aaagagagagagagatgggtaacttgcccagggtcacgtaatagtgagtggcaggcctagcaggcattcatttttcgtataaatatttagacgcattgggggtatagccataaacaaaacaaaagtccctgctctgtggagatgacagtctcttggggaaa

SEQ ID NO: 262851 - DNA, 525 bp, Homo sapiens
aagcaaattcctttttaacttaatgattatccaaggctgcatggcttttatctttttattccgcctctcagatccatagctctagtcctagtgatagtgacaagaggcagagaaattctaggcagagaggggtggatccctggtgaagccccaccctcaagccaaaaagcctgagaccacagcccaaagtgagaacttatatccccattttcctgcttgaatgttgccttttcctaaactaccatggtcctgccctgccccatcctgtgcctataaagaccccagactcagccggtagagaggagaagcagctgcatgttggggactacggccaaagtcagagagaaccagcttgacttcagagggacagcttgacagtgtaacttcaaagaagaatctggccagagactgctggacctcaggggaagattacctacattccctggccccttttcaacctcccttccctctgagagccactttcatcagcaataaaatcctccacattcaccatccttcaattca

SEQ ID NO: 262852 - DNA, 150 bp, Homo sapiens
agaaaagcaaacagagagtatggaaataaatacccgtcagtatagaaatgtagtatatcataaaaatggcacttcaaaccagtgggaagcaatgggtcattccgtaatacagtactggaacaggttaataaaaaattacaaagtttaatt

SEQ ID NO: 262853 - DNA, 473 bp, Homo sapiens
taggaaatagtctcttggatttctttggatctgggtcctttctttggattctgagttattgtgaggcatctatgtagtttttctagaagtattcaaccaactggaggatcctagaaccaactatgtttcccagggatctctagtatttctagcaatgaaaatattagacatacctggagaagatattggagatgcctggagatcacactccatcccatacccccccatatatagtttcagtttcaagtgccatgcgtcaattagattgtagagtatgagtctagtcagttagcatctctgagagatttttaaattaacgctgtattgtgtatatgcagcaagggcagaagcaaccctggtatataatttcacatttagattataagtaagatatattggaaaactgtagtaggcagccaatatgatatacctgcttatgtatagcagatgactgagaaaacttcaggtaacct

SEQ ID NO: 262854 - DNA, 392 bp, Homo sapiens
gcaaagtgacttccaacaagacaggggtaaaagaacctgagctagagtccagacaaccaaatctgttaaaggtagaatatggtgatgggtgctgtgcaagaagaaggagggaagaaggaagctgagtgtgcagcaaagacacctgcagggacacatagaaccaggcatttgctgaaggacacctggattgcacaaccagcggctaacttgcatgaaaaaacattctaggtggttttgcttaatgttggtctctccaactgtgctacaagctccatgaggtgaaggaccaagttaattgtgtcttccatggtatgtcccagtcctgccactttaggcattttaaatatttgctgaatattgtttgaataaataatttgtggagaattggaaga

SEQ ID NO: 262855 - DNA, 620 bp, Homo sapiens
gaagacaggtgtggcctgtgggtgcttgatacatggtggtggctttgttactgaataacagggaggtatgattgcaaaggtcactgttgccttcaaactctacattttggtttgaattccttctgaaacttgcttcttgcacatctctgctcctgtagtccatccacaaagggccatctgaggaaacttgctctgcaccacgctcccccatggtgccaggaacacagcagtgcacaagacagacatgagtctgctgggaaagaaacattaggcaaatacagtcatccctgggaatctgtaggaaattgcttccagggccatgggtaagacatgaaaatctgcacatactcaagtcccatagtgagtcctggggaccgaaggttatgaaaagccaggcttccgtacgggcagatttaaatcctgagaatactatattttctatctgtgtttggttgtggatacaaaacccacggactgtattttttggattcaaattggtatcgcaaccttattaagactgtcatctgggatttgattttatccttcttagaagctattcagtcaacctgctactgtttcctggatgttatgtccagccgcacttctgtgtcagttcccct

SEQ ID NO: 262856 - DNA, 567 bp, Homo sapiens
accctatgtttaaaaaaaattgtgtacctggtttagaaaaaaaagataaaaggatacaacttaaagtcagtcatcttcctgcctcttctccagctattttccctcctgacaggcaaaggcactgatgcaaaaatcactcaggtctcctccctgtgacttggtgcacacctgggcatcactgtcttttacacactgatgtgtccctcgctttcttttttaaagggaggtccgtaaccacccacctgcctccctcttgtctttatggactgcgtgatgtcccaccatatggatgctctcgggcctagcgttccaccgtctgcagctggggaacattttgtttgcagctaatcattgtcatgaatatcgtttatgtgtgccttgctgtgatggtgtctgtgggataaactcttagaattggaattgttggattgagaggtatatgccttttatttagatatagatgaattaaaaaaacctcttgagctcaatttatactcaatataccggggtgcctgtttgccatgttttcagcaaaactgtattaaaatatgtttttttaacctgata

SEQ ID NO: 262857 - DNA, 315 bp, Homo sapiens
cagcctggtgcactgtgcgtcctctgagaggtgaaggagcactgtgtggtcagagggctgcgagctctctgtttgggttccgaggaagacagaatgggctgaactggaactgacctaaatgtcagcaagaggaggtctttttcagtgtgctcaatatggtcaccaagcctggaaacatagacagagcttcattcttgttgctcaggctggagtacaatggcacgatctcggctcactgcagctgccacctcctgggttcaagcgattctcctgcctcagcctctcaagtagaaatttttttttatgtgtatatat

SEQ ID NO: 262858 - DNA, 1997 bp, Homo sapiens
cgctcctcggtgagcacccggcgtggggcgcgggcgcgggcccgggcggagagggcggtccggatggagccaggctaaactcattgtgcgaggctgagggctcagggcgcgggccgggaagggtccccgcccccacggcgctccctttctccccgcgcccctctcggaggtcagggctgtcctccgcccgcactgcgccttgctttggagagctggagctctttgtgggaagatgttgggggcgcgcccctcccctgcggcctggggcttctgagaggcccaccccattctgctgggtgcagcccgccccgtttctccggcgccgcccgaagcccctaaacagtccgctggatgggagggcgtaggtgcgtgcccgggactctgccgatgcgggccgcgccccctggggccaagagactccacgtcccgctcagggcaaagggtgtggggagaagcggtcacgcccctcggctggaatccgtgaggaccaggtctttttcagtgtgctcaatatggtcaccaagcctggaaacatagagtctcaccctgttgcttaggcagatggcgcgatctcggctcctgggttcaagcaattctcctgcctcagcctcctgaatagccgggattacagtcgtccagcatgctctgcccaccccacgccgaggtgcactgaccatgagcctcaactcctccctcagctgcaggaaggagctgagtaatctcactgaggaggagggtggcgaagggggcgtcatcatcacccagttcatcgccatcattgtcatcaccatttttgtctgcctgggaaacctggtcatcgtggtcaccttgtacaagaagtcctacctcctcaccctcagcaacaagttcgtcttcagcctgactctgtccaacttcctgctgtccgtgttggtgctgccttttgtggtgacgagctccatccgcagggaatggatctttggtgtagtgtggtgcaacttctctgccctcctctacctgctgatcagctctgccagcatgctaaccctcggggtcattgccatcgaccgctactatgctgtcctgtaccccatggtgtaccccatgaagatcacagggaaccgggctgtgatggcacttgtctacatctggcttcactcgctcatcggctgcctgccacccctgtttggttggtcatccgtggagtttgacgagttcaaatggatgtgtgtggctgcttggcaccgggagcctggctacacggccttctggcagatctggtgtgccctcttcccctttctggtcatgctggtgtgctatggcttcatcttccgcgtggccagggtcaaggcacgcaaggtgcactgtggcacagtcgtcatcgtggaggaggatgctcagaggaccgggaggaagaactccagcacctccacctcctcttcaggcagcaggaggaatgcctttcagggtgtggtctactcggccaaccagtgcaaagccctcatcaccatcctggtggtcctcggtgccttcatggtcacctggggcccctacatggttgtcatcgcctctgaggccctctgggggaaaagctccgtctccccgagcctggagacttgggccacatggctgtcctttgccagcgctgtctgccaccccctgatctatggactctggaacaagacagttcgcaaagaactactgggcatgtgctttggggaccggtattatcgggaaccatttgtgcaacgacagaggacttccaggctcttcagcatttccaacaggatcacagacctgggcctgtccccacacctcactgcgctcatggcaggtggacagcccctggggcacagcagcagcacgggggacactggcttcagctgctcccaggactcaggtaacctgcgtgctttataagcctctcacctgtcgcgttttccctgtgttgcgtttcccccgtgtcgcgtttcccctgtgcaggctcaagagctggcggaggggcatttcccacggtg

SEQ ID NO: 262859 - DNA, 3454 bp, Homo sapiens
cgctcctcggtgagcacccggcgtggggcgcgggcgcgggcccgggcggagagggcggtccggatggagccaggctaaactcattgtgcgaggctgagggctcagggcgcgggccgggaagggtccccgcccccacggcgctccctttctccccgcgcccctctcggaggtcagggctgtcctccgcccgcactgcgccttgctttggagagctggagctctttgtgggaagatgttgggggcgcgcccctcccctgcggcctggggcttctgagaggcccaccccattctgctgggtgcagcccgccccgtttctccggcgccgcccgaagcccctaaacagtccgctggatgggagggcgtaggtgcgtgcccgggactctgccgatgcgggccgcgccccctggggccaagagactccacgtcccgctcagggcaaagggtgtggggagaagcggtcacgcccctcggctggaatccgtgaggaccaggtctttttcagtgtgctcaatatggtcaccaagcctggaaacatagagtctcaccctgttgcttaggcagatggcgcgatctcggctcctgggttcaagcaattctcctgcctcagcctcctgaatagccgggattacagtcgtccagcatgctctgcccaccccacgccgaggtgcactgaccatgagcctcaactcctccctcagctgcaggaaggagctgagtaatctcactgaggaggagggtggcgaagggggcgtcatcatcacccagttcatcgccatcattgtcatcaccatttttgtctgcctgggaaacctggtcatcgtggtcaccttgtacaagaagtcctacctcctcaccctcagcaacaagttcgtcttcagcctgactctgtccaacttcctgctgtccgtgttggtgctgccttttgtggtgacgagctccatccgcagggaatggatctttggtgtagtgtggtgcaacttctctgccctcctctacctgctgatcagctctgccagcatgctaaccctcggggtcattgccatcgaccgctactatgctgtcctgtaccccatggtgtaccccatgaagatcacagggaaccgggctgtgatggcacttgtctacatctggcttcactcgctcatcggctgcctgccacccctgtttggttggtcatccgtggagtttgacgagttcaaatggatgtgtgtggctgcttggcaccgggagcctggctacacggccttctggcagatctggtgtgccctcttcccctttctggtcatgctggtgtgctatggcttcatcttccgcgtggccagggtcaaggcacgcaaggtgcactgtggcacagtcgtcatcgtggaggaggatgctcagaggaccgggaggaagaactccagcacctccacctcctcttcaggcagcaggaggaatgcctttcagggtgtggtctactcggccaaccagtgcaaagccctcatcaccatcctggtggtcctcggtgccttcatggtcacctggggcccctacatggttgtcatcgcctctgaggccctctgggggaaaagctccgtctccccgagcctggagacttgggccacatggctgtcctttgccagcgctgtctgccaccccctgatctatggactctggaacaagacagttcgcaaagaactactgggcatgtgctttggggaccggtattatcgggaaccatttgtgcaacgacagaggacttccaggctcttcagcatttccaacaggatcacagacctgggcctgtccccacacctcactgcgctcatggcaggtggacagcccctggggcacagcagcagcacgggggacactggcttcagctgctcccaggactcagggacagatatgatgctgcttgaggactacacgtctgatgacaaccctccctctcactgcacttgcccacccaagagaaggagctcggtgacatttgaggatgaagtggaacaaatcaaagaagctgccaagaactcgattcttcatgtgaaagctgaagtacacaagtccttggacagttacgcagcaagcttggccaaagccattgaggccgaagccaaaatcaacttatttggggaggaggctttgccaggggtcttggttacagcacggactgtcccggggggcggcttcgggggccgccgaggcagcagaactcttgtgagccagaggctgcagttgcagagcatcgaagaaggagatgttttagctgccgagcagagatgagggcctcagggtgccgtggggctgcagcctgagaggctggcccggggaggagttcccatcaccgcctgtgccgcggccttgggagcatgtcactgtgtacagctggccacacacagggaaggagcagcatctggtatgcagccaccaggacaaggactgaaaataatgtctacagtccacagcttcagcatttccagagaccacatgtgagcttcttttaggtcccagtgatgggaccagaagcatctaaagcaaaaaaaaaaccaaaaaaaaatctagagatgtggctgtggctttttgggaggtggggcatgggaggaccagagacgaagggcttggaaggagacccccacatgcatcatttcctcctcttcacagtgtgctgggagtccagccgtgcactgtgccagatgcctcaggaggagaaccctccccagtgtactgtgaaggatgacacagcacttcttcctaatgacacgcgaccgtcctggtgcctctacatggttgatgcgggcagtgtgggaccctcagttctaggactggtccgcagagaaagcacccaggagcagagcgcttcggagcggtcctcagtggcgccacctgctggtgctaatagggacagccacaggcctcttgcagactggcccaccctgcctacttccctactgacaagttctttggtatttcaaaagggagaaaccactataaaagacaagaggaagggcaggtactaggtgtttcatttccagaattaaaaaaaaaatccatttaagacgtaccactgttttaccggactgaatgggactgtagtgccaagcacagccaggaaatagagaaactgttattatggaagggaatttgttcacatgggaaagcctcattaaatagattctatgtgtgatgtttgagtgaccaacttacaaaacagcaacaccacacaatcggaacacacaacaattggtgggcggccttcggcctggaaaacgttttcaacacccaatccgttggggcgccgcgccccagtctggtagcttgcacatggcataagtggttccctaaggaaaccgggcacatgcaacagggcggggttccaccatataaaaagggcggggcaccgcgcggtttgaccaaccccagtgggtcggaggcctcacggagttatcacggggccagagacgatatccggggg

SEQ ID NO: 262860 - DNA, 2942 bp, Homo sapiens
agagacatggaaaaggcgacgtcccagcggctggaactggggcggaggaacgggaacagggaaggcctgagttaggcaccacaaaggttttcaggagaaaagtggggcgagccgagaggtcgtccagcatgctctgcccaccccacgccgaggtgcactgaccatgagcctcaactcctccctcagctgcaggaaggagctgagtaatctcactgaggaggagggtggcgaagggggcgtcatcatcacccagttcatcgccatcattgtcatcaccatttttgtctgcctgggaaacctggtcatcgtggtcaccttgtacaagaagtcctacctcctcaccctcagcaacaagttcgtcttcagcctgactctgtccaacttcctgctgtccgtgttggtgctgccttttgtggtgacgagctccatccgcagggaatggatctttggtgtagtgtggtgcaacttctctgccctcctctacctgctgatcagctctgccagcatgctaaccctcggggtcattgccatcgaccgctactatgctgtcctgtaccccatggtgtaccccatgaagatcacagggaaccgggctgtgatggcacttgtctacatctggcttcactcgctcatcggctgcctgccacccctgtttggttggtcatccgtggagtttgacgagttcaaatggatgtgtgtggctgcttggcaccgggagcctggctacacggccttctggcagatctggtgtgccctcttcccctttctggtcatgctggtgtgctatggcttcatcttccgcgtggccagggtcaaggcacgcaaggtgcactgtggcacagtcgtcatcgtggaggaggatgctcagaggaccgggaggaagaactccagcacctccacctcctcttcaggcagcaggaggaatgcctttcagggtgtggtctactcggccaaccagtgcaaagccctcatcaccatcctggtggtcctcggtgccttcatggtcacctggggcccctacatggttgtcatcgcctctgaggccctctgggggaaaagctccgtctccccgagcctggagacttgggccacatggctgtcctttgccagcgctgtctgccaccccctgatctatggactctggaacaagacagttcgcaaagaactactgggcatgtgctttggggaccggtattatcgggaaccatttgtgcaacgacagaggacttccaggctcttcagcatttccaacaggatcacagacctgggcctgtccccacacctcactgcgctcatggcaggtggacagcccctggggcacagcagcagcacgggggacactggcttcagctgctcccaggactcagggacagatatgatgctgcttgaggactacacgtctgatgacaaccctccctctcactgcacttgcccacccaagagaaggagctcggtgacatttgaggatgaagtggaacaaatcaaagaagctgccaagaactcgattcttcatgtgaaagctgaagtacacaagtccttggacagttacgcagcaagcttggccaaagccattgaggccgaagccaaaatcaacttatttggggaggaggctttgccaggggtcttggttacagcacggactgtcccggggggcggcttcgggggccgccgaggcagcagaactcttgtgagccagaggctgcagttgcagagcatcgaagaaggagatgttttagctgccgagcagagatgagggcctcagggtgccgtggggctgcagcctgagaggctggcccggggaggagttcccatcaccgcctgtgccgcggccttgggagcatgtcactgtgtacagctggccacacacagggaaggagcagcatctggtatgcagccaccaggacaaggactgaaaataatgtctacagtccacagcttcagcatttccagagaccacatgtgagcttcttttaggtcccagtgatgggaccagaagcatctaaagcaaaaaaaaaaccaaaaaaaaatctagagatgtggctgtggctttttgggaggtggggcatgggaggaccagagacgaagggcttggaaggagacccccacatgcatcatttcctcctcttcacagtgtgctgggagtccagccgtgcactgtgccagatgcctcaggaggagaaccctccccagtgtactgtgaaggatgacacagcacttcttcctaatgacacgcgaccgtcctggtgcctctacatggttgatgcgggcagtgtgggaccctcagttctaggactggtccgcagagaaagcacccaggagcagagcgcttcggagcggtcctcagtggcgccacctgctggtgctaatagggacagccacaggcctcttgcagactggcccaccctgcctacttccctactgacaagttctttggtatttcaaaagggagaaaccactataaaagacaagaggaagggcaggtactaggtgtttcatttccagaattaaaaaaaaaatccatttaagacgtaccactgttttaccggactgaatgggactgtagtgccaagcacagccaggaaatagagaaactgttattatggaagggaatttgttcacatgggaaagcctcattaaatagattctatgtgtgatgtttgagtgaccaacttacaaaacagcaacaccacacaatcggaacacacaacaattggtgggcggccttcggcctggaaaacgttttcaacacccaatccgttggggcgccgcgccccagtctggtagcttgcacatggcataagtggttccctaaggaaaccgggcacatgcaacagggcggggttccaccatataaaaagggcggggcaccgcgcggtttgaccaaccccagtgggtcggaggcctcacggagttatcacggggccagagacgatatccggggg

SEQ ID NO: 262861 - DNA, 2957 bp, Homo sapiens
cagcctggtgcactgtgcgtcctctgagaggtgaaggagcactgtgtggtcagagggctgcgagctctctgtttgggttccgaggaagacagaatgggctgaactggaactgacctaaatgtcagcaagaggagtcgtccagcatgctctgcccaccccacgccgaggtgcactgaccatgagcctcaactcctccctcagctgcaggaaggagctgagtaatctcactgaggaggagggtggcgaagggggcgtcatcatcacccagttcatcgccatcattgtcatcaccatttttgtctgcctgggaaacctggtcatcgtggtcaccttgtacaagaagtcctacctcctcaccctcagcaacaagttcgtcttcagcctgactctgtccaacttcctgctgtccgtgttggtgctgccttttgtggtgacgagctccatccgcagggaatggatctttggtgtagtgtggtgcaacttctctgccctcctctacctgctgatcagctctgccagcatgctaaccctcggggtcattgccatcgaccgctactatgctgtcctgtaccccatggtgtaccccatgaagatcacagggaaccgggctgtgatggcacttgtctacatctggcttcactcgctcatcggctgcctgccacccctgtttggttggtcatccgtggagtttgacgagttcaaatggatgtgtgtggctgcttggcaccgggagcctggctacacggccttctggcagatctggtgtgccctcttcccctttctggtcatgctggtgtgctatggcttcatcttccgcgtggccagggtcaaggcacgcaaggtgcactgtggcacagtcgtcatcgtggaggaggatgctcagaggaccgggaggaagaactccagcacctccacctcctcttcaggcagcaggaggaatgcctttcagggtgtggtctactcggccaaccagtgcaaagccctcatcaccatcctggtggtcctcggtgccttcatggtcacctggggcccctacatggttgtcatcgcctctgaggccctctgggggaaaagctccgtctccccgagcctggagacttgggccacatggctgtcctttgccagcgctgtctgccaccccctgatctatggactctggaacaagacagttcgcaaagaactactgggcatgtgctttggggaccggtattatcgggaaccatttgtgcaacgacagaggacttccaggctcttcagcatttccaacaggatcacagacctgggcctgtccccacacctcactgcgctcatggcaggtggacagcccctggggcacagcagcagcacgggggacactggcttcagctgctcccaggactcagggacagatatgatgctgcttgaggactacacgtctgatgacaaccctccctctcactgcacttgcccacccaagagaaggagctcggtgacatttgaggatgaagtggaacaaatcaaagaagctgccaagaactcgattcttcatgtgaaagctgaagtacacaagtccttggacagttacgcagcaagcttggccaaagccattgaggccgaagccaaaatcaacttatttggggaggaggctttgccaggggtcttggttacagcacggactgtcccggggggcggcttcgggggccgccgaggcagcagaactcttgtgagccagaggctgcagttgcagagcatcgaagaaggagatgttttagctgccgagcagagatgagggcctcagggtgccgtggggctgcagcctgagaggctggcccggggaggagttcccatcaccgcctgtgccgcggccttgggagcatgtcactgtgtacagctggccacacacagggaaggagcagcatctggtatgcagccaccaggacaaggactgaaaataatgtctacagtccacagcttcagcatttccagagaccacatgtgagcttcttttaggtcccagtgatgggaccagaagcatctaaagcaaaaaaaaaaccaaaaaaaaatctagagatgtggctgtggctttttgggaggtggggcatgggaggaccagagacgaagggcttggaaggagacccccacatgcatcatttcctcctcttcacagtgtgctgggagtccagccgtgcactgtgccagatgcctcaggaggagaaccctccccagtgtactgtgaaggatgacacagcacttcttcctaatgacacgcgaccgtcctggtgcctctacatggttgatgcgggcagtgtgggaccctcagttctaggactggtccgcagagaaagcacccaggagcagagcgcttcggagcggtcctcagtggcgccacctgctggtgctaatagggacagccacaggcctcttgcagactggcccaccctgcctacttccctactgacaagttctttggtatttcaaaagggagaaaccactataaaagacaagaggaagggcaggtactaggtgtttcatttccagaattaaaaaaaaaatccatttaagacgtaccactgttttaccggactgaatgggactgtagtgccaagcacagccaggaaatagagaaactgttattatggaagggaatttgttcacatgggaaagcctcattaaatagattctatgtgtgatgtttgagtgaccaacttacaaaacagcaacaccacacaatcggaacacacaacaattggtgggcggccttcggcctggaaaacgttttcaacacccaatccgttggggcgccgcgccccagtctggtagcttgcacatggcataagtggttccctaaggaaaccgggcacatgcaacagggcggggttccaccatataaaaagggcggggcaccgcgcggtttgaccaaccccagtgggtcggaggcctcacggagttatcacggggccagagacgatatccggggg

SEQ ID NO: 262862 - DNA, 434 bp, Homo sapiens
gacactacaaattcgctggtcactggacattacaagaaaaacctggttctcatccttaatcattgtgttcatcacttaagtcactcataagcagtggcaatttttgacactttccactcttgtcaagtcttcaatatattttttctccttgcctatgcctcatttgaagcagaagaccttagaatatccttcaatgacaacgataacaacaatgtcaattttaacatctatccattgagtgctgcgcacattccagatgctgtgctagtacgtcacatcgatgattggatttagtcttagaaatccttcaagatagtatatactattcttatttgagaaaagaggaatccagtcctcagagattttgaagttaattgcttatagtcccacacggactaagtcgtagtaccaaaatacaaatccagctacttaag

SEQ ID NO: 262863 - DNA, 435 bp, Homo sapiens
agcccataagtggccaaagcattgttcgtactcaggtttaaaagaccagaaacctaacatcatttgtatttgtctttaggtcctttatcaacacatcaagacatctgagctttttccttatcgtcatctctgtaataatgaagaatatataatgaatggtaaaattcaggttttaatgtgttcttttattaacctgaagcagaccttgcagataagccagagatttttaagtctgagtataagttgatggctgtttccaccatctcctactcttcaagccctcaggcttgaagtttcttggtgtttgttcatgaacatgcattctgatgaaatgcagagcattctaaaatacttggcttgctagtggatctttagagattttccaacagctgagtgttcaggacaaaccttcccccttcacacctccttaggatc

SEQ ID NO: 262864 - DNA, 643 bp, Homo sapiens
agatggtttcaaatcactcaggtgaaaggaataacatagccatgtttagtctgaatgcaaaatggagatggtaaaaagtacataggattccaccaccagtgggaggacagaattgtattgtggcagcaatctgtaaatataatatttatcactcattcacatttatttagagtctaatgtgttctaggctctgaaattaagcaaagaaaatctagatatgcataagtccaagactttgcctttgtgacagccaaaataatgacaccataaagatgttctagtccctggaatctgtgaccatattactttacatggggcaaaagggactttggagatgtgattaacccttgagttagggggattatccttgattatcttgggggccaatctaattgcatgtgtctataaaatcagagaatctttcctagctacagtcagaaggtgatatgactacagaacaatggtcacagacatcccactttactggctttgaagatggagggatggtcccatgatccaaggaatagggacagcatctaaaagtcagaaaaggaaatggattctctctagagcctccagaaagcaatacagccctgacaacagcttgacttaagcccagtaagaccacagtcagaggtcttcc

SEQ ID NO: 262865 - DNA, 688 bp, Homo sapiens
ttagttaataccctcaagataacatctaggttcttagctgcactgagtcaagcctacttacatctttttttatcttcggctgcacttttcctatcacatcacactccagcaatgccaagctgtgccgccttccaccccatctccactattttgcccccgctgccgcggcttttttccgccttctcagcggctttttgtcgccacgcctttttacccccgccgccgcgacttttcgctccccgccgcttttttcccccgccgccggccgcggcttcttgcgacttttttcccccgctgccacggctttttgcccccgccgccgcgacttttgtggatttttgcccccgccgccgctgattttgcccccgccgacgcggctttttcccccgtctcagcggctttctgccgccgcggctttctgtgtctttttgcccccgctgccgcgtctttttacggctttttgtccctgccggtacggcttattaccgtcgcggctttttgccccctaagtcacggctttttgcccccgccaccgtggctttttgcgtcttttttctccccgctgtcgcggctttttgcccccgccaccatggcttttgccgctgaggctttttgcacccaccattgcagctttttgccatcgtggctttttgcccccgccgccgcggctttttgcggcttttttccc

SEQ ID NO: 262866 - DNA, 831 bp, Homo sapiens
tccattttcagtacttacaaagagcctcttttgaccactgaagcaaagattttttaaaagctcttctgaagaaagggttaattcatcataatacaatctccaaacaccatgttgtcagctcaggcttatgggaaaaggaagtgtgtgtgacagacagcaagggacaagacagactccagagagccctgaggaagcaaacaccaagcccactgctatgtctctggaaattacagtttaaatgtgtctttagtgaaaatgaatttatctagttcctaaccatataccgtcatgtcatctcccctcaaaaagcctgggcatggcactggggacttgcaataaatagcctttaaagttattgatctacttttcgtggtcacatgaccatcttgatggaagagggcaaagagggaaaggagctcctgcctgtccctgtttcctgggcagggcattcagcttacatcatgccatttagccctaaggcctcctttctaggtattaggggtggaaatatttacccaagttggttgattatttaaactgcccaaacttatgaagtcaactattcgttgtttcaatctccaagtcagaatccagactgagttctttctcataatggcaaatacagaacaaaattcctgacgtttctcaatggacattatagtttatgtgcctggtttccaggattagtcattgtttactggactgcaataagaaatatcaaaaattgacaatcttgcccgacagtttcatctccacacaaaaatggataagtataagtataaatcaccactagtttttaatctccttatataaagaagaataccacaacca

SEQ ID NO: 262867 - DNA, 350 bp, Homo sapiens
taaaaattttgttatcaaatcccagtttcatcatgtttcaaatataaatagcttttcttaaaaatagaccgggcacagtggctcacgcctgtaatcccagcactttggtaggctgaggtgggtggatcacgaggtcaagagaccgagaccatcctgaccaacatgatgaaaccccatccctactaaaaatacaaaacttagctgggcctagtggcgcacgcctgtagtcctcgctactccggaggctgaggcaggagaattgcttgaaacccgggaggcggaggttgcagtgagccgagatcgcgccactgcactccagcctggtgaaagagcaagactctgtctaaaaa

SEQ ID NO: 262868 - DNA, 525 bp, Homo sapiens
cttcctagccctacttgatattagctaaatctcttagagatggtttcaggaatctgtagtttttatatacagactatgtactcagacttatgcaattacatttggaaaattacagaatgagtatactgtggccaccccaatacaaggatcttctcctaatttcttaagtttttgcagtgacagctcatttatctgataaagaatgagcagtaatcctctctagtaattcaaatttgttgcagggacctgcaaactactgccacttgttttgtatagcaaggtagctcaggatggcttttacagtgtttaatgattcaaaaaaaataatgttttgtgatgtgaaaattgtatgaaattcaaatttcagtgtctgtaagtaaagttttattggaacatagccatacttattcatttacatattgtctttgtctgcttacatactgtagaggcagagatgagtagttgtagcagagaccacgtgattggcaaagcttaaattttttgcgacctgatactagacagaaa

SEQ ID NO: 262869 - DNA, 1200 bp, Homo sapiens
tttccacacatacagatgcatacacttgaggcagatgtagtagcattatatattgattgttttctttccacagaccatgcttgtgaaaataccaggacggtaaattagtgaattccaaagtcaggatttttgttggatctggcacagtcacaggaaagtctgagttttctcaagggcatccctgtctcaccgaggggcaccaaggacagacgaccagaagcaaatggcgcagtcaccgtcagaggagagtaaaactcattctgaaacggttccaaatgcccatgcctgctctgtggttttcagcaaagcggacctttccaaaagacctccaacagggacttcctggatgtgagaacactaaccaattctcgttcctctcatcttttgctttattccttccttccatgctgttattgcgaaaaactggtagttaaattcaattgattcaaaatattcgggatccatatggccgccaaccctggagctgaagcggcgatagcgcctcactgctgttttcaagcatttgcctctcctccagtccccagatggtgggagtaacatttaaacctccttttctctgccttgtacaatagaccttggcaccatttcaactgtttactccggtaattaacagctctgataccacaacaattacaactcctacactctcaccacaataatgctatgaattagtgagagctaatggctggaaggtagagtgtttccagactgtgggatctgtgcatttttagaataaaataaaaggtacaaacagcacgcttgcagtagaccatgattacctagtaattagtttacacaaagcttcctatttaatggcaaaacgctgtaattaacgtgtgacagaaaatcagagggtactttgtaagcatattaaaaattaacactgcaggcccatagctttatgtactgattagaagcatattaaatcaataggacacacaaaccaacagcttgggtagctgattattataggtcctcagaaggggtaccctggctttcatttcacttggggaggcaattttccttctcctgtcatcttcctcaggcacagagaaacacctcaaactcaaccctggcagcttcatgaaaataaccactgaactggaagaaaacattctaagtcattctcagagatgaagacaaatatgtaaatgattaagactttccatgattgtggtg

SEQ ID NO: 262870 - DNA, 437 bp, Homo sapiens
aatggattttaaaaggtgttatatgtacacaatggagtacttatcagccataataaagaatgaaatactgtcatttgtggcaatatggatgaacctggaggagaggacattatgttaagtgaaataagccaggtatagaaagaaaaattccacttgacctttctcatatgtgaaatctgaaaaagttgatcccataaaagcagagagtagactggtagctaccagaggatggggatatggagccatgggagggtttggaaaatgctggccaaatgatacaaaatgacagaaggaagaagttcaagaggtccattgtagagcatggcaattatagttaatggccatatattgtattcttgaaaaggaagtgatcagcaaacctaaaatactgatgaactgtaaaacttattatgaagagtcactctacatgacaagaa

SEQ ID NO: 262871 - DNA, 739 bp, Homo sapiens
gggagtttgggtgccagaggagttaggaagcttgatgctgttgttggccgtgactttggtgacagtgtgaccttggacaagttcctttatctctagggtctcagcatcttcatctgaagcatgaaaagtttggggtggtcccttccttctttaacctcccgagactctgtgcctctcacatgtatagattccctgtttgtagacagcagtgctgttatggggacctctgaaggctatctgaatgtgcctgcatttagcaagtcaaggccagaccctccagatgcactggactgtggggacattttgtgtgaatgagactattaagaatttagcagttcattctgacagcttgatagatggagtggttttgcatggcatccatgtaggaattgactaaaaaggaaacattttctgagagtccggctgtgtgtgcatgctgggaggtttttctcaaatcagattttaaaactttgctctgaaagaccaacaacaataacctaatccaatatccttgtatatttgattctactgaccataacatttcttaatttctgcttttggcttctgtagcctaatatactaatgataataagtattagtgttgtattaggaggtagatgctattatccctcttgcattcgttggagtctagttaggggatagaaaccatgctagttgagctgttctgcttatagagtagccattctttattcctttacttttttaataaacttgcctt

SEQ ID NO: 262872 - DNA, 916 bp, Homo sapiens
cctgggacccctccctcctccttgctgctcctaaaccacataggtcaggagtctggactgacccaggtacgtctggcatcttgcttgaggaacagggggttttgttttgttttgaaagaacgtctctgtctgttgcccaggctggagtgtagtggcatgatctcggctcactgcagccttaacctcctggctcaaacaagccccctgcctctgcctaccaagtagctgagactacaggcacctaccaccgtgcctgtctaatttttaaaattttttataaagatgaggtctctctttgttgcccaggctggtctcaaactcctaacctcaagcaatctgcccacgtcggcctcccaaagtgctgagattataggcgtgagccaccgtgcccaattgtgatcgtttttcccaaagaatgtatcacatgctaacaaaccatatatttatgtatttcattgttcatagtaactacaatttaaaaaactaaaaagaaacaagtgaggccgggtgcggttgctcatgcctgtaatcccagcactttgggaggccaaggtgggcagatcacctgaggtcgggagttcaagaccagcctgacaaacatggagaaacccgtctctactaaaaatacaaacttagccgggcatggtggcgcatgcctgtaatcccagctactccggaggctaaggcaggagaatggcttgaacccgggaggcgaagattgcggtgagcggagattgcgccattgcactccagcctgggcaacaagagtgaaacaccatctcaaaaataaataaataaataaaaagaaacaagtgaagttaacgttaataataatatatttgatttaacacaatgtatcccaaatattatcacttcaacatgtatccatattaaaaagttactgacatatttaaaa

SEQ ID NO: 262873 - DNA, 446 bp, Homo sapiens
acacacaggccgcctggaaaaagctctgcgttggacacagctgagcaccttaggcaccccggacggggctgaccctctgctggctcaggaggaagcacagagacgtgctccagtggcatttccgacttggatgaaagcaggaaagagctgaagcgtctggggagcctccaggaggtgacctcgggctgaaagtgccgatatgcaacagcctgctcccccggacctgagccaaggggctgctctgagcagggcagggtgggcctggaggggagccagggacccaagagacttccgagggccccaggagccaggaagcagcaccctggctccgcaaacgttagatcacaaagggcggctctgcggttccctgctttgactcctctgccaagagtgaaacagcacagcctcgaggtgttttagaagcttgttttgaaaaatgcaggcat

SEQ ID NO: 262874 - DNA, 225 bp, Homo sapiens
aaaaactttgtggaaagaagaattatcagggaactctaagctgaaaaattgccagggctcacacagacctggggaattggttgagtttatgccacctacaggatagagaacttgctgaatgttcaaggattttgttacagatgcaagatgacacttaaagggatgcaaaactaacatctctggattagtcttaataaagtttaaaaataagcttagaaaaagtca

SEQ ID NO: 262875 - DNA, 736 bp, Homo sapiens
aaaagccgaaaggagcattttttcctggtatagtttgcttcagaaatgtttttatttgtgctaataattggaattgctaataaaaagtaaactaagtctgctcactgtggattatactatgaaacagaataatcaatattatggtgctgatttaatattgtgaaaattggtattgtaaacattttccccatgatttctgttaataagtctgtctgaatttctttattctacagagctttctaggagcagcattgaggtttttttcacagaactttgagtagacctagcacaacagatgattgcttaggaaggcaaatgatatgacaggccaatctgtgatattactcttttggattaatattcatttcataagtccttgtactcttttttttttttaaccagtgttacttgccaatccttgagcttttgagtttctaatatattaggaataacatacatggaatgaggaatatgaacagcatttatctacatgtctgtaatactgtgttctgctacatgtcctgtgccttactaagcatttatatttttgtggactgtgggctgctccatcctcaactatcaaagttttaagaaaatatccacagccttttacctttgagaattacagagggtgcttacagacgtatcagcctgaggagaagaacccaacctgctacctacacgctggggctgcttaaaaattagggggcagtttttctatcagaaggaaaaaaaa

SEQ ID NO: 262876 - DNA, 1473 bp, Homo sapiens
aaaaggttaatcctcactgaaacaccaggatgcccactggatatactaatctgaacatctgtaggtagtttgtcatgaaaaagtggagagaagatgagacttttgaatgaatgaaaaagggtatcttgatacccagaattccccccaaagtacgggtaattcaacctgcacagttttctttcactcaaagtgttcagcacttgtgagtgaaaaatcatgtaattatctgtaaatatgtagctaacaaattgacctagtttctgtatttttttgtttttgtactaaagtttataggtctgtgccagctagagagaagttgctgtcattaccagttgtggtcctagcatctaaccctgaaaccatcctaggtgacatttttagaattaatacttaaatgttaaacagggggaaatgaagcttaatcatggtcaggtttgagatcttttgcagtgaaataattttatttaatataaatgatcacatgtcctcaatcatgaatgaggtagggagcctctctcccccagtggccatgtttacaaaagtgtgttttgtctataaagtgcaagtgttttaatgtttatgtaaattatgcaggtgataacatggtttggaactgtttattgggctctttaactgaattttcaaatgaaatgaactatgcttattgctggcacattgatcccatttctggaacatttttcctatttccagagttacatatgttcttttgtcattacccaatttaacctccctttctctgatatgccttgtagccaaagtattaaaggctgatgaacatagacaagggaaatgcatttcttagaaatccgtgaaccctcagttgtatgctttcagtactcgtgttaatatgtttctatggcaactctgaggtcagtggtttagaaatgagataccagtgttaatgaaaagtgtgtgctctttgcttttgcatggcttggcttagtatccaaggtatattagggccacttgaaagcatgaagaccagttatatagggaacaggtttctctcagtggcacattttgctttttctgagccccagatacattgcctgggcatgaacattgttaccgtaaattgcacatggtcatggactgaattatgtgactttaaaggatgtaactgcccaacatttgcagattctgggtggtctatgtgaccatttgtctcgtatccaaaaaccccggggctattggaacccttccaacactttttcctttgtcatagacaagtttatatataacttaccaagatgttggctgtcctggtgtattgccagacagctctcttttggttcccattccaatgtgctgctgtccttctttgcatttcacaatatcaaagaaaccaccacccttcttcctaacagcattttatgccttttattccacattaaatgggaattgtgcctacttaggagtgcccctccaattaattacatgtgtccaagaata

SEQ ID NO: 262877 - DNA, 408 bp, Homo sapiens
gaagagaaaatgtaaggaacctaaaatagtgcttttcagacaataagcgttctgtaagccttggctatgttttaacattttgtaacagggaaataacatgtaaatcaggggaaaattgtacttttttccaaactttattaatctttatatatactatataaaatagacatacctacaatgatacaacagtcgcttttagtgtttaaatcaccaacagtaaacaaaggtacctttttgttatttggcaatctccgctgaatgaagagaatgcctcctctgccaccccagagatttatgaatgttgagtgtaatgacatatgagtgccaggatctaatgtttattgcacacatagtaaaaaggaaatgagtccaacgagatagactcagtctgaagagaaacaatagcaa

SEQ ID NO: 262878 - DNA, 1799 bp, Homo sapiens
aggcaggagacgtgctgcgggctgggctgcccgggggagatgactcctgccaggagggcgcctctgggaagaagaccacgggggaagcaaagtttcagggcagctgaggagccttcgccgcagcccttccgagcccaatcatcccccaggctatggagggcggactctaagatgaatcccgacctggacaccggccacaacacatcagcacctgcccactggggagagttgaaaaatgccaacttcactggccccaaccagacctcgagcaactccacactgccccagctggacatcaccagggccatctctgtgggcctggtgctgggcgccttcatcctctttgccatcgtgggcaacatcctagtcatcttgtctgtggcctgcaaccggcacctgcggacgcccaccaactacttcattgtcaacctggccatggccgacctgctgttgagcttcaccgtcctgcccttctcagcggccctagaggtgctcggctactgggtgctggggcggatcttctgtgacatctgggcagccgtggatgtcctgtgctgcacagcgtccattctgagcctgtgcgccatctccatcgatcgctacatcggggtgcgctactctctgcagtatcccacgctggtcacccggaggaaggccatcttggcgctgctcagtgtctgggtcttgtccaccgtcatctccatcgggcctctccttgggtggaaggagccggcacccaacgatgacaaggagtgcggggtcaccgaagaacccttctatgccctcttctcctctctgggctccttctacatccctctggcggtcattctagtcatgtactgccgtgtctatatagtggccaagagaaccaccaagaacctagaggcaggagtcatgaaggagatgtccaactccaaggagctgaccctgaggatccattccaagaactttcacgaggacacccttagcagtaccaaggccaagggccacaaccccaggagttccatagctgtcaaactttttaagttctccagggaaaagaaagcagctaagacgttgggcattgtggtcggtatgttcatcttgtgctggctacccttcttcatcgctctaccgcttggctccttgttctccaccctgaagccccccgacgccgtgttcaaggtggtgttctggctgggctacttcaacagctgcctcaaccccatcatctacccatgctccagcaaggagttcaagcgcgctttcgtgcgcatcctcgggtgccagtgccgcggccgcggccgccgccgacgccgccgccgccgtcgcctgggcggctgcgcctacacctaccggccgtggacgcgcggcggctcgctggagcgctcgcagtcgcgcaaggactcgctggacgacagcggcagctgcctgagcggcagccagcggaccctgccctcggcctcgccgagcccgggctacctgggccgcggcgcgccaccgccagtcgagctgtgcgccttccccgagtggaaggcgcccggcgccctcctgagcctgcccgcgcctgagccccccggccgccgcggccgccacgactcgggcccgctcttcaccttcaagctcctgaccgagcccgagagccccgggaccgacggcggcgccagcaacggaggctgcgaggccgcggccgacgtggccaacgggcagccgggcttcaaaagcaacatgcccctggcgcccgggcagttttagggcccccgtgcgcagctttctttccctggggaggaaaacatcgtgggggggaggggagggcgggg

SEQ ID NO: 262879 - DNA, 418 bp, Homo sapiens
tagaattgtatttaaaggaaagatagcttttataaataaaggtagacttcttatagtttcggatttcttctgctttctcctgcaaaccattcccgtatttgatggtcactttctgcagcaatatgttttgatgttctctgctgggccggcacaacaataagtctcaataaggattttgtttatctataaataaaacccttagtatacagtacgagctaagacccaatcagacagcaggaggagcctggctttcttactgttggcctagttgaaatggtctttttttttttttttttgccactgttacaatttgccattgtcatcacaatcagattcactcaaggcagttcaattccatagatatttagagatctagatttactttatattacatccttagggcgtggctctgaccttc

SEQ ID NO: 262880 - DNA, 504 bp, Homo sapiens
tcagaagaaggtgtgacagctgcctccttgctaagagaaagacgtttcagtgtctgcctcctgggaatggagtctcctggtgactctgaggatggcgcaggactctcccagctaacactacacagaggctccccctcttcatgccacccctttgccagctgcagcctgtgtggacccagacacttctgacccaggctccagtgcccgcatgtctgatagcctgtatttcaaactctgggctctcctggacattccctctccagctgtatatgatgttatttttcagacccatttactgttgtccagtggcctgccaagacctttaggtgaagacgctgactccctcgccggctcttcttcattcttttcaaacacacaagagtgaaactccgtctcaaaataataataataataaataatgtacacttaaaaatggttaaatggcaaaatttgttatgtacattttactacaataaaacaaaaaaggtttcactttaaaaaaaa

SEQ ID NO: 262881 - DNA, 582 bp, Homo sapiens
gacattagccaaacggacaagaacaggtggactgaacacaaaagggaattctataaacacatttacaagattaggaagtattttttgtcttgttttaagagatctactgctatattgcacaggctggcctgcctcagcaacatagtaacgcatctactggctcaagcaatcttcccacctcaggtctcaagtagctgggactacaggaatgcgcctccgtgcccggctaaggtttcgagttttgctactatattttgtcattcttgtatctaattacaagaaatttattagtaaatataggtaaatattattaggaacactaataccattccgatgttcatcacgtgtttctctgtatagcactaactaagcagcagggggaaaaatgcattaatcgctgctttgtatgtcacgcttgaatattataaaaatctttgttaaaaagaaaaatacatgcctccaatatcccagagggcttaacgggtttatggcttacttcctagtttgagaaatgttggcctgaaaaactaaattattattcttttaaaatgtgtttccacaggaagttaccattaaaaatga

SEQ ID NO: 262882 - DNA, 663 bp, Homo sapiens
cccatttaaaattgttattattttccaatattttgtgtctatttttattttttatatacttttcaaaatcagttgtttagtatcagtatcattagataaataggcaattgtgtgtcagaagtatatacagatagattttgttacattttaattaaatactaatttctctctcacacacgcactccatttaactattcagttctttatttatcttattcttagtagctgctttaactaaagaaaaataaacttgagtcaggctagacagtacagggaatggaggagacaggtagtgaggggatactcataaatcttcatagatatcaacttacccacacttggcaaagtggctgtgtgcacatatttgacctcttcacttttcagacaagttgaaccattttcgggccagggagtacaaagaatgatgcagttatctgaaaagttgtttctacagtgatttctctttaatctcccctacttccctcataatgcctgcagtttttgtgttttctacataaaaggaattaaacagaaaaattgctaaaaataagctggttactgtttcatgacttccagccaccaatggcaattagaaaaacaaatattccttccttggaatcacttgagttcgtaaatttgtaaaccatacagctcttgaatttt

SEQ ID NO: 262883 - DNA, 978 bp, Homo sapiens
ttacttgtatagtccaagaagatatgcccactaaccctgctatcctagcagtgctggattcctctggcagaagttcctgctatcatcccaatggaaatgtctgggtatacatcaatatcttgggaggtcaatattcagatcaagccggcaacagaataagggcttggaattggtcaaattccatcacttcctcaccctttgtttcatttaaacctgtctttctggctttgaaccgttatattggagtccgcatcttagaacaagacaagatttctataacttttctagcaatgggccaacaggcaagaatcagtgttggaaccaaagtgaagctaccaaaccctgaggagattccaatcctccgatacgtaagtggagatgaccttcttctgctggccagtttaataaagatccgtcgcctgtttcataaacttgaaggatgtgtgaattttccctcaagccaggtttgggaaaaattaaagcaaccttcctacctttcttcactttctctaaaactaattgccctttgtcacagttctggtataaagcaagatataatgaagacaataagaaatataataaatgaagaaatttaactaagaaaaacaaaaaaaaaaaaaaaaaaaaaaaaaaaaaaaaaaggggcgcggcgccgtctctcaagaagttttccctctccgcgaggggcccccagagctttgcgcgggttacaccgcggtttttctttgttcccagaggggggccccctatatggggaggccgcgctttttataagcgcccgtgggcccggggcgccggcgggtttaacaaccggtgtcgtggagcgcgggtgcgaaaaacctgtggtaacacgtgggggaacaccttcggagaaggagagacccctataacctccgggggggggggggcgaccactttgttcgggcacccaatacttcccctctagacaagagacgttttaaacgcgccccagagggg

SEQ ID NO: 262884 - DNA, 430 bp, Homo sapiens
ataagaacagcacaggaaacagccatccctatgattcaattacttcccactgggtccctcctatgacacatggggattatgagagctacaattcaagatgagattctggtggggacacagccaaatcatatcaggtgaatttctcaagattgcatttggttcccactcataattgagacatgagtgagacatgagtacaggacacatttcataatccatttatttcaactataaggaaaacaacagtataagcacaataataaatggtaagtagagatctcattatgaagagacaacagagagcggtggggactgtggcaaactggagggtaattgctcagtatagggtggtagctactacttacttcttcctgattgttgatgaaggagattttaagtctaatgttattagatattcttaccttttagg

SEQ ID NO: 262885 - DNA, 412 bp, Homo sapiens
actaggctcatactcaactgatgattattagacaattccatttctttctggttattataaacagaaaatctttcctcttctcattgccagtaaaggctcttggtatctttctgttggaatgatttctatgaacttgtcttattttaatggtgggttttttttctggtaagatttggatccaagtcgcatcatgcccacttgtgactttgagattattcatcaagaatgaggatatagtagccatgacatagcttgagctatagcctttaatcccttacttcggctgtggggggagggtgagtttgaaaatgttctgattttcttgtaacctgggaaagccatgaccttgtgcccgattctttcagattgctttgggtaataaatattggtggtggtatctgactcatgctgc

SEQ ID NO: 262886 - DNA, 356 bp, Homo sapiens
agctcactttatctctcgactacttaggaattcaaggaagagcagtgacaggacttttgacggaggtattttagaggctgtgggccatcctcaactcttacaaatttcccacaataagaatacacattgcatttaaaatcccctattttgaggcttgaagcttcccacctatgggttcatgtaaggatggaagtgggtttcagggcttctgctcagggacttggggtgatcatttctgtctaatcccatcaggaacaatgacttaccttggtgtatgctctctgtgtgtgtgtgtgtgtgtgtgtgtgtgtgtgtgtgtgtgtgacagagagagagagagagagagagagagaaag

SEQ ID NO: 262887 - DNA, 634 bp, Homo sapiens
tctgtcaactcttatagttaatttttcagtaagtcctgtttctgctttcataatatttctccagtccatccacttttactgtcatcaccttcatcaggccactccatcgttatccagttatgtatgaacacctgctttgcattctattttccacttctgctaacagtgtttcaccattgttactattaatcttaggttgtgaagtgctgataaagacagtgtcaggactctgcttattacatctataaattcacactatccaagctcagttagactgacattactatttagcagaccatcttcctcctgcttgaaatatccttgcgttctcatgtattactcctatccccattcctggtttatgtgtagtggaattaagagtggagctttttagcatacatgttttttttttttttcatcttttttctttatttccccacctccttatattgagttagataaaaaatgggaattctacatctgatctgactaatataaactgctgtcaaggtgaccttataaaatatatttatgtactatctctgctgtatattcaatggatctttttccaaccaaatgaactatgaaaacttcatcctggccctccaggctgccttttaaggtgttgccaatt

SEQ ID NO: 262888 - DNA, 1788 bp, Homo sapiens
aggaggaacacttccactaaaagaaacatcaagattactatgaactattagctgtgactgcacccgggcacttgagctcctcatatcaggagactactaggcaagaacagtcaccattctttgagggataattaatcctgatcatcaggaggaggtacagctgctgttaagcaatggagggaagggaggtatatctttggtactcagttgattcacgtggagacttcttggtattcctttgcccaatttttttttctttttctttttcagaggtggagtctctgtcacccaggctggagtgcagtggcaccatctcggctcactgcaacctctgcctcctgggttcaagctattctcctgcctcagcctcccgagtaactgggattacaggcatgtgccaccatgcccagctgatttttgtatttttagtaaagatggagtttcgccatgttggccagactagttttgaacttctggcctcaagcagtccacctgcctcagcttcccaaagtgctgggattacaggcgtgagccactgcgcctggccccttgcccaatatttataaaataattatacaagtgcccagaccgtgacctgagcaggatatgctgacttcaggctcagccccctcagggctgagggtctaaatcatgcctccgtggaagtgacggagaccggaacacgtgctggctgagggtaaggaggatctagaatggatagtagaagagggagatgatgagtatcagttgtggcctcaagaccagtcagtgatggaggttgtagtttgtccaacttactttcctaagtttcccccaggaaaggaggtccaccagaacttaaaccaaaaagtagagctgagcagcacaaatgtgggctgtagtggacaccatcctgtgctgcccagaccccccagccaccatgcttcctgggcctcttcccacagctactgggagtgctctcagccagcagccttcagctgtcagccccctgggaattttcctcaatggaagagttacctcactgacatacccctttcccaggcaggtcagttcaaggttatgaaggcctggccccactgcctcaacttgacaacttggaagggccatctcagcttcaagaccctcccatgagactggctgaggtcttcatacagcatcggagcccaatttatctctctgagcaatcctgcttcctttcctgcccccttcccaagagcaatccctgataaacttcccgcatgctaatctccatctcagagtctactttccaaggaagtgggcctataacatagctcttccagtttttgttaacaattctagaacaggggtcagcaaactttttttttttttcttttgagacggagtctcactccgtcaccaggctggagtgcagtggcgcgatcttggctcactgcaacctctgcctcccgggttcaagcgattctcctgcctcagcctcccgagtagctgggactaccatgccaccacacccagctaatttttttatttttagagagattgggtttcaccatgttggccaggatggtcttgatctcttgacctcgtgatccgcgctcctcggcctcccaaagtgctgggattatagacatgaatccccacacccggccagcaaacttttttaaaggaacagatagtaaatattttaagctttgtgagccacatggtctctgtcacaactattcagctctgctattgtaatacaaaagcagctgtggacagtatgtaaatgaatgaatgtggctgtgttccaataaaactttatttccc

SEQ ID NO: 262889 - DNA, 429 bp, Homo sapiens
ctagggcaaaacaggcaatggcactgggtcctggagacgctgccctgaagcctgcagtatgctgaacttatgctctcagcatctgtccactttcacctaagctgcgtttccactggtttgctgctgaatctactcctgactgaaaccttccaatgtgcatggggccagggtgggagaagccttcagctctagcgatgggaatgatcaccacagggcagggaaactggcccagggcctgcagcctttgcttctcagactggctggggttccatctgcagggtcctacaccctcatcacctgctgcttgtgaacacgagaacaggaaagtcttgaaaaatctgaatttccaggtgaaatcttctagttttaaaactaggaaatggtttcctaggtgtaaaggagttttacaaagacatcctgaggcagaat

SEQ ID NO: 262890 - DNA, 496 bp, Homo sapiens
gtaaactacggtttgcaatgaacgcggctcctaattttcttaattaaatcttatttacccaatttcgttgaatgaaggtttatgctaaagggtggctttttattttaatctaaaaaaattggcttcagaactgtattttatgcagacattggaaagttgagcaactgcctgctggaagtgttgagtgtagccagagataattcggacaaaaatcttcgttttgttaagtacaggcatttttggttagatttgatattccacaatgtcatgtttaatgtttattgaaaagaatcatgattatgtcaaaataacttagctttaatggtctgaaataggatttttcttaccaggactagcagaaggcctaagaggagagttttctttgttactgatgaacagtatggtgacagtctttgaattgtagcaatgggcttctggttatacaaaaaatgtttatatattttaagctctgtaattttaagttatggcccttaag

SEQ ID NO: 262891 - DNA, 470 bp, Homo sapiens
cctgggtctgtgtgctctgtccctgactccgggtaccctgcctctgtctctttctccaagactctgtttcttcctttctgtgtcggtgcctctgtgttgatgagggtgtatgtgttcctctctcagtaaaagggccctgttcccctagtaattataaccacttctttctgtggaccccacatttccccaatttggagctgaacttatttatttatttatttacttatgtattttgagacagggtctccagcctgggggacagagtgagaccctgtctgaaagaaagagagaaagaaagaaagagagagagagaaagaaagaaagaaagcaagaaagaaagaaagaaagaaagaaagaaagggaaagatggaaggaaggaaggaaaaagaaagagaaagagagagagagagaaagaaaaagaaagaaaagtaagaaagaaaaaagcccaagaaagaaaagtaagaaagaaa

SEQ ID NO: 262892 - DNA, 383 bp, Homo sapiens
gaggtggctgcagaagagcctgcagctctgaggatgagaattcagggagtttgtgaaatagaagctgctatagattgaatgtttgtgaacaccagcccaactaccaaaattcttatgctgaagccttaattaatccacagtgtgagacattgcaaggtggagcctttgggaggtcatcagggtggagccctcataaggagattggtgcccttataagaagaagaaaccagagccctctcttgctctgccaggtgaggacacagtgagaagaaggccatctgcaagcaggaatgggtcctcactaggaatcaaatctgctggcaccttgatcttgaacttcccagcttccagaactgtgagaaataaatgtctgtttttaagct

SEQ ID NO: 262893 - DNA, 371 bp, Homo sapiens
gtattaagacaaaatatgttctttcctcctgcctttcagaacttctgtcatgtggccatattgccttctacattgaaacaatcacacaaaacccaggatggcagaaagtcaaaattttagttcccttcttacatgccgttttccctatgtcaggaccctggagagggggtggtttggcatcgggcagatttgtgtttgaattctggctcctgttacttacatgccttaaacagaacactctcctgagcttgattctcactctgtaaagtggggataataatgccttctttgtagggctcagaatagtatgtgaaatgtatctgtcacggtgcctggtacaaagtaaggctgttgttattaccattattctt

SEQ ID NO: 262894 - DNA, 373 bp, Homo sapiens
aatgtttatttgattctgtaatgagtgtaagacaaggggaaggtacaatacaattcttatctagagtaaggctgacacaggacttatacattgcctcccatcacactcccacaaatgtatacatgctcaaatatttgaataggcacaggtttttgaagcttcccctctccaagcctttcaatgataaacctctgcattttattcccctgggacttctgttggctacaaaagctgggggcaaccagaaccttaacaattgtatatttctgcaagatatatccctatttgaaattgtgccatggagggcttgcccaaaggtgggaagctggagaaattcctggtctttgtctcactggttagggaagccattcat

SEQ ID NO: 262895 - DNA, 700 bp, Homo sapiens
tgcaaagtatgccacaatccaattttaactttcttcagaatcccaattttaagtgggagtagaaggcccaccttaacagtagtaagaacattcataaagactaaaatagaaccttgctcaaaataacttgcacccactaggtcaaacaggcagctcaaatttctgcaatctgaaccttgctctcaatattatgctcactcaagtcaatgttatagtagaagtatgtgctattttcacacagctatctcaaatgtaaacaagatcatttaaaagccagaagagagctccattagtctaattaaactattctgtgtttactccttcataaaacaaaagactaatccttaacttgtatagaggtttatacaaaataagctcaatgaagtcctagactggttaagatgctttggaaaagacaagaactcctacagcaggaacgcattctggtggcagagaccgtgaaatgtatatgaccttcagtatacttaaaagacaagcagacatctgcacatatacatagaaccacttctagaaatctacaggaagaaaataatccaaacactgaaagttagcctaaagctaagagacagagacagaaacatacaagtgctcaatacaaataatcattgactatccaaccacaggtattcaagcaatcatttacaatgtttataaagtttttatttacaaggaaaaataa

SEQ ID NO: 262896 - DNA, 209 bp, Homo sapiens
ctggttctggcattacggtaatttgtcattgtctacagctctcaaattttgggaaatttgggtctgtcacctgtcctgaaattactgtaagttgggttcatttgtaaccctcaagttttggtaccgtaaaggttgatttccagcctgagattatggtaatttggcctgtttgtttcctggggtgcctgctcagacagccagacagactc

SEQ ID NO: 262897 - DNA, 1427 bp, Homo sapiens
aggcgcagaccggatggaagccggggccactggcagcctgtaactggttcccctgggaaggccgctctggtgatgaactcagctcctcacctggggcctggcagtccgatcacggaaacgagaattgcgaccccgtggctcatctggggtgctgcggctctgtaatcgtgtgggtttccgtcatctttgggggcaggaacgggcagcgagtggccgcttggattaaccacccccacctctgggcgcggctggcaccttgtaattaggtcactcgtaggtggaggagcgtgtacctaccgggggagtgctgcgcagtgcacctgacttccgcggcacacacccgtccccggacctaggtgtctcgtcgggcgcgatggcgggggcgaggcttgggcttttctttgggcctcggaccgcggctcgcttccacgcgccccgctcctcgccggtggttgctttcctccaagtttaattctctctgggaatgagagaccctcaacccctgcgcgccctggcctactttcaagaggggaagcccagagaagatggatgcacctgtcctgaccgcgtctcggtggcgtgagaagcagctgtgatacgtgcttaaaagagagagctcgtataccctaggattggacctctgtctggttatgaatcgctttggagtttgcgaaacgttttcacattccattgtccctgcttttacataaatatctggttccatagagcgccagtattatgccagatccggaggggtcatccagacggaccagggaccatgccctggagcttgtattctcccaacagtactggctgaagatggtttgggataggcagaagagagatcataatgcccccaggatttgaaagatatagaagctttccaaagaacatttaaccataaagggcaaggcaagagctgaacctgatcgcctgtcttccaggaaccccaccctcagtatcaggcaacccttccacacccaagtgctcagcgatgcttgggaggagactgctcactctgcggctctgagggcatcatccccaccaacaggctgaagaaggcactggaggccccatcagccaatagcaggactgaaaatcctcctttatccaagacaacgtgtttggcaaggccgactggcttggcctccctaggctggaaattgcaattctgctttcccttcacacctcccattagtgtgcacaaaagaaagtaccttagatctactcttctagaagtcttatcacatacttaatttaccagactgggaaaaagaccctttagcccaaattctgtccctgttttgcagttaacatccccaaacaatagaagggtaagagttaagaccaagtggaatgaataaggaaaaaatcatcacttagtgcccgtgattataaagccatacccagtgtgcagtctaatctta

SEQ ID NO: 262898 - DNA, 1172 bp, Homo sapiens
aaaatggtggtgttcgggtatgaggctgggactaagccaagggattcaggtgtggtgccggtgggaactgaggaagcgcccaaggaaatgaaacacgatttccaaaatgaacttaatctttcatgagaaactgaggatagagatgtcaataagcagccactgtttccacctccccacctgaagagctaggagcgcccaagctttcggttctgagctcggactaagccatgtggattcaggtgtggatgacggtgggaactgaggaagcgcccaaggttttcaagatggcagcatctatgcatggtcagcccagtccttctctagaagatgcaaaactcagaagaccaatggtcatagaaatcatagaaaaaaattttgactatcttagaaaagaaatgacacaaaatatatatcaaatggcgacatttggaacaacagctggtttctctggaatattctcaaacttcctgttcagacgctgcttcaaggttaaacatgatgctttgaagacatatgcatcattggctacacttccatttttgtctactgttgttactgacaagctttttgtaattgatgctttgtattcagataatataagcaaggaaaactgtgttttcagaagctcactgattggcatagtttgtggtgttttctatcccagttctttggcttttactaaaaatggacgcctggcaaccaagtatcataccgttccactgccaccaaaaggaagggttttaatccattggatgacgctttgtcaaacacaaatgaaattaatggcgattcctctagtctttcagattatgtttggaatattaaatggtctataccattatgcagtatttgaagagacacttgagaaaactatacatgaagagtaaccaaaaaaatgaatggttgctaacttagcaaaatgaagtttctataaagaggactcaggcattgctgaaagagttaaaagtaactgtgaacaaataatttgttctgtgccttttgcctggtatatagcaaatactcaaaaagtattcaataattcaatcaataaatataagtttcatcttacacgtaagatacaggtcttatctcctgatggtgtgtccattttgcctggtatataacagataataaatatccagtgtcaataaatgtaacaataaaaaaaaaaa

SEQ ID NO: 262899 - DNA, 723 bp, Homo sapiens
atgggcctctactgagcatttgaggggccgagtttgaagcggttgctgcttcctttcagtgacttggttatgtcctcagtagcttgcggttatgaaaggcctagaggttttgttcgatttgaagctgtcattgagctgtaatgattcatcggaagaaaaaggacaaaacaacctccaagaaacctctaccaacctccgagaaatcatcctcccgctcgggagtactactgtcttcgctccgggcccataacacttgggggtgacaattctgaaactatacctggtatctggttcttacttcagggccataaaactaagatcgcccacactctccccttaaataagacatctcgatggactagtgactaccatccttttttttggtgtgagctacagagctgagcctttggtctcttgtagcagttgctgctttaggcaaagctcgagcttccttgctgtattaaaaagagtggaaatgaagttagtaaacttttttgtgcccatataatatttcagttgtatctagggttaaatgggctgtagtataggtgaggaaaagatttctggaataagacgttgctcttttacctttaagaaaggatctggggccgggcaccgtggctcagcctgtaatcccagcactttgggaggccgaggcaggcggatcacgaggtcaggagatcgagaccatcctggctagcacagtgaaaccccgtctctact

SEQ ID NO: 262900 - DNA, 275 bp, Homo sapiens
atgggcctctactgagcatttgaggggccgagtttgaagcggttgctgcttcctttcagtgacttggttatgtcctcagtagcttgcggttatgaaaggcctagaggttttgttcgatttgaagctgtcattgagctgtaatgattcatcggaagaaaaaggacaaaacaacctccaagaaacctctaccaacctccgagaaatcatccagcctgggccatagagcgagactccgtctccctccagcctgggccacagagcgagactccgtctca

SEQ ID NO: 262901 - DNA, 386 bp, Homo sapiens
agaagttctctgcctgtgataaaatgagaatctgaattaccagatttagctttgattatcaggttttaaggttcctttaagatctaaaaatctatatactggccgggtgtggcggctcacacctgtaatcccagcactttgggaggccgaggcggacggatcacaaggtcaggcgattgagactatcctggccaacactgtgaaaccctgtctctactaaaaatacaaaaattaaccgggtgtggtggcgcgcacctgtggtcacagccactccagaatagtaggcaggccaatcgcttaaacctgggaggcagaggttgcagtgagctgagatcacgccactgcactccagcctggtgatagagcaaaactccgtctcaaaaaaa

SEQ ID NO: 262902 - DNA, 669 bp, Homo sapiens
gagacactttcaggagtgcataatggaaggcttatgtagaactaggaccaagcctctcaattacactaagttgtccatgattgaccagagatttgatggaaaccccactgccttcctggagaagataagagaggccctggtaaagcatacctctctctctcctgattcagtcgagggacaactaatcctaaaggataaatttattacccaggcagctcctgacatcaagaggaagctacaaaaacaggccctggaaccagacagtagtttagagaacctccttaaactagccacctcagtcttttataatagagacagggaggcccaggaatgagagaggaaatacagtaaagagacagaagctttaaaggccaccaagcaagctcacaaaccccagaattctcagtgtgcacctgttaactgctaaagatatggcaagaacagttatttcattctaaaagtttatccactcccatgcaaggtttaatgtgtttcacctgggtgaaacagcgcagggttcaatgttgttagtatattttactgcttgtctctgtaatctttggcactaaattctttttttgtatcatacacatatttagcccatacatacttaaccttataaaacttgtttttttcctcttacgcctagaagccatcaaattccaaagg

SEQ ID NO: 262903 - DNA, 430 bp, Homo sapiens
cagctgcccccccagcgggcacagcacctcctccctgtgtgatggggtggggcccacagtctcctttctcgcggcctgcctgggctgaccctgggtcccagctcggccatggggcttcggcatgtaaagcccttggggggcagagcctcccacccccgccagcttctggctctctgtgtcgcccccagcactggactggtgccttggagggaggctccgctctcctccacatcaacccgctgaggagttctgtcttcccagggttgtgagagaaatcagctctgcaggcctatgtccaagtctaggcgccgcctcctccagggagccttccagacctgatctgtgtggcagaggcccagaaggacctgggtgtggggatcctagagggaggcgggggacccagcgtgaggagagagggtcccagtgcttc

SEQ ID NO: 262904 - DNA, 411 bp, Homo sapiens
cacagcattcatcccatttggaggaagcagtgttcaaggcaccatcctggaagcagagactgggccatcaccaggcaccaaaccagctggcaccttggtcttagacttcccaacccccagaactgttcccagtgctacaatgggatatttataaagatggggaaccagcggggtgccatggctcacacttgtaatcccaaaactttgggaggcccagaatattgctgctgccaaccactgatttaggaatgtttagaggtatatgccaactcaataatcaaaatcattttggtactgggaacccaaccacagtctctgtagaccagtggaatttattgcttgctccagtttattaagtaagagtaccaacagcattttgaataaaaaagagtctgataagatgtgatagaa

SEQ ID NO: 262905 - DNA, 360 bp, Homo sapiens
gagtctggaaatgacccctctatccaggaaggggctctggagtctccagttcattattccggacagagttgctggtgccacgacttatctcctgcgtgtggagaattccttggctggtacccacctcctctcagccccagcacagccctggcccctaaggcgcgtggctgattgggattccccagcggcttgaacagaaataagtctctatcctggagttaggagtagtgaaattagcacgacttcacatctgttatagcatattagggagggcttacgtgaactgggaatacagcaaattatatttgtatccaacgaaagaggaagaataaatcactaccagaacagtataggtttgcc

SEQ ID NO: 262906 - DNA, 184 bp, Homo sapiens
ttgcaatgagctgtgggtccaggagttggggcggcaggctgtcgtggcctgtcctaggtgactgggaaaagtgacctgcagaaaaacaaaggaacctgcctacccctgggccagcagcctgtgggtctcaactgctcagggccttccccactaattaataaatatttgactttcccattatgga

SEQ ID NO: 262907 - DNA, 936 bp, Homo sapiens
atggctacttcaaaccattcttcaggggctgagtttatcctggcaggcttgacacaacgcccagaacttcaactgccactcttcctcctgttccttggaatatatgtggtcacagtggtggggaacctgggcatgatcttcttaattgctctcagttctcaactttaccctccagtgtattattttctcagtcatttgtctttcattgatctctgctactcctctgtcattacccctaagatgctggtgaactttgttccagaggagaacattatctcctttctggaatgcattactcaactttatttcttccttatttttgtaattgcagaaggctaccttctgacagccatggaatatgaccgttatgttgctatctgtcgcccactgctttacaatattgtcatgtcccacagggtctgttccataatgatggctgtggtatactcactgggttttctgtgggccacagtccatactacccgcatgtcagtgttgtcattctgtaggtctcatacggtcagtcattatttttgtgatattctccccttattgactctgtcttgctccagcacccacatcaatgagattctgctgttcattattggaggagttaataccttagcaactacactggcggtccttatctcttatgctttcattttctctagtatccttggtattcattccactgaggggcaatccaaagcctttggcacttgtagctcccatctcttggctgtgggcatcttttttgggtctataacattcatgtatttcaagcccccttccagcactactatggaaaaagagaaggtgtcttctgtgttctacatcacaataatccccatgctgaatcctctaatctatagcctgaggaacaaggatgtgaaaaatgcactgaagaagatgactaggggaaggcagtcatcctga

SEQ ID NO: 262908 - DNA, 522 bp, Homo sapiens
ctgagtacaaggagttagcgatagggaagagaaaggaagaactctctgtttttgacataagcatctgagtaaatggaggtaccattcactaacatggacaaaaatcaaagatgagcagctctctatgagcagaagcaaagcaggggcacacagagtggtataatgaacatcggagagtcagaagtgaggcagatgggaggggagaaatgaaaaattacctattgggtacaacgtacactattccagtgacaggtatactaaaagcccacacttcaccactctacaattcatccatgtaaccaaaatcacttttacccctaaatctatcaaaattggaaccaagaggtgatgtcaagtaagacaatacatgaataggtttgaagcgcaaaagagatctatatgtcagctagatgtatacgtttgagaattgttggcatattcatagcactgaaaactataaaaataaataaggtatccaaaggcacagcttgaaatgagaaaacaggatgaagccctgggaac

SEQ ID NO: 262909 - DNA, 545 bp, Homo sapiens
aacattttctgatttgaaatacagacaataaaatattgttttcttactgcagcggatctgacatagcacctgtacatgcatgtttaggttttgtaatagaaatatgacagaaaagatgctgagtaggaagctatgaaaaatactcaaaagccaacctctttatggtaacctcctagcttgtttaaattaccatgcctacctcttctccagccttgttcattttctcagccacttccttttcctgaactttgattctgatttgatgcatgcatatactgaaaaaagtttgccaccagtttgggggtttcggggggtcaactagattctatgtttaattctcagtcccatttccctggcttcaactacaattcctctagatgataatgctggatactgaccccgactatagggccctttccacaagtgactgcaaacactctcccaattccaattccaagccaaccttcatgctctcctacctctataccttaggtagtgcatccaccaggcttcttcttgcattaaaataccattctttatatctt

SEQ ID NO: 262910 - DNA, 357 bp, Homo sapiens
tagcttaataaaagtgtcgacagaaaaacattgaaatggaaagtgtaaaaacataagtgatacactggtgctcaaatttcaatatatgatcaaaaaagagtatatgtaaaaaaattatcctaaagctcaaaggcaaacaaatgaaaatcccatataattaatcagaaaaaaatgctactatgattctgaattaaaatgcaacagaaaacgacatatccaagaatattttggtttgaagacaaaaattctgaggtgcagattgtggacagtgatttctaatttcacttaaattatgaatattaaagaagcaaagagattaaaataagaaacacaataaaatgaaaatatgtaattttg

SEQ ID NO: 262911 - DNA, 457 bp, Homo sapiens
gttactctcctggctccctctaaaccccactcagagaggaacgcttcctcttcctcttgttaagtgacatcaacacattgaaatacagctcttggctaaactccgcgagctgactttgaaaggtaacgggaagaaacatttcctttcaaaaggaatctggcagcctttgagcctttgaaacacacccatttcagatgagtctgagttgggcaggaattgcaagtacttccaaaatcatccgtgtcaatatttcccccacccctggaatattaatatgtacacacacccacacactccccttgagatgtgtttatttcacaattcacaaatggtgaagagaccttttctgaatttttttcttagggacttgggaagccagcatgaaaattgtgattcttccaaatgctttcccatatgccttaaatgcccccattaaagttaattttctcagtccaca

SEQ ID NO: 262912 - DNA, 426 bp, Homo sapiens
gatgaggttgatgggctgcaccataaccttctgcactttctggccctggctgtggtacaccatggtggaatcccacagaaagcacactgacccacacgctacctcagccagcaacttctggaataaaaaaccgaaaatgggctgggcatggtggctcacacctgtaatctcagcactatgggaggccgaggcaggcagatggcttgaggccaggagttcgagaccagcctggccaacatggcgaaaccccctctctactaaaatacaaaaaaatagctggttgtgatggttcacgcctgtaatcccagctacccagctacttgagagtctgaggtgggaggatagtttgaacccaggaggcagagtctgcagtgagctgagatcatgccatggcactccaacctgagcaacagagtaagactctgt

SEQ ID NO: 262913 - DNA, 142 bp, Homo sapiens
gatgcagccatcctttctctttcttctctctcatttcccacccaccccccactctctctttctctcctccccgtcagtctgtctttactcttcttttcctccattttttttttgtagtacaactgaagaaaactgaacctca

SEQ ID NO: 262914 - DNA, 321 bp, Homo sapiens
gacttcagaatggacaggaatcagagcaaccctggaaatcctggtgtcaggacctaatgaagaagctctagagggagctgcccttgggataatgggacctagatgattctttgcatctgttccaggattcaagcaaagggagggtgttttcagttgctccagctttgaacagggaaggacaggcaccatgattgactcttgccagacataaatccaatgagaggcagtggtttctcccaaagtaaaatcagagtgctctagctagaatagatactggcaggcaaaaatgatagatatccatgatggccccactgactagag

SEQ ID NO: 262915 - DNA, 172 bp, Homo sapiens
tatgcccagtctgagttctcaatgaagaccaaaaatagttcttggtgctatgctgtctctagttccacaaccttcatacaaaacacaaacccctcgctggtttaagagtgccagaaagcactggggagttagggccaatcatgtgccgtgagcaacttgtactcataaacca

SEQ ID NO: 262916 - DNA, 675 bp, Homo sapiens
cagacattaagcagcagagcaacttagcaagagaagacagatcctcaggttggtgggcaatgtctgaacagtctgctcatggcaccaattgttagtcacttgcaaagatgtggctttaagagggtaagaaattactactcacataaattacatttgtgaggtaagtaggaaggcctttcaaggtgatctgacatggcttgaatgtgcaagaaaaggagccaggcctggatttttattgagggtaggtggcatgctagggtgagaatttattcccatggacaggggtttgaatggtttcaatctgctgctggtaccagaaaagggaccacccaggtttcctcttactgtattattttatacacacacacacacacacacacacacacacacacacacacacacacggtttaggattaaaaatagagacaaccatcaaaaagtgaagatagttccttttggtcagcctggcaagtaaggacgtagaaggtgacattcgcatcagcgaaagtaaaaagggaaacataggccagcaattctcctaacatctatcagaaaaataagttcacagggcaaatcaccatcccaaattggacagaaggacacacacatccagagaattataacttacttggttagtaaaccacaagaaacccctatgggaacaaatacagttgt

SEQ ID NO: 262917 - DNA, 481 bp, Homo sapiens
gcttaaactttattcacttggagtagaacttcctagttaaatgattgaaaaggactagttctgcaaaatctatgagaacaagagcttctgcaaatgcataatataaattctcttcctttttttttttaaactgtatttttacaaacctagatctcttcctgctttgatttgtctttatcatatctttcagaacaaacctttgatggaattctaggaaaggttgagattaagaatatattaaaaatattccactttgtacattctgtttatattatagtaaactaagttatttagcaagataaaattaggaatttcacccaaggtatcaatcagatggaaccattagtccactgaagaatttactttttaaaaaagttagtggaggaaaggagaagatgctgcttaagagtaatcagaaataaagatggtaagcatcatatggtaaatatatacaagtttcatcaattttgtaaaaaaaaaa

SEQ ID NO: 262918 - DNA, 488 bp, Homo sapiens
cggttgtctgctcagtaacctagcgaagcccgcgactgccctgcctggtggagacgggcgcgcccctccctcaagctggtcgaggaggtgctaacacaggacttcgtcaatgaagcaagacctccctacatgcttaggtctgaatccagctattccagatctttccactcacactaagtaggctgaacagcttcagactctcccctaagatcacagccaaggactgggccggatcgctccagtgtgacacggagccggtggccatgcctggggcatccaatgccctgaacggagccgcacgcaccacctccccccaggctagggcagccgccccggggctgcgggatgctgggaagccattaatgagggagtagatctggtgaggagatgagggagggcaggagagcagcaggcccccatgcagggagaggaagccgcacgcctgacgctctggcgggacgaccgcggcctctgaagagcgcggccgc

SEQ ID NO: 262919 - DNA, 170 bp, Homo sapiens
caaggcaaagaaatgaaaggcatccaaataggaaaggaaggggtgagattgtctctgttttctgaaaatgtaatcctaatgtaaagaaaatcttagactccaccgaaaaaacctgttaaagctgataaacacattcaataaagttgagagttacaaaattaacatacaaa

SEQ ID NO: 262920 - DNA, 688 bp, Homo sapiens
gccaggcatagtggtacacacctgtaatcctagctactcgggaggctgaaacaggaaaattgcttaaacctgggaggcggaggttgcagtgagccaagatcacaccactgcactgcagcctgggcaacagagtgagactccttctcaaataaataaataaataaataaataaataaataaataaataaagtagattaatggttgaaagaggataggggcaagagagaatgaggagtgactactgagaaatatgagactctcttgaggatgataaaaatgttccgtgattagagagtggtgatgggtgtataactgtgaatatattataattcattgaattataatttttaaaaaggtgaatattaatattaaaatgatgaaagaggtagtactggctagattcccagggaaaccacaagtgtaggagagcagctatgacctatagtaggactagtcatcaatccatggtgtgacagggaaagaataaatagtaagtcctttcctcctctgtcttatctcatgccaatgttcccaatcagttaacttcaaccagaatctggaattgaaaagacccttaaagatgcagtcaggcttccagacatggagaaggaacagaagtgtagtacttagacacggaaaggaaattgagaatatctacaccaactctcaaagtctggatagtcttcac

SEQ ID NO: 262921 - DNA, 486 bp, Homo sapiens
gaactttctgaagaagtaatgggaatactctgtatctgtgatgtcctgtatggtagccactggcctcacacagctcttgagcacttgaaatgtggctactgtgactgagtaattgagttttaaaatttcatcaattttaattaattgaaatttaaatagccacatgaggccagtgactacagaattgaacagcacaggtctcacagatggactaagagtaagccagttacgaagaagcttatacaggaagaccggctaaaatatgtcaaaggagagtttctctttctgaactccgaggagctgttcaaacaagactggtctggagagagttttgggtggctggaggtattttcacccctccacttactgtgcctaaccttagtattgttgccattctcacgtttctgtatgactccatctcccttgttctgttccgatgccgctttttcagtttttctgagctctcaattaaacacagtgaaatga

SEQ ID NO: 262922 - DNA, 562 bp, Homo sapiens
tccttttatgacttctcagtatttagaatagaatccaaactctttaccctgtctcgtatgaaaaagcccagtagaatctgccccagcctacaccttcaagaccatcttgcatctttcataccatgctctaaccatactggcctccttttcgtttctgcaacatgcatagctcatttctcctctgcacgaattgatttttttcaactgaaaaactaattgtgcttgacagattgtcttgtcattcttatctaacctaaaatttcacccctttcaagagacccttcccgactatcaaatacaaagtacttatacagtgatttcgtaagaccaaattttaattatttgcaaagaactcatcaacctgtgttttgtttggtttttgttcatttgttttaataaattgctgtatccaccaaaccactgaactgtgagcttcacaggagtaggaatattaactgtccattactgtatcttttgcctggtaagcaactgaaaagtactttggaagggtgagagaaaagaaagagagaggagagagaggggaaggagaaagattattttc

SEQ ID NO: 262923 - DNA, 633 bp, Homo sapiens
ccaaaaccttggcctaatctgcctgggggccagactcagacagccaagccaggcttcttagaaattgtagctctcttccttttaccctcttgagagaaaaaaaataaaataaaatctgcagattctttaaggcagtttagctcaagtatccaacaactggttttttgttttttaatgaagtcaacaaagtagactaagaggaagtaggataggaacaaaacaagggaaaataattttagaatattatggaagatagaagtaaaaaggacatcccaaatctatcagcttggtgtaagaatttggttaatgaaaggttaatgtggcatttacctttgagagtttggaagttcaaacccaacccaaagacctttctatgtgaagtaaatctgatggctacaaaataaatattaacagatttctcctcaaactgcttatttgtcactaactgacttctttatattataaaacaaaagagaaaggtgagaggttaaatggggtagggggatgctaccatcttcacaattgaagctacatgcatcaatatgtagcagccttgaactatcatggttctatttttgcttggcttccaggaagctcagagctaagagcatgctcagtaattattttatatct

SEQ ID NO: 262924 - DNA, 337 bp, Homo sapiens
ccagttacccgccctgtctacggcccaaacggccatgctagtgaaaacctgccctggccgctaagcaagcctagcccaggctgtaacccatgtttctagggcttgttttcctctgcagtcaaatcagagattcggagttgaaggggatcttagaggtcaacatgcccaacctcttagcccgagtgagtgaatgtacgctttttacctgcacaccccgaaaatcgcccgttttctggaaacaacgttgattatgtagtcctggaactttcctgcatgcacattttattccttcgacaatatttattgctacctactgtgtgcaggcattgtaggcccc

SEQ ID NO: 262925 - DNA, 447 bp, Homo sapiens
ctgaagatggcaatgagcaaagaacgaacgaacttgggtccttcaagattactttgagacactgaataaaccaagtctggagctacccattgctggggatttttattacgtgaggtcataaaatccccattgtttgggttttttactcctcacaactaaaagcatcccagcccagagtgtcacttatccacgcccttcaccatgtttggcggggagaaaatatccctgccaaagggagataccatataaactcttcttcacctatggcccaaatcaggccctctgcttatttttgtaaatagtgttttattggaacacagccacactcattcacttacatattgcctatggttgcttttgcttgagcagttgcaagagagatagtgcagcctgcaaataggaaaatattcattatctggccctttacagaaaatgtttgccaatccc

SEQ ID NO: 262926 - DNA, 355 bp, Homo sapiens
cattgtattgatttgtatgccattaaatgtttcctgtggaggctattaccttgatgaaacctttacgctttaaaagttttctgctttaaagttaacatcttggccaattggaaagttatcatgaattaaaaaaaaaaaattatttgccattcctttaaattttttgaaagttgttttagctttttctaagttatatttgcatacatacgaaatgtatcctgtgtgcatctttgacatgagggcgcattaaaactttattaaattgatgactaaattgatggtatccaaagtgcagaaccttaggttggagtagctttggttatttaaatgaagacattgaccaacctccagacag

SEQ ID NO: 262927 - DNA, 357 bp, Homo sapiens
gaaaatgggagtgtaacattccacctcctaggactgctggaagcatgatatgagctgattctataaagctcttggagcggtgcctggcacgtggcaggtccagcctaagcgttgaccatcattgtcatcagtccatgaggaggagcagatagccactgaggttcccgtttataaggggaaaccctgaggcttggagaaagagcttgacctggtctaattcccaggatttcggccctgccttcctgcctctaacctcctgctggttcccttagagccacagttctagaagaatggctgggcaagttgataaaatgcagattgaaccagcctagactgggacctgggatttcaattttt

SEQ ID NO: 262928 - DNA, 179 bp, Homo sapiens
gccagggagacaaaagttgttcactttggtgcacatgtggaaccaacatgggacaaacaggcattttgtgctcgtccagggaacatgacttcttcggctcccacacaatttgtagctgcaggagtggcagagcaccagagtggatgcaggcccagatgttctctgggttaggtgttaag

SEQ ID NO: 262929 - DNA, 311 bp, Homo sapiens
agaagccttgggatgtgggggaaggctgttcttatctggggtttactcccaggccaggggggctgccatcttcttcacacacattcctcaaagaggaagcccctttggggcagggaggtaaggacttcatctcaacatagattggtggtcggcacgagcagagggggatacttttggctttttttttttttttttttttttttgacacggagtcttgttctgtcacccaggctaaagtgcaatggtttgatcttggctcactgcaacctccgcctcctgggttcaagccattcttctgtcttagcctccct

SEQ ID NO: 262930 - DNA, 613 bp, Homo sapiens
ccacaatttaatgcttccagaagcaagaggcaacatgatataatgaataaaacacaagaatggaggaagaagactccagtctgagtgctagtaccatcactgtcatcttcaagtaattagtcacttccatattgtttcctcctctgtaaaatggaaacaatagtcactaccttttgtgcagaagtactgaggggatgtgagagaaagcagtttgaaaactgtaaactaagataatattgtatattaccaacatggaggtatacttctgtttattcctcctgtaggcttcactgtgggagttaagaggtgccccaaaaattaaaaacaaccggctgggcgcagtggctcacgcctgtaatcccagcattttgggaggccgaggcgggtggatcacgaggtcaggagatcgagaccatcctggctaacacggtgaaaccccatctctactaaaaatacaaaaaattatccgggcgtggtggcgggcgcctgtagtcccagctactcaggaggctgaggcaggagaatggcatgaaccggggaggcagagcttgcagtgagccgagatcgcgccactgtactccggcgtgggggacacagcgagactccgtctcaa

SEQ ID NO: 262931 - DNA, 365 bp, Homo sapiens
caaagtgctggaattacaggcgtgaaccaccatgccctgccacaactttggcttctatttatttatttttgagacagagtcttgctctctcatccaggctggagtgcagtggtgtgatcttggctcactgcaatctctgcctcctgggttcaagcaagtctcctacctcagcctcccgagtagttgggacaacaggcacacaccaacacacccaggtaatttttttgtatttttagtagagatggggtttcaccatattggccgggctgttcttgaactcctggcctcaagtgatccacctgcctcggcctcccaaagtgaggaagctgtgagccaccacacccggccaactttcgcttgttaga

SEQ ID NO: 262932 - DNA, 1799 bp, Homo sapiens
cgctcatggagccctggcattgagtgtgagcacttcacactctacctctctcagttggccctccgaaatgcctcaatttaggagtggtgccccactgtggagggtattttcaggaccatcttacaaattattgtgaagtgttggaaacaaagagcttcctgcttcttttcaacctggttctaccatgttccaagctgtagccaaaaggaaaataaatcagagcttgaaactagcctttctgatgggaatatctatctgggacacccctccctttttgtctcttgcccccatacgtctcctccttacagcacaggctgtttgggaaggaggacaggatatgtcatctaacttttttccatccctagctgagtcactgattaaaaacaaatgaacaaacaaaaacctaaaaaaccttccagaaatacaaaggaaaagggtttgtttgttttttattttaatttttatttctgtaggtttttggggaacagatggtatttagttacatgagaaagttatttagtggtgatttgtgagattctggtgcacccatcacccgagcagccttcactgtacccaatatgtagtcttttatccctcacttacctcccaccctttcccctgagtccccaaagtccattgtgttattcttatgcctttgcatcctcatagcttagctcccacttgtgagtgagaacatatgatgtttggttttccattcctgagttacttcacttagaataatagtctccatccaggttgctgcaaatgccattaatttgttcttttttatggctgagtagtattccatggtgtatatataccacaatttctttatccactcattgattgatgggcatttgggctggttccatatctttgcagctgtgaattgtgctgctataaacatgcgtgtgcaagtatctttttcgtataatgacttattttcctctgggtagatacccagtagtgggattactggatcaaatggtagttctttctacttttagttctttaaagaatctccacattgttttccatagtggttgtactagtttacattcccaccagctgtgtaaacgtgttcctttttcaccgcatccacgccaacatctgttattttttgatttttggattaaggccattcttgcggagtaacgtggtattgcattgtagttttgatttgcatttcccagatcattagtgatgttgagcattttttcctatatttgttggccatttgtatatcttcttctgagaattgtctactcatgtcctcagcccagtttttgatgggattgtttgttattttttcttgctaatttgtttgagttccttgtagattatagatattagtcctttgtcagatgtatagattgtgaagattttctcccactctgtgggttgtctgtttactctgctgactgttccttttgctgtgcagaagtttttatgaagcaagtctttggggaggatattttgtctcataaaagttattacaaacatcaagaaagtggattccagccgggcgcagtggctcacgcctgtaatcccagcactttgggaggccaagacgggtggatcacgaggtcaggagatccagaccatcctgggtaacacggggaaacctgtctctactaaaaatacaaaaaattagctgggcatggtggcgggcgcctgtagtcccagctacttgggaggctgaggcaggagaatagcgtgaacctgggaggtggagcttgcagtgagccgagattgtgccactgcactccagcctgggggacagagcgagactctgtctc

SEQ ID NO: 262933 - DNA, 621 bp, Homo sapiens
cgatgctgtagtcatccccttcgtgcggggagctgtgtctttcctggtgtgattcgtcctgcgcgggtggtctctggagaagcggctttatctcggcggcttttccctaacttaattaggtgcggcaccaatagaagattcgatggacatggacatgagccccctgagggcccagaactatcttttcggttgtgaactaaaggctgacaaagattatcactttaaggtggataatgatgaaaatgagcaccagttatctttaagaacggtcagtttaggggctggtgcaaaggatgagttgcacattgttgaagcagaggcaatgaattacgaaggcagtccaattaaagtaacactggcaactttgaaaatgtctgtacagccaacggtttcccttgggggctttgaaataacaccaccagtggtcttaaggttgaagtgtggttcagggccagtgcatattagtggacagcacttagtagctgtggaggaagatgcagagtcagaagatgaagaggaggaggatgtgaaactcttaagtatatctggaaagcggtctgcccctggaggtggtagcaaggttccacagaaaaaagtaaaacttgctgctgatgaagatga

SEQ ID NO: 262934 - DNA, 253 bp, Homo sapiens
agtgcatattagtggacagcacttagtagctgtggaggaagatgcagagtcagaagatgaagaggatcgttcagaagaccacctcagtgcatattagtggacagcacttagtagctgtggaggaagatgcagagtcagaagatgaagaggaggaggatgtgaaactcttaagtatatctggaaagcggtctgcccctggaggtggtagcaaggttccacagaaaaaagtaaaacttgctgctgatgaagatga

SEQ ID NO: 262935 - DNA, 278 bp, Homo sapiens
gtccccatccactgtggcctttcttccctttgctctttcaattcccagtttatttcctgtagagcagtttcaccctcttcaccaatcttgtttatttccttgtttattgtgcctcctttaccagaacgttcaccctctgagggcctgggccaggtctgtctgttcacagctctagtgctcagagaagtcactgcataaataaacaaatactttgctcagaaaattgtggatatgtaaatgaaataggtctgaataaatgaattaaatacaaagcatat

SEQ ID NO: 262936 - DNA, 1513 bp, Homo sapiens
tgaggctgcatggttctgcaggaatccccaccttggagagagcaacccaaaaacaatcgggatatacttagaaatcactgtggggcaagtttcaagaagacttacccctacaatgtctaggcagtcctgaggaatcctgcagatcttttgcatccttggggattttgtggtttattcctgcggctctgcttgacgttacttcaggctggctcacatctgtaccctcctgggaacatgggattatctcatggatcccacagagaagacaggcaacagtccaaagccaacacacttccatggaaatcttcttctccaacaagacacagggacttgttgctaggcaatggtgacatgtattgtgatgctagccagagctcagaatcaggccttgtgccctgagactagcacatgcacatttgtgagggaggcttaggtactgtgctgtcagagctgtcaccctatctaagcacagaaaaatggtacaggcagagcaagcctggtatcaaaaaaaaaggctgcctgcaaacctccacttcaggaccctaaaactgtcaaactgatggactctccagtccatcttggtgatcgggtcatgccagaggcagaagctttatgttactgtgaggtggtcacaggaaactgctcttgtgactccattcaggaaagacctatgtgcaagaatcgggtccagcggggattggcatataatctggtgtgttgttgagggttcttttggtgataaaataatacctcagatcccagagttgggtgttagtgaaagatgtccaggttcttgacctcacttcctccctttattctgagcctcacagggctctctgggaaaagcaggaaccaagacaaaggcaattccaagttggagtggtgttcttgtacctcggattggcctctcactagtgcatatgagtatagacagtgtctcagaggctgtctgtggtgatgacaagcctttaaatggtgtccagtagtgctgttgatgggcactgtggattccctgtgaaagcaacagaaaatcaaggctcaccagagatcaagcggtcttgtgctggagcccaagtaatgttcaatgattcctgtcagaggacccaaaaccatcctccaaagtgcaaacatcctcaacccccaaaaagagacaacaacccaaaacctggagtgcagccagaatagccaatcttttttatggtctctcaaatccctggccacttaataatctatggtgaaaagcagtccaatctggcaacatcccagtgaaagagcccctccacaataagaaggccatgcagatgacatgaaacagaggctagattaccaggaaaatgaagacactgctgcctgtttctcatcctgcaggaatcacgcaggcctctgatagaagtggaagaataagagttttcttctggatggctttaatgggaatttatggttttaaaactatcaaagcgtcccactcattaaaacatgacaatgtttagaataaaacactcacaaatggatt

SEQ ID NO: 262937 - DNA, 417 bp, Homo sapiens
tttccaccttagcttcccaaagtgctaggattataagcatgagccactgtgcctggctcaacctgtcttttgattcattcatctttcactgagtatttactaaatagcagctatatgccagacactatactaaatgtaaggaatccaaaggttagacacttacattacttctcttcaagaagcaggagagtgagcacttacaatagtgtaataattaccatactagagatacaccgtgaactacaaagaggatagctatccctgaggtgcacctgcaaaaatatcacagagtaggcttgcttgagctgagaaggtcaggtgggagctgaaagggggtgacattttaggcaaagaaacggtgaaaaaaaatagcatcagagaataacattctaagaatagcaactgctctgagtttga

SEQ ID NO: 262938 - DNA, 382 bp, Homo sapiens
tctgtgcattgctctctccgatgaggaaaacgtggagttctagacccccagagcaaactcactccacttgcgcttctctcctaagtcccgaaggcctaccagattctgtcccctggggacagtcccaactcactgcaacctaaaaatggtttccacatgtttataaccatgggataaggaaggccttcttaagaaaggcacaaaaacaagccaggaagataaaaggattaaaaacccaggcaacatagcaactcacaattcagaacaatgaaagatataggcaaagttaaaaagacaagtgacatattaaaatatctgaagcaggtattacaagcaaagaactaatattcagtataccagcaatccctacaattcaataaga

SEQ ID NO: 262939 - DNA, 414 bp, Homo sapiens
ctttgaataccacataaatatatgttaacccttgaatgtgacagaagccagtccccatctgtgatatttcaaatgacagactagaatcacttttcatccccactgcagaagatagctatcatatttatttcaacaatgggaacttgttttcttattttgagggccagccacattcaattatagatctttcatcagtagccatacctttactacaaccttggtttttcttatcacaaattattgaataatacctgtaatagtttaggcaaacgacaactgtaataataaataaaatttacagaattgattcttcatactgcatggttcttagattagaccagaagtcaaggtgaacaaagagtgcatataatctaataaattattgatttatttcttgttaaaattttagataag

SEQ ID NO: 262940 - DNA, 564 bp, Homo sapiens
ctgagtgacctcaggcaagtcacttatctctctctgcctcagttgccccctccataaaatgggcacaacaatactcacctcataaattgttctggggtgcatatggtattatacacataaagagcttagtagtagtgcccacagtaatctcccaataaatgttatgtattatttcattatcacaattagcattctgttagaacacattccaaaggattatccacattaagcattgttctagagctttgttttattggaaactgcaatgaaaaggccaccagctggagtcttagagaccttttgtttatccaaagagcctttataattaatctttatagtgagattgttatataaaagtgccaggtactagctcctagtaacacaagggctgaaatggatttcaaataaggcagtgacttgtccaaggcccatggcttgttggtctcagagctttcagaaccttaccttctatcagaagacacagtactgggtacagcacagccacctttagagcactctgccttggtccaaagcaaccacagacagacttctgttagaacactg

SEQ ID NO: 262941 - DNA, 349 bp, Homo sapiens
tcagtgatgctttgaaaatgcatacttggtattactgttttaccaaatgcagcttagaaaaatgcccaaagcagaaaaaggcttcttttccctttaataacatcatcttctatatattttaaacaggatttttaactgacaaaatggtccttttttaagtccaagcaattaatcagaatcaacagttttctaatttagtgtcatcagaatttgttagattaaattgcagaatttcatctcaccatttctgtacttgaagacatttaggatgaaattattaggaacattttaatgactcataagaggtccttaagaaactgattaaatcatgccaactctgagctaaaaa

SEQ ID NO: 262942 - DNA, 436 bp, Homo sapiens
gtcacatgcccagagccacggcactctcctcaccaccgtatcctgtagccagagtaaaagtgacaagcctaaagccaagttgctgctcttcaggtttctcccctgcagatagcagaaggctcgtgtccagccgtccggttagccatgtcccacaggtctgccagggcagacgtcaacagagccctgtccacttaacaacctcagctgtgggtttttgaagcttgttctgtgctgttatccatcacggcctttctgtggctccgcacatactccctgattctatctgactcacatagttccagatagtatcttcagttcttgttgtagatgatgtgtcatagaacgtcatcagccatcggtctggcctagccccaatctgttaaaacacacggtaggagagactttggtgaggtgacccagctgcagaagttaacta

SEQ ID NO: 262943 - DNA, 448 bp, Homo sapiens
ccaggcaggaaactgaaacccccagttaaagctgggaccctgaaagagcaacagccttagtgaaagaggggaaaccataaaaaaaccccacccaggtggtgaaaggaagaagcaaggaagtctgaatgcctaggcttgtgagatcaggagattgttgaaaattctgaatcctgggcctgccccttatgtcaattttagaacatttctcatgtgaataatgagtgctcttcctgtatggtctggaaaaccaccactcccaccaaatccccagccaagaaggttctaaaaagtggtctcagatccactgtccacaggtttgctctggagagacatatgatgcaggcaacatggaactctacagccaccctcaccctataaaaactccaaaagatgatttcagtcaaacctgcaacccatgtaactaataaaatactattatccagaatat

SEQ ID NO: 262944 - DNA, 242 bp, Homo sapiens
gcttccttggtatgtgggggaaaactgaaatgtgacacatttgctcacaaaagcattctatgttgtcagattatagtaagagaaactgggtttgttttttcctatatccttatcacaaataaatacttctccaaaatagacacacaaatggccaatatgcacatgaaaagatgctcaacatcattaggcatcaaaactgcagtaagatactacttcatgactgggtgcagtggctcacacct

SEQ ID NO: 262945 - DNA, 1211 bp, Homo sapiens
ctttgagagcaggagcaatatcttcaatgtcttcttgaatctgggcaggctcagtcactgccttgaccaagagaatgatgataatttgagaaaaaatttccaaaaggactgcatataaacattaaacttcagggtcctgaaagtccaggagatggagaggctgttctagactgaaggagacaagaaacaggacaagtgggtgcaacttgtgaccctcggccgattcctgatgctctgagggattgctccgcagtaagcaggtcacacaaacctacccccaaaggccaagggagctgagaggctgaaaaaagaggctgacaaatggagtttctccaaaagaaacatttactagaaacttatgaacaaagtagtatctcgggcagccacaagacagtggatccctgcacctgccccccagaaagcatcctttatatagcaagctttttggtaaaaacatgtgcagctggtgatgtcttagactttcttgcaaaattcatgactgctggggaagttaggtagcatctttctgaggggttatcaatgctacaggccttgtgtgaagaccttggtatgcaggagtctaacatcggccaccacagtgattttgcttcgagatgacaccactcttgccaggcaacaggctcctttccttcagagacattgcagggacacctggtgacccttgaatgggggtctctgggaaggtgcactattcatgcaaccttttatctaagcttgaaattgtttcaagctaaattaacttacaaatgttgatcatagtaaggaaggagaccaccacttctcctactgccctcctctccccctgtcttgcctagtttataagacaggagaaatgggagaaaacaaaaagtgagaaagaaacagaagataaatagccagatgaccttggtgccatcacctggccctggtgttaataatatcaacccctaacctaaactacttgtgttatctgtaaattccagacattgtataagaaagcattgtaaaactttctgttctgttagctgatgcttgtagcctccagtcatgttctccatgctttcccagtctatcataataaccctttcacgtggaccctttagggttgtaagcccttaaaagggccagtaatttctttttcgaggagctcagctcttaagacacaagtctgccaaagctcccagccaaataaaaccccttccttctttaac

SEQ ID NO: 262946 - DNA, 349 bp, Homo sapiens
ctgagttattttccttaagtcttactgtccaggcaaaccaagagtgcacttggggaacttgacttgaaagctcttgcccttaaccttggcactatactgtccccccaagctaatgttccggaaatattagtggagaaatgattaaatcctacagtcccttacagatagcaccacagaacctgtggtgtttacaaatgctttcaagtcatcatttcctttacgatcatcatactcttgattttaaaggacagtctaaaggcactccaggccgagtcccctaaccttacccatctggaaattgaaaacaagcaccatcagtctccaaggagtcctgagctgggggtgcttt

SEQ ID NO: 262947 - DNA, 770 bp, Homo sapiens
aacaggggctgcgtgtggaggggtggacgatgttatttgaaaagttacaggacagattttctgtgttaatggacatgagccatacattgagagggctgctggctactgaaagaaatataaaattttaaaatttctgaaatcatgcagttaacatctgcacacttcactatattttaagtttttgttaatataaaagaataagaaaacagaaaagtattactgttaaacaataatagagaaatgtatactttatttacaaatttctccctctagctgatcatacagttgaccagttcagggtgcccgctgctggttggatgccaggcggaatgtcagggtgttctctggtgtctgttgtggctgtgggatccacggttactgggcggagccctgtggtggctgtggtgccatggaggggctgcgatcttctgtggagctggaccctgagctgactccagggaagctggatgaggagatggtggggctgccaccccatgacgcgagtcctcaagtcactttccacagcctcgatgggaagacagtggtgtgtccacacttcatgggcttactgctgggtctcttacttttattgactttgtctgttaggaaccaactctgtgtaagaggtgaaaggcagcttgcagaaacactgcattcacaggtgaaggagaaatcccagctcattggcaagaaaacagattgtagagactgaggcatctttaaaagatgtcagggtacagaaaaagtctttcaacacccccggctttgta

SEQ ID NO: 262948 - DNA, 336 bp, Homo sapiens
aagattggtcaaagcaaaggataatgaaagcataaagatttagggggaagagtcctctataaaactaagacttaaactttgttatcaacttgaatgtgaagatagaataatctagaaagtgaatgagaattataaataaaaggacaaatcatatatctcatggttgagaaatacaatgagataaattgtatatctcatctcatggagggtcataatgaaagaagtaagagagattgcccttggatagaacctttcggcagacatttcataatggattatcatatttttgctaaactggtaagaatggacttttcaccacattatgaaaaaacactt

SEQ ID NO: 262949 - DNA, 579 bp, Homo sapiens
gttgaaatgaggaaaactagacgcctggaagggaaaataccaccctaaatcatatgcttattctaaatggaatattaaattaaattcttcacaatgaaggtattcctgacagagcagctgtcagtcactccctgttcagacaccacattgtgggaacctcgtcactaccacattgcagaaggctggtatccctggtaaagatgatgtatatcatgtaaaccccatcatccagatcaaagtctgcttctttcatggaagccaatacatgtcaaacctcattccaatcaaattgtctggaaatgaattcaagatgaatatgtcacagaataacgtgacagtggaattgcagaaggtcaggggtggttgtttcaatgagagaatcgtcaaatattaattctggaacgtccagatgagtaggcattgagggggattagctggctgctggtgggacgttgtgtcattgatttgtgtgcaaatgtattgaacactaaggagttctaagtttcatttgaactcaagaaactccccccaaactctcaacccaacataaacaaaagacaaaacaaaacttcctactta

SEQ ID NO: 262950 - DNA, 463 bp, Homo sapiens
aacgtgttactctggggatagcctaatcactacgaaattaattttctgagctcctgagaaacttgccttcctaaaaaccaagatggatgcaaatgaacaaggactgagcagcccgaagcgggtccatgggggtggcagcggcacccctaactctggccgggtgaggggccccgtccaggcagcctcagtccaggctctaagcaaacgccgtggcccacaggtgctgcttctgggatggcgtcgggacactcctgcgggggtagcagagagctcggcccaccgactagccgctctgcccgctgacctgagtgcttctccgacctccgcagtggacgttcacctctaaaccttccttcatgtaaatgtttggttcccatagctgaggcaaatgcccttgaaaatgcttccatcaggaaacattcagacacctaaatatatactttgtatcaagtttaatgaacac

SEQ ID NO: 262951 - DNA, 694 bp, Homo sapiens
aaaagatttagtgtttcttttggaatccgaagacttttctggatttgttgctagcacagttgcccaggaagaagtgtgactagccagtgggtgtttgggggtgaaatccagcctgtgccctgctaactactaacactgtacctcagtgtagagctgcagctaatagggaaagcactgtatctgctaaatggagctctgtctcctgagtcattaagccagttagcactgtcctacagaagcttggaagtgccagttagtagacttttccatttagtaaagtgctgaataaataaacttttactacaactggtttctttaaagtgtttgtacttctaatgatattctagaacagttttgaatttttttctctttgtcatcacatagatgcttgtaaaaccagccgaatatcaggaataaactatttataacataggttgacatggtactatttgaaatgttttgtggactgcagatgtttcataaggattctttattctttttccttccattccttgatgttatggaatatgtcagaaggcttttttaaggtcaccatatatctaacctcttgaaaacgtatactcttatttcaaagctctaagaaactggtacctggatcactagacccaaatttaacttcagcttgctcagtttacatcttaaactccatttaaaaattgttattgtgctatta

SEQ ID NO: 262952 - DNA, 179 bp, Homo sapiens
atacctctttctctacattttaccaacaacgtacattagtcaattttttgtctttgatattctgatagaaaataatgtcatgctactgctttaatttgcttttattgttttactccacatgggttgaacaccttttcatatgtttataagaaaatatatatatatattcatgtaacata

SEQ ID NO: 262953 - DNA, 450 bp, Homo sapiens
gctaaacgtaggtaaatgtggtcattccttctaagaatttttatgtctctcacaccaaatccacattcgactgttgttttcattctctgctgtgctatctctatggaaacttttcctattgacattgaatgctagtgtaatcattttgaagacatttaaaacagggattgaaacacctatattatcaacagtgcatataactcaattgtgacaatattgtcagcagctgcaaccaagttcttttgagcacaggcagagacaagcttgtgattactgcctggccaacaatgattacgagatgtatcctgatttggaagatttttaaatttgaaaagagtgtgttttagaatggagttaaatgcactttgtttatttgaggtgaatcaactgaattttgcagatgcaaaaactgagactcagtgtagttaatcattttgtttaaagtcgcag

SEQ ID NO: 262954 - DNA, 545 bp, Homo sapiens
gcgagaatcatgtacattccctgtctgcagatctcattctcctgcctcaacatacagtgatgttaatgtgtacaaatttaactgatttgttccaagtaaggactatattcataagcacagaagtcttgatagttagaggtgataattatttgaaaagacaatcttattcaacatagctttttaacaatttaagattctgtcaatttgttttttctctgaatgttcattcttattttcttaagattgccattttctatttccatagtgatttccgtatcttctagttactttcagccttcattttaatgataataactgccaccatttattgggtagttatgtatttaaggcactgctaaatgctttatgtgcattatctgtgtgagttggtattattatttctgttttttccctaagaaaatttgtgtggatattgcataaattgcactggttttcactactagtaaacaaaagaaccagaattcaatctacaatttatttgattccaaagcccaaattttagtctcagtactactttagtaata

SEQ ID NO: 262955 - DNA, 682 bp, Homo sapiens
gatgaaaaaatattgtgtgattaataattatgctttaattaattttaaaggatataatttcagtacttctaattctcccatcagcagttataacaaaggattagtgaataaataccatagactgttttgcctagaattgaatccaatctgtctattaaactttgcttttattcaagtgcaaaatgctaaaacacataataactgcagtgacagccactgtggatcctcagaggtaaaagtagtcttgggacataaatcctgcaagtaatattgtttttacaggtttagaaaaccatttagctgggtttcaaacctcacagtgtgagcagtgggactctcatcaaactatagcatgtgcttcagtaccatttgtagactgactcattcccattgccttaagttgccatcagcaaaatgccagggactctatttcttgctccttagctcctcgttcttgcctgtctttccacgagggaggattttctagcaggagctcaagctgtgcttttaatgaaacacatccacacacactgtcctgttgtccacattaagcagagctccctgaatagctcatgaacaaaagcatctatgactaactgttgctctgtgtcctcctagcctctgaggagtctctagttcacaaggacagaggagatggagagaggccagtcaacgtgagggt

SEQ ID NO: 262956 - DNA, 1005 bp, Homo sapiens
attacagagatgcagttgtaggggattaatgaacaggctgtttggttaaaataagtagactatagctaattatttgatctatgtaatgttagttggtggttcatgaggaccctggttaaaaagcacgcttcaaactcttcgtattatcctcctggtagtcaaaatagtagtctccctgctgcattgtattctcaaaagttagaaatgttttcatgcaatcacctgtagaatataaaattgtctctcactaactggaatgacagaaactcaaagacatatgtaactatgatgaaaccataacctaggaatgacataagaacaaagaccctaaataatggaaacagtggtactaaggccctgagttttggttacactgtgcactgttgaaaattttttgaacaaaattattagaggccatcattctggactgagcttgtgcactaggtccaaacagacaaaatcaaactgaaaatttaaggaaataggtagattctgtaggttttgtttttcttctgtaaacagcagatcttaacacaaggggtttccctctactcaaacctttaaaaataataataaaataataacctgaatttcttgattccactttacaaaacccatagttctgctatttcacagtggaatctgagactaagtacatttttgatggtgacagtgttatcaatgtctaaagttttggtctatcaaaatttagaagatgaccaaaaaaggagaaattgtttaattataccctaaatctaccccctttcatgtttaagtttggtcaataagtttttttgttgttttgttttgtttacatagtaaactgaaacctaactgaatgtgtaaatagactgtactcatttttgtaccaacaactgtgttttggccaataaaaggatgtcaaatgttcaaaccatgtttaaataaggaaaatcccaagctgtaatcaatctagctgttcctgtatttcacttctattttctgatgtcaccttgcttcttctgt

SEQ ID NO: 262957 - DNA, 988 bp, Homo sapiens
acttgctggaggttcattgtgaaaaagtttgagaatcaaaatgtatgtggtggttgggtggggggatcttaggggccccacacaatttcaaaagttttaccttcaggagtcctactgtgttcctgagtgaagattggagagaaatcttctcttgcttcttgcacagggagggaaaaagtagccattttgaaattctgcttccaaagcatactgttcttctaacaaggaatgtcctcagagaaactattttttcagaacctaacttagtaaggttttacaagaaactaatggacttgacctaggggaaatgaaatatccaactccagtcctctctaggtttcctgtcctactgaaggggtcaaagcagaataaaattgggaagcacatgttagggtcacagagcaggggcacatgctaactaaatgactgagacctaatcatatgactataaaatacttcctctccttgtctccacacaccttatcactacacaaatagggattttctataatgggagttctatataaaccagaagaacagtacatcataggtgttatttaagaagtctctagggaaactcaaagacaacagaggaggtggaaacaatggcactagttgaaaattttacacctgacacctatggctacagcagacagtaaacacagactaacccctagccagggaaacataaaacctcacattaaaggccaaatacccccagttcttttatctcagtacatcatgtttggctttcaacaaaacaattataaggcatactaaaagacaaaatcacagtttgaaaagagaaagcaaccatcaagatttgactccaatatggaagagatattgaaattatcagactgagaattgaaaccatttgtgattaatatagtaagggctataatggaaaaactggtcaacatgcaagtacagatctgtaatgtaagaagacagatgggaacttcaagaatcaaaagcaaatgctaga

SEQ ID NO: 262958 - DNA, 424 bp, Homo sapiens
cgacctcacctgcctcccctagggaaggcgatcctaatatcatttctcttttacataaaggagagtgaggcttagaggcgccagctgaggtgtcagtcacatcctgaaggaagacttctcttatccctgaagggttcacaaagaaggcgaagcaacgaagttacagcagaatttgcaaaaatctatccacgtttctaccccagtccaaagctcgccatcaaaactcatctcaggagagctatgattggtggtgcagggtgaatgtcacatttagatttcagcatttgaggcttccagccgtactggcagaactgagaggccttgctcatgcgacttgaaacttaagcgctgtttccagaccagggtgcttgagtgcactaagaattaaagtctttgatgaattctataattagcttatcaacag

SEQ ID NO: 262959 - DNA, 522 bp, Homo sapiens
gatgaggttaaagctattccagacatcttatttcatgaagaatggtatgacagagaaggccctaaagcctggtgctcagagaaactggtaatggccccaaaggatgactacactgtggccagtgatgcatggcagagatttgactgttggaggccaaaagattgagggtcgtgattaacttagtataccactggaggctatatgagtaaacagcaaactgttctcataaatgcggaatgttggcaaactgacaaactgtgtatgccacccagaaggagtgctgagggcagtcacaccccaagtgcaacgtttcttgtgattaggtacatctgaagcctcttggtaataatatgaacctgtgatcaattaagcagccgaccaattgttactgccgcctccttgctcttgttacccaataaatacaaagggctgtagaagctccgggaggagggggctgcccttgctcactagaagcagggagctctcttcttcttcccctggccctttctttaaaacagattt

SEQ ID NO: 262960 - DNA, 440 bp, Homo sapiens
ggctctctgtttcattcagtccttcataagcatgcagcctgacctggagaaactgacagtgtaaaatgcatggagcagctcctgtccctctctttcctacccttgagcactctctaagcagtagctggccgatacagtcgcccaggaagtctccctgtagctcggccgtcagtcattaccctcactggcagcacgggacagagaacgggatatgttctccccttttattttgtgtggtgagacttggaaaactctgcgcctagaaaaatccatttctgaaggttgctgctattgagtagtgcagtgagactgggtttgaaggtattggactcttacataggctatgtgaacgtgggcaaattgcatcttctctttgagaagtctgagctcaagtcttgctttgagttatttgtgtactaacctttgaccttgctgacaaa

SEQ ID NO: 262961 - DNA, 346 bp, Homo sapiens
aatgggttatggaggcttgatctttctcccactcacatatttggtgaggtcatgtcaaagttagcccagctgtattcgcaaatttcaattcataaatgtctcaatagaggttgattgttttgctttgatattctggggggatttgctatttgctaatgacactcgatgtctaattatctttgtgcgaattaaatttaatattaggaccagttggtgaaatactgttttaagacaagatgagaactttctctccaccccacatatttttctttacaaatgtatcattgtttttgtaccatttctgtgttaaatacaaaagtagtatcagccacataaggaaatttga

SEQ ID NO: 262962 - DNA, 419 bp, Homo sapiens
tttttttcactcacacagggagcaggaagttttgtgcacaaggaatcataaagtctttcaaatgtgttggtaacttgggaaaagatggaaatgtttatttccctggagattatgtccttaaacctggttgcactgtgacttgaaagaggatcctaaaatgtcacaggaacaaaaggttgtgattgtcagagagtagttggaaaggtctggattcggtggcagtgagtacagacagaaggcctggaaagaggtagtatatattgggttcttggtgagattaaggcagggctgacttcggcttcttcaatagtgggatggggaagttggggaactataaaatgcagaactgctggattgttgtttttgagatgatagtgaagagtattaagattgtgttggagctatagtttaaaaaaaaa

SEQ ID NO: 262963 - DNA, 665 bp, Homo sapiens
caagagcactgagaccccagccaacagaactatctaattcagtattattaagatctgaaagatcagtggcaaagcattggctattttctgcaccttgactatgcaaaaattaaaatttggccaggattgttgttcgtagcaggagtcatgaatggttttgtggtgttttatgacatcttaagggccacattgaaccttgttcttatattatgatctgctaagcaattcaccaaccatacttctccacctcagtcctgactttagcctccttaggagaatattggagacatgattggtagtaatggcccatttcttgacatttttgaccagctatagagcccatgccagatacacatatgtatgtgtgtgtgtgtatatgtagtgtgtgtgtgtgtatatgtagtgtgtgtgtgtgtgttgacttgcttaaagatgttacagggaagattatgtttaagaacagttagagggaaatgtctttttgagtttgtttcctaaaccctaagccattcagctgaccttattatgtctctttacctcatagtgtaaaagtcaaaatgtgtgtgtataatgggaaaggagagaggcgggaggagaagatgaagggattaatatccatgagccttttagtaaggacctgccttttactagagactgagcactcc

SEQ ID NO: 262964 - DNA, 747 bp, Homo sapiens
caatggaaatttattgtttcacagttctggaggctaccagcctaagatcaaggagtcacctgggttggttgcctccggaagctctgagggagaatccattccttgcctctctccttgcttttggtggttgctggcaatccttggcttacggatacatcactccaatctctgcctcagagagaatcctgtgattctctctgtgtcctgtgtcgtcatatggccttataaagataaccagtcattggatttaaggcccaccctaatccaatatgacctcatcttaattcgattatatctgcaaagaccctgtttccagataaggtcaaattcacaggtcctgggggttagaatttcaagatacctttttgaggacacaatttaacacacaatggtataattttagaattttgattttgcttgtttcatctttcctaaattagttttttaaaattgtctctcctataactcgtcttaaaaatgtgagaacaagaggtgactataaagcatcattattaaaccttagatatgtgttcaatcaagtattcctattttacttataatcttataaaagagcagtgctccaaatttaccctaatgattcactgatattcaacatgaaaactcactgtagtaatgagttgggtcctcagatcaggaaaatatatatatggtttttaaaatttataattactaaatcaaccaataacatttataattttaaatatattcaataaatatctaatgaat

SEQ ID NO: 262965 - DNA, 432 bp, Homo sapiens
agtgaatgtgacattagtctctgtgatgcccctttctaacagcacttcatagatggtactgattctgttatgtcactaatctcatgtgaccctgtgttcttgtattcttcaatacctcccactagaccgtaaaacttattgaaagcagggattcttgtatgcattttaaaatcttccattgtgcctaggtgctcaataacattggtcgaattactgaattgattatcaagctctgatgtggtatagcctccggttgctgtcccttgcacatgaagataaagttattgactcactgtcagtaagacacatgccttggagctgtgtttttattttcttttaatagtggatttagttttgtgctaatgataatgatgctgttgataataataataataataataataataataataataaattactttcaactgg

SEQ ID NO: 262966 - DNA, 732 bp, Homo sapiens
gaataagctaggtgaactggaaaaactaccccaggcagagaaagaaccatgcagacacagagtgggggagaagtgaggagaataacagacagtgagaggaggaaggagaaggaagaagtagaaggtaaaaggaagaagagaggaagagagagaactcacctggtgctttctagaaagagaaaaaagtttaatgcaaggtaggttagggatcacagacatagatgagactggagaaataaggggagggaatatgggcagatcacacagtgctttcttaaggttaaaaaattcataaaaacaggaaatcccttaaacagttttgagatgggatcagatttgttttatgaagtttaccacagttgtgtttagaaaagattgcagaggggtaagatgggaggtgatattgtttggctctgtgtccccagtcaaatctcatgttgaattgtaatccccagttgggggagggacttggtgggaggtgattggatcataggggcggatttccctcttgctgttctcatgatagtgagttctcatgagatctggtcatttaaaagtgtgtagcgcttcctcatttactatttttctctctcctgctccaccatggtaagccgtgcttgcttcccattcattttctgccttgactgtaagtttcctgaggcctcccatccatgcttctggtacagcctacagaactgtcaattaaacctcttttcttcatgaattacctag

SEQ ID NO: 262967 - DNA, 366 bp, Homo sapiens
agtttcttaaaagtgtacacctgccatatggtctagctattacactcctaggtatttacccaagacaagtgcaaatatatgttcatataaagatttctacacaaatgttcatagcatctaaacaacccaaatgtctatcagtaggtgaatggataaacaatttgtggtatatccatacaatgaaacactacttagcaataaaaaggaataactgattgataaatgtaacaatgtggataaacctcaaattaattatgtggagagaaagcagataataaatagtgacagaaaggagatcagtggttgcttgtgaatagagtggggtagggtaggctgggaggaaaggattacaaagacacatgggaa

SEQ ID NO: 262968 - DNA, 320 bp, Homo sapiens
gtattttttagtccttgtctgattcccttttctacactgtcacactcaattaacatctaatagaagctttttcttgtaggattggagaaattttaagagtataattcaaactgcagggcaattgtagaattgcggagtagaaagacccttgaaagatcatttgtcctgtggttttcaaatgtgtctggtagccaaacgtttttaaacatgaaatgtcatataaaacagatgaaggcaataattttacaatataaatttctcagtttaaaattatttacttacttgcatgttctatttaaataaaggatggtttaattatc

SEQ ID NO: 262969 - DNA, 357 bp, Homo sapiens
aaaacaccttgggctttctatcacaaaaagcccatggtgaaaaagaataaaattaagtctatacaagttcttgacagtaattgagttgcctactaaaacgagaactaccgtcatcagaagaatattctagaatccagaatatacaacacattatctataatgtccagtgttcaattaaaaaaagaagacatacaaagatacaggaaactgtaatcttaatgaagaaaaagaaactatagacggaacctgagatgttggatgttgttgatcttagcaaacagactttaaagcaccttaaacactgaattagtgaaaaatgtggtttaaaggagagaataaatagggaatctcagcaga

SEQ ID NO: 262970 - DNA, 414 bp, Homo sapiens
caaatgatatcaaatatatcatttgattacattacattacattaagatagagtaatcttaatgtaatcttaattacatgaagatagagtctatctaagtgttttaactgtaatgccctagtaagtaaagttttcttatggtttaatttggttatttctgttttgatagtcctttttctggcaccctaaggatgtgccaggaagagtctctaagagaataagtaacttacccaaggtcaaacacactgttataaaggaagccaggattcaaacctaatcctgatccaaagcttatgttcttccctaaacactatacttttcaaggtcacatgacaatctgattttcaaagtcatgatcagtcactttatccatagtcagtggaatcttaattcgtaggtctctgcaaagtaggca

SEQ ID NO: 262971 - DNA, 824 bp, Homo sapiens
gcctttaggttcccattcattagttaactctggctatacctgagaagacagagtaaccagcctggtggttgagtgtacactgtagagaaatacagagccagccttagtcccagctccaccacttgctagctgtggggctctgagctagttaattcaatttgtccagtcctcagattttccactagtaatttgggattaaataacccgataagaaaatgaaccaaggacacagagaggcaattcatagaataaaaaatacaagtggacaataaatatatgaaaatgtgttcaagctctctagctgttagagaactgcaaattaaaataaggcctcattcctggcaaatgttacaagattgataatgcccagcactggcacggaggcgttggcacacactattggtgggaacgtaaattggctcggtcacattaaaagatcatttctcagtctctataaagattttatgtgcaaaccctttgacttcacaatcccacttctcaaaatctatcctggagaaataattgcatgttatggatatagtggtcagtgtaaaattgctggtaatcttaaataaaaggacagaaaaagaaaaaggaaagaatagcagaaagcccaagtcatgagcatgtaattgcaggtagagctacaggttaaaataataaatacctgaattcaggtcaggagcagtaaagagttgatggcttgtgagagatattgacaagaatcatcaggattgggtgctagagcacataatattatctgtctattattaatatactagtatcatttcaatcagcttcatttcccttgaggctaggttcta

SEQ ID NO: 262972 - DNA, 575 bp, Homo sapiens
gagaggctgttctttacaaatttctgaatttcctcagatgagaaattcccgtttccaaacttcctcagaagtgtcctaaccatactaaaggcaaattccacagagggtgtgagtgtcctgggaagggccaggagtaatgacagtgacagtggccatttcaggtcagaatcccaggaaaatacatggagctggggcaaatagaagagcagtcagtaaggaaaagatctgggaataatgatgccagggaaactgtgctttcctaccacccatattttcttgaaatcataaattgttaaaccaagataaaactgtagtgatccccatgctcatctctttcacttagcaaatatagaatcaagctcagtggggtaaagtaatcttctgaatatcacacagctagtaagtggtggagtgcagactagaaactacttcctgggaatcctgagttaccacagttacgacaacagtttgcagcctggctacattatactggcctagaccacgggttggtatccccttggaccaaatcctgccacctgcattcttttgtaaataaagttttactggaacacaaa

SEQ ID NO: 262973 - DNA, 455 bp, Homo sapiens
agctgaggcaagtagatcgcctgaccccaggagttcaaggttgcagtgagctatgttcccaccaccgcacttcagccagttaaggggacagagcgagaccctgtctcaaaaaaattttgttttgaaatgaatttatgtatgtttggttatttctgaaagcagttcaggcctacagccataccaccctgaatgcacctgatgttgtctgaaagcaattcaggttttcaggattaaaatttttatgctactaggtttgtaacctatatttaaaagtagaacatttaaaacattttagtagtatatagcactgaaaagtggctttttagcgtagacagttgtttttcaagaaactattttgtaatcctagctacttgggagcctgaggtgggaggatcgcttgagctcagaatccagtctgggcaacaaaggagaattccagcctctttaaaaaaaaa

SEQ ID NO: 262974 - DNA, 836 bp, Homo sapiens
ggcggttggcaagaacaagcgccttacgaaaggcggcaaaaagggagccaagaagaaagtggttgatccattttctaagaaagattggtatgatgtgaaagcacctgctatgttcaatataagaaatattggaaagacgctcgtcaccaggacccaaggaaccaaaattgcatctgatggtctcaagggtcgtgtgtttgaagtgagtcttgctgatttgcagaatgatgaagttgcatttagaaaattcaagctgattactgaagatgttcagggtaaaaactgcctgactaacttccatggcatggatcttacccgtgacaaaatgtgttccatggtcaaaaaatggcagacaatgattgaagctcacgttgatgtcaagactaccgatggttacttgcttcgtctgttctgtgttggttttactaaaaaacgcaacaatcagatacggaagacctcttatgctcagcaccaacaggtccgccaaatccggaagaagatgatggaaatcatgacccgagaggtgcagacaaatgacttgaaagaagtggtcaataaattgattccagacagcattggaaaagacatagaaaaggcttgccaatctatttatcctctccatgatgtcttcgttagaaaagttaaaaatgctgaaaaagcccagtttgaattgggaaggctcatggagcttcatggtgaaggcagtagttctggaaaagccactggggacgagacaggtgctaaagttgaacgagctgatggatatgaaccaccagtccaagaatctgtttaaagttcagacttcaaatagtggcaaataaaaagtgctatttgtg

SEQ ID NO: 262975 - DNA, 793 bp, Homo sapiens
  misc_feature (583)..(583): n is a, c, g, or t
ccggaccctgcagccgcagagatgttgatgcctaagaagaaccggattgccatttatgaactcctttttaaggagggagtcatggtggccaagaaggatgtccacatgcctaagcacccggagctggcagacaagaatgcgcccaaccttcgtgtcatgaaggccatgcagtctctcaagtcccgaggctacgtgaaggaacagtttgcctggagacatttctactggtaccttaccaatgagggtatccagtatctctgtgattaccttcatctgccctcggagattgtgcctgccaccttacaccgcagctgtccagagactggcaggccttggcctaaaggtctggagggtgagcgacctgcaagactcacaagaggggaagccaacagagatacctacaaacggagtgctgtgccccctggtgccaacaagaaagccgaggctggggccgggtcagcaaccaaattccagttcagagatggatttggttgtggacgtggtcagccacctcagtaaaattggagaggattattatgcaatgaataaacttacagtcaaaaaaaaaaaagaaagaaaaaanaaaacaacaggctagcagacaaacaataacgacgcgacgcaaaagtaagaggggagggagcacaaagggcgtgataaagagagcacaggagcaaaaaagagacccacacaaagagaatagggaccaaagggagaaaaaacggggaacaccaacagaggaaggagaaaagaagaaaaaagaacgagaaacacggagataagcaccaggaca

SEQ ID NO: 262976 - DNA, 376 bp, Homo sapiens
ccaattgacaaatatattggcaattcaataggggaaagaaaatcttttcagtaaatgatgctggaacaactgcatatctgtatattctgacctgtatatcacaatgtattaaaattttaccagagccaggctcagtggctcatgcttgtaatctcagagctttagggggtccagttggcaggattgcttgaatccaggaatgcaagactagttgggcaatgtagtgagaccctatctttaaaaaaattagccttaagtggactgttaatctaaaaataaaagagaaaattgtaaagttcctagaaggaagcataaagaatatctttgcagtcatggaataggcaatgatctttgatatataaaaagcaccaactat

SEQ ID NO: 262977 - DNA, 428 bp, Homo sapiens
acccatgtccaaattacatataatggatatgactagaagtttgttaggtgtactagacacgaaggtggatatatggagagagaactttgtaaaggcttcctgaagcccaatatgaacatctcatttcccttgatctatcttatcatccctcaacttatcttctcaaaaaacacatgacagtctggcatggcatataatacatttttgcatcgaacgggttgtaatgttgtgttatttgttgtctccaactttgaccgttaaaattagtttatgtcagaaatacacttcaaaacttttgaggattattttctttcatattataattgtttttaataagatgaaggttgtcctttgtgaaattttggaactgaaactgatcacaacttaaaacttgaaatcccaaattaaagtttatttccaggtttaaa

SEQ ID NO: 262978 - DNA, 403 bp, Homo sapiens
ctgtaccccctgaagagtctgatttagtaagtgagagcgagggccatggatttctgtatttggcacatgtcttgagcagttcccatgtaccaatccttgagaacctctaggctagctgaatttaagtataaattgccagtaattggaaagcatattcatatcttctgaaactataaggatactctcattttacttggttaaaaaacaagtgtttcctactgtcctctttacccaggttttaatgtttagtggtgaacagtagttttccctctacatttttttctgaactgataataaatgtatttggctgggagggtgacattgattaaaaaatgtatctcttgaatgtaaatatcagtattacagatgataaaataaattcctccaagaaataattttaaat

SEQ ID NO: 262979 - DNA, 627 bp, Homo sapiens
tatacaccggcactaaaataaacctaatgagcatttctgatacgtaacacctgatgggaagtgaatgaatcagctttgaccactggtgcttggaagaatgacctaacagtgtacataatcaaaatgacatttaaatatatgaaatgatagaaaattaaactgttcataatgagctctccagtgtgcttttctctgacaacttatttctagtactcagtcatggaatggattatctttctacaaacttgggtggggcgggggtggggtgggggagacacaaccacgttcctccttttatttaaacttatctacctttatagaatcaaagcaaacacaaaatctatttgtgatttctattacaggaattttcttcacaaaatgaaagcaccatcaagataaacggagaaatgacatgaaagtaaacaaacgccacatacatttggtaactatccatattttatctttaatatttggcaattactttaataaaaatcatttagtttaccactttctcgggtcttcttgtatcatttggagacataaaggagctgcaattgcaaagcatttaaaagtatatcaattcctaggaaatcctttcatataggaaaaatatgatggtggtaagaa

SEQ ID NO: 262980 - DNA, 506 bp, Homo sapiens
agtccacacgctgtgtgattccattcataccaacgtccagactaggccagtccgtacagacaggatgaattactggttgccggagggtggggaggttgggggagatggggaggaagtgctgatgggtacagggtttctttttgggatgatgaaagtattctaacatggattgtggtaatagttgtgtaattttgtgaatatgctggaaaccattgaattgtatactttaaatgggtaagttgtatggtaagtgaattatatatcatagctgttaaaaatatatacgatattttaattagacatagaagaacatgaatagagactagaaatatatatatgtatatataacaaggtgttaatgattttctactagtagactggtagatttgtactaagttttttctactatatatacttttctgtaatttaggaaaacctccctttcaattttaataacgagggaaaatttatatttaaaatatcaaagaaataaaattagttgcaac

SEQ ID NO: 262981 - DNA, 229 bp, Homo sapiens
gtgtcttcctacaccgtggtattccccacaacacttaccacagggttaggtgcttaagagctggtgaagtcatcaggcaaggtggaagacagacgatgtgcaagaagtgtgtcacagccactcagctggccacacccctgcccatctggtcacgcagcttccttaaatagctgcttctcaggcaggccttgctcaaggccagagtcaagggagcctcagagacaagagt

SEQ ID NO: 262982 - DNA, 355 bp, Homo sapiens
cgagcaccggcggctggcgggagccgtggcaagaatgcggcccgaggtggcgagcagccactgcgccagtgcagctcgggctcagcggggcccgggccgcgggttcgcagcccgcccagtggtgcctgccgggttggccgtgccggccgtgccaggtgcgcggggcccaggccgcccgggcgccctctccccgcacccctcacctttggccgcgctctcgggcttggggagttgccatatcgaagacaccctcagaccccagctctatctgccgccttctgcaagttcgctgcaaagtcccccatagcaggactaggaaggaaccttttacaaaattaaatactcgagtgtcgtt

SEQ ID NO: 262983 - DNA, 124 bp, Homo sapiens
atttgcgtctcaggtctgctacttgctaagcgttccgtctgcgggcatttgcggaaccctcacagcacacctggtgccgtgctgcattccatcctgataagcaggaatgagaccacattcctcc

SEQ ID NO: 262984 - DNA, 363 bp, Homo sapiens
gagtgggtatgtggagtgacctggaaagggagaagcgatatgaatgttgcactactcagcctgcatgatggggtcaagacactttctgctggaggttgacatttgttttagtagtttatgttgatgcaaagatcctgggaaacatgcatgattttgagccttttcacaaggaagggtgatgttaaaagtgagctaacttgagaaactggcttcaaaatctgggccaatttgagcaacaaaataaataatggtagaagggtattgtaacccagagaataaaataaatatccacaagtccttaatgatgatataaatacataagtggggagaagggaaaacttttgtacagaggattccattagt

SEQ ID NO: 262985 - DNA, 433 bp, Homo sapiens
tgctcttgaggttctgcagaggcctaggccgttgctgttgcacctgtggatgctcgcacacctcacaggtcgcaggaactgctgcagatgggcaagcagaaggccagatgagcacgtgctgttggcactgaatagcagagtttccaaagatctttgaacaaagtctagcaaatgagaatgtcatttgcacagaccccacttgcaaggacccctggcagccttgcccaagagcctctgccttttgtcacagggtcccaggagggatggttcaccccatcttcctggagccagtcaccgtgcagctgggtcaggtcaagtttagttgtgaaaatgcttctccggataccagatgtgttgggcagctttccattccctctaacagaatgccttggggccgtcttcaggccaggtatgtttaatagctgttttcatt

SEQ ID NO: 262986 - DNA, 506 bp, Homo sapiens
tctcaaattggatttcattttcatattttaattaagggttgagtggtatatttagttgtccagttttttcattttaagattgttaatgaagctcatctttttgcaagtgttgctttttttcttgtctttgaccattcagtagagattgagtgttgacttgatagatttgtgtaatttttgtaaattttactggttatgcttttacagttgtcaccagtaaatataggcaactctccagcacagtctccatccactttctccaagacatcttataccctgaggagtactgaataacttgcagccttctgtctttttacccttctatgtataccacatgctgctgcttctgcctgttctgttctcccttcttatatacgtctggacaatatatttttatcttttgaaatgcagttcttgagtcatctttttccagatacctttctcacctctcccaatctcaaatatgtgttgatgctcgtgttctcacatagcgatttctgttgtac

SEQ ID NO: 262987 - DNA, 719 bp, Homo sapiens
gtactaattttaaaattagccaggcatggtatcacacacctgtagtccaagctcctcgggaggctgaagcaggaggatcgctggagcccagtagttctaggctggagtatgctgttctgatgcggtgtcttcactaaactcaacatcaatatggtgacctccagggagccagggaccaccaggtttcctaaggacaggtgtactggcccaggtcagaaatggagcaggtcagaactcccatgctgatcagtaatggactcgggtttgtgaatagccactgcactccagcgtgggcaacacagcaagaccctgtctcttaaaaaacagatgtcattatacattaaattcaagatagaaaaaaatagctataaagggtattattcagagaatcggagaacatttgcagatgactgtatattagataatatcatggccaggtgtggtggtgcatgcctataatccagcactttgggaggctgaggcaggcagatcacctgaggtcgggagttcgagaccagcctgaccaacatggaaaaatcccgtctctactaaaaatacaaaattagctgggcatggtggtgcatgcctataatcccagctacttgggaggctgaggcaggagaatcacttgaacccgggaggcggaagttgcagtgagccgagatggcgccatcgcactccagcctgggcaacaagagcgaaactccatttcaaaaaaa

SEQ ID NO: 262988 - DNA, 432 bp, Homo sapiens
catagtaattttcttaaatatatatatatatattttatccactagagctacttagtgaagtttctacagatgaaatacaaagacatctagaatttgatttaaaatattccaggttgggtgcagtggttcgcacctgtaaccccaacactttgggaggtcaaggtaggaggatggcttgaggccaagaattcgagaccagcctgggcatcgtagcgacaccctgtcactacaaaaaaatttattttacttatttattttttagagtctcactctttcacccaggctggagttcagtggcgtgatcttggctcactgcagcctccacctctcaggagaatcacttgaacccgggaggcggaagttgcagtgagccgagatggcgccatcgcactccagcctgggcaacaagagcgaaactccatttcaaaaaaa

SEQ ID NO: 262989 - DNA, 695 bp, Homo sapiens
cagcagtgaaatattaataatgcaagtatcaatgcaccagcacttttccggcctctgttttcatcacattttctattgtctcattgtccaaagacagtcacatagcaaagaccagattcagtaggcgaagggacttcccaagggtaggcacactgggtggtaggaattactgcacccatttttgcaaacagtctatcaaaggaaggaattagttaaatatttaaaccaagatctaatttcagataaccagtgtgagttaggagaaacatttggcgcaaaactgaaaccaattcatttgacttggtatcaccaaatacacatacagtggctggtatacaggaatggtcagaagatatttaagggactccatctctgtgcaaccctagagcagtttcaattgcatggcatagcgcagactttagctacaggcctctttaaggagacattgtttggattggttttgtttctctaaaaaggacctgggcccagtcttacacaagaaacaagaagatgagttggcaggctctgttattccccttatcacttaagaagaaagtttttctcgtgtaataggccatttaagatcatgcacaaggattcccaggcaagatgcctgaataggaacagctctggtctgcagctcccagtgagaccaacccagaaggcaggtgatttctgcatttccaactgaggta

SEQ ID NO: 262990 - DNA, 382 bp, Homo sapiens
tcatgcatctggagagaggctggggaggaggaggcttgggtttggcttatctaggtggggcttgctaggcttggctctgagctgtggattaaacacaggtcttctccatttgtctttcatcttctttgggccaccggctacataaggcatgttctgatggcaaagaggagaattaaaggggaagtcctattggccaaagctggtcaatgggagagagaagcgtacgcccctagggagagacagaggggagtgaatttttgttgaacaattatcctaactatcacactgttgtgatagttaaatgatttaataactttaacaggctaataacagtacctggcatggagtaagtattcaataaataacaaacattggtagtgat

SEQ ID NO: 262991 - DNA, 412 bp, Homo sapiens
gtggtttgtgtctgtgcacaacacactgtggcatgttggacaggccaccattctatgtcgtccaagataaccagggagaactttgtaagcctctgatcacctgggtttatagttacacaggagtcagtcaaccagcaatcatacactacacagtctgatgccccaatagggagtagttcccaaaaaacccttcccaaaagataccctttgttgtagatgtaccctgaaaagtcagagttgaaagatgctagagttccacttggtcatcgtcgtgtgaccacagtgtctctgacagtgatgtcactaggtttgcaggttgctattcgaccttgtcagattcctaaaacagggatggtttgacaaacacacaagtttaccctttcaggcatctggtataactgtgctaagagac

SEQ ID NO: 262992 - DNA, 528 bp, Homo sapiens
tgttttccatttgggttttggaaagtaaattttattcacctcactaccttaaatgctaattgtatgtttaatttctgagatctagaaaggtttctttacctatgagctcataagataagtaaattaggtctctcttttcctctttggtcactcttgagggcagtgggcttgtgttaatatatttattttgtctctgtacttaggtattttatggtttaagtttgaagcttctgtgccattttgttcctcttttctcaaaatctgccaattattggtaacacgtttatcttttaatgtgagcatccctgtctgcctaggtgaatgtgggtcaccatatggcattgcacctcaagtgactgtggaggtggagtggggtgtgtggctgctcaaggtgcatggaaagcttattttctatgtgcatgttcctgtatcacttggttgggggatcctaattcatctaaggtttggccttatttttccaatcccagagcccactataaactcccatttcaaaggcaaaaaaaaaaa

SEQ ID NO: 262993 - DNA, 467 bp, Homo sapiens
cagcaaacagattttactttcgactttgcagatgataggatttctattgcaactacttagttctgatgttgtagcatgaaagcaaccatagaaaaatgaataaacaaaatgagcctgataaactgtatttacaaaaataggagtagggcatactttggtgattcctggtgtagtgtttcaggttaacatcgcgtgtaaatagcacaattgtatgcataataaaggaatctttcctggtgaccccaaatcttgccctcacagtttttctcctttgtttagctccacttagacctacacctaaaccctaaaagtagcttctttgctcagcatgtgtctcactactaactttatcactttctgaagcagtatgttccctgtatgttttaatattagcttcttctgaattcttctctacgtggtttttatacttctgtccaaacaacttttttctgagttttggtgccctt

SEQ ID NO: 262994 - DNA, 526 bp, Homo sapiens
aatgctattgtatctgtagtatcttatttaactattttacaacttatccagtgaaataagtacctgtgtcactggagatttctctaggaatgtcccatgagagaaacacattttataataaccttttaggtactgtaatagagttaaccctcttgcatgggataccttctatacaaccagaaaacatgcattcaaaatgacaattgaatgtaatccttctataaatacttaaatggcccatcaggtagcagaaatgtacgtgaagttttgattgtcttcccaggattatggtttcgacaaagcaaacattggtcataaattattttagcaatttagcaatatatataaattttatatatacatgtaaaatttggaatattttatcttttccatgatgagccatggaatgcagactttttttttttgtttgttttagacagagtcttgctcttgcagtgagccaaaattgcaccactgcacactgcactccatcctgggcgacagtctgagactctgtctcaaaaaa

SEQ ID NO: 262995 - DNA, 297 bp, Homo sapiens
gtctcaagtccaatgactgagctacaaacagcagaacaaacctgtgtttcttcacaagcccattaaaaaaacgtgacagagacctggcctagctgcacagagggtggcccctactggaagcttgctgaatgaccagtcagaccggaattcactgtgcaggactcttttctttaatgacctccattcctgtggctgcaaagaggaggaaaaagccctggtcgggaaatcagcaccctgaagtggattctgagctttgaagctgagaggccttgaacaaatgattaaatcactctctga

SEQ ID NO: 262996 - DNA, 288 bp, Homo sapiens
gaagggaaagttgggactccctctgtccccagagaggaggggtgcttttctaggtttgtcaagttcaaggctctgatggggcgctctgatggggccacagctccagggctgagctctgtgagtgccctctcccttcctctctcctaccccctgccacagcgttaattgcaccagggttacttgaggcagccttgggcacctgtctttcttgtctcagatttgcctttccccccaccccacaaagttaagtaagatgagcctatcaacagctcaggtctagggactgtc

SEQ ID NO: 262997 - DNA, 368 bp, Homo sapiens
ctgttttaaaacgtcatatgtacatttccctcctcttcccctttctctccctagaatatgagaagggcctagaatgaaggactcagaggtttgaatgttcctattcgcttagcctggttgcgtgcttacctgtaaacctttgtgccgccccttttatgacagggacagctctgtatccctgccacattgcttttttactgtgcaatctaggcagtggcattgtattatatttcatgcgtatattatcttgtgtcacctatgtaattgactttttaatcttttcatgaccatttcctggatgtttcaggtatctgtctggagaaaagaaaaacatattacttgacatgtcattaaagtttgttaaattc

SEQ ID NO: 262998 - DNA, 493 bp, Homo sapiens
gaagcactgtgaggtaatagctctgtggaagcagcaagaagcgaggtaccttgaaactgatagcagagtcatttttgttacttgaggctaaaacaggataagccttggtgctctgggctttattcagttaataggttgattttctcattttcatgcctagggaattcactgttcttttgactgataaatctagagcagttaggcagttctccagagccaacagagctgacggtctttgtgtccaggttgctggatatgcattcctttttggctgcaaaccttgctgataagaaatatgactcactctgtggctgatgcttccagagaagtttgctgactgttttcctctcttctgtgtctctggagtccttagattttcaacagaagatggtcagaggaccaggctcagaaggtagagagagaccttccaggtgacatttccagaccaggtgcttcagtcatcattccagcagttaggttgttccctctaaca

SEQ ID NO: 262999 - DNA, 267 bp, Homo sapiens
ggcaacagagcaagactccatctcaaagaaaaaaaaaggttctcgtttgtgtgataaatgtttaccccgctcataagggaaacaggcataatggaaagtgtcatacagactaaccctgtaaccaggatccatgaatagaaattggaatggttggaaggaaaggctgtttgtagagtaaggtgcttttcatatgttgaattgaaggtgttgccaggacatctaagtcattattttctagtcggtaaaagtagctgagacgtcatttag

SEQ ID NO: 263000 - DNA, 526 bp, Homo sapiens
ggtaatatgaaatgttatttaacaaaataagaccatacagttggtttcaattattttcctctgttcattttgtagttcttagtaaggattttttttttattttcttcctttcatttgatagttttttatttataagatttttgaactgatgaagatgagtttgccttgttgctcctaattacagattagaaactttcttgatttcccctaccgattaaggcaaaattaaatacttcatctgtacttgctaataaaatactttttgaaaaacacttctaccatagtatttgtctcatggctttagtcatatttctcctagaccacaaccttactttagggatctttattgctattgcttggcatataataagtggtacaagaaaaggacaaaacttagtgataccagagaatgctaaagagtatagagaatctggtgggggcaaagtcctgtgaaacaattgaaatgatcattgatagcttaagatttagggagaggaaggttttacacagaaggcatgataggtta

SEQ ID NO: 263001 - DNA, 208 bp, Homo sapiens
tccgcagagaccctcggtccctgccggcgtgacggactctgctcccccgggttggagtcacctcgtccaggccactgcatcccccaagccccagctccgcgtccttccaggatcctcctctgcggggagaaaaactcgtctccgctcagcgccgggagcccgcctggggccggcgatcttcaaaagtaatcagagcccgcagtaaaaa

SEQ ID NO: 263002 - DNA, 638 bp, Homo sapiens
atacaatgaaatattattcagccttaaaaaacaaaaaaattttcagacattacaatatggatgacccttagggatattatgctagatgaagtaagccagttacacacaaaaaatattgtatgattccacttatagaaggtacttagcatagtcaaaatcatagagacagaaagtaaaatggtggtctccagggggtgggtggagaggggttggaagttattgtttaataggtatatgttttttgttttacgagatgaaaagagttgtggagatagatggtagtgatggtttacaacattttaaatatatttaatatcactagactgcacacttaaaaactgttaaggcagggcacgcacggtggctcacgcgtgtgatcccagcactttgggaggccaaggtgggaggctcacttgaacccaggagttccagaccagcctgggaaacatggtcagacttcatctctacaaaaattaaaaaaattagctggttatggtggcatgtgcttgtagtctcagctactcaggaggctgagggaagagaactgcttgagcccaggaagtcaagactgcggtcagctgtgttcgcaccactgcactccagcctaggcaacagagagagaccctgtctcaaaaatt

SEQ ID NO: 263003 - DNA, 418 bp, Homo sapiens
ggagtcctttactgaatgcgttctccttcaatccttccgacgacgtcaatttcagcggagtccctccaacctgttcattccaaccctcactgctcaggcctgaacttttctgaactagtgtcttccctgaccccaagaataatgattccattctctagaacaagcagttacagatccctcaccattaacagggggaaataggagttgtaaccaaggccttcggaatttggccttggtaatgttacagtttggatctctgcttcctaagactctgaaaatattacaaggtgcttttgtaactgtaggcacccagtgtgtgcttccctttggagcctgtggtatatttgcataagcaaagtagccatttaaaaggtgatttttttccccctgtgggcttgggggtagggatgggttcata

SEQ ID NO: 263004 - DNA, 405 bp, Homo sapiens
tgcatgattcatgtacttattcattcatccaaaaaatatttacagggcattaaacatgtgctatgcattgaggtatacactgggcatggagtctagttcgaaaacatgtgagtgcagacagaccctgtcctaagggagtctaccaggtgaagatgagcccacgtaaaacttccattgtgtgcaggactaagaccaaccttattttcatggcacatggaattgttcataatttttctgcaacctaaccttcgagcctcacttttgtccatccactccatgtaccgtattttatagacaacatactgtcctatttgcctatctccttgacatgttatgttcttctaaactttcttgactttaagaaagctggtttctcttgcaggatatttgcataccccctctatt

SEQ ID NO: 263005 - DNA, 509 bp, Homo sapiens
ccttattcacactgccttttattgcagctgcattccagccagctggaggtggcctggctgcctcagctttcccgatttagctctggaaatgacttcagcatggcaaaaacgtttcactggccaatttggaaaacaggattcaatttgtgaagaaagctcaaaatggcaactgagaatgaaaaagaggatggagaaggttgcggcagcaaagcagtaagggaacagagatgggccgggtgcagtggctcacacctgtaatcccagcactttgggaggcaggcggatcacctaatgtcaggagttcgagaccagcctggccaacatggtgaaaccctgtctctactaaaaatacaagttagctgggcatggtggtgggcacctgtgatcccagctactcaggaggcagaggcaggagaatggcttgaacccgggaggtggaggtttcagtgagctgacatcgcgccactgcactccagcctgggtgacagagtcagactccgtctcaaaaa

SEQ ID NO: 263006 - DNA, 514 bp, Homo sapiens
ttgcttgatgccaggagtttgagaccatcctgggcaacaaagtgagattcttactctacaaaaatttttaaatagctgggcatgctggtgcacatctgtagtcccagctactcaggaggctggggatggaagatcgcttgagcccaggagttccaggctgcagtgagctatagttacatcattgcactccagcctgggcaaaagagtgagacttgtctcaaaaacaaaaatcttacaattattgagttgtaggaactattctaaatacatagcttctcatttaagcatcacgatggtgtcctatgagatagctactattgtcatcttcattaatgaggaagttgaggcacagaaaggctaagaaatagttggtaagtgacagggtttaaagtaggactcaaaccctaattgaactgaatccaaagactgagctctttctattcaaataggctgctgttttcattaaggcaatgagcaatcagagctagtaagtattgtactttcttcaaaaaaa

SEQ ID NO: 263007 - DNA, 224 bp, Homo sapiens
aggtgatccgcccgcctcagcctccctaagtgctgggattaaaagtgtgagccactgcacccagcccgtgcagtcacactttaataaattttgtaaggttacatgaagtttctttgaggatccaagaattctgttttctgagcccaagggaggaatgatgcagacagaaaagattggtaaccaacactggggagcgaggggcataaaggagatagtgctgacct

SEQ ID NO: 263008 - DNA, 313 bp, Homo sapiens
caaacttctagcaagactgacaaagtaaaaaagagagaagacacattaaatagagaatacacctatacctgcagagctcaaggggataaaaagggattactggacacaactctacagacacatacatttgacaacttagatgaaatggtgaaagactgaatgatttccctcctattatcaaaaacaaggcaaggatgttagtcatcaccactttcgttcaatattgggctaaaagttctaggcagtgcaataaggcaagaaaaagaaataaaagtcatgcagattggaaaaaagtaaaactgtccctttttac

SEQ ID NO: 263009 - DNA, 397 bp, Homo sapiens
tttattggatctcatttctgccaaaaaaaagtatatatgatgtacatgtgtatatatcagtgtagaaaagtagaacctcaaaaagtatataacacgttaacattgttgaccctagagaggagagtgtgtattagtccattttcatgctgctaataaagacatacctgaaacttggtcatttatacaggaaaaaaggtttaatggacttaacagttccacgtggctggggaggcctcccaaacatggtggaaggcaaggagcagcaagtcacgtcttacattgatggcagcaggcaaaaagagagagcttgtgcagggaaactcacccttgtaaaagaatcaaatcttgtgagacttatttactatcgtgagaacagcaggaaaaatctgtacccatg

SEQ ID NO: 263010 - DNA, 519 bp, Homo sapiens
ccttaaaatgtatcagaacttacgcacacactcgatcacatacatggcaccattcacagtctagataaatagaaacaaatgtaaacaatacagtataaatcgtaattggataaaattaactgcattacctactatactactgtaataattttgtaaccacctcttgttgctattgcaatgatctcaagtattgtgagtatccatttaaaatgccatgtgaccctaatcatgtcacagtgaacagttcatccagtaaattgtgtattgcagtaaaaagtgatctctctatgtccttgagtattttgcatcctgtttagtgcaataacctaaaccttaaataatgccataagacctatacgaagtaccactggtggtgccagaagtgttccccaaagcagaggcaagtcataatgttataggaaaaatttgaattgcttgatgtatactatagattgaggtctgcagttatagttgccatccatttcaagataaataaattaagtgtaaggacgattattt

SEQ ID NO: 263011 - DNA, 534 bp, Homo sapiens
agacccttcacgtctatactgtgtctctgtctctgtctctctctcttctctcaaaacaggctctcactctgttgctgacctctcaggctcaagcaatcctcccacctcaacctctcaaagtgttgggattataggcgggaccactgtgccggttttgttttgttttgttttgttttttaatagagatgggggtctcactatgttgcctaggcttgtcttgaactcctcggctcaagcagccctcctgcctaagcctctcaaagtgtagccaccatatccggccctaaatgagttctttttgtattccgtaatttttagagttcaccttaaattttacagtgtctatagattgataaatttgcttgatacttaactcatgcttaaaattatcacttcctccgagacaactgaatgtaagtttggatttttcaaaatttttccgtaaaataaccatttctaaacatatagcttaatggtcaaaacaagtgcaataaaagattaatttacaagtatcagaagtgaagactgtggtcc

SEQ ID NO: 263012 - DNA, 249 bp, Homo sapiens
gtactataataatactctctatattaacatcaaaaccagtcacttgatttgatctgaagaagacccataacattctagtcatccagtttgaattctatggatcatttcagaatgcccaaataatctagggcattattggttttagtaatgtagcaatctggtacctacaggaggaggtacgaaacttgatgtataactaattgattggcttaatgttggcaagattacacacaagggtcaaccactgac

SEQ ID NO: 263013 - DNA, 1073 bp, Homo sapiens
ccttccctcaccccatgatatctgtacctaaaaaatgtcagaaaagtcccatttttgtatttacattttttttttgtgaatgaaaagagacaaaagattctagactggaaaggtgcctggcactcagctggagcactgccctaggcggaggaagagatgcagaatatgatggggctcccacctctgttcccgtcttcctggtccctctccccttctggaggtgactgagttgctggtgtctcatgagatgtgataaagcatcctggttaagagcactggagatagtatccagcttggctttccatcctgttatgaattggcagattaaccttggacaagtgatttgaactctgcctcagttcttaatctgttgagtatgaagaaaaatagacctacctcccagggttattgggcagtttaaatgagttaatgtatacaaagtatttacatcagtgtgtggcacccagggatcactgtatgagaatttcctgaacaacaacaacaaaaaaacccttctagaaatatttttacaaattatgaatgtattttcctaattttgaaaatacaactagtagaataccatgaatactgttctgcaccttgcttttatttatttatgtatttagcttgtttcttagcaatgtcaagccttatgttccaatttgtgagctatagtgttttgttaccatccctgtaagacaaagcatctaaagtaatcacctaggtatgcatacggaaaacctttctggactgtcagggaaagcattttatcccaactgccctgaacttgtcactcttctctgagcaggtcacaccccttgctgactcagcctttgtactgtgttctctgccttgaattcattctctcttctccacgctacctggcaaactgtttttcctccttcaggaatcagctgaagtatcaggattgccgtaaagctattcctaactttctccaggctctcctgtgagcccccctagcattgtgtgtctgtctgtgagccagccttggcacacagtgttgcggttatgatctgtgtatatgtgcacgtgggggcccagagctctcccac

SEQ ID NO: 263014 - DNA, 545 bp, Homo sapiens
caatgtgtatacccatgtaggcacaagaaaaatgagtgaaagtttttgctacaacattaaagaaaaaactgaaaataacctcaatgtccatagacaagaaatatatattagtagattaatagaatacattactactgagtagctaaaataaacttaagctacctgaatcaaaatatataattctcaaacagagtctaaaaaattgcatgaggatatgtatagtatgaggtcactatataaagtaaacatagcatattatgctgtagctacataaaatatgtagtaaaagtataacaacatgcatgggcataataagcatcaaattcagagaaatgttcacttctgggaaaagaagaggatgcaggatcctcggtgatagggtatttggaatgttttatgtcttatttcaaaacatcaaatgctactatgtaaaaatgctgggtggtgggtacctggatatttgttgtattatcctctgtacttttctgtctacttgaaatactgaataataattaaaaagaaaatacaagcaagcaaaaagaaaa

SEQ ID NO: 263015 - DNA, 404 bp, Homo sapiens
agagagagagagagaggaagagctgtcttacaatggctgcttaatttaaatttttcaacaaagacacataatgcttacataatatatgataagaatacttctcacttccatgaagaaatatgttctcaggccgggagcagtggctcacgcctataatcccagcaccttgggaggccgaggcaggtagactacctgagatcaggatttcgagaccagcctggccaacatgacaaaaccccgtctctactaaaaataacaaataatagctgggcgtggtggcaggcacctgtaatcccagtgactcaggaggctgaggcaggagaatcacttgaacccaggaggtggaagctgcagcgagccgagatcgtgccattgcactccagcctggtcaacaagagtgaaac

SEQ ID NO: 263016 - DNA, 271 bp, Homo sapiens
actacttagaaccttggcttcgcaccaaggctgaattaagttgaagaatgttttccgtaatgcttcccctaccttttaagttggtttgaaaacattcagttgcatgtgtaccactggatttttagctttttcactagttgttaccctggcagccttgattcagtgaaaatcttgtttttatcacaggctatttctctgagcagccaatgtttcacgctctctccctgtctaattgtctggccttggtaactcttagcaagagttgaaatta

SEQ ID NO: 263017 - DNA, 658 bp, Homo sapiens
aaagcagacagtattattgttgggtttgatcctataataagaggaagaagtaaagacagaagttaggagaagtataagggcaaacagaagtttcatgtatcccaagtaacgaaaaaataaaggtcctaaaaagagaagaaaagatctaggctgtatacaggctgggactgggaatgactggtggagaaagaattagccgttgggggcacagacaggaacctcaggggagtaacagtaatactgacatttatggaatgctcagaaaacatcagggactcttctaagtctccttaatgtattaattcattgaattctcacaggaaccctgtgaagtatgtctatcattatccctagtttttaaatttaaaaaatgagataaagtatctgtctgaggaggaaggaattcaatattacatatgaatttatatttgaaaaaatgtgggggagagacctattatttctgtaatataaagctaccaggaagaaaaacaccttcttagggatctctaaaatcatcatggatacattcctaccagtcatgaataagaggcagttgcaacggtggaaatgagatttttaggtttttccaaaagtagaagtttaagttgaaaaacctcagttctgggatacagcatcagagtttattcactgccagtgg

SEQ ID NO: 263018 - DNA, 470 bp, Homo sapiens
gccttgccagccccagctgaaccacttcagagagccattaacctctgcaaaacggagtggacaacttccacgtggctttctgtagaaatcagatgggactgcaagcaatggcacggcccctgccaaggtggatcttggagcctccagaagagacatgggcagagacctccctggtcttcctgcagctcctgccctggaacctgagtctcccaggcatctgaccagctgcactccaccaccagaagccggttaccaccgtccttcgggctttgtcctggagggtgcggggctggtgtggaccattcagtctggcagtgaccaccacccagtcagaggcacggcagaacgcacctgctgcacggacgctgtttgaacttcttcaaaacgtggtgcagtgtttcctgaagacatttaccatccttggcagttaaatacagcacagtgtcaattacaggtccatcttctgtaag

SEQ ID NO: 263019 - DNA, 234 bp, Homo sapiens
atctccagtcagctctccacacagcagggaaggggctttccataccttcgaaggaagggcctgttgagcctgcgttgctgaggggctagacggggcccatggcggagggctgccttcaaaacagctgggtgcagaaattatagcttcctagtgatgatcggccccactttgcgtggcaacacaatatgttcctaatgactgaattgtttatttaataaagaaatcacaaccatt

SEQ ID NO: 263020 - DNA, 936 bp, Homo sapiens
gccagcagctgattagctggtgcccacccagattaagggtgggtctgcctttcccagttcaccgactcaaatgttaatctcctttggcaacaccctcatagacacacccaggatcaatactttgcatcattcaacccaatcaagttgacactcagtattaatcatcacaggtgggtgtggggttggatggccttccagaagattctgttctgagtgaccttgggaagccaggctgtgacgttggaatgaaggtccagagatgactgtgtacgaagggaaggtcgaatgtgggtgggcaggggacagggcttgctgtgtttctggcattcaatgtccactgtgatggaggaaaaaaactcttcctgaattccagggggaattttgagtgatgtcaggagaagcagtcacacaggtgtgcaatgcatgtttgccaagacagccgcataagccatcggcaggaattaaggtacaggaagggcttcctggggtactcagttgggaaaggggtgctttggagtagctgggagggctggagcacttagaacacttagcccgctgggagtcactccatggacagaacatgataaggcaaaggccacatggaggacctgaacacctctgggtgacctcagacagtcacttctggtctctggtctccgtctcctgttcaatcatcaaagctgtttaccgacttccaagagtcactgtaagtcccaagtgtggcgacaggcgtgcaggaaactcacacactataaattccctttcaaaagtcaagaggaagccgggggagtggacgttggtctagactgctgtgacatttctgaagctcctctgaaaatccaccaccatccgcactgtgccaggaagagcctctgtctgaggacagccattgagaagtggacaagagtgggtacatttacaatttgcagagaggag

SEQ ID NO: 263021 - DNA, 445 bp, Homo sapiens
taaacacaaacccccttgagaatcacgccgacaggtgctatctcttcacctggggattgcaaaggaagtgagaacatccccgagcaagaccaaaaattgctgaataaacacaaacccccttgagaatcacgccaagaggtgctgcctcttcacctggggattgcaaaggtattacagcactgtacagtttactaaacacaagtcttcacatcagtcctcttctctgcagccacatgactcaagcaggcacaggacccatcaggaacaccagagtcctgagcaggaagaatgtctcctgtcgcagccttggggggagtcaggcatgatgtgcccgatggtgcagcaggacacgatgatgtcagagctgcctgggacatattgaacttcctgattttttcttcttgtgatggaataaatgattttggattaagatggagagaaacaa

SEQ ID NO: 263022 - DNA, 560 bp, Homo sapiens
caagtgttagggagattgaaaaactgaaagtttttagcagagtgcattttccttcccctaaatagtgttatgatgatcacttttgatgaacagaatgtggcagaagtgaagatgtcttaaatattaggacaaaaaaaggtattgactgtggctttctcattgctctttctcaagtcagttattctggggaaacccaactgccatgttgtgaggacactcaagcagccctatggaggagcccacatggtgaggtactgaggcctcttgccaacacccatatgagtgagccatcttggaagcagctccagctgacatcttaattacaaccccctgagagacctgtatcagaactacccagctaatctgctccaagtttctgactcacagaagctttgagaggataattgttttaagctgctaaatttggagctagcttgttacacaacaataataactaatacacttagtagaaataagaatgggttcacgaaacatttcagttgtatatgagtgtgtgctaggtctcagtgtaaaatgaaccccttcttataggttgcagt

SEQ ID NO: 263023 - DNA, 787 bp, Homo sapiens
aaggtatacatggtgtaataaaggatgtgggagcacaaatccataggaatttgagagtttaggaattgtatttattattcaggcccttcactctcagactaccctgctctatttgaataatgaggcttgtggtggtctgtggaaaagtggacagagtagaatttgggcagctgctgaaggtttggtctctggaatgagtccacgttaccctaaggacagtaatcccaaattgagacaaaaactttaagaaaaccaatgtttggggccaagcaatggggagcttggccgacctcattttttagtgattttgaactcaatctttaaaatcctggaagagaaggaaaaaaagggtgtatattcgtgtaatgacatccagatctcactgttctcttggctcctagtgatgggggaaaaaaggtgcgcccagggttgacccttcagtaacacctgcagccatgcgtcatgacctccaggtgttcagaggccctgcccatgtgacacgtgcctggtacttcccatacatgtgcctctttaatcctaataaacctggggtgaaatccggctgtgcctcttgctcgctgtgtgaccttttgactttaagttccttaacgtttctgagcctcacttttctcatctgtgaaatggggatcattcctatttctaagaattgaaagcgcacattctcaaacttcagtgtgcccctgaggcatgtggtgtgcttgtttaaaaggcagatttctggacctacctctaggaattcagacttaggaggtcttgagtggggtcc

SEQ ID NO: 263024 - DNA, 597 bp, Homo sapiens
tcattttatgcccattcagagcactgcgtgttttgaaatatacaaatagtgggaaacgaaatctttgttctggatgcagttataatttggaaagcgaggaaataaattataacaaggggaaaaaacagacacagagggattgaaatgcataacaatagagatgaaacacgaagagtgataaatgaagattgagtgtgcacaccttctggaggagccctgattgagtattttaaaatactactaaagtcatgccgtgtgacttctgaagctagctcctaagaagtccttgcagcttctgcctgcgactcttagaacacttgctttgaaggatgccagatgctgtcttaaaagtctgagcactctgaaaccatcatgctgtgaggaagcccaagctaaccacatgggcaaaaaagatgccctctgactgccaccatttgagacactctaattaagaactgcctcattgagcccatgaggccctgtgaatgataataataaattgtttttaaccactatgtttttggatttgttataagtttatagataacaagaaaaagttatattagcatggtaataaaattatggatatgtgtaaat

SEQ ID NO: 263025 - DNA, 528 bp, Homo sapiens
agcatggggcctgataaatagtaagcccttggtaataattacatcttccgtgatgctagacacagagggattgaaatgcataacaatagagatgaaacacgaagagtgataaatgaagattgagtgtgcacaccttctggaggagccctgattgagtattttaaaatactactaaagtcatgccgtgtgacttctgaagctagctcctaagaagtccttgcagcttctgcctgcgactcttagaacacttgctttgaaggatgccagatgctgtcttaaaagtctgagcactctgaaaccatcatgctgtgaggaagcccaagctaaccacatgggcaaaaaagatgccctctgactgccaccatttgagacactctaattaagaactgcctcattgagcccatgaggccctgtgaatgataataataaattgtttttaaccactatgtttttggatttgttataagtttatagataacaagaaaaagttatattagcatggtaataaaattatggatatgtgtaaat

SEQ ID NO: 263026 - DNA, 507 bp, Homo sapiens
aaagataaataattatggtagcttgtctccaagatggctgaccagcataaatttcttctccctatatccacacaagccagggttgcagtttattcctttgttcccttgaatgtggcctgatttgtgactgctttggtcaacagaatactactaaagtcatgccgtgtgacttctgaagctagctcctaagaagtccttgcagcttctgcctgcgactcttagaacacttgctttgaaggatgccagatgctgtcttaaaagtctgagcactctgaaaccatcatgctgtgaggaagcccaagctaaccacatgggcaaaaaagatgccctctgactgccaccatttgagacactctaattaagaactgcctcattgagcccatgaggccctgtgaatgataataataaattgtttttaaccactatgtttttggatttgttataagtttatagataacaagaaaaagttatattagcatggtaataaaattatggatatgtgtaaat

SEQ ID NO: 263027 - DNA, 492 bp, Homo sapiens
tcattttatgcccattcagagcactgcgtgttttgaaatatacaaatagtgggaaacgaaatctttgttctggatgcagttataatttggaaagcgaggaaataaattataacaaggggaaaaaacagaatactactaaagtcatgccgtgtgacttctgaagctagctcctaagaagtccttgcagcttctgcctgcgactcttagaacacttgctttgaaggatgccagatgctgtcttaaaagtctgagcactctgaaaccatcatgctgtgaggaagcccaagctaaccacatgggcaaaaaagatgccctctgactgccaccatttgagacactctaattaagaactgcctcattgagcccatgaggccctgtgaatgataataataaattgtttttaaccactatgtttttggatttgttataagtttatagataacaagaaaaagttatattagcatggtaataaaattatggatatgtgtaaat

SEQ ID NO: 263028 - DNA, 420 bp, Homo sapiens
tatgtcagctgttctccagagtatactcttcattgattttccaatgatagcagcaaagaaatagtgaaacttaatcctctgattttttaaactcagtgtttccttatatattttttttcatttctaggttccattactagcatagggaataattttttgaaatcttgcaaggaataagaattttgctttttaaaattacctttctgagacacttcacttactgactggattattctcatttttgttaaagaaaaaaatgcatttaagccaggcctggtggcttgcatctgtaattccagctactcaggaggctgaagtgggaggataggatcacgtggcctcaggagttggaggctgcagtgagctgtgatcacactattgccttctagcctgggcaacagagtgggaccttgcttaaaa

SEQ ID NO: 263029 - DNA, 600 bp, Homo sapiens
taggagctggtacatgacatttaaaaccatgggaatgaatgagatttcctagatagaaagaagaaaagaatattgacatttaatgttgaacggagtaggaggagctgaacagggagaccaggaaggagcagacagtgaacctggagcatgaataggagagtgggtgtcatggaagccaagagaaacaagaattcaagaaagaaagtttcttactgtagcaaatggcgctgagagggaaagtaaggccatggaatgatgacaatgacaacagtgacgaaggatcattgagtatggtatcatgctgacatttgtttctacccaggctaggtcgttactgaggggtggtagctaagacagggtgggttgaacatgaggaaatgaagacagaacatgggatccaagaggtagcatgaagagattattgtacatgccccaggactttccaaacctcttctttccttccatcaaccatctctcatcctggaatccacccctctaaccttttctaataaaattactgccttaaagccaggacagggagacagatttgagctggaatcctgtctaattgttaacttataataaaagcattcttttctc

SEQ ID NO: 263030 - DNA, 652 bp, Homo sapiens
taggagctggtacatgacatttaaaaccatgggaatgaatgagatttcctagatagaaagaagaaaagaatattgacatttaatgttgaacggagtaggaggagctgaacagggagaccaggaaggagcagacagtgaacctggagcatgaataggagagtgggtgtcatggaagccaagagaaacaagaattcaagaaagaaagtttcttactgtagcaaatggcgctgagagggaaagtaaggccatggaatgatgacaatgacaacagtgacgaaggatcattgagtatggtatcatgctgacatttgtttctacccaggctaggtcgttactgaggggtggtagctaagacagggtgggttgaacatgaggaaatgaagacagaacatgaatttttggaaagtttggctacaatgggaagtagagaaatggggtaatatctggaaggggagggaattgagtcagtagggttttgtgttttgattttacggtagggcatctagatagatcatgtttatgtacctattcccactctgttctctcttcctgaagagtctcctctggcaaactccattctgtaaacgtccgtatttaagtgtcctgttctctgtcaaacattcttcccaggcctagtatgatgtttgtcccc

SEQ ID NO: 263031 - DNA, 389 bp, Homo sapiens
gctggagcacactgaagctggagcacactgaagtggaagatggggctgcagacagagactgggcagcctctgctccagggaggcccgagagccagagagcagattccataagaagaataactcccattcctcatgcatgagaccctctgctaaatgcttcctgtgcaccacctccagaaatcctcccaagccaggacaccagcagtattacaggaactggatgacaaaaagaagagccgatataaccaggaacctactctggccaccccaagtaaggatctaaagtccagcctcctcctccactgccctcaaggcctttcctcatgaaagcagaggttctgaatgctgatttctgttttaaagcccaataactctttaaacatctaaag

SEQ ID NO: 263032 - DNA, 270 bp, Homo sapiens
tgctggattccattatttctgtttaaaagttacactatcttatacattgagctttttttaatgtagtaagtaaacagtttttcttgcccagtttttcttgcccagttttttcttgactcagtatgtcaaaaaaaaaaaggctgagagcaaacatatgactgttttgtagtaagtactctggaaaatgtctgaatgataagtgtggatacacatgaggaattaaattacattttccagactaacaaaaatataatcttgggcttgaatgat

SEQ ID NO: 263033 - DNA, 323 bp, Homo sapiens
aagacccaacccatcatcccagagattaccaggctgcactgacaggcatgtaggttggagaaagaatctgaattctatgttattagtagttttaagaaatcatcttttctgattgatcaatgcactttaacccataggactttctatctggtcctatgttttataaatttctattaagggtgagggttggccctccttagggtgtccagcatttagaacaccaaaacagattaggtttgcgacactgattctttcaacataactacaaagttttccaggactacaaaatttttgaagaaacaatggttaaaacccacaagaaa

SEQ ID NO: 263034 - DNA, 410 bp, Homo sapiens
atttctgtcttgcagtgtctcagaaggctttggggataagctgaccctcaaagaccaggagaaaagatcacaactggtgaaggaacagaggagggcattccaagcatggcaatcacacatacaagtgcaaagaggcatgaagccgcacgagggacttcaaggaggaggctggatggggacacataccatgagtgacatcttaccagagggtggccatgaacttcatcatgttccacaactgttaatgaccactggcgctggccctgctgctctctgaactcctctctgtggaactgtgccccttctctgggaagagtccttgaagctctactgagaatgaaacctcttctttcagctcatgtcaatcttgaatcttgctctgttgcccaggctggagtgcagtggtgtga

SEQ ID NO: 263035 - DNA, 398 bp, Homo sapiens
ttcctatgaacaaaagtgaaaagtcaatccacaagaatgggagaagacatttacaaatcatacctgctaaggtactgttacccaaattaaagaactctttttaaaatttatttataggccacgcacggtagctcacgcctataatcccagcactttgggagactgagccaggcagataatgaggtcaggagtttgagaccagcctgaccgacatggtgaaaccccgtctctactgaaaatacaaaaattagccaggcgtggtggcgcacacctgtaatcccagctactcaggaggctgaggcaggagaatcacttgaacccgggaggtagaggttgcagtgagctgagaatgctccccttcactccagcctggggggcagggcaaaaatccatttcta

SEQ ID NO: 263036 - DNA, 421 bp, Homo sapiens
gtcaagcacgtgagaaaaccaacattgtttgagggtctactatatgccgagcatggtatacattttttcttatttaacctgacaacaacattctttcccctgttttacacaggaaagttgtttaatcttcctgggccgcagttcctcaaagacgcttgcatgatcattggaggagccagaaatgaaatgaagctttacctagcctagaaatatgttcaagttaatatttgctaaggctttgtcatgacacagagaagtacagtttctggaaatgaatttgagttctgtcctcaggactctgcccagagccacctttgtgaggtcctataattagaagggctgtcagagggtctctactctaacttccactcagatagccatttcctctacctctgcctggagacacccagtaatgggtagc

SEQ ID NO: 263037 - DNA, 615 bp, Homo sapiens
cttgtctaaaagggaacatgtcatcttctcccaaacctgttcctacctcagtcttcatcttccctcatgaatgacactgtcatccacccactactcagaccaaaattccggaagtcatccttaacatggtctgtttattaccttccacatacaaactatgaccaactgattctactgccaaaacaaaccaccacggttccacttttaccacctaaaaacattctcctactatcaatcagatctcctatgttatacttctaacatatacacaactcaacaatcaaatatcagcattttgctttatttccttctgtccccctaagtattatacatagactttagagttcctatgaatcaccacctgacccttcctttcccagatataaatacttactaaattagatatttcctggccaagcgcagtggctcacacctgtaatcccaggactttgggaggccaaggcgggtggctcacttaaggtcaggagttcgagaccagccttgccaacatggtgaaaccctgtctctactgaaaacacaagaattagcagggtgtggtggcgggtacctgtagtcccagctacttagaaggctgaggcagaagaatcgcttgaa

SEQ ID NO: 263038 - DNA, 523 bp, Homo sapiens
gcagcttctagttgcagctcaagacccgcgagttcaccctccgcgccaagcacccaactcccggctctgcctacagtcacccacagacctaatgatcgactaagcgccgtaatggcccgagatgacaccaggagactcccttgctgtgcgcctccggaagacgcggaacgtagcccctttctcacactcctgggacacaaaaatacccgacaactcaaagtcgccaaaccacatcttttcatgctttgaagacttctgcccaaggctgtggcaggagtaccctacaaggtttgcacaaagcaagaaagcatcatgtaaccgaaatgctgaaaagtatagatgctgcaaaacctcattctgagactgagaactatgaatagtcagtgtatttccttctgcggtgcagaaaaagaacaaccaaaaagaaagcaacaaggggagatgttatttattttaatgacaccaaaactaccaatcctagcaatttaataaattaaaatcatagtcctttaaatgtaaataa

SEQ ID NO: 263039 - DNA, 1047 bp, Homo sapiens
gcagcttctagttgcagctcaagacccgcgagttcaccctccgcgccaagcacccaactcccggctctgcctacagtcacccacagacctaatgatcgactaagcgccgtaatggcccgagatgacaccaggagactcccttgctgtgcgcctccggaagacgcggaacgtagcccctttctcacactcctgggacacaaaaatacccgacaactcaaagtcgccaaaccacatcttttcatgctttgaagacttctgcccaaggctgtggcaggagtatgtccaactgtgatttgggattctttttaaacatcgaatcaaagggaagaggggagggattcgcaactaaatggtagttgttttcaagcaagtctttacgtagccccaaacctactctagtattcggtgattcagccccaaaacatctctgcctgcctttatgttcggatctcactccattatttgtcagcaccaagtactaaacccacaaagcgatcgctgtacgggacaccaaacccatacctgcccgtcccctaccttccaggcaaccagtgtcaatctcctcactatacataattcccaacatccctgcccgaagtgaggagaacggtaatttaaataatacagcgggggaggagaggacacactgtttttgaaagactgtaagcattctgctgttccactctgcgtccttacacttgctgagcactgacaccaaatttaaatggcgttccttcaaaactgatgtaattgtaaagagctgtaaagggcaatgacctcaagtggatgttttttcccaggtaccctacaaggtttgcacaaagcaagaaagcatcatgtaaccgaaatgctgaaaagtatagatgctgcaaaacctcattctgagactgagaactatgaatagtcagtgtatttccttctgcggtgcagaaaaagaacaaccaaaaagaaagcaacaaggggagatgttatttattttaatgacaccaaaactaccaatcctagcaatttaataaattaaaatcatagtcctttaaatgtaaataa

SEQ ID NO: 263040 - DNA, 515 bp, Homo sapiens
caataaacatacaagtgcatgtgcctttttggtataatgatctatttttctttgggtatatacccagtaatgggattactgattcaaatggtagttctgttttaagttcaaactgctttccacagagcccgaattaatttgcattcccaccagcagtttataagcattcgcttttctctgcagcctcgccggcatctgttgttttttgactttagtcaaaaaatagccattctgactagtgtgagatggtatctcaatgtggttttgatttgcatttttctgatgattagtgatgatgagcctttttcatgtttgttgaccacttatgtgtcttcctttgagaagtgtctgttcatgtcatttgctcatgtttatttattttttgaatgatttctataacttttttattttgatctgttctaacattcttttattatttaacatgatgaaattagatttctgtatagtttctctactataattaataaaaaccatttcggcttttaaaattctca

SEQ ID NO: 263041 - DNA, 406 bp, Homo sapiens
ctcaaaaacgtatttcctggtagattgaggatgtttttacaatataaaagcaacgaccccctaaagtcaagaattgcagtatttcttcaccttaaccaatcataagagagataaaagaactgttcctttgtgaatggtacaagttaattaccacagtctcccctatgatgcttttcatttggtttggtaatttttctaatactttctccttgtaaaagctaaacatcccacagttttctttttaaaattctttccttttaccttcatgtaaagaacttacattgaatttttaaagcatctatatagctctccatttttctacaagttttaagtagactgtaattattacaagacattggctgtagatcaggccctgtgcaggccaaatactgtaaacaccccactg

SEQ ID NO: 263042 - DNA, 556 bp, Homo sapiens
ttgacacattaacaatataatccaagaagcacttgagacatatcacagcttatttccagccatgacttggagccagatggccttgccagtgactgtgttctcatggagcatatatactcatttgtttacttttttcataagtcagtttaaggttcctcatgattcttatatatttatttttatcagattgttttgcaagtcttttatctcctcctgcaccaatgtaccgttttcacaaatgcttggatcactttcttggtttagaacagctgcttttgcagagggcttgactggaagtgtatgtttctgtatgtctgtctgtgtttgtgtatgcaccatttttattcagacatgtttgttttttatgcagataaatataataaagtggacttttgtgtgtgtgtatgtttgaatttgttaatcagacttcatagtctcaaatcaagagtgccaatgtagcttctcaaaaaaatgtcaattcacatatcttggtggccatgtatatatttaatcattaaaagttccagtatcattttctcttgttgatggtgtcaac

SEQ ID NO: 263043 - DNA, 432 bp, Homo sapiens
cgagcacgaggtgagaagcctgggaggtttgagttctgtctccatgaccataagtctgcagccacacaattgtgtgatgggttgtgtgatcttcctgacaaggaaccagttgaaggatgctgactgggaagccgtgcacgcgaccggccgtcaggatgtgcccgagaaaattaaaaacattaagtactccatccggacacaaagcgtctccatatgacagagttttgttactgtggggagaggacaaagcaccagccacacccctcattccacagcctttcccaaccctcccctcgagatgaaacactggccatctgcagcgcttcacctctgagctggaaagaagcttgtttcttttgctttgatgaggttctgctggttttggcgggactttgaagtttatttattgtcattaaattgcattaattatta

SEQ ID NO: 263044 - DNA, 420 bp, Homo sapiens
aagatggttcgctccattaactgcagtttgaagacaatgagaagagaaagtctcagggtaaacggacaataacactcttttatggatgtggtacatcacaggagcctgcagtggacccatggagaaacagctcagcagacactgaagctatggggtctagggtccaggacagagggcctgcctggagtaatcaatgttgggagctgatgctgggagaacagattaatagattaagtcttccagggtgagaaaaaaaaaaaagggcagagtttgaaacactggtcaccaccaacatttaagccaataaagggtcgaaggctaacaaagaaatagagaaaaaaatcggcgaagagggttaggaaaactaggaaatgtggtcttttagaagcaaaagaggggaaagctttaagaagagatggg

SEQ ID NO: 263045 - DNA, 482 bp, Homo sapiens
attccatctagactgatatattaaaggatacttggctgaagaaatgagttattggaaaaactaacagagttggatgttatagacttgatctccccagatcctagtcttcccacccgagacagccagactgccttttgggtcaaacttctgaagttgtgcaaacgtatggacaaattaccatgagctgacaggggcagcctgaccatttcctcacataaagtggcttttgtgctttttactttggtgtgctattaaatgaatttgtgctataaagtccagtcaaaacagcagcactaattgaatataatctcatctttgctttgacaggatgcagttttatcaaggcagaccagtttagttctcttatgtgcattttggttagaaatttattattgtttaagaattacagatattattcctaaaatagagtgctaaccactgagagcatgaggtggcagagcaggaagagtctggaactggga

SEQ ID NO: 263046 - DNA, 440 bp, Homo sapiens
gtgattttggggccccaatatttattttctttcaaatttttctccttttctttttaaaaatatttcagggaaagcattttagaagaaaatgagtctctggcctcaggcttcctctaatccctcatggctaagaaggttcattcctagatggatatgtccagagttattaggaaagctaatatttagcaggttgtgaagtctcacatcctatgaagataaaataggggaaggaagggagaaaaacaacaacaacaaaaaagaacagtcctggaaaacttatataggccacattattctgaagttaatatatcagtaggcaggtatgaaagtggcttatgtgtgtaaataggttgctgttattttcctctgaagtttaatttgtctagcatcagtttgcagggctttgtgaaagcacagctaagttctcagttactccaaat

SEQ ID NO: 263047 - DNA, 421 bp, Homo sapiens
gaaaataaaggcttatagtctcataaccaaatttgtaagatgtatgtgttcatgctaaagaatttgacctttcttttgatttcttctttttacctttgcatgttcacagccacaatataattaagtcagcttttttcctttctttaaactacatttttttttcctgtggtgtcctagagcctacagagggaattgagagagatgcttagaaactggcaatcctagcatccgcccttctctagaagtaagctattaaatgttcaaaatctggctctgtaggtgaaaaaatctttaatttgtagcatttgctgagttctgtggtgcaaatacaccgaagaaggccaatttcaagctgccagcataatgtcactgaaaacagagctgggaggagatgtgtattttcaccccacagatacgatat

SEQ ID NO: 263048 - DNA, 941 bp, Homo sapiens
  misc_feature (147)..(147): n is a, c, g, or t
  misc_feature (241)..(241): n is a, c, g, or t
aggcactgaagtacttgatactaattggatattatgaccacttttcagcaattgtattactgtaatggtgggatccataaaggaaatggtaaacctgtcttatatgggtagttgtgtgaattgcaaaacttacatcaaataattttnttgcctcgtcttttgaacaagtcatgacatcattctagttcctttttcaacttagtgagatgtctgctctgtgttaatattataatgtgtatantctacaacagaattgtcctccaaattgcaagttttcctttttgaatctaatatatcaggctcatttttagatgacttagatgcataaggattttatcgtagcttgatgttagctctctgtaacctttcaggtatattaatcaaaaaagccaaacttaataaagcatctaatttaaaatggattgatctcaaatattttatagccactatcttttcacaatagtaaaacataaaagagtttaagctatgccaatttagagagtgcttaacaatgtgtaattactttattttcacttaatagatttttacctgtgccttgtttcagatctgaataggtttcctttgacctcaaaatcactaatgcagggaaaattaccatatcatgagagtatttttcctctttcttttttttgcctgatgcttagaataataaatactcccaaggcttaggagtagacatggcctgagagaaagcctattaaatgctattttctaatggttttaaaaaacaacttaaacaaatcatgctactcaaactgattttcttgctaaaacagaactagttttagagtatattttagacatctttttttctcaattactagttaaacttgaagttgggctctatctggatttgctttatagatctgcttcatttcatgccagatttgggcaaaccatgaacaacccccaactccagg

SEQ ID NO: 263049 - DNA, 492 bp, Homo sapiens
ttggttgcttatgtttcctcaaagggtaattttaaaaattaaaatcgtatatatttcactacaaaagtgataaagattcccagaacatttggaaaaaacaaaagtaaaagtaggggctaaaatccttccaccaaattctgttattactagtgcatttcattcttttttttcttaatatacgtagggctattttttttttaattaaggaaaaaatgtaaggccaggcacaatggctcacacctgtaatcccaacactttgggaggctgaggcgagagtatcgtttatgcccaggagtttgagactggcctgggcaatatagtgagtccttgtctctacaaaaaattagccaagcgtgatggagtacacctgtagtcccaggtcctccggaggctgaggtgggagaagagcttgagcctgggaagcagaggttgcagtgagccgatatcatgtcactatactccagcctgggcaacagagtaagaccctatttc

SEQ ID NO: 263050 - DNA, 223 bp, Homo sapiens
tttagtagagacagcgtttcaccatgttggccaggctggtctcaaactccgggcttcaagtgatctgcccgcctcagcctcccaaagtgctaggattacaggcatgagccactccaccctgcagaagtcagtatttgtaaaaagtgttatttaaaaagtaaaacaagacaccttgctccaaggccactgtaacatgtagtgaaagcaatagaaaaaaaaatag

SEQ ID NO: 263051 - DNA, 204 bp, Homo sapiens
tagttccctttcaaaatgggctttcagtagtgggttcattccttcctgctcttctgctatgtgaggacacaggtccctctcctccagaggacacagcaagtgccatcttggcagcagagagcagcccttgccagatgctggagccttgatcttggacttcccagcctccagaactgagaaataaatgtctcttctttataaatt

SEQ ID NO: 263052 - DNA, 804 bp, Homo sapiens
agattttcattaatgttatggtgatgaatctttcataaacaatacttaccattgattgtgcttttcttagcctagttctgtcctgcaatttatctttcttatcatgtgactgtcggctgaagtctggggttatttggtttctttttcttcttctgtaaattggaaagcagtgggaaaattacaaagtatctttttaaaactcaggtggtttgcatagctatttgtctgtttgagtttgttgttcctgtgatttaaaagattgtctccacttaactggaaataagccaaatgtctatcaatagagaactggttgcatcaactcctgcatctccacacaatgcagtactatgagctgcaaatggaaagcaggatgtttctatattcaactgtggaaggatctccaggatatactgttacattaagaaagaagggtggatgagacggaaaagtttgcctgatgtaatggatctaggcgatgagtatccatggctaccaacacgagacagacaaccagaaatgatcctgagcttcagctattgctccctaactgagaatgagatgcaagagaagtctcactaggaaaggagtcagagctacgggaattttcaagagaactttaaaaattcttcacttaaaactctctttttaaaagaaatcctcgtggagcataccaactactgaaatcagaaagacttttatcattgcaattgtaacaatattaattatgcatagtttattactgtattaagtgtaggtggaatctatttcaagaaaacacaataaagcctaaaccaaaataaaagc

SEQ ID NO: 263053 - DNA, 505 bp, Homo sapiens
agattttcattaatgttatggtgatgaatctttcataaacaatacttaccattgattgtgcttttcttagcctagttctgtcctgcaatttatctttcttatcatgtgactgtcggctgaagtctggggttatttggtttctttttcttcttctgtaaattggaaagcagtgggaaaattacaaagtatctttttaaaactcaggtggtttgcatagctatttgtctgtttgagtttgttgttcctgtgatttaaaagattgtctccacttaactggaaataagccaaatgtctatcaatagagaactggttgcatcaactcctgcatctccacacaatgcagtactatgagctgcaaatggaaagcaggatgtttctatattcaactgtggaaggatctccaggatatactgttacattaagaaagaagggtggatgagacggatatgtactgggtgctgccattcctttcaagaagaaggtattaagatctctgcctctatat

SEQ ID NO: 263054 - DNA, 879 bp, Homo sapiens
agattttcattaatgttatggtgatgaatctttcataaacaatacttaccattgattgtgcttttcttagcctagttctgtcctgcaatttatctttcttatcatgtgactgtcggctgaagtctggggttatttggtttctttttcttcttctgtaaattggaaagcagtgggaaaattacaaagtatctttttaaaactcaggtggtttgcatagctatttgtctgtttgagtttgttgttcctgtgatttaaaagattgtctccacttaactggaaataagccaaatgtctatcaatagagaactggttgcatcaactcctgcatctccacacaatgcagtactatgagctgcaaatggaaagcaggatgtttctatattcaactgtggaaggatctccaggatatactgttacattaagaaagaagggtggatgagacggaaaagtttgcctgatgtaatggatctaggcgatgagtatccatggctaccaacacgagacagacaaccagaaatgatgtgcgttgtgacggaagtacatatccctgttcagtatatacgtaagcctctaggtctgactgtcagtataaccagcctgagcttcagctattgctccctaactgagaatgagatgcaagagaagtctcactaggaaaggagtcagagctacgggaattttcaagagaactttaaaaattcttcacttaaaactctctttttaaaagaaatcctcgtggagcataccaactactgaaatcagaaagacttttatcattgcaattgtaacaatattaattatgcatagtttattactgtattaagtgtaggtggaatctatttcaagaaaacacaataaagcctaaaccaaaataaaagc

SEQ ID NO: 263055 - DNA, 191 bp, Homo sapiens
tccgctccaggacctccaccctagctctgacctctgcccagcccctgatgctccagctattcacacattttgtaccttcacttctttcagttctttgtgcaaatgttcacttagctgtcaggccttgcctcctcaacctacagatttgaacagggcacttcccaacctcctttccctgctttctctgttct

SEQ ID NO: 263056 - DNA, 438 bp, Homo sapiens
tgatggccacagacccccgcccccaccccagcgtctgatacgccgcgcctggggcgatcttggtacctccccgccaccgcgtggggacaacacattcgcagctccgcggttaccaaggcgacccagctggtgtatcctcggtagccccctagcggacacttatggaacctgcagttctttcctttacctcgggcggcgtatttcacctgcagccctgtccagagagggggcggctctcttacctggcctctgtattgcttctctctaccctgagcctggccacccgccccacctctccagacatttcggtttctcctccagggaccaggcttctctggctttgtcacccaggcacaacagctctaattacccatcccttccagccagggtcctggggacttcagaagggctgtcacccacggcacttccaaagtccct

SEQ ID NO: 263057 - DNA, 569 bp, Homo sapiens
actcctcggtcctaccttacacatcgcctagggtgtttgaccctcatttttttctggagtttaggcttctggacaccacacaggccagtctgaaggggaatgctaagcacagtggacagtagaatccacctggtgtgctgcccattcattcggctgcagtatggccctctctgtgtctcccaggaaacactgaacagtggtacatcacccgccctgcgtatctctcccgatatctgggaactattgtactacctctctaatttctcttttctaggctgaatgacccatttcttcagcctcctctcaaaggcaatatttctcagcccttcagtcattttcattgctctcttctggcctctctccaagattctgtatcttgtttaaatagtgaagtccaacaccgaacatgatttaagaacagtcatgcctggaaaagtaacaaaggcccaacgaatacggactccagaaagtaaacattttctcaaaaacaaaagtattgtaatattaataatggtagtaagaattaggttgaccaaataaaatcatttttgttgcccgtcaaaaaaaaa

SEQ ID NO: 263058 - DNA, 526 bp, Homo sapiens
agcacagccactccacgagcttctggaaattccatgtctcccagctgtgcaaggcaaccctagtgttgttgaggaaaagcctaaagaagaccatccatcgtgttgagcgcagggaagtgccgaatgctacgtaggcttgggcattctcaatagttcaaggcccacattacaacttccaagagaagggtggtggatggctcacaaaccagcaatggtcaagggccatttccttctctggtcctggcctagagacttcctggggactcacagaaaaaatgctaccaaatcctgaactctacccagctcttctcccttcctgggggaacaaccatgtggacttccaataagaacacgagcttaaagaacgagttattccttctgacccaagtaaagcacatggcccatttcctgttcaccagagaacttcattagagggaaactgcagacatagcattcaattataaaaacctattcagattttgctagtgtaacgtgcttatttctggatttaacttatatagctgaa

SEQ ID NO: 263059 - DNA, 348 bp, Homo sapiens
cactgggtaagccaacagtgaagaccaagaaggaaaagcacccctccaggaatgattctctagcagcctagagacttcctggggactcacagaaaaaatgctaccaaatcctgaactctacccagctcttctcccttcctgggggaacaaccatgtggacttccaataagaacacgagcttaaagaacgagttattccttctgacccaagtaaagcacatggcccatttcctgttcaccagagaacttcattagagggaaactgcagacatagcattcaattataaaaacctattcagattttgctagtgtaacgtgcttatttctggatttaacttatatagctgaa

SEQ ID NO: 263060 - DNA, 441 bp, Homo sapiens
tgagtggttacagtaaccgagagaggggacttaactttttggtatatgtttataaattagttccatttgtatgttcattctttttttctagtgtcttatctttgggcttattttataacttaagtctgtaaagcagtcactctgaacctgtagtgagttgaagaagcccttaaaacatctcctctgggccgggtgccggttgttacgcctgtaatcccagcactttgggaggctgaggcaggtggatcacgaggtcaggagatcgagaccatcctggctaacatggtgaaaccccgtctctactaaaaatggaaaaaaatagccaggcgtggtggcgggtgcctgtagtcccagttactcaggaggctgaggcaggaaaatggtgtcaacccgggaggcagagcttgcagtgagccaagaaaacgccactgcactccagcc

SEQ ID NO: 263061 - DNA, 456 bp, Homo sapiens
attattctgctaaatataacattgagagaatcttaggttaattttccactgattgcttttttcttgagtataggccaagtttttctgtttctttgtatgtctattaatttattattgttttgaaaacatgaaggggatgtatttcagatattttagtttctgtaattttttcctaaggagagccgataactgtgtgtagtaggcagtttaattattggctaatttcactgatttcctttaaattgtttaatcttaattttatatgttttggtttggttctgtgggaaaccctaaaccatttttgcttggcagaactcaacctccaaactttatctactctgtgcttcttattggtgtttggtttcaagctttgggggtaggtatagagtagcccttgttttcagtcatggtccttactcctaagatgcagcctttttgatgtcttctttggatatc

SEQ ID NO: 263062 - DNA, 440 bp, Homo sapiens
cccagttttgtacttgtataagtatggaattcttatataggattgttgttggattcattcttatctttacattttttaatattaagggacagaataccaagtgtccaatgtcttgttattatattgttagggtactgggcactttggggatattgactgtattctgggtttgccccctcactatttttaatccagactattttatacctatcagtataactatagttcttactcttcttcttggaattctttttcttattgtttattatgggagttttcacccaaacagaagtgcagaaacaaaatgtgatgaaattgatggaaaaccagttctaagagaatgtagaatgagatatttcctaatggaataagctattcatttatgatatatattttcttatattttgtttcattggttagtaaagaaaatgtgtgttatg

SEQ ID NO: 263063 - DNA, 128 bp, Homo sapiens
gactgagaaaccataatcaatctggtagcaatgagcataccaagagcctaaactgtaatagctaaatatttcccattagaagaatccaggctggccgggcacagtggctcacgcctgtaatcccagca

SEQ ID NO: 263064 - DNA, 1055 bp, Homo sapiens
catatatagcatgctttattaagtagttttcattcatttcccaattactgctattagttcataaattgtgaaaatacattaataaactaaaaatatttagtatgcaactaacattatatttgtataactgattcatgcaaatccagatcagccttcttaattataaccattactcagacacctattacctgttatcaccagtatacatagggtcaatgtagcacagacttctggctgaccactaaaactcatttcctcttcttctaggcacacagctagactacatttcccaggacctcatatggtgccaccaagacagagctgactgtatcacccaatgccaagccctcagcgtcactgtcaagtcacattggttacctgagccaataatctcatggaactcaatttctgagagctgaagatggaaatgtgaaggcaatccagctcttaggaggagaatatctgccttctctgcaaagagaaattgtcattttattttttaagggtgattttgtcactgggaatggctgcccacccagtgacattttcctatgtaccttgcatccaactgtggccttgcgacatattttcatgaagggaatatgagcaaaagtgaagtaacttccaggtctgtgccttaagaaacagttccctggtctggatacctatctgtagactcctccaatcaacacatcatatgagactctgacttcagagctgatgacgtaaaatgcagggcctaatctatcttggcaatgtggcagtggtggcagtagctccatccaatttcccatggtagcaattccagccacagattcaatgccctgcattgttggcatcagaagcacaacagtttatgtgtgcctagcaagggtggcagtgcatcttcacaggaccacatttgggcatgattctggatgttgttcctcactgtgagaatttcaaacatggctttctactctgttctgaggaagaagattctgtgtgctacataatatcctttaatctactccttttatgcctaaattagcaagagttagtttctaatacttgaa

SEQ ID NO: 263065 - DNA, 444 bp, Homo sapiens
catatatagcatgctttattaagtagttttcattcatttcccaattactgctattagttcataaattgtgaaaatacattaataaactaaaaatatttagtatgcaactaacattatatttgtataactgattcatgcaaatccagatcagccttcttaattataaccattactcagacacctattacctgttatcaccagtatacatagggtcaatgtagcacagacttctggctgaccactaaaactcatttcctcttcttctaggcacacagctagactacatttcccaggacctcatatggtgccaccaagacagagctgactgtatcacccaatgccaagccctcagcgtcactgtcaagtcacattggtcattatgaattgtgtaaatgcccttggggattagctgaggtgatgaaatgaaatatatatatatatata

SEQ ID NO: 263066 - DNA, 270 bp, Homo sapiens
ccatgacctggaattgtgcatgtgtggaagagaagagcactgggcaataggtagggtggatctctgaccaagtcatgttaagtatgttcaaagtgaaaaattgagctatggtaatgggctggttttgatttaaatgaagcaagttacctgtcgggcatggtggcttactcctgtatagtcccagcactttgggaggctgaggtggggagatcagttgaggctatgaattggagagcagcctgggcaacatggagaaactccatctttaca

SEQ ID NO: 263067 - DNA, 480 bp, Homo sapiens
aactgtcttcattccagccctgcccttctcaacacgacatatagacaaccccaggtcgtgggtccctagaggacaccaccgatactgtgatgtgatgatgaggcgccgttggctgatctataggggtaaatgcgagcagatccacacattcattcatagaatctgaccaccatagcagatttctgcagaactccaccactgccctgtaccaacagcccctccatgtgcagctgccacaacagtactcatgatgtcaatgtcactgactgctttgccagcacagggacccgacctcttcactgccactaccaaaaataaggagtccaccaggcccatgcgagtgggctgcaagaagggggcatctgttcacctggatggctaggttcctcctgacaacggcacctgaatgacttgcaccctacgccttcaaatctgtgcagcactgtcaaggtcttctttgtaaatgcttcgtcctttgca

SEQ ID NO: 263068 - DNA, 483 bp, Homo sapiens
aaacttcagatctcattcatgtagccagtcatttcacttatttctatttttcacctcatattatggaaatgacttgttcctgaagtcgttatattatcactaatttatttgaaagccttaaagttattggcatatagtgttagatattttgtatgatggagtgtgttctgagatcagaaaatgaccctcttcaataaaactaattcagaaatatccatagaacaatctaaattgttatatttatttaaatttgatttttcttcatgtgacttaagtaatccattggctgaaatttggtagtatttagttcagaaaactctgcttataaaatttagtaactttgccatatatcatccatggctattctacagagactaagcttgatcctactgtacatcagtactacttgtgataacaaataacaataacaatcacaatgataatttatcaaaattacctgttgtcagaagtgagcaggaatag

SEQ ID NO: 263069 - DNA, 479 bp, Homo sapiens
caataagaataagctaggttcagtggcacgtgcctataattgcaactattcaggaggctgaggcaggaggatcacttgagcccaggagtgtgaggttacagtgagctttgatattccactgcactccagcctggctgacagagcaagatgcagtctcttttaggaaaaaagaaaaaaccaataagaagaggaataaatctcacagccagatacacaaaagagtacatatgctacatgattccactgaaataagccaaaaaactgacagagctaacctgtgttattcgtagtcaggaaagtacttttcttgtaatcactggaaaggaatgtaaagggaattctagggggattgataatgttcttttttaaaaatctgggtgctcattacaagagtattggtttgtgaaaattcattgagttatatacttatgatacgtacatatctctgtatacacatgttgtacttcaataaaaagttt

SEQ ID NO: 263070 - DNA, 1549 bp, Homo sapiens
  misc_feature (1)..(1): n is a, c, g, or t
  misc_feature (121)..(121): n is a, c, g, or t
  misc_feature (178)..(178): n is a, c, g, or t
  misc_feature (269)..(269): n is a, c, g, or t
  misc_feature (286)..(286): n is a, c, g, or t
  misc_feature (536)..(536): n is a, c, g, or t
  misc_feature (987)..(987): n is a, c, g, or t
  misc_feature (1163)..(1163): n is a, c, g, or t
ngctttctgaagaacttgtgaggatggtaaaggatatgaaaacctactttccatcatggagacatagtaaaccatattctttctatgccttcaaccatgtccttcactgtgtggacagcangcaagcaaacagtgagattttccagttaaaactcactacctctagcacatacaactntgttcaacttgagttgctagacactgttgattcagaacatgcttccaaaaacacagatactcttgtggcaattttttattgccgtctaganggttagtcctgaaattntgtgtgtgtatgtgtgtgtacatacatatatatcttggagtcctctcactttgctgaaatgtgtgcctttaatatatgagagtgttctatacacataatacccagtctcagctttctttctggagcaactatacctgcaaaagtatcttcacagcatgcgtatgcttcagtgaaattctttttttttctttcataacccatggaggtaaagacacagaagaagagaaataatacagtagtcccaccttanctgtggtttggctttctacagtttcaattacctacagtcaactgtggtcagaaaatattaaatagaaaattccagacataattcataagttgtaaatgtatacagtgttctgagtaacctgatgaaatgttgggcagtcccaccttcttctgcccagagtatctgctctataggtgctccctgattgttagtcacttagggttatcacctgtcccagtatttcagtgattttgttcaagaaactcttactgtatttcttaatggacccaaagcacaagagtagtaatgctaacaattagatataccaaagagaagccatagaatgcttcctttaagttgttaataaggaaagaaaatatatatatactaagctggctaagatctacattgtaagaaccaaacttcatctgtgcagttgtgaagaaaaaaaattaatgcatagcatacacanggtttggtactatcctcgatttcaggcatcaaccaggcatcttgaaatgtagtccccatggttaagggcaggctacttattacttaatctacattattctcctttagccctatatacacagctttatcctaacagaatctgaatcttgctgtctcacactggttaagaagattcantctggctatggagctcctcaaatactagtggataaagtaatttttaccaccacacacactccaaagtgtgtttttctttaatagagtggcagtttagatagtggtgtctttgctgggtgactgtcctcaagatctggttggaatatcattcttaatgtatttgcatacaggatataattccttgttgatacataccaaaaaggcttgatgtttgtaggccaccttctctttgaacattcattcactacattttgtattcaaatggagactacaaagggagagattttactggggcaccaagaaactctgaggaagataaatatgttctttatcgtgattattgtaatgtttcctagatgcatacgtaacaatttatcaaatgttgc

SEQ ID NO: 263071 - DNA, 188 bp, Homo sapiens
ccctgatcggcagtcacaaagtcacagcaagacttcgcagagctcagcacctaacttctgattttcctgtagagaaaaggacagcaacaaggtgggtcgggctggaaaatatccctacaggagggcaccccaggaccagtgtttctgccactttgctgtccctgcaccctctgtcccagaaaggtcta

SEQ ID NO: 263072 - DNA, 333 bp, Homo sapiens
agggctctttttatttctgagacatctgttgtaatgtttcctctttcatatacagttttatttatttcagtcttctctctctctttggttactctaggaaaggatgtgtcagttttatttgtctttttcaaaacacaactcagttttgttgacttttgaaatagcttttttgtcctttttaaaatttattttttgccttaattagcattatttccttctttctgataatatttgggttagtatgtatttttttctgtctttggctagttatttttttaggttgtttatttgagatgtttctttttttttttcttcctcagaaacatttaatag

SEQ ID NO: 263073 - DNA, 414 bp, Homo sapiens
aagagatattggcctgtagttttctttttgctgttgttatgtccttgtctggttttggtatcaaagttattctggtcttgaagaatgagttaggaagaattccctctgctttaattttttggaatagtttaagaggaagcagtattaattattctttaaaaattctataggattcagcagtgaagccatccagtactggacttttctttgttgaaggactttttattactgattcaatcttgttacttgtcttggtctgttcaggttttctatttcttcttggtttaatcttggtaagttgtacatgtccagaaatttatcagtctctacagttgttcatagcagtctctaatgatccttgatagttctgtgatatccattgtgatttcttctttttcgttgctgctgttattt

SEQ ID NO: 263074 - DNA, 541 bp, Homo sapiens
tggatgtggcagcttctgcagacggggttctggctgtggctatggaggctacggatatggctctggctttggaagctacggatatggctctggctttggaggctacggatatggctctggctttggaggctatggatatggcttgccgcccatcgtacaatggaggatacggattctctggcttttattaaatgaattgctgaaattggaagcagaggagaaacctccaaatgtgtttggtcctgtcccgtgctttcattccaaaaatccattctattgccttcagcatcaatggagagatatttagctatgttaaatctttaaaatagatttaagctgcttctgtgaatatttgttgtctttttactttcggagtccgtcacctgaaatcatattcatgtataactactctaggttgttcttctaaatttgctttatttttcttaccaccattaccttgatgttatctatcaagatcctagcaaaaacttgtattttgcttttatctaataaatgaagtaaagtataaatattttagttc

SEQ ID NO: 263075 - DNA, 463 bp, Homo sapiens
aatattctcagtaagttttttgggtttttttgttggtttgttttttgtttttgttttgtttttgagacagagtctcactctgctgcccaggctggagtgccgtggtgtgatctcatcttgctcggctcactgcaacctccccctcacaggtgcaagtgattctcctgcttcaccctcccaagtagctgggactatgggcagattccaccatctctactaaaaatacaaaaaattagccgggcatggtggcccgtgtctgcagtcccagctactcgggaggctgaggcaggagaatggcgtgaacccaagaggcggagcttgcagtgagctgagatcgcaccactacactccagactgggcgacagagcgagactccatctcaaaaacaataataataataataataatgtaaaacttaagaaagcatgtgacatttaagaataaagaattaaagtagtatttc

SEQ ID NO: 263076 - DNA, 157 bp, Homo sapiens
tgcaagttcttagcatccagtattaaaagaaaagagatggctctgttctcttagcaactcaaaatcctcttccttctccccctttaaaatataatgtagtccttgtttttccttaaaataaatattttaaagagaaaattggtccatttgaagaagc

SEQ ID NO: 263077 - DNA, 879 bp, Homo sapiens
ctaaatatttcagcaacttcagaggcacttaattttcctccttttgtaaactggcaatcttgactctaacattgctaggaattacttatctatatttgtccttaaatacaagactattaaaaaaaaatcaagggctgctttctgcccgtggataccgctgaggaagcctcgttaaagtctctcttcccagggccgtcctgtcctaaagagccggaacagctgcggaagctcttcatgggagggctgagctttgaaacaaccgatgagagcctgaggagcccttctgagcagtggagaaggctcacagattgtgtggactccaagtgaaggtgaaagagaccagacgagacctttcctaattccattcatctctgagggatttataaggaagttaccaacccctggtctaaataatcaaacagagaaaagaagaaaaggaaaaaaggatcagaggacacagaagaatttctggacacacttccatctgctaattaaatggaaggagcaagtttgggtttttttgtttttcctctacctcaatcaaagactatgaatctttcttttaatctctggagctaacttctctaattagtttcctagaggaagaggatgctttactattggcatttcacactctgcacaatggtatgaacttgacatacctcagctgatccagcagaaagagctctaaaactcaaaagttatgtcatcagtaactgtcaatagatagaagtgttcgcaggtactactagttccaatactcattgactttgtaacaactggtatattagctacaatcaaacaaaatgaggtattctttacaagaattacataagccctttccaataaattttctgtaacgatggaaatattctataa

SEQ ID NO: 263078 - DNA, 566 bp, Homo sapiens
cctcaatgctctgtgttgtgttttttctgagacatcaataacagttcttattgatccgttgacatttgggattaaaaagtcatatgcccacttagaataaaaactggttaatgtcctcaagataataaaaatcaaaatagtggtgtcttttgtagaaggacagaaaatcatgtcactgcatcttaacagttttaaaaaattataaaataactagacactaatgaattgtaccaaattaagactctctaggcctagagagtcagatgactcccagacaggcctcagaaaatgctctcaactaggccaagtgccgtagctcatgcctgtaaggccaaggggtaagaagatcacttgagcccaggaatttgagaccagccttgtcaacatagtgagagcccatctctacaaaaaaatttaaaaattagccaggcatggtgctatgtgcctataatcacagctgctcaggaggctgaggcaagaggattgtgcaggaggctgaggctacagtgagccatgatcacgccactgcactccaacctgaacaacagagtaagaccctgtctcaa

SEQ ID NO: 263079 - DNA, 374 bp, Homo sapiens
tgcctcccaggttcaagcgattctcccaccgcagcctcccgagtagctgggattacaggcacccgccgccatgcctggctaatttttgtatttttagtagagacagggtttcaccatgttggccaggctggtcttggactactgacctcaggtgatttatccgtctcagtctcccaaagtgctgggattacaggcgtgagccaccgtgcccggccttaacttttttttataataattcttttatagtttttactctcatatattatactgcatgtaagcccattttctgttagtttgcttttgaaattctttggagggtactcttcagggcttcacaataaagaccttaataatattttcctccttaattaatt

SEQ ID NO: 263080 - DNA, 301 bp, Homo sapiens
cttgtatatattgatgcttatggtactgttaagaaccctgagtttgcagtcatgttattttcatttttaacaatttaatttagaattcaaaaactttttatatgtttttcctgataaatagtgcttaaattacttgtcaatattctgttccaaagaatgcatacaaattggattttgtttttcatttgatgtgtgttaagagtggaaaagatgcataactgacgtgcatctggcatatctgatgtgccgcaactgccaacagttcagataactttatggtggtcacaggtcagtcataatg

SEQ ID NO: 263081 - DNA, 390 bp, Homo sapiens
gagactcattgattgattattgatggatgtatttgtggtctggctctggggcctcttggccaggccctgggcaaggacaagaatggggatgaggtgggggtcttccaaccccaggaaaggccctcaggctgcctcccccaacccccagcatccctgcttctggcctccacccctgccaacttacctccgcccctggatttaaagtcacagtgacgattaatcacccaatgacatggagggcaggctgcagaggagttaattaattagggaaatttctcctggccctttgaaggtgaaatgtgtggggaggggacaaggccagggacagatattattcaagctgaacaagctgactctgggaggcttcgagaacaactccaggggagcttt

SEQ ID NO: 263082 - DNA, 292 bp, Homo sapiens
acaagaatgaactccttaggagacgtctcttgttgtgttgtgggctctgtgaaggatgaagttccacacacctcaggtgaaatgtttgaaggagccattttttgttctagatgtgcacctggaacgtggcttctagatacaggtcttcaacacagcagataagatgtctggaaagatctctgggctcaagtgcaggtgaggttttagcacagttatcagaggaactgatccagaagcaggcttagttctagattgagttctagagtgctaggctgataaaatgtcccaggga

SEQ ID NO: 263083 - DNA, 405 bp, Homo sapiens
tttacaatatctttcaagtaaacagttttagtgggttttgaacccacttgttaaaaatatcaaaagggagcaccttccaattagtttgcaagaacaacatcaagattaggaaacatggaaatttactagccagatgtcaacaaaaatctgtgcataattggcagttgggattgaaaaatgaatatcattagctgcttctgcaccaagcctcaagcatttgtgtggaatattttccagttatgatagactttcaaagcatgtattcaactctatggaacctggctaggcacagtggctcacgcctgtaatcccagcactttgggagggcaaggatgacagatcacttgagatcaggagttcgagaccagcctggccatcatggcaaaacctcatctctactaaaaa

SEQ ID NO: 263084 - DNA, 761 bp, Homo sapiens
aaggtattccaagctagactaacaggtttagtatgaaagaaatgtaagcttcatatgatttttatttttatttttatttttgagacggagtctcactctcttgcccaggctggagtgcagtgatgcggtctcggctcactgcaacagccaccttccaggttcaagtgattctcatgcctcagcctgcagaatagctgggactacaggtgggcaccaccatgcccggctactttttttacatttttaatagagacgggggtttcaccatgttggccaggctggtctcgaactcctgatctcaagtgatccacctacctcagcctcccaaagtgctgggattacaggcgtgagcgactgcacgcagcccatatgattaacttttgtccatggattcttacctacctcttttgggaactgggtcagtttaggtttctaaggtaggagagccatctagtaggagcaggttaaactagatttctgaggtcatctacttatggtcataacatttagtgttgtgtgttattaaaaagtcataggatgccatctgatctgtataccatctaacctgtaccctgtatttcttttatgcagagaaggtaggaaatacaggtaaatgttacctgagtggttgggtttatgagtgaagctgtttttgcatatgttttggtgttttccatttgttactgctgtagtcagcaaaagtgattttaaacactagaactgtcttgaataaaaccatgattatgtatcccttttccagg

SEQ ID NO: 263085 - DNA, 215 bp, Homo sapiens
ccccatgctactaactttctaacattcatgtgaacaagaatggatcaattctctattactttccattaaaccagcctcctttgtgtctaaccctaaagtctagatacagactggactctatgtttcgaagttccttctgctgccctgattggagcttcacgataactgctagagtttaggtagagcatagattgtcttccttgtaaggaaataaa

SEQ ID NO: 263086 - DNA, 405 bp, Homo sapiens
gccaccttgtagctgtgagtaattttcccattttgttgaaggtaagtacaatttttaattggctacatttggttgcaggagaggttaaagaatagatttaagtaggcatgtctgaaaaggacagaaagttccacaaagcagttgtcagcagggattagatctctggatgtccttgtttgtcaggaaaagccttctgtgtatccagtagcttctgaaaatgttaatgtggcactgtgcagggagtcaagggaacagtctcctcattttcagtgcaggatgctagggaaagcctgtccgtatgtgtgcgtgggtgtgtgagtgagggctggctgtgcaccctgcctctctggctgaagtaagttgcagagcagctttgccttttcatgggcttgggtgtggggaatc

SEQ ID NO: 263087 - DNA, 399 bp, Homo sapiens
tatatctttaggctcctgggctgacataccatagggtaatttccaaggcataagagttctgggttagaactttactagcaagatccatgtcttcctccaggaaggtggtactaatttacactcataagagtgtctgttttaaatgtttgccaggccagtaagtgaaaaacagcatcatcttataattgacttttaatctttaacacagtgcaaaatatccttttatgattatcgttgtttgctttttatttcttctgtaaattgttcacatcctttgcctgttgttagtgatttctcttatggtttctggatttaaccctttatataattatcttaagttttctcctggtgctttaatggttctgctttttaaaatattattcttatttaaaaaaaatt

SEQ ID NO: 263088 - DNA, 393 bp, Homo sapiens
gagtagcattcagttaggaagtgttggagagaaaatctgaatccgcatttacccgactccaaagtccttactcctgtcatgaggccatctcatctttttggtatggaatgtaccagaggaaggaaaagcattcaggtatgttgcccaggcaggtctcaaactcctgggctcaagtgatcctcccgccttggcctcccaaagtgctgggattccaggtgtgtgctaccatgtctgaccctcagccagtttaatcagattcctctgaaggagcgttgcttggaacataatcaacttaaacaggaaaagaagacagaatgaggagctaccttgcagcatccccatggctaggaactgcagacagccacgaggagctgacagccattcctgccaacc

SEQ ID NO: 263089 - DNA, 622 bp, Homo sapiens
  misc_feature (578)..(578): n is a, c, g, or t
  misc_feature (614)..(614): n is a, c, g, or t
aaggaaccaaccctgctgacatcttgatcttggacttccagcctccagagctgtgagagaaaacatttccattgttgccatccagtctctgtttgctgttacagcagcctcagtaaataaatacactgagtaacagaacaaatgtatttatgtgtacgaatgcatttgttctattactcaggtctggaaagtaattttaactggcttgccaatcccagatgaattccagttgaagtggcaagccagttaaaattaccagccctgagtaacagaacaaatatccccatcctgggagctttatttctgataatagtcaagtataccttttatcagacaccctcttgcaggtaacagtggtcagctctggaccaactatatggagacatatacctaatatctgtggccttgctcaacttttcaatgtcagcaatggttttcccatacctttgccaacagttgttggttttttaaacagctttgttaaggtataattactgctatggtttgaacgtttgtctcctctgaagctcatgttgaaatttaatccccattgtggcattaatcatggatgggataantcatccataagcttatgggttaattgagtaatgggntatctggt

SEQ ID NO: 263090 - DNA, 449 bp, Homo sapiens
accatttaggtttgtgtaaggacactctatgaagtttgcaaaatgtattcctgagaatgtgtcgctgtggctaagcaatgcatgattgtatctgcatgtgcacatctttaccaagaatatcttactaaagattctgaggcagtgagttttttacttcttcatagataatataaaatagacaaatctaaaggactttatttattatgaatgaatagttcttgaggctggggaggtaagaaccctgtttaaaaaaaggtttataacctgattaaggaaatcatgaatgttgcaaaagaaacacatgactttgttacatttgtttggtaattatgcagttatttattcatctgtgcaagagatcattagagtctggattattttcaaaattttagtttctaaatatgacatgcattttcaaataaacatgaatatatattaagaatacagaa

SEQ ID NO: 263091 - DNA, 698 bp, Homo sapiens
aaagaaggcattgtatggtactgtgaataatatacaaaacaaccctttacattaaagaaaataatgcacttatatttgttgtgatattcaccattgcttttgaaatgcaaatgtcaaatatgcataatgacataacgtagtgctggagtagctgtggggccttggttgaatcacccaatttctccaatcttcagtttctttttcaattcacccagtgtcttcttcaactatgaaatagcatgacagtaataatcacttgcaaatctacctcccaggaagaacgtgttggaccttcacaaactatgaccagccttcaaatgcaaaacattattgtcatagtgagtgtggttttgtcagagtgagataatattgtcaaaataacaaaatccaactcaaacgtgcactgcttttgcattcttaaattgctccaaagtatttatccataatttttagatacagaatggtctagaagacattaaaattctcagaacaacctgttgaatgttgtcttacttctcgttgttcatcaagcacatcaccttatggattgcctggagcatatatctaattttctatttagaaacaaatgttgttttcaccaattactccactgggggtcattccccaactcatgacctttcttcttgtggatgagatcattgagaagtggctgtccagccaagaaaactgacactcca

SEQ ID NO: 263092 - DNA, 422 bp, Homo sapiens
gttagttgtgtatcctgatagaaaatataaacttaaaaagatttctttgtgagacagaggtctcactatgttgctcaggctggtctcgaactcctggcctcaagctaacctctcgcctcagccactgtgtctagctaatataaacatttgtttattcattccacaaatattgattgaccatgaaggatgtaccaggcacaattctaggctcttgggataaggtagtaaatgaggctgccccttgatgaggggtccctgctctcactgagcttacattccagcagggaggctgatgatgagaaaggaaaccacgtgtttcccaagacctgtacattccgccagggcagggaacatgttgcatttgtaccttgatctatcccaaatgcatgagacagggcctaggtcaggcacttgatgaacgt

SEQ ID NO: 263093 - DNA, 396 bp, Homo sapiens
tcctaccctcccatcctctctcccttccttctccactgaggcaagatagaaactaaaattcctcttccccaaggaaccccgcctttttgtgtaacagttggccataaagaaattaagaccttcattccagagagtcctattgcatgcctgagagggaggaaggctgcacagagacgccaagaagctggacagtccttgctgggtttccccactcagtctttaagcattcgatcataccccttctgtccagttgtattttacatggctgtccatacatcattgaatgtcagtgtaaaaatggattgttttccctgtatctttgggtctttattctgaagtctcttttaaaactatgatcaaataaatttgtatgccttttctcctattaatctgtcc

SEQ ID NO: 263094 - DNA, 389 bp, Homo sapiens
attctatttatttggcattctgggataaatgaggggatttgggaaatagagctcagtgaaaaattcagtacacctctattgataatttgagacgatttagtagagcatcaggaaaggtgtatgtgatgtggtcacctcaggttgctctctgccaatgggtactaagtgtaaagtatacaaaataacagtatattcaagcctcagggagtcacacaaatagtgtttcaatgtaatctcaaccagtgtaatgttgaagagttatgacaattgctttaaatattgtatcattataaaaaatttacaaccaactgcattttatggtacaccttcaacctatttgttattgggaagctatgggttaaattacaaggcaaattcaggactatgtg

SEQ ID NO: 263095 - DNA, 406 bp, Homo sapiens
ggtaaaggagtattatgaagggacagggaccatacacattcatgtagtatagcgactcattgctggcattcatcatgatgggacaggcattgacaagctatggcctgtgggccagatctgacagcttgcccgtatgtctcgtgggctaagaatggttttcacattcctgaatggttggaaataaatcaaaagaagatcagtattttgtgacccatgaaatttagatgaaattcaaatttcagtgtctataaacaaagttttattggaacatagccatgctcatttggttacatattgtctacagctgctttcccgctgcagtggcagagttgagtagctgcaatggagactgtgggcccacagagcctgaaatatttactatgtggacctttacagaaaaagtttg

SEQ ID NO: 263096 - DNA, 1045 bp, Homo sapiens
ttcagatgtttagtgcaaaagaagttgaattatatgtaactgaaatagaaaaggaaaaggaagaagcagagaagaaaaaatcaaagaaatctgtctaattcttaggatgaccactgggaggtcttaatgttttgttttattgtactgcctgaggttgtttagtgaaattttagaggaaaacagttattttgcagcattacatgcagtacttgtgtgatgttttgagaatgccagatctgtggctgtcttcattctattacatagtcaaacataggtttatgtgaagattttctttgaaaggggatttcagtaattgttgagagcagtcataattccacataagcctgagactctataatttgtccagtgtcttacttaccttcatatatgcaaatataattttaaaaaattttttaattaaaaaaatttaataatttggtgatgtttgaatattgactgtcagttaaggacatagctattccaaataaactaaatataatattgagctgcatttctcaaagaatgacaaaagcatccttatactgatgagttcttaaaattttgtcagagccttcttcattttacaatattttgttatttttattttacctttttcattttacaatatttcgttatttttattttacctttttcattttacaagttgcaatatattgtttcgttcatggaacaaatataggctgaattcaaacatgcaattaaagcatgggaagagcttctaagggcatcttaacaggatgctacatgaaaataaggaaagaaattaatacatatcacttttagtttagatttttattttatctcaagtatgtccagtgtgttcggtttgttacatattccatgaaatatctgagtgtgtattttatgattggtattatggaaggcttattgggggaacaagaaaaatataaaaagtgatctctgcccacggaaaggatttaatccaaatggtccacaagaggaatgtgcttaattcctacagtgagtttatatttttgaaaataaaagctagtaaatattcaaa

SEQ ID NO: 263097 - DNA, 504 bp, Homo sapiens
ttcagatgtttagtgcaaaagaagttgaattatatgtaactgaaatagaaaaggaaaaggaagaagcagagaagaaaaaatcaaagaaatctgtctaattcttaggatgaccactgggaggtcttaatgttttgttttattgtactgcctgaggttgtttagtgaaattttagaggaaaacagttattttgcagcattacatgcagtacttgtgtgatgttttgagaatgccagatctgtggctgtcttcattctattacatagtcaaacataggtttatgtgaagattttctttgaaaggggatttcagtaattgttgagagcagtcataattccacataagcctgagactctataatttgtccagtgtcttacttaccttcatatatgcaaatataattttaaaaaattttttaattaaaaaaatttaataatttggtgatgtttgaatattgactgtcagttaaggacatagctattccaaataaactaaatataatattg

SEQ ID NO: 263098 - DNA, 761 bp, Homo sapiens
ttctaaaaataagcaaacaacaaaacagagggtcaagatctgtttctctctttgattcctaagatttgtttaaagaaaactttgtttcagaaattacatatttcagacacagttttaggtctattttgttctattccacataatatcgatactaagacaatgattgggccagcagcattttactaaagttttcccaacgacattaaccaatcaattaaataattaattttttttgagacagagtcttgctctgtcacccaggctggagtacagtggcacaatctcagctcaccgcaatctccacctcctaggttcaagtgattcttatgcctcagcatcctgagtagttaggactacaggcatgtgccaccatgcctggctaatttttgcatttttagtagagatggggtttcaccatgttggccaggctggtctcaaactcctggcctcaaacaatcctcctgccttggccttccaaagtgctgggattacaaatgtgagccaccacattcagctcagacattaatttagcttgatatatatatatggattaattaaaggaggattagtcagaatagaaagcactgaaaaaggaaaattacagaagaaaatctgagtggtgctcattcagttgccatccagaggaaaaggaatcttagttgtcaggcctgaactactcagatcacattgagcatcttatgtctgttttgagaacagtatatcaggatgacttagcttgtagtcattaaacttgaaattta

SEQ ID NO: 263099 - DNA, 695 bp, Homo sapiens
acaacaccaaaggggaaatccagccctgtgatccagttacctcccaccaggcccccctccaacactgggggttacaatttgacatgagatttagcagagacacagactcaaaccatgtaatcattttacatatataaacattgatatgtacatttgtcatttttgatgacaatttccctttcctattttgagaaaattctcctttaagtgttatgttgaccattgggagttccttctttttcattttagaagtcaaacagactgatcctttctctataaacttttataaagttcatatacacttgatatgggcttgattttcaggacatttctctctgggactgaattttcagcaactgatgaaaaatcaaagtgatggtcaaaatctgtggactcagcagcagtgacagtggaagcattcttctggataagtaattattgctttcagccttctagaactgccttagtttctgtccacttttcagaatgtctctttttactttatgtaaccacagttgctttctattgaatagaaataagaatcccattggatgaaaagcttctcatactctggtcctatccttcttagcatcttcatcactttgcctgccattcttgcttaaatactctatgcaacagccacacttaatttcttactattatacaaatagtaagctcacagtttacaataatat

SEQ ID NO: 263100 - DNA, 476 bp, Homo sapiens
cagagcgagaatccgtctcaaaaaaaaaaaagaaacgaggcatcacattggaaaggtacagggaagattctaattttaaacagaatttctctgactctagtgctttcaaccgtaatattaccataatcatcatcatcatcattaagaccctttattttcagagctgcacagataagaggtctgtaataaaagccaggctcagtggttcatgcctgtaatcccagcactttgggagtctgaggcagatggatcacttgaggtcaagagtttgagaccagcctgggcaacacggtgaagcccatctctactaaaaatacaaaaattagccgagcatggtggcaggcgcctgtagtcctagctattcaggaggcagaggcaggagaatcacttgaacccgggaggcggaggttgcagtgagctgagatggcgccactgcactctagcctgggcaacagagaaagactccaactcaaaaa

SEQ ID NO: 263101 - DNA, 146 bp, Homo sapiens
tacaacccactaaatgtgcatgtatcatctgtccctcctagtgtctccttatagaaatggggacctgggaacaggtgcaaaatatatgctgatacactggctactggaattagcttaaagtaataaactcccctttttctgtgact

SEQ ID NO: 263102 - DNA, 281 bp, Homo sapiens
ggggaaaaagcagttactgaatcaaaaatgccttgaggacgggagccagctttctcttctgccgccttccttagcacttaggacccaattctgcacagaacaggaggacataaataattctgtctttgttggctgtctgtttactttaccttctaggctatcagcaatagtattaaccattgctacatatttaaccggcaagtactggtatcttgagtttggtcactgtttttcattcaacccagggtacagttttaaaagttttctatacctgtagtttc

SEQ ID NO: 263103 - DNA, 1544 bp, Homo sapiens
tcagggcactctatcatcaccaactacttgttgaactatgtcctgggtcttgaccttgaaggatgcacgcgttcgggttgaaagcctccatgcagggtggaaccgatcgcatccgagccctgagctagcaggggcgggtgtccacgcgagggcccccgccgtgggatgtcgccagaggagtggccacttacacgtccgcctcatgcagaggctcctggagcgcccctgccagcagcggttggggaaaaagtaccagcttgagctgcctccgctccacgagagggcgcggaagcccaagggctcgaagaactgcctgcagagggtcagggactgcgagctgtccgtgctgacgcggcgttccgtgcgtggcccggaggaccggggcgccctggaccacatggtcaggatgatcaccagcctctaacagccccgccgtggccctcgcgtgccagaccgtgtgcccccagagctccctgtgcgtggggaagaggcggctggcggagcaggaaatcctggcggctgaggaaattctggcgacgcggcggggggtggggaggcaggcgcaggaggcggacgaagcggagggcgcagagcagcacaagcggccctgcccagaagccgcgggctcccggcagggctccccaagagccggcctcccacctgccccgctgccggggtcctggggctctgtcgaccccgccccgcggaaggccagcctcctgcccctgcagcgcctgctgcggagcagcttgcggcctgacgtggtggtgccccggatccgcctcagcaaggcgcccgcgcccaccttccagacccagaggccggcgcggaagggcagcaccaaggacagtggccacctgcgaatacccaactagccttacaaggtggccacggaggagaaaccggaggctgaggaggccgagaagaagcgccaggccaaggtgcaggagaagcgcccgccgccctggaagaagaggacgtgagaatccgcgggtgcttgacacggggttcgagggcagggtgaggccgcggggctgagcaccatggccgctcccgggaccaccaggccgcgcgcgtttccacgctgtctttctagaatgctcccaggaaggagctgggggagccacatcgattcgcctgacaccagccaccctagcaatcagtacacctagcgggcatgttgcctaaaaggctccctttagagaacctcaattaagatgtttttaaagatcaatttattaggccgggcgcggtggctcacgcctgtaatcccagcactttggaaggccgaggcgggcggatcacctgaggttgggagtctgagagtagcctgaccaacatggagaaaccctgtctctactaaaaatacaaaattagccgagcatggtggcacatgcctgtaatcccagctactcgggaggctgaggcaggagaatcgctggaacccaggaggcagaggtggcagggagccaagattgcgccattgcactccggcctgggcaacaagagccaaactccgtctcaataaaaaaaacctcaattta

SEQ ID NO: 263104 - DNA, 698 bp, Homo sapiens
  misc_feature (44)..(44): n is a, c, g, or t
aattcgcggccgcgtcgactacggctgcgagaagacaacagaantgggcatttctctaatctctgcagtgctccctcctcataagatagtcatttcctgagaatttaataagaatataagattaatgacccaaagcactcttggagccggcgattaattcccccaggaaataccagtggtctttaaacaaaattgcctaaattatgggctagtgatgcatgtccgctcagggcttgggggtggggggattgtcaccccaactggttccgatagatggcgcctatcttcatgtaaatcattcaaatgatttgttttccatttttttcccagcaaaaaccggggaccatttaaacagacacacacagcagggagtggagaggacttagtaaaagcccagacaggaactttccgtccaaggttgtttccaggcctggcacgcctctcaggctcagactgagccactccagggtgcagccagggacttgagcagcagtcttgcttcctatgcacagcccgagatgggcactagcagcaagagggacgcagggtgggagtccagctgaagagcacagtaaaaaagcccctttcggccgggctcacgcctgtaatcccagcactttgggaagccgaggcaggcggattacgaggtcaggagatcgagaccatcctggctaacatggtgaaaccccgtctctact

SEQ ID NO: 263105 - DNA, 429 bp, Homo sapiens
cctagctctagatgacttcgaagagggactcagctgaatccacagaagtccctgtgcactggagtcctgatccactaggtaagaagcataaccatcctgaagtcattttatctctgacacatcagcattgaccataataaatactctagccagtttggtggagcccaatccactggactacaaacattaaatgatgttatttttgtccctaccatgatccagtcaggaagctgaatgccatgtggagaccatgtacaggaccaggggagtgccaatagcagcccatgagcccggcccgaagcccctccagatgatcccaaccaccagttattcaaggcaacagaaatcgtagagcagggataaactataaccccatgtctaaatgcccgagccacaggacctgtgagcataatcaaatggtcactgttt

SEQ ID NO: 263106 - DNA, 659 bp, Homo sapiens
ttgagcttctcctttttttttttttttttaacagactctatgtgctgccaacgagccggtctatggagcacagtttgaatagtgaggatgtctgatggtcaggaaggagatgtgtagtgtggagatcagatctccagaccataagaggagaagatacaccttatgttttccagtcatgagtcatcttgaccctccacccctgcacaaaatctgtccttgtgtatgtcggcatggagcccagcattttctgggagatataaaacatccatcaaattaggtggcctgttgttttgtttggcttcactttaacttccccattataagttgttctgtctggagaaggcaggtgaaccatttcccaccacagtggaactgacgctgcatcccaatgtccttctttaccttctagaaaacgctgcagccttaggttgctataagcagataatttctctatttctttctttaactcttttccaaatacatgcaataaaacatctggaactttgctattgactatgttgagcagctacttcgatcttactcaagattagttccctatagtttaaaacacacacactagcaccaagttcacatctatttcagtactttgaacttagtagatgaccaataactgttttccaattgattggttatctaat

SEQ ID NO: 263107 - DNA, 356 bp, Homo sapiens
gccacagcagacatgcctccgcgtaaattcctgacagggaacacctacggcctacaggagatgaggagagaagagaaggcacaaagaggtagcgtgaggtggtttccttttgccatcaccgtgcttcagagagactcactcaagcagtttaaaagcctcagaggaactttcatcaagcgcttctagacgtatttaggtgccactctgggcactccccacagaagttccagaagaactctgactttcaagtcagggatcaaggcttgttctctgtggcagcgccactctcaccagcctccagtggtggcagcgctgcaggatgactcttcccccattgatctgtccgtcctgtgacg

SEQ ID NO: 263108 - DNA, 268 bp, Homo sapiens
ctcttatattgctgttagttaaaaataaagtcgggttgcaacccactataaatcttattctacatgttacgaattcaagacacagagggctgctatccagtgtgctagccatagacaccaaatgtcttggttcccaatcttttgcattagagatatgtgcgacatatttaggggttaaatggtatgatgtctggaatttgcttgagaatagtggggagcgggaggtgaaaaataaagcaagttggccgttaagtaaggccatagaagc

SEQ ID NO: 263109 - DNA, 342 bp, Homo sapiens
aacaggaaagtcatgatctaatttatatcttaagatataaacacataaaatacgttttaaaatccataagtttctaataataataacaagctatttgatcacaattagaggatgctagtgaacaattcatttttctgaaagctagtaaagggcaagaataaaccatgtgtcctgcctttccaacatgaactgtactattgggtaaccaaagagtggaggaggagaaattctccttacagaattattccagctaatgtatgaagaaggaatgatagaattagtatatttgcattttataatcttttgttaattttccatgtagttttcctaatatcagagaaa

SEQ ID NO: 263110 - DNA, 423 bp, Homo sapiens
aatctaggctcttaaaggcaaagaaaagatctagatgatatggatgagtagggagtgctgatttgaaaagttgagggtgaatagaatggttcccagctttctacagcatgtggaatttccttcccttggggggaatagagaggtacaggttctgcccaccgtgggggcctgtgtttgactctctcccagaccccagagtggcagaatgtttgatgggttagctgagtggacacttggctggggactgagctctaagccatagtctccagggctatgagcagtgggaccactgaagtctggacatcaagcccttcacagtgaccacactgtcttgaagtctagaactcttccctcagattccaagattgggtgaactcagggggttctatgtgactccatcaaggggcagggaaagagcaggca

SEQ ID NO: 263111 - DNA, 500 bp, Homo sapiens
aaaaaagaaagaaagaaagtgggtttggtctccctgcaaaacaggaaggcagagggcagccctgggtggctgctgtgagggagtctagtctggctcaggccttactttcgtcatctgtaaagtgagaaaaaaagtcccaccagcggaaccttgccatcctcagaggaggactggtgctagctggttttacagatgagctgaggccactcagctgaagccggacaactgtggagcggctgggccagtgtgcaataccaggtctgagagctgagcccgaggacctgagccctgcacccctgggctggagagagcccacaagcatcaccccttccaggcatcactacttcatctggggacgggaagactcagaggactgggccagggcctcgggctgtcagctgggatgcagccctggggttctagctgccagctccagggatcagggccctatgctaatgctctgctgttgccaactttaaattcttagggttttttgtttg

SEQ ID NO: 263112 - DNA, 454 bp, Homo sapiens
tcaagcaattctcctgcctcagcctcccgagtagctaggattacaggcacgcgccaccacacccagctaattttgtatttttagtagagatgaggtttctccaagttggtcaagctggtcttgaactcctgacctcaggtgatccgcccaacacaccctcccaaagtgttgggattataggcatgagccactgcacctagccttagatgcttctttagttggtggttgtgttacaaaatgcctctttttaaaaggatggctcatttttataaacaaggtaaaaatgtgatttctacttttcagtttcaaaagtgcaggaagtttctttgcttttgaaatctgcagctgatcatcacagacacgcctctctttgcaagcgaatactattttgctgaaatattagcaaggggagagcttactagttttactgaagttgccaataactggattgtat

SEQ ID NO: 263113 - DNA, 432 bp, Homo sapiens
caccatgccaggatggaaatgaattattttgtaatgtaaaaaataaaggaaagaggacagctctaactaaagtcaggactattgctatgttggacatgcctcagccaggactcagcacagcaagtgggttttttctgttcttaaaaatatacttaagttgggccaggcgcggtggctcacacctgtaatcccagcactttgggaggccaaggcaggtggatcatgaagtcaggagatccagaccatcctgagtaacacggtgaaactaaaatacaaaaaattagccgggcatggtggcacacacctgtagtccctgctactgaggaggctgagacaggagaattgcatgaacccaggaggcagaggttgcagtgagctgagctcgtgccactgcactccagcctgggcaacaaagcgagactccgtctccaa

SEQ ID NO: 263114 - DNA, 358 bp, Homo sapiens
catggatctctgtgtacatgctgtgagatacaatctgaggtttgggtgaaaactggcatcttgtcaaataaactgcttgaataactattgctataaaacatataaatttaattactgcaattattttgtgattgtaaatcaaggtatccagaaactggaaagtctatgaagcagccaggctagcccctctgccagggaaagatgcagtgagcgagcctgggctgcatgaggcacacaagcgcgatgccaggcaaacacccgtcgggagggcccagccctgccttctcgttaggatacgtgagagcttatgaaattttaaaatcttgtttaagaaataaaaaataaaggtatctcacca

SEQ ID NO: 263115 - DNA, 576 bp, Homo sapiens
acggaaaatacatgcatctgggaaaatttcacaagatattttatcgaatgttagtatactctacacgctgtcctgcaccttgctttttttactctatgcgtcttgcagatcattttatataatacatagagaggtgactcattctttttaaaggttacattaagtttgtagtatgtcagaatggcaatactataattgttttaaccagtgacgtttaagttgtttccagattttttgatctaacaaataatgtgtcatgagtatagaatttttatgttcatgtactagtatagttataggatgactcatatttgaagcaaagtacaaaacgcatgctttctgtagctactcataaattctggtatgagcaaaatgtcaagatgcttgcttatcaccgaccaagtgatgattaagctcttgctaaactgtatcaaaggagaaaaagggaaatacaggcttatcctaacaatttcacagtgaacagtaatctctggcattcagttaaagctagacttgttctaattactttgattttgaaattattattaaataaaatcacaagccttttctcaccac

SEQ ID NO: 263116 - DNA, 666 bp, Homo sapiens
attttcctcctcttacaaggatatcagtcatactggtttagggtcgactctgattaacttacagatttgggaaggggattaggacttcaacttttttgggaggggctggcacaattcagtccataaagagcttgttctttaccagctgtgccacttggatctaccctgcagagcaggacctgtgtgtatacttgtttgtgaagacgatagaaactgatgttgccatccaactcccggcatctagtagggagagtcagagtggcaaaacaggcattgcctgcgtgccgctactacctacttggtacaggtcttctgtagcatggagctttgggaagcagtatctgctgatgttcaccagctgctaaatctcctaggaatagctcttctactcctgggacctacaggagatgagagctgctactcaactgaccccactagaatagctcttccataacacagagttgtgggggaatgggggtagtctcttatctcgaatgccatggcttcccactattatgactgaatttcgatagattttgttgaatgaatgttttacaatttgttgtaagccctctgatcaatctccagagactgaatcattgtctttgctaatttttgctggtttaataagtgttggagagaagagatttatccaagctctttata

SEQ ID NO: 263117 - DNA, 683 bp, Homo sapiens
gagggctgtgcttcaccatggtgtctgaacaggatgggtgggctggctcaggctgttgattcaggtgagtggatgctccaaatgcctggatatctgccagagggtggagcagagagggcctgggcttcaccacagtctccacacaggaatggttgggtggcttggtatgctgatctgggtgaatggtagctgcaactgctaggagatctgcctgggcatgaagcagagagggccctgctgtaccatgatctctgcacaggcagggtggggtatcttaggttgctagtcaatgtcaccaggtgtttcaaatacctggatttctgcctgggagtggagtggagagggacccactgcaccgtgatcccagagaaggaggttgggccacccagaaatgatacacataaacctgttctatgtctccaagctggtcctggctgcaagtctcctcatccaggagaaactggatgagcagctttcctccagctccaggcctgtgacaggggagagcacaattccagtgcctactgatgaggcactttctgtaattctggctgtagagacctctacaccactccagagcaagcgctccaatctctggcccaagacaaaaatgcctgtgcagccacggtgccagattgccaaagaatggctgactttgtatgcactcgggttaaaaacggcat

SEQ ID NO: 263118 - DNA, 449 bp, Homo sapiens
aggagtttttgattttgccctttgccttgtgatctttattggcctcagaagcacgtaatctttgttctcccttttgccctttgaagcatgtgatctttgtgacctactccctgttcgtacaccccctccccttttgaagtccttaataaaaacctgctggttgtgcggctcaggtgggcatcacggtcctaccactatgtgatgtcacccctggcagcccagctctaaacttcctctttgtactctatttctcagactggccgacacttagggaaaatagaaagaacctacgttgaaatattggggatgggttcccccgatagtgctgggagggcagcacgcctgcagtggacacagaagctctgagccccatacctgtcctgctcacctcttccatttggctgttcctttgttgtaccctgtataataaactggtaatcccaagaata

SEQ ID NO: 263119 - DNA, 641 bp, Homo sapiens
cccgagtcactcagctgatagtcatcagaaacaagtttcgaacctagtccagacctttcctgctcccacacctgagtgcttttctccatgccctggtgcagagaagttgctgggaatcttcacccagcttctcccaaagttaacctcctacaaaacatagtacattatcaaaatcaggaacctaatggtgatgcaatactatgaactactctataacttatattcacattttgccatttgtccacaaatgttcttttttgggtccagggtcccaacagcgtatttagttgccatctctccttgtctcctccaatctggggctgtttctcagtctgtcttccataacttcagaatattttaagagtactggtcagttatttgtagactgcctctcagatttggcgtgttggttgtttctttgtgattaaattctgattatgcatttttggcaaaaataccacagacataagattttactcttcttgggcatcctatcaagagatacaggatgacaggtatgtcccattacaggtgatgttaactcaggtcatctggtttaggtggtatctattagatatctccaatggaaagttgctgtttgcccctttgtgatgaataagcatcttgcagaaagaaacttt

SEQ ID NO: 263120 - DNA, 436 bp, Homo sapiens
ggttttcaccatgttagccaggctggtcttgaactcctgatctcaagtgatacactcgctttggcctcccaaagtgctgggattataggtgtaagccacagcgcccagccctatgacagattttaatttgatatttgtatatcttgcaggatgtggattaaggttgattttttatgcttttgagtgtccaattgttttggcttcatttgttaaaaagggtattctttgtctactgaatacttttgctcctttgttaaaagtcagttgaccatctatttgtgagtctatttctggattctccattttgtttcatttatctacgtccctattttttcaccaattctacatcctcttggttaccgtagctttagattaagtgttgaaatcaggttgtgtgaatcctccaatttttaaaatattgttttgatgattataa

SEQ ID NO: 263121 - DNA, 552 bp, Homo sapiens
gtcaagttcattatctttccttgagttactttttaaactccaaaccttttcagattaactctcaaggttttgcattgtgtatgattttttttttttaattttccaaaataagagagagtaaaaggtccctgtgtgtttaacatttaaaggcatcatttaaaaatatttcctaagaatatatgccccttggtggtgctgggtgtctcctgcttgagtcatcctaaaatctagccaactcagcctgcaaggagtatcaccaccacccgccaggatcagaggtgcgctggctgagctgggctgtcccggagatctggttatgggtggggagcagttgaaggtatgaggacaggctctgagagagccatggggttgacgaaagggcatcgagacagatgtcccagaaactgagtgagacccatcatgcctcactcaggcccccggggctgcatggggaagacaggacccatgtgtctgccagggcctagcacagagttggcaggggtggctagattctttgttctgttttctaataaattgcaactcacttccaag

SEQ ID NO: 263122 - DNA, 455 bp, Homo sapiens
attaatgaagctgttgatttttttttttttttcaggaagaatgaagaatggaagaatgaacaaactgcaggttagccaaatagtgcaagtaaacaaggaaagacaataaacaaatagccaaagcaattctgaaatggatgtaaaaacactgattttccttaaatgttttctcataattaaaaaaagtcactatccagagatcgtcagctattagtgaagtttttgtttctaatttttaaataaattatctgtttctgtgagcccaatgaacttgataacgctctcagagtctgggagccttgtcaaatatgtggggagctgcgtcttctggatgtggaatcacgctctccagtgctgttctcaccagcagtgttcactcctctcctgatccccttccactctgttatatttgtattttaatgtgtcccttttgattatcactgtgaactcagagc

SEQ ID NO: 263123 - DNA, 594 bp, Homo sapiens
gttaaaacgaaaaatgaaagcagtgtattctagatgtcatttcttggcagcagacacactaccttgctcatagcacttagaacaacgcttggcaattagaaaatgctccataaatattttgactgactccaggtggagaaatgttaattaagcattaatcatctaccataagcccacactgactgagcattttattcttcaacataatcctgtaatattggtatgataaacagattcaaaagtaagaaaagttagataagaaattcagtcaaaaccttcccctccacatgcatatactctcctacccatagcaaacagctcagatgcacctgctatgccgcctactatttactaagtgttcccccatgagttcccttcttgctctgactctgggtgagtgttaagctgctctgaaaattaagataagtctcttaagttgcatggcatggtttctctgtgactttagctttgcctctataaaagtaatgtcataagttaaagcatgaaacactcacttcacatgcatttgaggtgctttctgatcaacagcttcccaaggagatcatttacctgatttgttttcctacagccacc

SEQ ID NO: 263124 - DNA, 348 bp, Homo sapiens
gagagagggtcttggtctgttacccaggcttgagtgcagtagcacgatcttggctgactgcaacctccacttcttgggctcaagggattctccagcctcagccaggcatgagccattgaagtccagctaatttttgtattttttgtagagatggggtttccccatgtttcccaggctgatcttgaactcctgaggtcaaagcaatccacctgccttggcttcccaaagtgctgggatgacaggtgtgagccaacgtgtttggcccacttatttatttatttttaaatatagggtcttgcggggtctggtgcggtggctcacgcctgtaatcccagcactttgggaggc

SEQ ID NO: 263125 - DNA, 274 bp, Homo sapiens
gctaatcagagaggcaaatgatgaccctacaatttcagaaataatgtttgcatcatttgtggttgagctttggcatgtgagcgagtgttcctaaagtggaaccagtgtgtaccagcccagcacaaagtcagcactcagcatttgtcaccgtgtgaggtatggcaaggaagagcagctcctttcagactcaactgtagctctaagtgaaatcaatggccgaacaatctaacacaattggtcacatattgatagaattaaacactgctgttaacgt

SEQ ID NO: 263126 - DNA, 442 bp, Homo sapiens
gtaaaagagttagtttggagttaggagaagcatcagcaattatgttttcaggctgccatgttcctagaatctttgtctctacactgtaaatattattgatgaatagatggcctcttatactaaatagttttagactgtagcagagaaaacagtttaatggttaagaacaagacggaatcagactgttgggattcaaaccctagtttcgctgtttactacgtatgtgaccttgggcaagccatatagccatactgacttagtttcctcatctgaaaaatggataatgatgctattataaaaaacagggataatgataacactagtaatactcacatagtggtattgtaaagattaaatgatattgtaatttatagcaagtgttcagtacactacctggcacatgttatttccttaaataaactaaaataggctcatatgcaaa

SEQ ID NO: 263127 - DNA, 347 bp, Homo sapiens
agcctccagctcagccaggaaatgcccagtcccagccctgcctgggctggtaggtgtcgagtgatctgttagtggaaggtaacaatgacaccagctatatcaatgacactgccccggccagctgggaactgatctctcctctgcagataagaggaggagaaggaggcagacttgcctactaaattccatgtcttttcagccaatttcaaacacagaccagaggagggagagggagaggagggagagggagaggaggagcctttcccagggtaatccatttttaaaattctgtatgtccgattacttttgtggagacaaagggaaaagtacagaagatcacacgccta

SEQ ID NO: 263128 - DNA, 476 bp, Homo sapiens
cttggtcaagtaccagctctcatttatttctctgcaacattagaaaactcaaactcctcttctttaaaatggaaataatatctgttctgctgaactgagtgttgtgagcatcacatgaagtagggattgtgaaagtgacttgtaagctataaaacactgctgatggctgatgggagttgtcatggccgcttcagacccacagcaaagatttttgataaggcatgactcctaaacggatgaatgagtgccccattagagccaagattcttttattctttttgttgttgtagttgttgagacagaatcttgctgtcatccaggctggagtgcagtggtgtgttctcagctcactgcaacctccatctcctgaggcaggagaatcacttgaatccgtgaggcagatgtagtgagcagagatcaaaccattgcactccaccctgggagacagaatgagactccatctcaaaaaaaaaaaa

SEQ ID NO: 263129 - DNA, 304 bp, Homo sapiens
gagatggagtctcactctatcgcccaggctggagggcagtggggcgatctcagctgactgcagcctccacctcctgggttcaagcaatcctcccacctcagcctcctgagtagctgggatcactactccctgctaaccaatatggctttaaacacattaggtaacagtagaatccaaaactgaaagagcggggagctggagatcagtatccagatctttctactcaaggcaacattaacatgtccatctctgagacattcaataggcttttctcatgcaaagcgtcgacgcggccgcgaattta

SEQ ID NO: 263130 - DNA, 2711 bp, Homo sapiens
  misc_feature (2549)..(2549): n is a, c, g, or t
gcctctgactccatgcctcccacacacgcggtctgtgcagctaacaccaggcgcctacccggaggactcagctgttctgtttacatcgtggcggcacctctcaccctgacccacgcaaaggttctggagatttctggagaatatatttattaaagccacctcttcactgaaagttaccaaaagggtcagtttaggaagtaaatgaagggtcagtgaacagagtcaaacgcagaagtgggcttgttatgggtagggctttcagcatatgataaaaggatatttgttttttaaagtgttggaaaaactggttttctacttggaaaaagtaaaggttgtaagctttgtgtgtaaaaaagaaaaccatgaaggattggaagggaatgcaggtgtcgtgtttataaccttgtggttcgagtccctcttaacaaggactccaaagctggaaagcaggagggaacaaaggtgaaaattaaggcggggatgctcgggccctgcagtgcgctctaggctgtgcttgagccgggactgtgcccgcagcctgctaagggctgctttctcgggccagggaaagcggggcagcgggggacctgcggctgtgcctggactgaagccgtcccgcatgtccccaccctccagcatgtgttcacctgtccccctcctcgcagcagcctcaggacaaaacagaatgactcaaggacagcacttcctgcagaaagtctagaagtgcccagaatggaggcacgaagcccctcccagggaggactctccctcattgacggaccattcttggtgcagattcctgactgcacgcaccgaaccgtagacaagcgggcatccatccatgttgccccagagtgcccaggaggcaggcagcggggcgcccagacagacgggttcagcctgcaggactgcgaggcgacctgtgaaaccgacccaggcatcccaacaagaacaaaagcgtggtcctgtggccgtgtccacagcaagttccactttcaccttgctcatttctgcattgttggaagtgtttacaaccagcatgtgctttcataatacaacctcaggtaagaaaggaaaaaaattatagttgtatcatacctcaaatacgtttttaagttctacaatttaagctactctagaatagttagaatagttagaaaatggaaattttgcttaatggtgtttctaatatgaagggtacaagaattgtggtaggctctaactgttggcattaatggcatttttcttcatagaaacatgcaaaaaacaaccagtgttagatttctagaatgatcagacctatgcatatgtacttaattgtattaaccttgttgataatgttaaatggtaacatagagttaaccttagaacatttcctaacaattgatgtctttgaaacaattatttctgaggacaatacaggtaatctgcagtagctgaaagcaaattttggagtaaggtaaatttaagtttaaatcctcatgttgtcacttaaaaattatttgactgttgacaggttattaaatctctgtgtattttgtcacatgtgaagtaaggataatggaatcattttgtataagtaaaagaaaatgtcgtgtagttattcgttgctcaaaaacataccatgaatcattggaaggcagggactgtgacctactttccttttcatcctttcatcttagaataatgtctgctaaggtacttaatgtatgctctctgaaaaatgagtgaattaatgaatcttaatgtgtctttttcatgccctcataaatatgcatgtttaaatgcaatgaatcttactacataagcattgtttggtagctaggcactcaatacacattatttctactttctcaaggcatgtagaactgaatcgtaatcaatgatcaaaccataagtattctgtatctttagtaaaggctgtgaataaagagtagcattacttgttcattcatttgaacctttattgcatgaacactttgcatcagataatataccagcaaatgtactagtgttgttgttgttttggacatttggaaatttctgtttgtcttcatgcagataaagtatcttggtagtaattatttttttcacatgaacatttgaaaacctgtagaaaaggccgataccttttgctcagagatacctaaaatatattacagggtaataaaataaatcaactagatcaataagtttggtattgttaattttaaagtaactttattttataattgacatgtgtagtttgacaaattaaatgcaataccaagcttaaaataaaaatacagtgatactgtcccatcattccccagtcttacttttctatcctgggggcaaacacttttgaatctttcagttgcttaatttggcatttatatatctccatagttttatataatatgtaaatatagctattttgatttataaatgttaattattatcaaacttcaagttttagcagaagtgtggtgatgaatcagttttaaatccatctctcctaaaaactgtagataaatatacacacatacttgtgtgcatgcacacataanacatgaagagtgcttacagttactacactgattgacttcatcttctggtaagttatagatgaactctttcatgatgccagttctatgtttttcctctttccaatgcctgctattgttatgaaaattttggttaaatcgatattgaataaacatcatgcattc

SEQ ID NO: 263131 - DNA, 511 bp, Homo sapiens
atgcttcggatatctcaagaaatctctaggcaattcaaggaaaaaagccctcgtctggcagggaacacctgaaaaatcaccctggttaacagaaaatctgcgtgtgatcttaggcaagccattaaatctctctgggcttcaacttcttcctctgtaaaaggaaggagttaggtgagcaaaaaattccatacccattacaggtcaatgcttaaagaagcaacgaggaaggaggtgtgatcaaaggaaggttgactggtggaccacccagagaactcttcaaggctgatgttttcttggtgaatgaccctaatctaggcctagcttttggcctttcaggtttttgaccttcctaatgtccaaagaggtgtagacattctgtgatggttctgacctaaccatttatcaaaccctctgtacacttatgaattgactattaaaatcagaacactcatatcccctatacaggtactacttccagacccttcctgttattaagtatcccaggaagctg

SEQ ID NO: 263132 - DNA, 425 bp, Homo sapiens
gaacacagcgagctgtctctgtttaaaaacattccagagttgaagtccagattggcctcacataacccacagtggggctgcaaatcattgacagttggttacaaaaataaacaatcagaggctatgacatttctagactggcacggtggctgacgcctgtaatcctagcactttgggaggccaaggtaggcggatcacctgaggtcaggagttggagaccagcctgaccaacatggtgaaaccccgtctctactaaaaatgtaaaaaattagccgggcgtggtgggcgcctgtagtcccagctactcaggaggctgaggcaggagaattgcttaaacccgggaggtggagcttgcagtgagccgagatcgtgccactgcactccagcctgggtgacagagcgagactccatctcaaaaaaaaaaa

SEQ ID NO: 263133 - DNA, 506 bp, Homo sapiens
gggaaggaaatggagggcaaaagaaattgagaaaaaaatgagaaaggctgtaaacctaaatctaggattataatctttgatgggaaaagtttccctgtctctcactaaaaaaacaaacaaacaagaaaccttggataatagctataaaatgttaacatgcaataaagtacaaagcctcttgcttaaataaggaaacatataatttttgtggttttatttaattcatttctttttattatttattttattcactattgggtgacagcataaggaatatcagatggggttacactcagacatgtccctttaagtgtgcactttttaatcagtctttttttttaatggtacaattgaagatgtctattattggggccatcaccacttctttcagtgaattcattgaaaaaatcttggttggttttgataaaaatcaaatgaataattgcttctcgttatcatatcagaaatgcagatgcacgtttggttgacaaaacacactgaatttg

SEQ ID NO: 263134 - DNA, 1648 bp, Homo sapiens
  misc_feature (1)..(1): n is a, c, g, or t
  misc_feature (4)..(4): n is a, c, g, or t
nggnagaggcgcaggcgcggtgcttcgcagcccgcttccggcctcacacctgccaagcatcacacctgccaagcatcacacctgccaagcatcacacctgccaagcatcacacctgcgatgcctgcacgagctgggtgcggtccgcgcagctgcagtaagggggcgacccggcgtctgttagtcggcggttcatctccttcgtgcctcgatgagctttaacgccattttcctccattctctttcttcacctcttgagtttccaagatggcaactatcaagagtgaacttattaagaatttcgcggaagaggaggccattcatcacaataagatctccattgtaggaactggatcggttggtgtggcttgtgctatcagcatcttattaaaaggtttgagtgatgaacttgtccttgtggatgttgatgaaggcaaactgaagggtgagacaatggatcttcaacatggcagcccttttatgaaaatgccaaatattgtctccagcaaagattacctggtcactgcaaactccaatctagtgattatcacagcaggtgcacgccagaaaaaaggagaaacacgccttgatttagtccagcgaaatgtatccatctttaaattaatgattcccaatattacccagtacagtcctcactgcaaactgcttattgttactaatccagtggatatcttaacttatgtagcctggaagttgagtggatttcccaaaaaccgtgttattggaagtggttgtaatctggactctgctcgttttcgttactttattgggcaaaggcttggcatccactctgaaagctgtcatgggctgatccttggagagcatggcgactcaagtgttcctgtgtggagtggtgtgaacattgctggcgtccctctgaaggatctgaacccagatataggaactgataaagatcctgagcagtgggaaaatgtccacaaaaaagtgatttccagtggctatgagatggtcaaaatgaaaggttatacttcttggggcattagcctatctgtagctgatttaacagaaagtattttgaagaatcttaggagagtgcatccagtttctaccctaagtaagggcctctatggaataaatgaagacatattccttagtgtcccatgtatcctgggagagaatggtatcacagacctcataaaagtaaaactgactcttgaagaggaggcctgcttgcaaaagagtgcagaaacactttgggaaattcagaaggagctcaagctttaaagttgcttaaagctaattctgtagattgaagatgaaatagtagttatggaattgtatatgtcaaacttttgaataaatttgaatttctaaaagttggaaaaatagaggaaagagtgacctatttagtatagccttccagcttttttttttttcttttttgggagggtctcattctgtcacccaggctggagtgcagtggcacaatcatggctcactgcaaccttgacctcccgagctcaggtgagcctcccacttcagcctccagagtaggtgggaccacatgcgtgtgcctccatgcctgcctaatttttgtatctttttgtagagatggggttttgccatgtcatccaagctggttttgaactcccaaagtgctgagattac

SEQ ID NO: 263135 - DNA, 1156 bp, Homo sapiens
  misc_feature (1)..(1): n is a, c, g, or t
  misc_feature (4)..(4): n is a, c, g, or t
nggnagaggcgcaggcgcggtgcttcgcagcccgcttccggcctcacacctgccaagcatcacacctgccaagcatcacacctgccaagcatcacacctgccaagcatcacacctgcgatgcctgcacgagctgggtgcggtccgcgcagctgcagtaagggggcgacccggcgtctgttagtcggcggttcatctccttcgtgcctcgatgagctttaacgccattttcctccattctctttcttcacctcttgagtttccaagatggcaactatcaagagtgaacttattaagaatttcgcggaagaggaggccattcatcacaataagatctccattgtaggaactggatcggttggtgtggcttgtgctatcagcatcttattaaaaggtttgagtgatgaacttgtccttgtggatgttgatgaaggcaaactgaagggtgagacaatggatcttcaacatggcagcccttttatgaaaatgccaaatattgtctccagcaaagattacctggtcactgcaaactccaatctagtgattatcacagcaggtgcacgccagaaaaaaggagaaacacgccttgatttagtccagcgaaatgtatccatctttaaattaatgattcccaatattacccagtacagtcctcactgcaaactgcttattgttactaatccaggtcagctttgttgttttaaattttcaacttttagattcgggggtacactgtgtaggttcattacatgagtatactgtgtgatgctgaggtttggggtaggattgatcctgccacccaggtactgagcaaagtacctaatagtttttcagcccttgctgctctcactccctccctctctagtagtctccagtgtcatttgttcccatctttatgtccatgtgcacccacatgtttagctcccacttatagtgagaacatgtatttggttttctgttcctgcattaattagcttggaataatgatctccagctgcatccatgttgctgcaaaggacatgattttgttttttatggctgcataggacagctttattttcactgttcagtgaaggagtttttgggggtgggtttagtaactttgaggagaaaaagaatttaatgaatattaaatcgtaaaccaccagtataattcca

SEQ ID NO: 263136 - DNA, 463 bp, Homo sapiens
tgtaatcaatagacaactattggaaatatggcatatgttgacaaacacttaactagggaaatcaaagatataaatcatgtttataaaaaattaggcacgcaatcatgtgattcatgcttcaagaaaatatatgaaaaaagtgttactccattgtgttataaactagcagattttccctattttgaaatgcatgtaaacgggctcggctgattctgaaattgtactgtatcctttggtatttacttatatggtcaaatacttgtttgtaaaagtgatggttctgatacctttgatcaaacatagatacaaacctcagaaaatggtaaatgcaaagcagtttacgttgtaaatcatgatggtgtcctccagcacaaccatcccacccacacacctagactacagattctgatctgtgaatattttcaccaaagtgacatttaaacaagtggatttttcacaaata

SEQ ID NO: 263137 - DNA, 607 bp, Homo sapiens
agagacagcaggttgtaaaaatgtttcttcttactggacttaaaaaggtgcctggctcttagttgattgattatctcctggatctggaatgtaaggaaggaaaacaaaagaggaaaggggattgtctatagaatgtacatttttcccacaagagacttttgcagggcaatttcaaggcatggcaagaaaatatattttggtgttaaatattttgattttttttttcttgtctcataatgttacgccagagtcagattggaaagtaagtcacgatctatagggtcaaataaaacccatctgatgagaatttatggtttgtagggcatgaccccttcaaacaattagatagaaatttgggcaagataaaaaattcagagcttagtcctcagttcctaaataagatggctacaagaagaaaagctacatacctcccccatcttttgcccacaagaaaatttctagtgagccgcaagatctttaccctaaggtgtttctgttaaaatgtaaactgatagcttatctttacagatacagtcacccccctgcccaacagacacaaatgcatatctgattgttcccctgcctcgttttgtcttgtcttatgtta

SEQ ID NO: 263138 - DNA, 1388 bp, Homo sapiens
acaatttgtagtaccataaaaacataaaattctcagaaataaatttgataaagtttagcctgggagcagtggctcacgcctataatccaagcactttgggaggcagagatgggcggatcacgaggtcaggagatcaagaccatcctggctaacaaggtgaaacctcgtctctactaaaagtacaaaaaattagccgggcgtggtggtacatgcctgtagccctagctactctggaggctgaggcaggagaatcacttgaacccgggaggtggagattgcagtgagctgagatcacgccactgcactctagcctgggatacagagctagactccatctcaaaaaaaaaaaatggttaaaatttgtgtaatacttataaattgaaaactataaaacattgctgagggaaattttaaaaagacttaaataaatggagagatacactgtattcagaaattggatctattaagatgtttattctttccaaatcaacctatagagttagtgcaatatcaaagtctcagcaggcaaattaactcgctgattctaaaatttgtaaagaaaagcaaaggacctaaacttaaccaaaatattcctgaaaataaaaaaaacggttaggtgtggtggctcacacctgtaatcccagcactttgggagtctgaggtgagtggatcacttgaagtcaggagtttgagaccagcctggctgacagggtaaaaccctgtctctactaaaaatacaaaaatttgccgggtgtggtggtgcatgcctgtaatcccagctaccctgaaggctgaggcaggagcattgcttgaacccgggaggtggaggctgcagtgagccgagatcgtgccactgcactccagcctggattacagagtaaaactgtctcaaacaaaacaaaacaaaacaaacaaaaccctaaaaaaccacaaaaccctttgaaaaaagatggaagactcagactagtaaatttcaagatatgtaatagtaatcaagatagtgtggctttggtgtaaggacacaagtgtagatcaatggaaaggaatagtgagtccagaaatacatacagccaactgactttcaagaaagatgccaagataattcaatggggaggccaggcacggtggctcatgcctgtaatcccagcactttgggaggctgaggcaggcagatcacctgaggtcaggaaatcgagaccagcctggccaacatggtgaaaccccatctctactaaaaatacaaaaattagctggacatcatggcacacgcctataatcctagctactagggcagctgagacacaagaatcacttgaacctgggaggtggaggttatagtgagcctagattgtgctactgcactctagattgggtgacagagccttctc

SEQ ID NO: 263139 - DNA, 364 bp, Homo sapiens
tgtatttttagtaaagatggggttttgccatgttggccaggctggtctcgaactcctgacctcaagtgatccacccatctcggcctcccaaagtgcagggattacaggcatgagccaccacacctggcttgcctgtaatatctaataacttactttatcctaagatcacataaaacatgtatttgttttgttgggggaagtctagagtgggtttattttcataaaatgggaactgaaacttagtaaatgagcatgaatcagcacagcctactggctgtgaatgtctctttttggcctcttatagatttctttcttcaccctctctcataagactagagaatctataatctggatgttaatttta

SEQ ID NO: 263140 - DNA, 538 bp, Homo sapiens
tggggtgagaaaaatgttctgaaatgtattgtgctggtggttacacaacattcatgctgattatatattaaaaatcattaaactgcacattttaaataggttaattgtatgacatgtgaattgcatcttagaaaagtcgttgtataaaaaaatcaagccacattgtaatggaggccagaatatactattaacaaaatctttacccattcacacctctgacaaacatatatgggaacagctaggcacagtggctcacgcctggaatcccagcactttgggaggccaaggtgggcagatcacttgaggtcaggggtttgagaacagcctgaccaacatggcaaaaccccgtctctactaaaaatacaaaaattagccgggcgtggtggcgggcacctataatctcagctacttgggaggctgaggcaggagcatcacttgaaccctggaggcagaggctgcagtgagccaagatcataccactgcactcctggtgacaagagcctgggtgacaagagcaaaactctattaaaaaaaaaaa

SEQ ID NO: 263141 - DNA, 382 bp, Homo sapiens
ctgcatcgtcccatggtggaaagcagaagaataagggagtgcacacacgagagacagatggaacttgtaccctgaagcctttctataatcagccttaatccattcatgtgggtggagcccttatgacctaaataccttccattaggcctcacctcccaacacttttggattaggggttaaattttcaacacatgcttttgggcggacccattcaaaccacagcaatgtatgtgctgcaaagaacaaagattttgggatccaataggtagaatttagctccacattgggcaagtcatgataacttcctaagttttggtttcttaaatggtaaaacagatgtaccaatatctaattcagcagattactgtgagcagtctgagat

SEQ ID NO: 263142 - DNA, 413 bp, Homo sapiens
ggataaatgccttctccccattatttccttcaatccctacaatacccctgtgaagtaggtatcattcgaatcacattttacacggggaaactgagactcagagatcacagctccggagctcaggcttttggcaataaccctccactgcctgcctccgcaagacagcaaaaggttggctttgttccccaagtcatccagtttcccacagtgatgggttaagcgtcataacccatggctttatccaagccatttgaattgaagaggaaggtggacgcagagccagcatggttagggccagtggcctttccagacttgcgtgccaggagagatgggttagcgtgggggaggccggagaaggggttttcaagtgaccccggtaggacccccacgtctctctcccgcctttgctcagc

SEQ ID NO: 263143 - DNA, 344 bp, Homo sapiens
catggatggatttgtcaaagatcaggccacctcatctcttccattggccaccagtttataaaccaaagagtatctgagacaggtctcaatcaattcagaagtttattttgccaaggttaaagacatgcctggaagaaaataacatggacccacaggaacagtctgtggtctgagtctttctccaaagataaatttcaaggcttcaatatttaaagggaaaatgtaggctggaggggagaggggtagagtatagtaatccccatgttgtaagagaaaaggagcgggtacgggaatagtcaattatgtattcatctcatgctcaataaattggcactttacataag

SEQ ID NO: 263144 - DNA, 282 bp, Homo sapiens
aattctcctgcctcagcctcccgagtagctaggatcacaggtgcccaccaccatgcctggctaattttgtatttttggtagagacggggtttcaccgtgttggccaggctggtctcaaactcctgatctgcctgcctcggcctcccaaagtgctgggattacaggcgtgagccactgtgcccggccgagtctaaacatttttaaactctcagtgcatactgtcatgttatctttcagagagttgccgtcagtttaaattctcagtggtagggattgcgagtg

SEQ ID NO: 263145 - DNA, 440 bp, Homo sapiens
taaaaacaaaaatcaaggcatcttcactcagtcttcagctgataaaaatgttgacaacagtgggagaaactcaaaactcacatgttttggctttctttataaagggaaaggccatagatgaatttctaaatttaaacctccatctccagagacacccttctcgttgctgattcagtttcatctcatgaatacacagggtcttggataggattctgcatgggcagccaagatatctgttgtattcctagctgtgttttttatttctaggttgccctgggacactctctatatatcattttccctgaacagaaaccattttgagagtaagtacaacagcattcgttaaatgctctctgctcttcaagggcaagatgttgttgtcaagtttagtagaaaaacaattgaatgtaaaatgggctcattgattaaagctatacaac

SEQ ID NO: 263146 - DNA, 314 bp, Homo sapiens
aattgcagaaaattagactcagaaaaaatcttgaaagaagccacaggaaaagaacattttacctgctgagaaacaagggtaagaattatatcaaactttcttccagaaaccatctaaggaagaaaagaataatgtaaaatatttaaagtgttgaaagaaaaagccagcaacccagaattctgtatctcataaaattatccttcattcgtgaaggagaaataaagactttttcaggcaaacaaaaattgagcgaattcattgccagtagacctcccttgcaagaaatgttaaaagttcttcagaaagaaggaaaa

SEQ ID NO: 263147 - DNA, 403 bp, Homo sapiens
atgtttagttcttgccgcccaggtatcttgtgtccatttcttcatttcaggcagagcttggatccaaaaatggagtatctcagcaattctgagaaatatttaggaaagtaatgggatgttttggtgtatgaatattgtgggaaccaatttataatttttatatgtacagggtattttggaattacataaagatgaaggggacaggttaggcaatatgactgattttttgtagaataaaacagcaccatttcagagatagcatggattgcatccaggctgacataagtaggcaggattcaatctcattgagtgagacatagtagtagccttaagtggcaccacttttagttgaatggaagcatatttgttcttggggttggagttggaccaaggtcatagatac

SEQ ID NO: 263148 - DNA, 454 bp, Homo sapiens
agtattattttatgtgatcccacataggagagcttaatatttaaacagttttatgctttagttgattcagagttcacatactctttggaccttagagtatgaaaattgatacatctttaattatcctggtgtagtctaaagaacccaaattttatagccaaagagactatcctgatattttccctggctttgtaaactcggatagattgcttattgttttttgtttgtttgtttgttttttcttgagacagtgtcgctctgtcgcccaggctggagtgcagtgtcgcagtcttggctcactgcaacctcaacctccagggatcaggacctctcattctcagctacttgggagggtgaggtgggaggattgtttcagtttaggaggttcaggctgcagtgagacaggaccactgcacttcagtctggtcaacagaacaagaccttgccaaaaaaa

SEQ ID NO: 263149 - DNA, 372 bp, Homo sapiens
ggatcagacaggttgagcttaagatagccatgagacatcaactggagatgtctagtagcctatttggtagttgtcatccctagggtaaccaattcatttccgttttcttgggactttcccgattttaaacagtgaaagtttcttgtcctgggaaacccctcagttcctgaagcaactgaagtcatgaacatgggggataattcacacaatgagaaaagcagtcagtttggccaggtctgagccctgaggagctccagtaataaaggcagagcaagaccacttcatctcctgctgggctgtggactccctgagggcaggcaagcataatccatgagggctgcccaatcacacttgttaggaatgaaaggaaaa

SEQ ID NO: 263150 - DNA, 384 bp, Homo sapiens
caggggcaggaaagcaggaagtaaggaaatgtcaactcttggacttctgagtctgacttaggaaaaattaaggatggaaaggtcagttagggcctaattttggagtgtccagattccctgagagcgtgcttggattttatttgattagtagtggggagctattgaaagttttgagctggacaatgacattaattaactaattaatgcaacaaatatttatgtgtgtcaggcactgttctaggcattttggggtataacaatgagcaaaataaaccagaaaaaaaattcctgcttctaaaacttatgttttagttgaggaggcagtcaatattactatgtgtaataagtatatcatatagtatgctaggtaatatattctgttga

SEQ ID NO: 263151 - DNA, 497 bp, Homo sapiens
cgagggtaagaacgtgccttttctttcttacacattcccagaagacccacattcctcattgggctctctgtaacagtatttactaagcacttgaataactggacatgggcaccatgttgctaagttgattaaaggttggtcttccactctgccactggccacagcacaaagtgaaaacagatgtcacaagcaccttgtagatctgtcccttttttcttctgatgttcaccctccttttgagctctttctttctccaacattgcttacaaaataatctttatgcatctgagagggagcaaatattcagtaactttctgcagctgtcctcactaaagaggagaatctgttgaatgccactggaaatgtaaggatctcttgtgacagtaacatctcaaggggaaactagtggttaaattgttaattctttgagtctgaaacttttttcatttgcagtgcagataagtgcctgatcttgcagtatcacgtttctgacttct

SEQ ID NO: 263152 - DNA, 364 bp, Homo sapiens
cttgttgggctaaaacagctcctgacagaccccaagcagtgtagatgaacccaagttaactttccttattaacatgctgaagtctccactctggaaggagctatagcttcattaccataacatgctttctatgtgctggtatgactcactgcatctgtgcaactgggaccccaattctacatgcactgatgcaccttctcccatcaccattataccataaaactctcctgttacttgtcctcagggagacactgctttggagaatactcccagtgtcctctttacttgagccaagtaataaaagtattgatcaatacctgtgttctctggccgggcgaggtggctcgtgcctgtaatcccagca

SEQ ID NO: 263153 - DNA, 443 bp, Homo sapiens
cagcaagggggaattattttccttcccctagagctgctgggaaaacgactccctgcttgcctatgcctggccagctgggaagattcttaaataaccgactggacaccggccccaggccacgcagtgctcccccagtaaaggataggtccacgtctttctcagtcctggccaaaaacgtctgtgaacacacccactagaaacaagccaggaacaaaccgctgctctgaggatctgattacatttccccagggcaggtttccaccagagcgagcgcccctccctcctcctttcccagaactccgttgcccaacaactgttccagctcctgctcctgaggcgggggcagcctgaggaaaccagggcctcaggcgacagccggctctgttaggcaggggcaggacaaagtgcaaggtccctctggaatcccccaaggcagagggcag

SEQ ID NO: 263154 - DNA, 210 bp, Homo sapiens
gtgagcatccttgtcttgttctaattctcagggggaatgcactcaactcttccccattcagtataatgttggctgtgggtttgtcataggtggtttttattactttaaggtgtgccctttctatgccgattttgctaaggtttttaatcataaagggatgctggattttgtcaaatgctttttctgcatctattgaaatgatcatgtaat

SEQ ID NO: 263155 - DNA, 444 bp, Homo sapiens
atgtctcctcaactagttacacagctcttcccagcactgtttcctttctggaaacctcacaagtgaactttgaagaaggaatctgtatattcatgagtagagtttagtaaatgacttcaccagttagggggtcaaccatgctaacagctcaaatcccttgaaccctcttcactgccctagagttggatttggtgtgattctcttcccacgaatggagtaaattcagagaagcacccagaggaggaagtcaatgcccaatctgtagaaagagaaattagcctggacacagcaccacaggctatagtgcagaactgtgagaaaccttctgaatcatccaaggaaaaagaaaggtacaccttaatgagaaaagaaatttctgcagtgtccctgaagtcttcaagatcccagaaatcccttggaaacgtaaaacaaaacaaaacaaac

SEQ ID NO: 263156 - DNA, 359 bp, Homo sapiens
aaatctcaaagacaactgaagaaagtagttgttgaaagttgttctaaaaaattgcctgactaaaatgggaggatgggcaaaaatcatttgcataaccacttgcctatatcaattaaatttcaattttatgcatttctcaggcctttaaacttaaaacaattttccaaatattaatggctcatttttgacacaatctttcttccactgctcaacctaaatcctcctctggctttaccccccacacttaggaagagaaaggataaaagggtaaagatagtcatacatgacccccatgaacaaaaatagtagtcaggggaaaagacacagatgtagagttgggtactgagtctgggtggggt

SEQ ID NO: 263157 - DNA, 442 bp, Homo sapiens
gacttgtttttgggagtaaaggacaggctagagttaaagacaaagcctaggcttctggctaggaaaactaggtgggtgatgttatcactcactcatatggggaacaaagaagagaagcagatttggaagatagaatgataagtttcattttgtgcatgtttaatgtgagatacttttgaaacttgtgatactcaagagaatgtctcaccggggacggtgcctcacgcctataatcccagcactttgggaggccaaggcaggtggatcatctaaggtcaggagcttgagaccatcctggccaacatagtgaaaccctgtctctagtaaaaatacaaagattagccaggcttggtggtgtgcacctgtaatcccagctactcaggaggctgaggcaggagattgcttgaactagggaggcagaggttacagtgagccaagatca

SEQ ID NO: 263158 - DNA, 281 bp, Homo sapiens
ctcttcttttttgcaaatgtatttatgagtaaaactgtaaaacagtatagattacataagccaaatcatctatttcttaatatataagccaacttagtttctattttcatttgcttaatacatttttattgagcacatactacatgataagtactgttttggtgctgcatgtacaatgaagaataaaagagacatggtctgcctatatgagagctcacagtacagacagtcccagacttaggatggtccagcttaacaatttttagactttatcatggtgc

SEQ ID NO: 263159 - DNA, 234 bp, Homo sapiens
acccaaagaacagctatttggtcaacagatttgcattggtatttaccttaaagactggtttatatgaaactaaaatagtgtaagagactttgaggaaacctatagaagacaagtttagttgttttatatatgtaaggaggaaatcaggtttattgaaaaccactgcttatgaacccaaccatgcctcttaatttttattaaaatacttgtcactgaaataaagtaagttttttc

SEQ ID NO: 263160 - DNA, 368 bp, Homo sapiens
ctgggtcagaacatattttctgcttgtttgctgcatcactttatgtccacagttcttagctagaagttactctgtcccccagcagaggatagctggcaaagtctggagacatttttagttgttacaattggcaggtgctgaggagaaggtgcaccagtgggtagaatacacagatgctgctaaacacgccacattgcacggtacagagcccacaacaaagaattatccagcacaataatgcgagttaggaaatcctattttagataaatcagctcaatctttattattcttggcttctgtatgaaatacttgtgtttttgaggatagtaaatgagattgctatgaaagcacacagtaagtgataaagt

SEQ ID NO: 263161 - DNA, 268 bp, Homo sapiens
tcttttgaggctttccaggggcctagctagaaaatccaagttagttctaggtcaaaaatatttaatttagaattttgatattggggagggaggtctatcaaagatgtgaaaaggtttaaaacacctgatcaaaacaggatcacaggtcactgtgaaatgatagtcattcatttaaccagaatgataatcagaggacttcaaaagcaatatagaaagttacctggatttaaaaaacattaaccctttcaaagctattttcctgagtaat

SEQ ID NO: 263162 - DNA, 436 bp, Homo sapiens
aagcatccctgtatgtgttctgttgtatagttgttactcataacttgttacctctctttttttttattattattgtttattaactatgacacaattgcactggagactggtcagctccccatcatagtagctaaggacctgcaatttggaactaaaaagatcttgatttgaatattggtttcaccagatactcactttgcagccacaaacgagttttgtaaccttgctgcacttagtttacatctgtaaaatgaagaaaatgacagtatctacattataaggttgcaatgaggattaaatgagatgacacttgtaatgtgcttagcaatatagcctggcacctacaagcacttaataaagccagtgtggctattattctttatctacatttaccaagttcctcctatgtaccaggcgtggtcctgggtattgggga

SEQ ID NO: 263163 - DNA, 418 bp, Homo sapiens
tatccaagccttaaaggttgggggcaggatttgactataaagggatagcacaggacaatttagggagggaggcagtgatagaactgctctgtaaatgctgactgtactggtggttttaagattctatatatacatttggtaggccaggcacggtggctcatgcctgtaatcccagcactttgggaggccagggcgggtggatcatgaggtcaggagttcgagaccagcctggccaacatggtgaaatcccgtctctactaaaaatacaaaaattagctgggcgtgtggcacacacttgtaatcccagttacttgggagactaaggcagggagcattgcttgaacccaggaggcagaggttgcggtgagcccagatgcactctagcctggtgacagagtgagactccatctcaaaaaaa

SEQ ID NO: 263164 - DNA, 168 bp, Homo sapiens
atgtatacatagaaaaattagccagacatgttggaccatgtctgtagtcccagctattcaggaaggctgagatgggaggatcacctgagcctgggagttcaacgctgcagtgagccacgatcgtgccactgcactccatcttggacaacagagtgagactgtctcaaa

SEQ ID NO: 263165 - DNA, 183 bp, Homo sapiens
tgaacctttacggaagttgattaccctagaatttttataagagcattagaatttgccagctttcttcaagagttaatataggccgggcgcagtggctcatgcctgtaatcccaaagtgctaggattgcaggcgtacacctccactgccaataaatttttgttcagatctgtgtgcctgtacaa

SEQ ID NO: 263166 - DNA, 501 bp, Homo sapiens
ttatgagtaataaagtataaggggaaaggcttgcagagagaaaaagcaaggaagagaagtatgtcaatgaatacaaattctctcatttgataagaaaatgtaaaattatgaataaatgtatgacatctcattgcaagatatgataagactcaatttcccctgtttattgtcaccgaatatctaggaaacaaaaattttcaggacttcagtattttagcaggaagaaatctagtgactatagattgcctacccctcaccatctcaccagtgaaggtcttggtcagtagtctgtagctctccattttctgccccctaaatgtgtcttgcagtgagtggtcagtggtcaaatgaatggaacagtagaggcacttctatatcagcatgaaaaaccagtgaaatgctgtcttgccaatactgtgtatacagagagacatttataaaataataagcaggtaaaacttgtcttggcaaaaggctggctcattacattcagtgaatgtt

SEQ ID NO: 263167 - DNA, 347 bp, Homo sapiens
agaattctgcaaataactagagatgtgaaaagaaaaatgaagttcaagcattccaatttccaagttagaaattggaaactgtttcccaaagaagcagctggataaataatggccaagttctgcaataatactgttgctacattttaattacattttgatttaggtagaatcttgcaggttggttttgtatcctaaccacattcatcatgcaggttttatggagaaatatgttccaaattctaacagtggcttacaaatgaacttgtagagcacaacctgattgcaatttggaaatggcttgcaaatactttatttttattaatattttatttaaaatattggaagat

SEQ ID NO: 263168 - DNA, 471 bp, Homo sapiens
tgagtttgaaaactttattatctggctgttttgtcaacatgataatttcatatacaaccacgtaaaaacatctctggtgtttagatttttccgtttattctagctgtttcatatttgtagacgtagccatggcatgtacagaatatgcatagcaacaggactttcatataatatagtacagttggaaaaaaacactatcttgctagggagatatgtcaagtagattctagtttccacattattttgattttactgtatttaactttgtatatattttacatgtattaaatgttttgatgaaacatttcaaactctatattagaaatgttggcaaacattagtatctataaaatataatctgtatatattgtataatctggatataaaatatccagaaatctgtcatatttttataccaattacaatggtcaaagttgacactattcttaaatatacttaatgattatctgg

SEQ ID NO: 263169 - DNA, 229 bp, Homo sapiens
tgaaaaattagttgcatttctatacactaaaaacaaactattctgttgtttaagccacccaatctatgatattccattatagcaccctgaactgactgagataatgcctaactagcaagagactgaaaatgttactttttggattccatatttatgcactcaaaaatatttactgtgtacttattatgtgccaggaacctttttaaggtgctggggctggagtgatggc

SEQ ID NO: 263170 - DNA, 432 bp, Homo sapiens
caattctgttgggagaggtgaaggccataagctaatagatgtatagtctttgttttaataagaaaataaaaaatttttataattagcaaaattgttgctaattataggaacaattttgcacatgaacaaactgctatctacaaagaagcaatttgctgttcttaattgtactaaaagtaattgccttgtcttaccattcatgtggttaggaaactcttcacttcaaagatacacttcagtttagcaattattgccaactactaatgtctaaaattggaatgagtatggcatttggtactgttgttctttgttgaactctagttttgtttataggtaaagagatgaagaaaataatctttctaccagatatccattcatggtctactaactgcttctaggaaataatactattaaataaccatttcaacctgc

SEQ ID NO: 263171 - DNA, 505 bp, Homo sapiens
cacatcatgtgattgtagggaaagcctaggctatcatggagggaagagattggataaattatttgaaaagcaagcctgtgaattgctgtggaggaacaatagcctgtctcttatctggagcctttccaaggaaaagcaaaggggaccctagaaggcttcctgggagacagtttaattctgaaaacaaagcagtacttcacctcttgtgtgttgggtagagctgtaaaacagaacacagtcaaaatagtcattagggccacatcaatgtctgcccaaagtcaggcgagcattcccaggaaggtggggggctgtggcagttgcacacatcaacctcctttctccattgtcacacagcagaagagcgtgttccattctactaaagttggggcggggggagttgaataatttattgactgaaaactgggggcctgagttagatggtaaaaaagtttagagtgctgttttttgttttttaagttatgtttgttttatatattgaagtgct

SEQ ID NO: 263172 - DNA, 376 bp, Homo sapiens
tccatacaatacatttcatccttgtagccctggaacattaaacagtgcaatgcactgctgattttgttttgttttgttttttgaagcagagtcttgctctgtcacccaggctgaagtacagtggcgtgatcttggctcactgcagtctccacctccagggttcaaatgattcttgtccctcagcctcccatgtagctaggaccacaggcacaagctaccatgtccagctgatttttgtatttttagtagagatatggtttcaccatgttggccacgctggtttcaaactactggcctcaagtgattagcccgcctcggcctcccaaagtgctgggattacagatgtgagccactgcacccagccttgcactcctgt

SEQ ID NO: 263173 - DNA, 89 bp, Homo sapiens
gatgttccagaaagctgagtctgatctggattacattcaatacaggctggaatatgaaatcaagactaatcatcctgattcagcaagtg

SEQ ID NO: 263174 - DNA, 390 bp, Homo sapiens
gcagcgctcccgcagggctgagtgtccaaagccaagtagaatgctcagggtgccgctaggaagagggcgatgggcagagcatgctgctgatgtgctggggccatctcagtcttgtcaccaagaggaagccacctaaccctcactggaaactcacaactacttagtcaaaaaatgggccaaaacattcataatgggtgcataagcaggggcaggggcggaggtcaggctgagcaagatgagaagtcaggtgggactgggcaggacaggcagggagggtgctgctgcaggtgtaaagtgaaccctcgggcggccggagagccaagttcccaaccaagagaagcaagaagaagatgagccccgaggagccacctcagcaacaagtgcaggact

SEQ ID NO: 263175 - DNA, 194 bp, Homo sapiens
ggggtcttcctatgttgcccaggctggtcttgaacccctgggctcaaacgatccacccctctcagcctcccaaagtgctgggattacaggcatgagccactgtgcccagctggaaataaacttttatgtgttaagtcactaatattttgggtctgttgccacagcataaatccagactacccagacactttccc

SEQ ID NO: 263176 - DNA, 301 bp, Homo sapiens
caaaaaacaaaaaacaaaaaaaaacctgatgccgagaatggtacgtaggtttcactgatgcccgtggggtctaccgcacagacaaggaaagatctctgcactagaatgtggagccactggccaggtgcggtggctcacgcctgtaataccagcacttggggaggctgaagtgggtgggtcacgaggtcaggagtttgagaccagcctggccaacataatgaaaccccatccctattaaaaatacaaaaaaattagccaggcatggtagtgggcacctgtaatcccagctactcgggaggct

SEQ ID NO: 263177 - DNA, 380 bp, Homo sapiens
atgtgcaggagagggtcgtggctgaggtcaccctgggtacggtcaggatggagtagtaactgaagccagggcttggaggtggtcagctgccaggggtcacagaggttcagggacaagaagagagagcaggtgtccctcgacttagccaggtcatggtgtctcagcaggagccattccggcacagcccgaggcaaggcgagggtgagatgaggtagcgagggtgggtctgcctagggcatggggcagggagggcaacagggaggcaccagaggacggcaggatgggaaggagatgccagggtgggcgtcatggagatgccagggtgggcgtcatggagatgccagggtgggcatcatggagaaggcaagggtcactggagc

SEQ ID NO: 263178 - DNA, 431 bp, Homo sapiens
taaccagctgaataaatgaaatgaccatgaaggattaagtgagacctgttgtaacgtttcataaacccatcagttttttaagtgtgcatgagaatgggccatcaaatatagctggttggagtcccagaaaacttggcatgccttaatgtttgaaaatcccaggcagagtacagtggcttacatttataatcttgacactttgggaggctaaggcaggaggatctcttgaggccaggagtttgagacagcctgagcaacatagtgaaacaccgtctcttcaaaacaaaacaaaacaaaaaaagtagctgggcatggtggcgtgtacctgtagtcctagctacttgagcctaggggttcaaggctgcaatgatctatgattgcatcactgaactccagccagggagacagagtgagactctgtttcttaaaaa

SEQ ID NO: 263179 - DNA, 507 bp, Homo sapiens
atgaagaagttcttcaccgtggccatccttgctggcagcgttctgtccacagctcacggcagcctgctcaacctgaaggccatggtggaggccgtcacagggaggagcgccatcctgtccttcgtgggctacggttgctactgtgggctggggggccgtggccagcccaaggatgaggtggactggtgctgccacgcccacgactgctgctaccaggaactctttgaccaaggctgtcacccctatgtggaccactatgatcacaccatcgagaacaacactgagatagtctgcagtgacctcaacaagacagagtgtgacaagcagacatgcatgtgtgacaagaacatggttctgtgcctcatgaaccagacgtaccgagaggagtaccgtggcttcctcaatgtctactgccagggccccacgcccaactgcagcatctatgaaccgccccctgaggaggtcacctgcagtcaccaatccccagcgccccccgcccctccctag

SEQ ID NO: 263180 - DNA, 197 bp, Homo sapiens
gtctgattccaggacactggtacctgtttctgtgctcaacgttcagatcctacaatccagtgctaaaatgaacagtaagagatatgaagaaataggaaacaggagttctggctaatggtcattcaacataatgacattaggtaagtttctttgtgcctaggtctcccatttgtaaagataacctgcagcagcttaca

SEQ ID NO: 263181 - DNA, 876 bp, Homo sapiens
cgcccgcctcgtcttcccaaagtgctggaattacaggcgtgagccaccgcacccggctccttctagaagttttatagtttgagattttatacgtgttctatgatccattttgcatcaatttttctatatggtgtgagttatgtgtccaagtgtgtttagcaaatggtatttaattgttcaagcaccatttattgaaaagattctccttcacccccactcccactgaattgcttttgcatttttgttgaaaatcacctgcctgtgttcatgtgtaggtctgcttctggaatctctatttcatcacactgctgtacatatttacccctttaacaatagaacattatattacttaatgttacataatttcatattgtatattaaaatctggaagtataaaacctctagattggtacttatttttcaaaattgtttgggctatcctagattttttgtgtctccatattcattttagaatcagcttttcaatatataaaaaaacttgagaatttgattgagattgcattgaatttacagaccaatttggggataaaggtcatcttaaattcagccttccaatccatgaacatattttacctctccatttattcagatcttccttcatttccttcagcaataaagttttcagtgtagagtttgtgcatgtttctattaaacttgttatcaagtgtttcgtgtttttatgctattataaaatgacatgccatattatatatgctattttaaaattttactttctggttgtttggctgatatatgcaacataaatggatttttgtatacatatcttgtattctgcagtcttgtttaactcagttattagttctaatgacttaaataaatcctttagtatatact

SEQ ID NO: 263182 - DNA, 303 bp, Homo sapiens
gaggacgaccttgtggctggcaagtgtcctggaggctggtccctcaggaccctccctgtcctcatctggaattcacctttcttctgagcacagcctgtgtggcgtcgtgtgctctgatggccttacccagaggccaccttggccgccggccttgctttctcctgtttgtgggctgcgagctgtcattacgtgactgagtcctgatcaggcctgggggagcccgattctaacgaccctgaggctcatgagggaccccgtctctcctgctgtgtctccccgcggacccgcgctctccttccttca

SEQ ID NO: 263183 - DNA, 480 bp, Homo sapiens
cgtttttctgaccctttggccggaacttgatctcttggctccctccttggccacccaccacctctcgcacagcccctctgtttttacaccaataacaagaattaagggggaagccctggcagctatactttttcaaccaaactcctttgccgggacccagcccgacaccctgctcgcctccgtcaaacccccggccaatgcagtgagcaccatgtagctcccttgatttaaaaaaaataaaaaataaaaaaaaaaaaaaaaaaaaaaaaacaaaaacaaaacaaaacatgcttcgctgcctatggctggctttgagcagcaacattattgacaaacatacaggttcacacattgaagttggctaaaaaagaaagtgatgctgattgcagtggcatgtgaagaaaaatgtgtgtgtgcttgttcagagaggaactgaaatatataccactataagtcgtatgaggtacatagtattgtact

SEQ ID NO: 263184 - DNA, 365 bp, Homo sapiens
atttttattaaagacaatttgagacagggtttctctgtgttgctctgggatcctcctgcctcagctgggcttatgggatcctcctgcctcagcttcctaaagtgctgggattactggcatgagtgactgtgtccaggccacatgcaacttaaaggaagcacagggaagtgctcagtgtgagggaaaaaaacataacagcagggggcaaggctggaggaaaatgttgaggtgacatcaatgagaacttcagggacccgtgtcctacagagtcggaaagagaagctaaagttctacagtgatgagaatgttatccctgcaaggatggttaccaaggaatatcagaaataaagagcacctgaatgaaa

SEQ ID NO: 263185 - DNA, 514 bp, Homo sapiens
agctttttaggttaaatcgtggcagtagtttttctgaaaacgcggcgcattttgatagctggactttaggtcatccccaggcttcctagcctttcccgcgtcctcaggggttctggttctaaccctggagaccaacaccacatgcgtgtagatggtgaccagcaggagcagggagtctcagacccagtgcagtcagacaggctcccattcccagtagcgaaagggtcccgcagacccaaagcctaaggagccaacaagcagttcgtccatggagcctggcctggatctcccactgtcttcctctccagcattcagccagatgtttgctactgtgttgtcttagtcctggcccaccttatcctttcctttaagaaataaaaatctcaactgggtgcggtggctcacgcctgtaatcccaacactttgggaggccaaggcgggcggatcacctgaggttgggagttcgagaccagcctgacacatggagaaaccccgtctctactaaaaatgcaaa

SEQ ID NO: 263186 - DNA, 1322 bp, Homo sapiens
acagtgcaccgatgccttttattatgcatttttcacttcaggagattgtgcaagatccaaagagaggaaggccaggaatgtgctctctggtaattttgctgtctaaaactaccgaaatgcacatataaatctttaattgtttttataggaattagttaagatttatacagaaatgaatctacctaaaattgctagtcctgtgcttgttgcttactaaaatgtattggattaaaaactattttgcatcttttaaagtttattagcctttgattatacaggttgagtattccttatccaaaatgcttggaaccagaagtgttttggattttataatatttgttaccgattcagcattcctagtccaaaatctgaaatgctccagtgagcatttgagcatcatgtcagtgctcagaaagtttcagattttggagcatttcaagattccagatttgtagattagggatgcttatcctgtagaatatattctagcggagtaagctaattagctacttttcaaaaacttacctggaaaattgtgagttataagtcactttgattaagaagttttataagtttatttaaactgtgtatatttagaagttaagaagttttgtaagtttatttaaactgtgtatatttagaagttgtttagaaattctaggaagttaagtttgtcttttacttgatagccactgtaacttacttagtgtcccttttataaaagaatctttcctgttggattgttttcttttttttctttttttcttttcaagactgggtctagctctgttgcacaggctggagtgcagtgtcgtgatctcggctcgctgcactctccgtgtcccaggctcagctgatcctcccgccttagcctctccaatacctgggactacaggcatgcatgcctggctaattttttgttggtttgtttgttttaatatgtagagatgaggtctcactgtgttgcccaggccggtcttgaactcctaggcacaagcaattgatcctcttgcctcagactcctgaagtgctaggattacaggtctgagtcactgtgcctggcctaaagaatgtttaataggctgggcgtggtgtctcacgcctgtaatcccagcagtttgggagaccaaggtaggcgggtcacctgaggtcaggagtttgagaccagcctggccaacatagtgaaacccatctctactaaaaatacaaaaagtagccgggcgtggtggcacgcacctgtaatcccaactactcaggaggctgaggtaggagaattgcttgaagccgggaggcagaggttgcagtaaaccgagatcactcca

SEQ ID NO: 263187 - DNA, 650 bp, Homo sapiens
gaggacacaggcttctggggtgagttctgggaaaaccaactgctgttccagtgaggctcaaggcaccctgccaagccaggtctgcctggtagtgagggcagaggtccctccaagtctcttctctctagaacggcagcagccacctgctaaatgtaattcaactcagcccatttccactgagcttggattcatattcaagagcttcctgctttcctaaacaaatccttagcttctataccagactagccatttcttagaaatgggatcatcttgatttgcacagcaacctcaataagacctcaatagtccagcctcctcttcccaagtttcaggctttatttacacgacttgggtgaggtatataggatgggcgtggtggctcgcgcctgtgatcccagcactttgggaggccgagatgggtggatcacctgaggtcaggagttcgagaccagcctggccaacatgatgaaaccctatctctacaaaaaatacaaaaatcagctgagggtggtggcatacgcctacagtcccagctactagggaggctgaggcaggacaatcgtttgcacctgggaggcagaggttgcagtgagctgagattgcgccactgcactccagcctgggtgacagagtgagactccgtctcaaaa

SEQ ID NO: 263188 - DNA, 373 bp, Homo sapiens
gtcaaggatagttttaccttaatattatacttaaacataaactgggtattttaatatataaaatggaattctgcttctgaaagacaagctttactttgagccatttttaaactcattatgcaaaggaataacgattttgcaatgatgattccaaaactatgttacagtatatggatacaatggtgagggttataatccatgactcttttagaatacaagtgataatatagagttttgctctgtcacccaggctggaatgcagtggcacaatctcagttcactataacctccacctcctgggctcaagcaattctcctgcctcaacctcctgaatagctgggactacaagtgtgcaccaccatgcccatctaat

SEQ ID NO: 263189 - DNA, 301 bp, Homo sapiens
aaaccctggaagcactgacattatgtaatgactttgaacataaaatggcaatttacaatggtcgtactgtacatctgtttgtccagatacagattgaaaagagggaccttggatatagatgtttacctgagaccttttacctgacctgttgtaacacatttagaaatgctgtaagaaatctttgtgaaactaccccatgactttgaagcttgatactacaccatcaagatccaagtatttctcaaataccccaacgcagcttatgtattcatcaggaagttgagactcttggttatattta

SEQ ID NO: 263190 - DNA, 776 bp, Homo sapiens
tgtagagaaagatgtgattgcttccccttctgccatgatcggaagtctcctgagacatccccagccatgtggaactgaagagaagcactctggaatcctagaagaactacttaaactcctgcagaaggaagtggatcttagcaacataagaatcaactatggtagtacctgtgatgccccctcctgaaaaaagccagcactaatttgaagtgacgaagcacatagggcacagaatttaaggagatacaccctctcaaggtcatatgaatgagcatttccttgaattttttccttaggcacttcagacgattcaccctagtccctgcttgttccagaattgtctttcaaaatggaagatttatcccttagctactgggagtgttgttagaagaaaatctttatctaagcaatccttaggatgggctttggttgaaaaagtggccatccaaaagtcataaccgctaccattggcagcccataacccaaaactactgatcaactaaaaaatgtaaatgcctggcttcctctccccaaatcaggacaattctgttgggccatctcaacatcaaagcttactgtgaggtggctgaaagcttcactgggactgcatcacagctcaacattttcttcatcttaatactgcttccttaccctctgcacatgtgttcatcacaagagaaatttctaattactttccttttcactaacctgtatttcagagtctacttcttggaggaaatcttgtgaaaccaaaaataaataacaaatacattaaa

SEQ ID NO: 263191 - DNA, 271 bp, Homo sapiens
ccaaagtgctgggattacaggtataagccactgcactaagtccagtgaatcattttccagacaacatttactgaatatccgacactgccttccacagacggggaggtttcccaaagaggccgtgctttttgagaagctggcaagataaccctggggtggagggaaggtggcccgcagctgagaccaccaccttactgtccccaaatcctcaccagaggttgctgacacttccctcttccccatcctcatactacttttcaaattagaaaaa

SEQ ID NO: 263192 - DNA, 419 bp, Homo sapiens
taagaaatatataaataccacaatgaaaaggcactttggcttgaaaaacacctgaggtttgcttgtgggaagtaagtgtcattaggttacagcttgggagttatcaggaagtggtggaaggagggctgtctgaagtccaatggaaagttctgacatcaatgtgatgaatgtgattcataacacatgcagtgacctgatgaagctggtagatgtttaaggtgcctgtgtatgtgtgtgcacattttgtgcattcctgcatggctcatttcagccgaatatggttttctgcacttcctagtgtttttctcatgcataagcaaatgcaaaatttatattatgctcagattgtttctggatgtatctgatgcatttgaacaaattcacattttcaaagtaagagttaaagcaaaagtgtcaaa

SEQ ID NO: 263193 - DNA, 565 bp, Homo sapiens
cccctaagctcatttcttactttagaaagctatctgaggtacactacatgagttctcttaaaacccaaggaatctagggagatagataggtcaacccaactgttttctggcctagtacgtgaagcatctcatttatctgctgagaatagcccctcacccgccgatgagtggagagagaacataacgaaagaaagctctcactccaaaggacccacgtgtaagtcactctgcccatgacatgagtagcagcaggagccacttctgaactaaggaggtattctcttatttatgagctaatggcagccttgcactctaaaggctctggaaatggttaacagcctgcaatgagattcagaccctacccacattttccattctccatcccccaacctgtgcccttgttgtcaaactaagaaaacacaaaattgcatgcttgcacctgacactgccaattaagtctaaactagaaattccacagaaacaaaggaggggcagaacttaactgcatttctaagctcccactgtccaatctttttagtgggcatagactaccttatataatgta

SEQ ID NO: 263194 - DNA, 407 bp, Homo sapiens
gatgtgtgtttttgctttattatcaagtatattcctgacaaggagagaaattctgttttgatcagggattagagagaactagaccccatataacatgctctccaaacttcttctcaagaccttaagacctagtaactcaggagagtggacagcaggggtgttctggaatctcttcttacacctagacagccagcaaaacaactcttataaaagtcagtgcaaaagatgtcaatataaccactaactatacacaaatgaattttcatcctatcttgttcttatctggatctcaaaggtgtctgtggccactggccatgaggagaagcatgatggagaggatgttaatgtgggaagagatggcagtcatacctaactgtggattaactatcttactttggcaaattaaa

SEQ ID NO: 263195 - DNA, 636 bp, Homo sapiens
ctcaaacaaactgatattgcaaaaacctttagtatctgctttgaggggcaggcttgcaagtggggagtatgaggtagaagtggtgttgtacttgtgattgggaaggggtggcggaggagagccaggggataccgaggggtggagggaggccagggactctggcagcggctgcataggctgggcgatagagcaagactccatctcataaaaaaaaaaaaaaatcaactcaattcttcaaaagaaagtattttctacagtttacactccctatattatgattgcccatcctcatagaaaatacagaatttaaaaatctggaaatgtaaaagtaaatcaatagcacatgtttataaaacctaagcaaataagtaaattaaataaaaccaatgtctactaagtatgaaaaatggaaaaaatgttctctacattagcaaagaaaatgaaattaaaatgagatatcatctttgatcaatgaaattataattgttttaaaaataagattatagtcattggcacccttccagttcttctccttaccagactcatggtaagattgcacctcactgccctctttcaacttaggtgtagaaacatgacttgctttagccactgaaatgtacacagacgtgatgttac

SEQ ID NO: 263196 - DNA, 383 bp, Homo sapiens
gaacaaatactgagctgattcattattagcacatttgcactacataagtgttaaagaaaatttctttagtaaaagaaatataataccagaaggaaaatttgatctataaaaaaagaaattaagagtcccagaaatatataaaaattatgtaaaatttttttgttttttctccttaaaagataattgattatttaaagcaaaaacaataaagtgttataggatttgtggcacatgttaaatgtatgcatttgaagtaaaatgtatgataacggtagtgcaaagacagaagagaaaaactgacttctcctgctgtacattctttatactctacatagagctgtgataagttaaagatgtgtattgtaaactctagatgaaataaa

SEQ ID NO: 263197 - DNA, 383 bp, Homo sapiens
gaaatcatttttgtgtgtcttcactagtattccttatgaaatgaaataaaacagaaaatataatgcagtgcatatattaagtgaaggtattgttttataacaccatttcaattatatatatgcacacacacacgtgggtatgtatgtaggtgtgtgtactgtgtgtcacagtataaaacattttctttacagtgggttatagtaaaattttctgaaaacactctttcatgatacatacatagaagcagaatttctgaatcctagactatgtacattttcagccttacttgctaatgacaacctagttgatgaataaatttatgcttctatcaggatgtcactaaattcctttttcttcatagctttaacatttgatattctct

SEQ ID NO: 263198 - DNA, 519 bp, Homo sapiens
atcctgcccaacatggtgaaaccccgtctctactaaaatacaaaaattagccaggcgtggtggcgcgcgcctgtggtcccagctactcaaaagaatttaagctctgataagtgctgtaacaggatgaacctgaaaatacactcagtgaaatttgacagaaaaggacaaatactgtgattctacttacatgaggcacttaaggataggcaaatttatagagacagacagtagaagttaccaggggctggggaaaacagggcatgggatgttattgcttaatggttacaagtttctttctgttttgggtgatgaaaaagttttggaaatggtagtggttgcacaatattgtaaatataattaataatgtcacttaattgtacatttataaatggtagattctatgttacatatattttacataaaaaaagtattagatctaaaactattgaattgtacactctaaaagatgaattatttgatatgtgaattctatcttaataaaactatttaagaaaccaa

SEQ ID NO: 263199 - DNA, 476 bp, Homo sapiens
agtctaaggtatgtctttatcagcagcgttaaaatggactaatacatttgcctaagcggaaactcgggttctactttttatacagagcttaatagtttataatgaacattatagtagtagttgtgcatcaaaacctataaggtgggcaaaacaggtaatacttctcccattttacaggttaaaaaatggaggcaacagctgggtacagtggctcactcctgtaattccagcactttaggaggccaaggtaggcagatcacttgagaaaaagagttcgagaccagcctgggcaacatagtgagaccctctctctcaaaaaaaatagccaagtgtgatgatggacacctgtaaccccaactacttcagagactgaggcaggaggatcacttgagcctaggaggtcaaggctgcagtgagctgtgattgggccactgcactccagcctgggtgacacagagagacctctctaaaaaata

SEQ ID NO: 263200 - DNA, 705 bp, Homo sapiens
ataaccttttgattttcgagtagttttatttattattgctatttcttctgtaggtaagtgactcccatgcagtgattgccaaatgggctttcttcccaggtcctctgaaagaatctggaggaaatgatgatgctcaggagacaattcatgatcactcggaatttctgacaaccatggcaagtatgatagcaacaaagagataagctttaagcaatttctaaatattgtacatttccgtttatttagattatcatcacaatggtttgttttgttgtttgtttttgtttttttgagatagagtctcgctctgtcacccaggctggagtgcagtggtgcgatcttggctcactgcaacctctgcctcctgggctcaagtgattctcatacctcagcctcccgagtagctgggattacaggtgtgtgccactgcacctggctaatttttgtaattttagtagagatggggtttctccatgttggccaggctggtcacgaactcctggcctcaagtgatccacccgcttcagcctcccaaagtgttgggattacaagcgtgagccaccgcgcccggcccaacacaatgggatattataaagtcaatttttttatggggttgagaaagataacttttaaaaataatgggtattctggttgtacacagagataaagaatacgtatgatgatcttgaaaatgccttgcctatc

SEQ ID NO: 263201 - DNA, 492 bp, Homo sapiens
ttaccacaatcagtaggctacttccaggtgggtaaccttgaccatgtgaacataaaaaaatatggatgactttttacatcaaaatagatgcctttagaatcttcattcatggatctagtcaatccatgaatcctactaactatgggtttctttactttgagttaaaacacattaaaaaatatttatctagtttgctaaaatactaaaactaaagccattttggtctgatattaatatactccagctctcttatggttgttgttcatggtatatcattttctattcttttacgttcaatctgtatctttgaatctaaactctgtctcctgtagacagcatatagttggatcacgtttttaacaatctaacctgatcatctgtcttttgattttttgtataatccattcaccccaacctttttttttttttttttttttttttttgagatgatgtctccatctgtcactcaggctgtaattcagtggcatattc

SEQ ID NO: 263202 - DNA, 122 bp, Homo sapiens
attctttctattataccacactctccacctctctgattccatgcaggcttaaagctcttccctttttcattgtattctttttgtttgtttgtttttttgagacagagtctcactctgttgcc

SEQ ID NO: 263203 - DNA, 235 bp, Homo sapiens
gcgatggtgtctagagggagggaggatctggatggacacgatggtgtctagagagagggaggctccggatggatgcgatggtgtctagagggagaaaggctctggatggacacgatggtgtctcctctagttagaggagctcatggttgacttctcagagcaacttctcactcgcttggcagcagggacctgtcacacccctgtgctgtggccaggaccatgttgcctgcactgc

SEQ ID NO: 263204 - DNA, 335 bp, Homo sapiens
gttaccaccattcctggtattggtcccagttcttctaagaatatttttgatgcaagagctgttttatcttgaatcctacatagcttattttccatttttccattcaaataaaacaacaagagaacaatagagtgaagaaaaaggatgtttaagcctaaatccaagactgaggtacaagaccaagaaaagtggggcagaagatggaaaagaacaagtgaagaatcttggaaacaattcaaaggcacgttggattctttgcttgtaataagaagtgcaagttggtgttacttcttaagatctaatgttaaaatttcttgaatctgatctttatcgta

SEQ ID NO: 263205 - DNA, 249 bp, Homo sapiens
cacatgtcccatctacgcacccacgtcccgtccatgcaccccatccactcacctgtatcctatcacctgcatcccatcactcccatgtcccatctacacacccgcgtcccatctacttactcttgtcccatcatagacacctacatcccatttacacacgcatgtcccatcatacacacccctgtcccatctacacacccgcgtcccatcctcgcatccccatcccgtcctcacactcccgtcccatcc

SEQ ID NO: 263206 - DNA, 409 bp, Homo sapiens
ttttattttgagagtgtacacattgacctcttaaaggatggctataacagctgctttaaagtctcatcatttcaatatccaatttgcttcgaagttgttgtctcttgattgtttcattccttaataattgttcaattgtttctggttttttaaagtatattgggtgattttctattttgtcttgcacatatgcatttcctctgtttgcaatacagaaaagtttcaaaaaggcaagctttggacattggagggaagagacactagtgctacattgtaatccactgggtggttcaaatgccagaagggtttgtcccactaacatttttctacttggagcttgtgcctggaggtttctctctgtctctaatgaggtaatgttataaatatttaatatcataccatacattca

SEQ ID NO: 263207 - DNA, 336 bp, Homo sapiens
atcccatccctgctaacatcatcccagaccagatgcgtggattttcataagggcagtttcttggaaacaaaatgtccaagtcaagggagggtcttgaagagtaggaatgtcaacccagtaatcggatggtaggtgttgtcaaatcacacccagtaggcagctgcctacatacgggtaactggaaaagagatgtgccttggagagttaattgctggctatccccaagaggcttcttgtcttcccaagccaagtaagagcctgcctctccccagcttcattaatgtgaatggtggcagacacctctagctatagagctctggtttcctcctaagtcca

SEQ ID NO: 263208 - DNA, 224 bp, Homo sapiens
gggaggcagaggctgcagtgagctgagatcttaccactgcactccagcctgggtgacagagtgagaatctgtcttaaaaaaaacccaaaaaacacctcccaaatggcttcccatctgattagaataaaagcccatgtctgtttatggcccacgctctcttcccctgcctctctgacctcctctgcatccactccctcctgctcactcccatctgtgctgttctg

SEQ ID NO: 263209 - DNA, 617 bp, Homo sapiens
atttcgtccaaatggcacaacgcaggcttgtcatgaggccattaataactcaccttttcacaggctcttcttggtttcctggttcaggaatcagttcttatctagacagacactgatgtctggatttactggtgtgaggacggacaaatgggctttgtctggggcaggccacataaatgtgatttattttcactaagtcaagaactgagaggctgaaggcaactcttgacaataactaagctgaagaaattgagagtaaaatttcttcccttttgtctctctcccactcaatggtcaaagtcccaggaaaggctgaaacggtgtttactttcccccacttaggctgacccttcgcattccgaccagctgaaaggatggaactggctggtcagtttcactttccactttcaggaagggtaactttctgttctcatccctcaccgtgaaaggctgcatctggctttgtggcttggtcaaggctgggtggaggtgggggtgtgatgcttcttggcgaagggcttaaagaaatatgaaacaagatggcattccaaattctgcataaatataggccaaaattaaaactcctttaacccaggagttgctggccttagtggtcg

SEQ ID NO: 263210 - DNA, 686 bp, Homo sapiens
tgctgggattacaggcgtgagccaccgcacctggccctaagttgtctggtttctatttatggacataatgataaaagaaatgtggctgagtcctttttatggctacgaaacagtctgtaatatatcttttcttcaaatgtgaagttgagtcgactgattcacttaataggatgtgtgttttgggatgtttttaggcactctttgttttgaaacattccctcatctgcctacttattttctctccacaccattctcccgttaaccagctgcagaggctagcagagctcagcatagggaataaagtttgatgtctagtcaaagctccaactcataactttggtctccttgacatggtgttaaaacagacccagacagcctaattaagggtcatagtttaaacccaaggctaagttagccacaagctacacaatctgcttatttcattttataagacacaaagagccaagaactttcatgtatcttgctcttcctgatggttttccctccaggccctaaaagcctgttgatagtcttctaatgaggtccctatctctcccttctccctccttcctctttggtggcgctgatgcttctgtggtcaaagttcttggacagcctacattttgggggctatggaaaatgaatatgagaaaagaaaaaataaaggctattcattccttcattca

SEQ ID NO: 263211 - DNA, 969 bp, Homo sapiens
cgcatgcatcttggggagaggcccttctgttgcacgctctgtgacaagacctactgtgatgcttctggactaagtcgtcaccgccgcgtccatctgggttaccggccccattcatgctctgtgtgtgggaagagcttccgggaccagtctgagctcaaacgccaccagaagatacaccaaaaccaggagccagtggatggaaaccaggagtgtactttgaggattccaggcacccaggctgaattccagacacccatcgccagaagccagaggtccatccaggggcttttggatgtgaaccatgcaccagtggccaggtcccaggaacccatatttagaactgagggtcctatggcccagaaccaggcatctgtacttaagaaccaagcacctgtgaccaggacccaggcacccatcactggaaccctctgtcaggatgccagatccaactctcatccagtgaagccctcaagactcaatgtcttctgttgcccccattgttctttgacttttagcaagaaatcctatctctccagacaccagaaggcccacctcacagagccgcccaactactgcttccattgcagcaagtctttcagctcattttccaggctggtcagacaccagcagacccactggaagcagaagagctacctttgccctatctgtgacctctcctttggggagaaagagggccttatggatcactggaggggctataaaggcaaggacctgtgccagagcagccaccataaatgccgggtgatcctgggccagtggcttggcttctctcatgatgtccccactatggctggggaggaatggaagcatggaggtgatcaatctccccccaggatccatacccccaggagaagaggcctaagagagaaggcctgcaaaggagacaaaacaaaggaggcagtgagcatcttgaaacataaataaatggcctttctgactgaaaaaaaa

SEQ ID NO: 263212 - DNA, 896 bp, Homo sapiens
cgcatgcatcttggggagaggcccttctgttgcacgctctgtgacaagacctactgtgatgcttctggactaagtcgtcaccgccgcgtccatctgggttaccggccccattcatgctctgtgtgtgggaagagcttccgggaccagtctgagctcaaacgccaccagaagatacaccaaaaccaggagccagtggatggaaaccaggagtgtactttgaggattccaggcacccaggctgaattccagacacccatcgccagaagccagaggtccatccaggggcttttggatgtgaaccatgcaccagtggccaggtcccaggaacccatatttagaactgagggtcctatggcccagaaccaggcatctgtacttaagaaccaagcacctgtgaccaggacccaggcacccatcactggaaccctctgtcaggatgccagatccaactctcatccagtgaagccctcaagactcaatgtcttctgttgcccccattgttctttgacttttacaagtctttcagctcattttccaggctggtcagacaccagcagacccactggaagcagaagagctacctttgccctatctgtgacctctcctttggggagaaagagggccttatggatcactggaggggctataaaggcaaggacctgtgccagagcagccaccataaatgccgggtgatcctgggccagtggcttggcttctctcatgatgtccccactatggctggggaggaatggaagcatggaggtgatcaatctccccccaggatccatacccccaggagaagaggcctaagagagaaggcctgcaaaggagacaaaacaaaggaggcagtgagcatcttgaaacataaataaatggcctttctgactgaaaaaaaa

SEQ ID NO: 263213 - DNA, 604 bp, Homo sapiens
tgtagcttactatatctgtgaccttaggaaattcactcaacctccctgtgcctcagtttcctcatatgtaaaatgagaatgaggataacacctggtcttcctgtttcccaaagttactgagaaaatttgttgaatttaaaactgacttgctggggggcagtacataaatgttattgttaattaacagtttttatacctactatactaggctatatttgctcatgggctgcctccccttagaacagacctcagagtaactagtccttgagggaaccgacccttatctagctagtctaccgacgactgcagtcctggtttctttttctagactagctggcggcctggctgcaatgcctcgccagcccagtgatctctcagacctgtgggtgtgcccactgaatcttgcccatacatctctgtgtttcttctgatgcgtgtagtcagtcatgactctgggctctaagaaccttgagaaggacattcatcctgttccagagcttttggacaggagagaatgactcctgtacaaaaatgtactgcaaaatctgtccccaagggcggcaagtatttttctcagcagacgtttttttctgtttctctttta

SEQ ID NO: 263214 - DNA, 435 bp, Homo sapiens
attttgtagatgaggagattgaagcctggagaggtaaagtgactcagccaaggtctcacatttgctaagtgccagtactggatgtagattccaggtttgtgtgacagcaagcccacgctcctcagccactagttttgtgtaaaattgttgttctctttccccgtctcctgcttaaggaaagatatattgtttcctggaaaaacaaaaatgttagcatatagtttgcaaactacaacttattatttggttatgcaggtgtgtgtgtgttgtataaacattatatatatttcacttggatatattccacttgataggaactgctttgtttttgaatgaatatatgagaaaggaaaatgcctgggtttttgtttgttaccccaatgtagcaacattatgaaaggtaaaatgctctttctttaacagcagcagcaaaaa

SEQ ID NO: 263215 - DNA, 510 bp, Homo sapiens
actctcaaaagtgtcccagtttggactgataaatgttatggtcactgtggttatagaagaaaggtatctccttcttgctttgactctgaatggctagattctataaactgaagttctattttgtattttgttttataagctactatttattgagtacctattaccaggtattcttctaagcacctaacacacattttcttaatttaatcctcataatcctctctgaagaaggtgttatctctgttttatagatgaggaatttatggcccagagaagctaagtaacttattcaaggtcacagctagtaatgctgaagctagaatttgaacaaagatctttctgactccaaatttactacattttattgtatatgtctttataaatcacaaaaatgtgtacaatctctatgtcataaatttaatgtgtagtaaggatttatctatctctgagtcttccataaaccaagttaaggcttattgttaggctctatctgtcctaattctcaggttt

SEQ ID NO: 263216 - DNA, 1283 bp, Homo sapiens
gaataaatacagagtgtttttatgttctttaaaaaattatcttgcaggttctgcatcactctttcttctctcatgctcttgacccagagggtcacgtccctctctctggacatttgtgaggggaaagtgaaggcagcatctggaggcttcaggagcaggagctctttgtctgagcatgtgtgtaaggcactgccctatttcagctacttgctctttttccctgctctcctgggaggctctctgtgctccttccagcgatttcaggctcgtgttcaagggtccagtgctttgcatcccagacactctttctgggctctgagctggaggggtctgcagattcttggactagaatgcctaaacgtggcagtgagcagggtggtggatgcaggagcgggactgactgattgccagcaattcgagtgcatctatgtcgtgtggaccacagctgggcttttcaagctcacctactactcccactggatcctggacgactccctcctccacgcagcgggctttgggcctgagcttggtcagagccctggagaggagggatatgtccccgatgcagacatctggaccctggaaagaacccacaggatatctgtgttctcaagaaagtggaaccaaagcacagctcgatggctccgacggcttgtattccagcacagcagggcttggccgttgttgcagacatttgccttctctgcctggtggcatggactccatccaggacaggtgtttggtttcgtttgctgggccgtgatggtggaagctgactacctgattcactcctttgccaatgagtttatcagatcctggccgatgaggctgttctatagaaccctcacctgggcccacacccagttgatcattgcctacatcatgctggctgtggaggtcaggagtctctcctctctctggttgctctgtaattcgtacaacagtgtctttcccatggtgtactgtattctgcttttgctattggcgaagagaaagcacaaatgtaactgacatctttccctggctttcaccttaaacacccaggaaacattttagaaagtgccagatgacgcatcgataatgcatacatttgaacttttccataataaaattttttctaaagttttggatggatatacccagtgacttgcagtaggaatttgtgtatctactttagcaagctattctgctggtactgaggatacaaaaaggaaaaagatgtggtttcttcccttaaggtttacagtctagatgtggaagcaaagattaagtaaagtgataca

SEQ ID NO: 263217 - DNA, 403 bp, Homo sapiens
ataacatacatatattgtgtatttttaaattttataatctgcctttaaataatattttaacacttcacacagtctaaggaaaggcaggaatgaaaacacaaatctgtgactttttttcaaagcaccaattttcttctgagagcaggacaccatttagctgacttggtggcccatgacattaggataaattaaatgtcagggttcaaaacgttgatttataattctgatctgaatatgtgagggagatattcatgatggcattgcatgcctgagtttggagaacacaaatctgtatttgtaccaatgtgtaaagctgtgtggtgttctccagcagcactcagcagcctggaaaggaagtggagaaatatgtgaggtgaggttgaggaggacggacggatatggc

SEQ ID NO: 263218 - DNA, 508 bp, Homo sapiens
tctttgaactacttagttaaagaagaagaaaagaaaaccaaggaaacaaatacctatttttggttatactcagaaacatttttttaaatagcagaagaaaaactttttttaaagaaaaaagataagtgtattccttaagaatgagaccataaatatccctgacccccaaccctctagggacacctccaccctgaactttagttaattagctgaagaagatagaatttgtggtgttttcctagaaaactagagctgtgtccgcgtggacttggggaagggtagtcccttcccttctcccaaatgatgtgtggatgcccagggctccacaaagctccaaggcagtgccccctctgttcccaaagcagcttctctcgggagcctccctctcccttgggaagggtgcggctggggcaggagggggctggggggccacctggccttacttgggttttgtcacactctgctcattttgactgaataaaagtcctgttgccaaagtgaaaaaaaa

SEQ ID NO: 263219 - DNA, 370 bp, Homo sapiens
caccagtataaatattcagtagtgatgctggaaaattggtaatatgcccattgatgccaaatcactcgctatgtttcctttcaagtgagatctgttgtggatatggttaaaagaaactatgatttttcttccttgagagcagatgagctgtaagaaattgagaataacaaccgtcctgacagctttcatgtactcaatcttgcctatattgcttttaattctggcttaagtcctgcgggctttccctcccacccccttgcctgatgcgtattgtaaagaacacatttatatgtacattagttagtttaagaggctttttgtgttcaaaggaagaagttagtcatcaccagaaaagctttgttgcaaaaca

SEQ ID NO: 263220 - DNA, 338 bp, Homo sapiens
tgagacggagtctcgctttgttgcccaggctggagtgcagtggtacgacctcggctcactgcaagctccaccttccaggttcatgccattctcctgcctcacactcccgtgtagctgggactacaggcacccaccaccacgcccggctaattttttatatttttagtagagatggggtttcacagtagccaggatggtctcgatctcctgacctcatgatccacccgcctcagtactgggatttcaggcatgagcctccgtgcccggccctaagtttatcttttaacccttgtacctttttggggagtttttaaattataatttttaacttcctggga

SEQ ID NO: 263221 - DNA, 1112 bp, Homo sapiens
agcgttagatgtcctgcacaggcactgcaaaggtgatgatgtcgggaaggcggccaacaatcccaaccactgtaactgcatcatagaccaaatcttcacaggtggcctgcagtctgatgtcacctgtcaagcctgccatggcgtctccaccacgatagacccatgctgggacattagtttggacttgcctggctcttgcacctccttctggcccatgagcccagggagggagagcagtgtgaacggggaaagccacataccaggaatcaccaccctcacggactgcttgcggaggtttacgaggccagagcacttaggaagcagtgccaaaatcaaatgtggtagttgccaaagctaccaggaatctaccaaacagctcacaatgaataaattacctgtcgttgcctgttttcatttcaaacggtttgaacattcagcgaaacagaggcgcaagatcactacatacatttcctttcctctggagctggatatgacgccgtttatggcctcaagtaaagagagcagaatgaatggacaattgcagctgccaaccaatagtggaaacaacgaaaataagtattccttgtttgctgtggttaatcaccaaggaaccttggagagtggccactataccagcttcatccggcaccacaaggaccagtggttcaagtgtgatgatgccgtcatcactaaggccagtattaaggacgtactggacagtgaagggtatttactgttctatcacaaacaggtgctagaacatgagtcagaaaaagtgaaagaaatgaacacacaagcctactgaagtgacacacagacctacctgcaatggaagatgacgacaccaatactacaactggcatcgagatctaaaggacctacttgaccatggcccatgggcctgacagagtaagaattgaacagtacccagtgtccaaaaggtcctgattggaagagaaatagaaggggagggagaagaggctctagtctaagcagttgatgaaagggaaattaaatggtagaaacactctgggtgaggaaggcaggagcaggaaaatgctgacactggtacatatcctatattcctccaaaagattgtgtgggaaagtgtg

SEQ ID NO: 263222 - DNA, 701 bp, Homo sapiens
gggatgaagttttccaaaaggcctgtgaagttttagttaccaggggtttgagaaaagggaatctagctgactaaaaagttcttatgggagaacaatatccaaaagagaacggagaagcttaaaaaaagtgcagtctgaatgtcagcttttaatgaagctgatttctaaccatttctaaccacagacctttctttttgaaacaatcctttacaatttcttattattagatttcaatggggacaaacagcacatattctgggtttttaattttttaaaaaactaaaggcatctatcaggtgattctgaatgcaaatcaataagccttttatgacttaaccaagaatgtatgattcatctctaaagaggtgcaaagaaacagtcctcccaagacccggagccacccgctaagacagttagaagaaaaaagaaaaaaaataaaaaagaaaaaaaatttttgggcggcacttgcccttgcaaaaaggcttttatataaaccattctcgtttgggcgggggggccccatattgggttagggaaaaatgtttggtaacattaggcttgtccctaaagggaaaatctgggtcgaaggaatatggtggtcgtgggatttttcacacagtataaaatactcgggggggacacgaaggtgtttttgtgaaaaatttcagaatgtgaagtttgggggggaaataggggagtta

SEQ ID NO: 263223 - DNA, 174 bp, Homo sapiens
ggagaccggacccggttaccaccacctccccgcaatttctagtctctaaattatgctgtccccgaaaacaaagaaagtgaccaagaaataatgtgaaaatgttaccaagagagtttactattgaaagaagtctagccatcaaataaatgtcttttactaaacgatgaataaatc

SEQ ID NO: 263224 - DNA, 130 bp, Homo sapiens
ctcagaacctcttaaaagataaaatggtcattgtagaatgtatctcagatgacctatcgtgcattttagagtgcatactggattaaatatgtttaaaactccttttatcatctttaaaaactcaagctgg

SEQ ID NO: 263225 - DNA, 338 bp, Homo sapiens
gatctttccatcccagcctcacaaagtgctaggactacaggtttgagccatcgtgcctggccatttatgtattatctatggttatgttggcactataataacaggatgattagttgtgacaaaggacatatggtttacagagtctaaaatatttaccatctactcctttacagaaaaagttagccagcccctgacataaaacatgtagaatttattaggctttgttgttaaagatcgaattctctaagtttcatgaacaggctttggtagaagtgaggtagggggtaaatcctgtaacatagtaacaattttttgtgtatgaaaatgtgcatttgaaa

SEQ ID NO: 263226 - DNA, 471 bp, Homo sapiens
cagcggagatgttccttggctgttcctgacacccccttagcacctcccagcgtgagccaaacactctgggactttactgccaccttctggaaagctcataaatctggtgtctgctgcactggaattgtgaattgtgccctgttggaaaggcttgtggacaacctacataaccatccatacactttgagtccatagagaacaccaagaaatgttgggtcaccagagctttgaaagtgggtgtatatagtcgaagaggaagctgaagataacccggtggcttctcagttctccacagctggccttcctagcagcagcttgttgacagcaccccacccctgttgatgctctctacttcaggtgactgtgacctgacatcagtgggagaagacatttgaaaataaagctatttactctcatccccactgccctagggaaggcatgagccataaaagtgtagcttaaaaaggaagg

SEQ ID NO: 263227 - DNA, 461 bp, Homo sapiens
gaaggacatttgagtaaatacgctcccttgctcctttcttgccttttgttcattttttgtacatccacaatctatgaggtatgttacctactgaaatttactttcttttccaactgtggttcaacaactgactttcttctctcatactttccaacccattccattctgaataagttaagagttttcttaccttcagctcttctcaccttccaatactaagtgaatacagcctgcctcccccttcatttctgattacaatattattctcatcatcctaggactttgtacctaatcaccagttgcttctcctaagtttattttacagctgataagccaacttggaaaatgagcccactctccctcagatacattctcttccgctgtttgaaacgtttttcattgaaacaatttggtgatattgtatcaaaataataaagtattaagctactggaaaaacatgg

SEQ ID NO: 263228 - DNA, 234 bp, Homo sapiens
tgtagtttcacctgccacctaaacactgatgaataccatggctgcaacttcagcctcaacctctctcctgagcttcatgcccatattccagctgccaactcactatctctccttgaatccttgcagagcacctccagactcaacatattcaatactgacatcattatattcttccaagcctgcaacttaaatgatccatcagcaccatctaaccacacaagcagaaacctagtt

SEQ ID NO: 263229 - DNA, 306 bp, Homo sapiens
ctttgagtggagtatccatataatttatttggaattctgcaaagaagatttggaccaaaattatttcaatagattataaacgtcattaattccatggactccctcaagtcaaggaccttaattgtcttctttcattctggtacttagaacgcccagaataaattacaagctagattaaaaggaagaaacaaacaccaaaatgaccatcgaagacattttcaatgaacattctctgaagctaaaaattatattaacataaaacactttggcagctctgacaaataaaatacgataaaccaatcttct

SEQ ID NO: 263230 - DNA, 628 bp, Homo sapiens
acctgcacaaagggacacagcttttaagcaatgcaatgtgtgactctggagcctgcacttttacttaactgatggaatatgatctgtctcagagacagagagaggaacagactgtgtcaacttagagaaaccaaatatactgatctccaaagggacagcttcttaagctgtgaccttaaaaaattgtgaccatacacaattttcagccaatgtgatggtttccatcacctcccacctaagagatgacaccattaatgtatacaaattgttgtagaagcttagagaaagaaccaactaatggggaagttggagaaaatgtctcagcagcggggatattcgagctgagttttgaaggataaagagcagtttccaaatgaggaagaagtgggcaaggacaagctaagtaaagctgcctgaactgttgacggccaccactggctctagaaaagcccctgctacttccttctgtctacttgaaagtgcaacataagatgttttcagaacaaacaggagtatgaatgggaagactgtggttcagtatttcccaaagtgtttgccatggaactagttctgtgagatgcttcattgaaaagagattctgaataaaataaaacattcatttaacaaa

SEQ ID NO: 263231 - DNA, 457 bp, Homo sapiens
cagccactgactgggtcagaatgtgggaagcatggccttggaacaaacatggtgatggatttcagagagcagcagctggagccatcagtcagttactgtttgtgggcagagatctgagaggaacattctcatggacacctgtggcgactttgtaatgtgtcaactcaagctagtctaaagtacatttctcaagactcccttacccacaattctggttaggtgagacacaagagttcttttcatgcaagatttggaaagcaggatgtgagggcaatccggctgcgacatctgtcaccccactaatcaccagagttgatttcagctgatctagctggctagattggtattaacttcctccctcactgctctgtgtgcatctctcccaaagctgtgtgcttggtcaaagaggacgaccctccctaatagaggaggaccactctttggtcaagaatatacg

SEQ ID NO: 263232 - DNA, 418 bp, Homo sapiens
gccatctccactgtccatcttcagaactttttcattgtcccaattaaattgcagacttttaaaggaggaaaaaaagtttattgtgtgtgtcctgtctagcgcactcttccaggttagttgtaccttttattgtctttgagccagtttacagctctgtaaagttgtgcagtaatcatgagaatggatttttgtccacgttcctgtaagttaattgtgtccggtggaatgcaattggatattgccctggggacaaacctgttttgcgtctatttgtaaattcacagcagcattccgtgtttgcctgcaagattccgtgcttctacgaatttgcctttgaaccgcccatggcatctgtctgctttgttccctctttgattaatgtgttaaataaaatctttgacacatgttcattttctac

SEQ ID NO: 263233 - DNA, 743 bp, Homo sapiens
gatttaaagagaattacagacagacaaggctgaacattggctgtcatccaacaaagctcttataagatgggaatcactgcccggttcttgagctccgacctggagggaagaggagtctggaagacttggcacaggcctgagtgcttcattgtctttctggttccaagtcctcctcagctcactaggaaggaggtggggtgggggcaggtaggccactctgcataagtgcacacatctacactggctagtctacttcacaattcccccacaggttatccttatctctacctggttccagttccagattggagggatatagaataccatccccacccctcaccttgcttgctctggcctggaaaactgtcattcctttaccaccagctggcatctgccatatgcttcaaggaactgaataaagaggaaggggaaagaagaaactagagaaactggaatgcttcctatctgacccccaagtacagggactgcctctttccgtaacggcacagaacgtctccatccctttgacctccacctccccagagatgcccgaggaggacagccttgtttctgtgatctgttgttgagaactgctgctgagaattcttccttcagcaccgccttaggcaccattggtttttcactaggtccgctgtagaaaacagccaggaattacttagttgactaccacctgaggtgctgtttggtgttggtaataaagaataaaggtggaaatgaaacaa

SEQ ID NO: 263234 - DNA, 595 bp, Homo sapiens
gaaaaaacctttcttttattctaacacaattaagtaaaatatatttaattggacttttcaatcctctttggctacatcattttctactaacagaacctgaagaagtgctcacaggtattgggaggagggggatgaggttacaaagtacaggtagttcctgatgcagctccctcctcactgtcctctcttccttgcatctctgtgtggccccatccttagcattactgaggtttttaggaagtggaaagctggctgtggttgttggatttattcactattcatattggttttgttttatttgcagtaagccatatcaaaccaagatgtgaagggtcagtaccacagagagtcgccacaggacatttgactggagacaatgaagagccagatcttaatcaagtccagtgtgtcttttcaaaattaaagaatgtcaaataataaaaataacaggcaagacattcatagtgtctatatgtatcagctctgtgctatgcattttatctgtggacattatcctacttaatcctcctccttcttaataggtagctattattttttatcttcattttacagatggagctgagaactcagaccc

SEQ ID NO: 263235 - DNA, 589 bp, Homo sapiens
gaactgtggaaccagttggatggatttgattctaggggagatgtgaaagttatcatggccgcaaaccaaacagaaatttggatccagcacttagcagaccaggctgcactgacaggaagatcgggattcccctccctaatgaaaatactaagaagagcatctttcagatgcatacaagcatgatgacactggccgatgatgtaaacctggacgacttgataatgactaaagatgacctctttggtgctgacatcaaggcaatctgcacagaagcttgcctgatggccttaagagagccacagaatgaagatgtagaagcttcagacttgaccaaagtttatacagcctgcacctgggagtccaccgccatacactccctccactgtaccctctctctgcacaaagtaagccatatcaaaccaagatgtgaagggtcagtaccacagagagtcgccacaggacatttgactggagacaatgaagagccagatcttaatcaagtccagtgtgtcttttcaaaattaaagaatgtcaaataaataggatgcggccaatcccctcccctctcataccccgcgactcgcaagac

SEQ ID NO: 263236 - DNA, 696 bp, Homo sapiens
gaactgtggaaccagttggatggatttgattctaggggagatgtgaaagttatcatggccgcaaaccaaacagaaatttggatccagcacttagcagaccaggctgcactgacaggaagatcgggattcccctccctaatgaaaatactaagaagagcatctttcagatgcatacaagcatgatgacactggccgatgatgtaaacctggacgacttgataatgactaaagatgacctctttggtgctgacatcaaggcaatctgcacagaagcttgcctgatggccttaagagagccacagaatgaagatgtagaagcttcagacttgaccaaagtttatacagcctgcacctgggagtccaccgccatacactccctccactgtaccctctctctgcacaaagtaagccatatcaaaccaagatgtgaagggtcagtaccacagagagtcgccacaggacatttgactggagacaatgaagagccagatcttaatcaagtccagtgtgtcttttcaaaattaaagaatgtcaaataataaaaataacaggcaagacattcatagtgtctatatgtatcagctctgtgctatgcattttatctgtggacattatcctacttaatcctcctccttcttaataggtagctattattttttatcttcattttacagatggagctgagaactcagaccc

SEQ ID NO: 263237 - DNA, 357 bp, Homo sapiens
ctagtattcgccccgtgtccctggggcccagcacagagctggcacaaaagagatgtcactaagtggccaagggaatccaggaaaggccagagaaggcacattggtataggagcaggcgggcagaggtgtagggtggacttggagggggaattgaaatcaagaaaaggaaatagccctagctgctgcctcagcctccttgaggggagctgatacttggagttggttgccgttaggttaccctcatttggagtagtactgatgagtgctcgaccgaaacctgggtctactctggtggcgattttgagttcaagcagtgctgccccctactgggggttgctaaaagcactgccatttcag

SEQ ID NO: 263238 - DNA, 498 bp, Homo sapiens
cagattttgagtcatgccaggggctccggtgaaaatgtcatgggaagccagccctccgcgtctaacatttcagcttgagggtgaccaggagctctggggtggccctagacctgggaatggactcccaggcgcagtggcaggcatttctcttgctttttctttatgattgacctgggctggccatgtccccgtcaatgcagctggttctcaaaggccccactcttccccgcggctccatttaccaccaacgcgcttgtcccgtggcacttagagggagacctgctcctcctgagaatccaggaaggaactgaagagacgacgttgctttctgatctttctcaggccagaggaagtttgtgggccaagtgatattcctaattcaaactttattatgtaattatagtacaaaacatattatttttctctttatttttcctctctcagttaatggtaaattgtattgcataaataaattacacatgctgtaattcataaaaa

SEQ ID NO: 263239 - DNA, 1251 bp, Homo sapiens
tctcccaagaacatctggaagctggggaaaacatcagagcaagtgaagaatgttcaaatatacagggaccatccagagacatgtggcctgcacgttgatgagcaatgtgaactgaattactgttgtatctggaggaattccataaaagagagtaatcagtctatttggatcccaactgccttttcctgtccccaaagggcgggaactagtgtgggtggaaaaacccaatgcatcccaaggcagtcctgccttctaaagcgcccgccaggacaggctcctggtgggttgtaaggagaacggcaggaagaagtgctcccaggaagctgcctagccaccgccaccaccacagggttccatccaactgacttatggcatcaggagctttgaattgtctcatctccaagactctgaaggtccttacaacactagcaatccccttcatgccttaggggatctctacatgatgtcctgctcagatgatggaaagccagcccccttcctcttgcaaactggcttcttgcacagtcacctggccttagactagaaccatggctctcaaatttcagggaaagtatgatcaagcagttcatcagggaagcacaaatgccacatggacagggcaattctttttcaagaagacccacagacttctcctgcctaggctctgaagaagccacaaaaatctgtccttccactaggctttcaggagagatgagccgtctccatttccatcagtcactcagctcttccccaacaccacagacaactggccgccttggaggctcttccaagtttcctgtagcagactctttagttgttataatgttccagaaactgaagtgggaatggaagctatcaagttttctgtactccaaaaattgtctccagcacattccctgagaaagtgttgcatccttgccctgaacaccttccaacagaatgactaaggaatactcaatgctagaccattccagcctgttcacccaccaagaggtggaacttgtctgaagctacaggaccacaattgaccataccctcccctccttctttgctttatctttttggaacatattctgtttattattaacatttttaaactatgagacttaaagataatctgttctaagcccctaatcttgtacatgactaaaaaaaatcacaaggacaaatagaatgcatgcacaccatcactctcctatcctctacccacagcagagatcactaatcaattaaagcaatcttttctactgc

SEQ ID NO: 263240 - DNA, 780 bp, Homo sapiens
tctcccaagaacatctggaagctggggaaaacatcagagcaagtgaagaatgttcaaatatacagggaccatccagagacatgtggcctgcacgttgatgagcaatgtgaactgaattactgttgtatctggaggaattccataaaagagagtaatcagtctatttggatcccaactgccttttcctgtccccaaagggcgggaactagtgtgggtggaaaaacccaatgcatcccaaggcagtcctgccttctaaagcgcccgccaggacaggctcctggtgggttgtaaggagaacggcaggaagaagtgctcccaggaagctgcctagccaccgccaccaccacagggttccatccaactgcccacagttttgctgaactaggaattgtcctgagaactttcttccacaatggctcagcagatctccattttaaaccggcagtctgcaaactcagccctgaggacacagccagcccgcttccaggcatctcctgcgagctgctcccaggaaagaacagcaaagcaacctggtccagtgtagacatgctgttcaaatcatctgtggttgaatgactatttttttaatttaatcttttgcagacatttttggtaaaacattatataaatgaattactagaaaaaaagaaatacaaaagtaaaaacatatgaaatataagccccaatcttttgttattagattcaatacacatagaaataaattttaatacatacaatcaaaacaaacagcatgggataaaataaaagaatcccaaaacc

SEQ ID NO: 263241 - DNA, 148 bp, Homo sapiens
cctgcctcagcttacagagtagctgagatgtgcaccacaacacctggctggtttttgtgtttttagtagagatggggtcccctggcctcatgtgatcctcctgcctcggccaccaaaagtgctgggatttcaggcctgagccacaatg

SEQ ID NO: 263242 - DNA, 454 bp, Homo sapiens
gaagtctcaatggccaggctctgtgtgatctgccagagggtgtcagacccctggacacactcagatccgtgtttttcggccgaggccctgccaagaaatggctgcccacagcaaaggaagtcccccaggaagctcagctgttgatcacctgagtctcacatttatccgcatccaccaaggagtcacagccagagaactctttgcagatcccatgaaggggcccctccttccagagcgggacagggtctgagcatgtcttggctatgtactcacaataaagcaggggcagccaccctggatcctgaggcccatggatggaagctggcttatagcacacactgagaggaaacaaaattgaaccttctggaggtggaggtcttcccggaggatctcaagtgacacagtggtccagaggtgatccatgcacaaatgcaacaccgagggtaaatcccat

SEQ ID NO: 263243 - DNA, 268 bp, Homo sapiens
gtttccatctttatagtggctgcttatctaactgtgagtgatggctgtcactattcactgtgggacaggtatcaaatgtcagcaatctcttctactgccaatttgctgtttgtttttctcaactcttctccatgttgaatcctggaagttattgaaacaatccttgatcattgcttttagtctctagttgttgttaggcaaaaggatttgcggctcctcatcagaatagcaagtgaataaagagcatggattatggaatcagaccaga

SEQ ID NO: 263244 - DNA, 1578 bp, Homo sapiens
aaggcactctggcacccagttttggaactgcagttttaaaagtcataaattgaatgaaaatgatagcaaaggtggaggtttttaaagagctatttataggtccctggacagcatcttttttcaattaggcagcaacctttttgccctatgccgtaacctgtgtctgcaacttcctctaattgggaaatagttaagcagattcatagagctgaatgataaaattgtactacgagatgcactgggactcaacgtgaccttatcaagtgagcaggcttggtgcatttgacacttcatgatatcagccaaagtggaactaaaaacagctcctggaagaggactatgacatcatcaggttgggagtctccagggacagcggaccctttggaaaaggactagaaagtgtgaaatctattagtcttcgatatgaaattctctgtctctgtaaaagcatttcatatttacaagacacaggcctactcctagggcagcaaaaagtggcaacaggcaagcagagggaaaagagatcatgaggcatttcagagtgcactgtcttttcatatatttctcaatgccgtatgtttggttttattttggccaagcataacaatctgctcaagaaaaaaaaatctggagaaaacaaaggtgcctttgccaatgttatgtttctttttgacaagccctgagatttctgaggggaattcacataaatgggatcaggtcattcatttacgttgtgtgcaaatatgatttaaagatacaacctttgcagagagcatgctttcctaagggtaggcacgtggaggactaagggtaaagcattcttcaagatcagttaatcaagaaaggtgctctttgcattctgaaatgcccttgttgcaaatattggttatattgattaaatttacacttaatggaaacaacctttaacttacagatgaacaaacccacaaaagcaaaaaatcaaaagccctacctatgatttcatattttctgtgtaactggattaaaggattcctgcttgcttttgggcataaatgataatggaatatttccaggtattgtttaaaatgagggcccatctacaaattcttagcaatactttggataattctaaaattcagctggacattgtctaattgttttttatatacatctttgctagaatttcaaattttaagtatgtgaatttagttaattagctgtgctgatcaattcaaaaacattactttcctaaattttagactatgaaggtcataaattcaacaaatatatctacacatacaattatagattgtttttcattataatgtcttcatcttaacagaattgtctttgtgattgtttttagaaaactgagagttttaattcataattacttgatcaaaaaattgtgggaacaatccagcattaattgtatgtgattgtttttatgtacataaggagtcttaagcttggtgccttgaagtcttttgtacttagtcccatgtttaaaattactactttatatctaaagcatttatgtttttcaattcaatttacatgatgctaattatggcaattataacaaatattaaagat

SEQ ID NO: 263245 - DNA, 1700 bp, Homo sapiens
aaggcactctggcacccagttttggaactgcagttttaaaagtcataaattgaatgaaaatgatagcaaaggtggaggtttttaaagagctatttataggtccctggacagcatcttttttcaattaggcagcaacctttttgccctatgccgtaacctgtgtctgcaacttcctctaattgggaaatagttaagcagattcatagagctgaatgataaaattgtactacgagatgcactgggactcaacgtgaccttatcaagtgagatggagtcttgccctgtctccaaggctggagcccaatggtgtgatcttggctcactgcaacctccacctcccaggttcaaacgtttctcctgcctcagcctcccaagtaactgggattacagcaggcttggtgcatttgacacttcatgatatcagccaaagtggaactaaaaacagctcctggaagaggactatgacatcatcaggttgggagtctccagggacagcggaccctttggaaaaggactagaaagtgtgaaatctattagtcttcgatatgaaattctctgtctctgtaaaagcatttcatatttacaagacacaggcctactcctagggcagcaaaaagtggcaacaggcaagcagagggaaaagagatcatgaggcatttcagagtgcactgtcttttcatatatttctcaatgccgtatgtttggttttattttggccaagcataacaatctgctcaagaaaaaaaaatctggagaaaacaaaggtgcctttgccaatgttatgtttctttttgacaagccctgagatttctgaggggaattcacataaatgggatcaggtcattcatttacgttgtgtgcaaatatgatttaaagatacaacctttgcagagagcatgctttcctaagggtaggcacgtggaggactaagggtaaagcattcttcaagatcagttaatcaagaaaggtgctctttgcattctgaaatgcccttgttgcaaatattggttatattgattaaatttacacttaatggaaacaacctttaacttacagatgaacaaacccacaaaagcaaaaaatcaaaagccctacctatgatttcatattttctgtgtaactggattaaaggattcctgcttgcttttgggcataaatgataatggaatatttccaggtattgtttaaaatgagggcccatctacaaattcttagcaatactttggataattctaaaattcagctggacattgtctaattgttttttatatacatctttgctagaatttcaaattttaagtatgtgaatttagttaattagctgtgctgatcaattcaaaaacattactttcctaaattttagactatgaaggtcataaattcaacaaatatatctacacatacaattatagattgtttttcattataatgtcttcatcttaacagaattgtctttgtgattgtttttagaaaactgagagttttaattcataattacttgatcaaaaaattgtgggaacaatccagcattaattgtatgtgattgtttttatgtacataaggagtcttaagcttggtgccttgaagtcttttgtacttagtcccatgtttaaaattactactttatatctaaagcatttatgtttttcaattcaatttacatgatgctaattatggcaattataacaaatattaaagat

SEQ ID NO: 263246 - DNA, 412 bp, Homo sapiens
agaggtcacatatgtggggctaatctttcttaccccagatctcaggtttagggtacaaaactaatttcagatcatgtctgctaggatgaccaaactcctacatcagcagtaataatagcaaaaggttattgggatgcttattttatgacaggctttactctaaacactttatgtagtagctcaattctcaaactgcactatgagttaggcacttgtagtatttgcattttctaggttataaatttgatgtagagagaagccaagtaaattgttttagttcactcagctaataaatggtggtgtgcagacttgaattcataaagcttgtctccagagctatgttctttttcaccattttaggctgcctccatcccaccccaatgatggtgaaaagtataattgttgaaatgaa

SEQ ID NO: 263247 - DNA, 316 bp, Homo sapiens
tttttttgagatggagtctcactctgtcgcccaggctggagtgcaatggcgtgatctcggctcactgcaaccttcgcctcccaggttcaagcgattctcctgcctcagcctcctgagtagctgggattacaggcatgcaccaccacaccaggctaattttgtatttttggtagagatggggtttctccatgtcggtcaggctggtcgccaccgtgcccagccccaatcttctgttttcaaactatgttcggaagttgtccagtgtaggaaacttccgcatactaagcccttgaaaccgagggagagaggatgggtc

SEQ ID NO: 263248 - DNA, 564 bp, Homo sapiens
ctggggacacctcactctctggcaggctcctgctggctggagattgttaacatcgccaatcagatgttaattgaatgcaaaggaataggaaataaattctggttctgaaggggcagctggaaaggtgttgggcttctcagattccaacctacattacaaagcaggcctaaagccaagcatactccttgccagaagaaacggaaagcccctctcccgtttttagaatcaggctggaaaacacggctcccagaaggtggggttagaaaacaagagcttgcgaggcggcgccctgtggtccctcgaggaaatagtagagagacaaagagggcctgctcctgggaagccctaaattcgaagccaatccttcctcctagacatgaccacaactttaaagggcagggcgcacacctcccctcccggatctctaggacaaaggcaggtcgaggggcagccaaagaggcgcagagaagaatgacaaggtgcccagcaagcggcaggatcaaagcctgggtctctaattcccaggctggagattctgggctgcctgctcctcctgcacggggc

SEQ ID NO: 263249 - DNA, 219 bp, Homo sapiens
gaacaagaggcctgagaggtctacccacaaggagaggcatcctcctttactttaaagtatccaaggacattcctatttggtagaaacacatccagagactccaagctcaaatcctccaggataatcttggccttacacatggatgcccagacctgagtcctgtctggaaggaaagtagcttccccactttcaataaatgtataatagtgtactaacagc

SEQ ID NO: 263250 - DNA, 321 bp, Homo sapiens
gaacaacaacaacaacaacaaaaacataagaaggacaaaccagaaagtaatgataacgattacctaaagttgtagggtccatgcctggtaggtaggaagtgggttggggtaagttacaaagggcagtgacacttctctgaggatacctttctgtgtagttctgacttttagaaccgtgttagtgtttcacttgcctaaaacaaacaaacaaacaaggtggggagaaaacactaacataaaacacaaacagaaaaaaaatgaccctcattagaggtggaggaactaatctaagtaatatttgaataaagtattttgacaaaa

SEQ ID NO: 263251 - DNA, 293 bp, Homo sapiens
gggggggggtggggggggaatggggaaacaaggaggccagtttttcctctgctaaaccaggaaaggaagaggaaacatctagaaatggaactagattggaagctcaatcttttctctttgtcttaaacatgtcttaaacatttttgtaatgaagtgggggcataaataaatacctccaagtgaagttagagtgcatctgatgatgatggtggtgatggtgattcaaaaagataaatataaggccacaaattatgacagttactaccatgtacagttctatagtactatcatag

SEQ ID NO: 263252 - DNA, 484 bp, Homo sapiens
ggtgtgattttttgttactgtaatctttttatgtaattatcaaagcaagctgcaccaaacaagccagagattaatatgctgggatgtccatttagctctttctagataggcttcaatttggctaaaatttagaattattatttttcttctgagcacatcacatagatgtcaaaaagttctctccaaaacttcttatgctgtcagctttaatagagtctgcttacacagatgaaaaataaaaatttcctccttaaaaaataacaacacagagattctttccactgaaaacttgcaactgaaaattatttgaactctaaataactatagacatttagatattatttcttgagggcagaacatctttttgagttagaggttataatgagaaatcttgaacactggtggagtgataccaactccaaataaactgcaacttgcttgccttttcttcagtagcaaatatttagctctttgttgcattttt

SEQ ID NO: 263253 - DNA, 187 bp, Homo sapiens
atatgtgtaaggatgtgcaatgcaacattgtctataatatagaaaaattgaaaacaatccaaatgcccatcaaaagagaattgggtaaataaactgtgtaccactgtgcagactagaaagatttatatattgatgtgaaaagatgtccatgatataccgttcagtaaaaaagcagcttcatctgtgt

SEQ ID NO: 263254 - DNA, 400 bp, Homo sapiens
gataaggcatctggcatccatcacttgtcagggacagaggaactggagggaccctggctgcctttgggatagaatctcaaagaatgagccctgtgtttgggaccttgggacaggatcaggctgcctacgctgacatctcagctctgccaattaagagttgtatgatttgggtctgtgggtcttgttcctagcatgtgacctggcaaagagcatatccagtgagtgttgagtgaacaaaggagaagtggaagagactgcaatgaggagagaactccctggctgcaggcggctttctcgcagccccaggtggaagctcttctactgcaccagccctgtggttatgtcagatggactcaggcctccagagtgtggctccataaacaacaggaaaaaaaccaaa

SEQ ID NO: 263255 - DNA, 433 bp, Homo sapiens
ttggtcattagtatgtggtaccaattttctaatgtcatttgttattcttggccacagccagccctcccccaaaccctgcctcctttgatgcacagaatgcggagaggcaagtgatttaattatgttctcttttgaaaatctgatttggggagtgacttttatgttatcccataacatgactataaagcaaactttaaaaattaatgggcttaggaggaccccattctccccatcatcagagtgggtaggtgggatcaacaacaatgcaggtggctgatggtagctttcctagggcagaaacagacaccaaatagtcctcagagagaaaagaaccctttttctgtttatcctaagtcaccatgaaccagacagggagtttatacctcaataattaacctggcttattttctttctaatccatgacccttttcta

SEQ ID NO: 263256 - DNA, 475 bp, Homo sapiens
agccatatgaagaagattgaatctggaaccctgccttacatcatatacaaaaactagttcaagattgattaaagatgtaattgtaaaacctaaaactataaaaaccatgaaagataacctaggaaatgctgtattgtagcattctggacataggccctgacaaatatttctggacaaagatgcaaaaaggattaatgggacctaattaaatggaagagcttctgtacagcaaaagaaactatcaacagagtaaacagacggccaccagcataggaggaaatatttgcaaactgtgcatcccataaaggtctaatatccagaatctataaggaacttaaatgaacaaatataaaacaaacagccctattaaaaaagtaggcaaggaacatgagcagacacatttcgaaagaagagatacatgtgataaacaagcatatgaaaaatgctcaacattactaatcattagagaaatgca

SEQ ID NO: 263257 - DNA, 1425 bp, Homo sapiens
atcgggaccgcccgggctgcggctgatgtggaccgtccgacccgcgtgtctgataatcctttgacgggtttggtcggcggagaatggtctctaaacttcccaaaccgcccccgtttcacgtcctgtgaaaggaagtgctcctctgatgaccaatcagcggcgagaagctcttttaacgtccgtccttctttcacgcctccttccccgcgcttggttcgtgcgtccgcgccccagtgtcgggtctgcgtggatcggtccttccaggacaccgtcgccttcccggccgcgtcggagtccggcggcgacctgcctctgaaacatggcaggctcggatgctggtgagtgtctccctggggtcccagtatgtgtggactgaaaccgtccacctccagggaggcctcgggctagcccggactgggtctgggctgtcggcggggctcgtgaccttcagacgccgcgtcgcgctggcgggttccctggatagggtctctcagcttcaccacctcttcgcttcgaggccgtggaacagcagtatgctgtgggagagagagaggcactggggcgaggccggtaggacacttgggtcctggctgtaaaaagagcggtcagaagggtcgtccccggacttgtctttctgtggggcgtctagccgctgtccgtgtgccctccgcccttgcactatgggccctgaggtcgtacctgcttttgtattggtctttaaaggaacagcattcttaagatttattatgcccctgcagaatagtagaatatgcccctgtagaatagttgtgcttttttctcttcagtgccctctagagtcatgggctttgtctagcaccgcttttgaagagcgaattaatttggttgtctaggacgctttcatccttttcacaaggactgcgtacaaaccagttgtcatggtttggccagctgtgagaaatgggcgtggggagggggattatgtgcatggaaaatacactctcattcgtttccagaacgttacgtgtccagaacatagtggagatgtttgtttctaataccgattgaaagtgctttcctaccaattcccaggcatttcaaggaacaagtattttaagctaagttacttttggtacagaaaccgttaaactttgcaaatcccagcaatatctaggggagaggagaatgtggtacgcaggaaacgtcaacagtattgataattctgagcttcatgtacttcccatattttctttcatatagatcgatataataaaaaagaaaaactaacaaatgcattaccgttgatgttgttattataccagttcttaacagcctaagtttaatcaccactttttccggcaccagagaaaccctgacttgcacaagataattgggtaaacacaagaccaatactattgcaagtgcgaagcacctccattaatgagt

SEQ ID NO: 263258 - DNA, 112 bp, Homo sapiens
agcatagcctcctaaggccaagctcctgcctttcagcagcctctacaggcccagctcctgcctcgcaattgcctttgtaggccaagatcatgccgcgaagtggcctttccta

SEQ ID NO: 263259 - DNA, 416 bp, Homo sapiens
ggtccctggtgcagggggtggaggtcaggcaggccctgggcagctgattgctgcctgaagcccaccctgaggagggagggaggcaggggaggagacagaacagatcccttgggggaagcaaacccacattcccagacccaggagcgcccacgtcagggggctcccccgccacaagaggggccgtcccgggtgctttgagtggagtgagctagagagtcggatattagggccacctaggagagccggccttgtccatcgcctggccggggctggactgacgtgagctgtctccaagtccaggaggaaactcacaaactctgagctacacagcaggtatgagtcctgctgcaacacagtgcgctttaaaaagtgtgaataaattgaaacttcatgaaatagcctatatttacaatatc

SEQ ID NO: 263260 - DNA, 597 bp, Homo sapiens
ggtccctggtgcagggggtggaggtcaggcaggccctgggcagctgattgctgcctgaagcccaccctgaggagggagggaggcaggggaggagacagaacagatcccttgggggaagcaaacccacattcccagacccaggagcgcccacgtcagggggaccccagggagggccagccctgcgtgtacacccctcctgccaggaccctgcttcggaggtcacaccagctccttgtggaatggtctgttggagcggacctgacctggagaatccacgcctctcacacatggagctgggcaacagctggcacccgccccctcggcctcagcctccctgggggctcccccgccacaagaggggccgtcccgggtgctttgagtggagtgagctagagagtcggatattagggccacctaggagagccggccttgtccatcgcctggccggggctggactgacgtgagctgtctccaagtccaggaggaaactcacaaactctgagctacacagcaggtatgagtcctgctgcaacacagtgcgctttaaaaagtgtgaataaattgaaacttcatgaaatagcctatatttacaatatc

SEQ ID NO: 263261 - DNA, 337 bp, Homo sapiens
aaattcaagttaacttcagttaatgtcacttgttgttcttagaagaaacctcagcaaagctctgctccgagtcagctgctcagacagcagctgagcatgccaggcctagatcggggccagttgttccagaaaagagagttagtgtccacctcattgactgcttcagaaggcgccaccagcttcctcctggtgtttgtagcgagtgcctgtgctggcagctgttctatgtaacaactgtctggttctatgtcttgtagcccagggagttagaaaatgtaaagtattcaaaatcttctaaggaatcaacactttcctgtttgaagacaaccttggaagc

SEQ ID NO: 263262 - DNA, 352 bp, Homo sapiens
ttttttttcctgtttgggttacttatcacaatccacagttatagtattggtctatttagttggttttgatggtctctccttctagcatgtatgttttaaatgagaaaggactcaagtcaatctttttctaccattatatattgtgtctaatgccaagtgtctggcacaagacttctcttcaataagtacgtgttaagtgaatatgtttacctcttacttttctgtgtttttcagtcatattaacagaaaatccctgttacaacattttttaaaaaggctatttttaaaacattagctcagctttgttaaaggcttaaaataggtaaccttaaaagtattaccctatagttca

SEQ ID NO: 263263 - DNA, 572 bp, Homo sapiens
ctgggctgaggatcatggcccggcctgagaacccccaaggcagcatgcagaggccgggtctgcaccgagccctgacactgacaggctgtgtgacgacgactgacaactaaccctctctggttttactttctgtaagtgacttgggaggttgttctgaatgacctttgaaagggatgaaaaattggtattaataagcctgtcatttcataagcatctactctgtgtccagccctgtgcaggtccctggagtctcctctcaccgaatgctcccacgtccccaagaagttccattatcccattttacttatttatttatttgtttatttatttatgtttgagatggagtcttgctctgtcgcccaggctggagtgcaatggtgcaatctcggctcactgcaacctctacctcccgggttcaagtgattctcctgcatcagcctccctagtagctggaattataggcacatgccaccacgcctggctgatttttgtatttttagtagagacagggtttcaccatgttgggaaggctggtctcgaacttctgacctcaggtgatctaccggccttgg

SEQ ID NO: 263264 - DNA, 464 bp, Homo sapiens
gtgtaagtccaagagtccaaaagctgaagaacttggagtccagtgtttgagggcaggaagcacccagcacaggagaaagatgaaggccagatgactcagcaagtctgctcttccatctcctgcctgctttattctagccacgctggcagctgattagatggtgcccatctagattgaggatgggtctgtctctcccagttcactgactcaaatgtgaatctcctttggcaacaccctcacagacacacccaggaatgatactttgcatccttcaatcaagttgacaatattaaccatcatagcttagtgtctgaatttaaaatatgctgcaagtataaaatatgtattggatttcaaagaattagtagtgaaaaaatgtgactttcttgttatattttttgtattagtatatgttgaaatggtcctatttttgattaaatagttaaaatatattattaaaatcc

SEQ ID NO: 263265 - DNA, 454 bp, Homo sapiens
aaggagtttcaccatgttggctaggctggtctcgaactccttgcctcatgtgatctcccccgccttgtcccaaagtgctaggattacaggtgtgagccaccacaccggccttgatcatcattatcaatgcaattatttgtgacgtacttcctagccctccagagcttttaaaagaaatggaatctgactttaacttctagtgtttgaaagttttagtcccttgccatcttgcttttgagaaacgtcattagcgctgtatgttttgataggagtacagttgtttaattatggtagtaactgtaattaacttctgtgtagctctttgtggcttaccattttcatatacattaattcatttctactccacaggaagcctggcattactgattatgcagccaagcagcagtgtactattttgcctagtccccttgttccacataccctcctttctttt

SEQ ID NO: 263266 - DNA, 697 bp, Homo sapiens
  misc_feature (41)..(41): n is a, c, g, or t
ccacaccccctcgtaccaccgcacacctgcatgctccactnctcccccctccgactccccagccgcgcacttcagactgggcgacagagtgagactggatctgaaaaaaaggtgatacactacacaccacataggagagacataactttgaagtctaggatacaaacttgaatcttttcagaacataacaactagaggaggccttgcaaagatttaacagcaggaggagaggctgacagcaggaagagcacatgagaattcatagttatagctaagtgttttattagaaggtttacatatactgctctaccttttatataaaagaactatatggaaatggatattagtagggacacttcgccaaggagctccctacataataaaccattacgtcaaaacataaccagggcatgcagctttcgcagccgcggcgggccccatggccccctccccacccatatctacagctcactcaccacccacccccaacctgccctgagcagtgacgcaccaacggaagcacatctcccctcttcagctagaagacatcccgccctccttacatcaccccacgacagtcgatccgcctcacccacctgatgaattacaacggcacgacacgtgcgtcgatacccaccgtccccccatcaacgcagcgacgccaccaccggccgtactcacatcccagcggtccccc

SEQ ID NO: 263267 - DNA, 224 bp, Homo sapiens
cggcacgaggattctgatgttggatggggtggggaggtcgatgagtgagtggttaattaattttattagggggttaattttggtctggggccaactttctgacataggatgcatatttctagcatcaggacctgatccttttggtattaaaagctttttgccctcctgattcccacgttctaacacgtagcaacaggataggtccttattagcttagctaatca

SEQ ID NO: 263268 - DNA, 585 bp, Homo sapiens
gacaatgatgtgtgcaaagaaaccacatggcgagagagagaagccaaggaagccagactcttctgaacaacccaccctcttgggaatgaatacattccgtgagagtgagaactcactcccgtgggaaggcattaatctattcatgagagctccacccccatgacccagacacctcccagtaggcccataggccccacctcccaccgctgccacagtggggatcaaattttaacatgagttttggtggggacagaccaaaccacagcagtggtcttgccagcgtgtacatgataatggcatttccccccctatcctgggaaaggaattactgcacggaccttagaaagcagataaaccactctgtaagaaattaggtattttcttcttagaatcaattcagttcagtgttactgttctcttttatgtgttagaccctgtgttagatactgtggagtgacagcaaagcaatgtaaaacctccctcgactattgaaacagccaccaaagaggtcaacttcctgcctcctgcctctctccattccttctcattttctactcccgtgccagagtttatagctttccaaaa

SEQ ID NO: 263269 - DNA, 516 bp, Homo sapiens
ttagagagatgcctagaagaatgtaacacaaaatttaagaaatggttatctctatattatggtatttggacagattttaacttctttgcatttttgtttaaattttttaaatttgtttgcataagcatgtattgtttttataaaacaatagttattagctgggtgccacagcctgtgcctgtaatcccaactactggggaggctaaggcgggaagattgcttcagccttcagcccagttattcgaggctgttgtgtgccaagatcacacctgtgaatagccactgcattccagcctgggcaacatagaaagaccatatctcttcaaaaaaaaaaaaaagctattttcaaagaaaggcagggtgggggcagggctgatttggtccagtattgtttctagcaagtaattttccaggataaggctgtggctgaccttattttaggaaagggttctaatctttgctcaatggaaaaaagtgttattctttattaattataacttttaataaaattaaaac

SEQ ID NO: 263270 - DNA, 140 bp, Homo sapiens
ttgcaagaaactggtgtctctgttcccaaaggatatgtggcaaagtgaccagatgaagcttatgcaattgccaaaaaattaggttcaaaagatgttgtgatgaaggcacaggttttagctggtggtagaggaaaaggaac

SEQ ID NO: 263271 - DNA, 311 bp, Homo sapiens
ctgagaagggaaaggagataaagacatgctttcaatctaccgtctttgaatcagaagtcctacagcatattttggaggagctttgtcgaattccattctatgcctgtgccttctatttacccagtctcgtgttttgcacacttagattgttcctccctacagcttccccgttaaaaaaaacatctggtcgggtgcagtggctcacacctgtaatcccagcactttgggaggtcgaggcgggtggatctcttgagcccaggagttagagaccagcctggccaacatggtgaaaccccatttctactaaaaat

SEQ ID NO: 263272 - DNA, 380 bp, Homo sapiens
aattgagatattgccagtcaggccaaattctgggtgatgtgcggtagactgtgaacaaatgaggaaacaaggatagcaccttggcagccggcacccggaacaaagtcatccatagagtatgcaatttcccttggaaaggatgtaaacattctgcagtctagccccattgttatcagcttacagaagtttttatgagcccgtccaccttctgcagtcacacatttattaatgctttagtatcttcatcatcatatgactgatagcatagaaggcatgaacataaaggaatgactctgttatgtgtggcacatggaagtcagtcactttctaacctcacctcaagtgcgccatgaaaggcctccggctcctggacatagatt

SEQ ID NO: 263273 - DNA, 415 bp, Homo sapiens
gcacctgcccagcagcctagtcctctgtcctcgccggctgtgtcactaaaactattactttgctgtcaacagagatgtactgtccaaaacacggactcttacataaatgtttacatcctgtagccaacagccccttggagctcattaggtgaccggggctttggatttgtactgaggaagttgacttggcaccttctctccttatttttctcttctcctctgcagtcatgacactggctcaggactgagatctaaacagtcatcttcgtggcaacaggtattattggtaaaagagagtctggaaattagggcctagcctttcttgagaggccagtatagctgagtagtaaaaagtcaagttttggagtcaggtgtaactaacccacaatccaagttatgaactgtggagtgaatg

SEQ ID NO: 263274 - DNA, 736 bp, Homo sapiens
aattacatcttgaaagagcctatcttcaaatacagtcacattctgaggtccttagggttaggacttcaacatgaaattttgggacaacacaattcatcccctgtaagacctcaccctcaggaccttcaaaattcatgtctttcccacatgcacaatccattcacctcatcccaacagcccccaaattctcaacctgtttcagcatcaactgtaagtccaaaatctcatctaaatatcaacatctcaatcaggtatgggttagacttgaagtatgattaatcctgaggcaaaaccctctccagctatgaactgtgaaaccagatgttttttgcttccaaaatacaactgtgagaaaagcatagcatagaccattctcattccaaaatagagaaatccaagagaagaaagggtaatgggtcccaagcaagtcttaaatctagcaggtcagggctaggtgtggtgtggctcgtgcctataatcccagcactttgggaggccgaggcaggcggatcacctgaggtcagtagttcgagactgcactggcaaaaatggggaaaccctctctctactaaaaatacaaaaattagccagacgtggtggcacacacctgtaatcccagctactcaggaggctgaggcaggagaattgcttgaacccgggaggcagaggttgcagtgagccaagatcatgccattgcactccagcctgggcagcaagagcgaaaccccatctcaaa

SEQ ID NO: 263275 - DNA, 186 bp, Homo sapiens
tggtgtggaaacgagccaggctgctccttgcagtgaagagggaagaacctcactgttggagtcagagtaacttgagtctgaatctccattcccttgtatactagctgtgtgaccctgagtcagtttctgaatgtctctgagcctctgtttcctcacattataattatgtggctatgataattaaat

SEQ ID NO: 263276 - DNA, 342 bp, Homo sapiens
atagaagctccaggaagtagatttcagttccgcctaagaaatatggagtaaccggtgccatccaagtgtggctcaggcatcaagctgcctctttccattatcctctctccattgatatatttggaggttggacgaccaccattgacagtagttgagctacagggaggtacaagaactggaagtgaagagggaatggtcagcaattggaaggctaggaaaagaaaagttttgatgcccacaaatgtctgcttgcagcgaaaggaagtactgtgatatgaatttcaagtactttgacagctgtcattacttctccattatacattaaactgcttctaattatga

SEQ ID NO: 263277 - DNA, 374 bp, Homo sapiens
ggggaaatgagttcagtaaaatagtaggccaagtttatcagattaaaataaaaattcggatttagttcaaggagttggtgtgatctgaatgcatcacataaaatgtgtagcgggtacttctctccactttggggaatatcaaagtaatttaggtgcgtacagcccctttctgagattttttttttagttttagaaaattgtaaatcatgcacaaggaacaacattcaaaaggtagaagtcatgagctctcatttctacccccaggccttcagttctgacccagcaaaccatcactattaacagttacacatagtattctgcacttcgcttttttcacctgtaacattggcactttgtatatcaaaatacatgga

SEQ ID NO: 263278 - DNA, 553 bp, Homo sapiens
ccttaattaggttgatttggtgttcagcacaaaggcctccaccaacttgacatacatagtaggctcatcatagttggatgcaagcacacaaagatgggcttggcgtttgtctacggctttggcagcttcgcgaattccacgtgctaggtcatggtggatgagagcggtcttcagcacctcttgtgaagcagtattaacatccattacccctccagcaagcaatgccttcctcggccgtggcggtgggttacaagtgaagctgaatcttgaaggtacccaagcctccgcctccgcgcaactcggcagcggcagggaaagagaaggaatcaataactctctaggtaactcgaaatcacagacatttttaactacatttgcaacttcagaaatgatacaagacgtgcgccttgcaaaagccaattcaaacagtacagaaaggcataaagtaaaaagaaaaactgctcctcccccgcaaagccctgccccagtagcgtgtatactttctaatattagtctatgcacaagcacataaatgaatattttacaagaaaag

SEQ ID NO: 263279 - DNA, 100 bp, Homo sapiens
ttccttaccgtttgaaaaccagcgtccttcagcaacattcaaactagataaggggaaaaaacctgcaccaaataataaaacacaccaaataatggaacaa

SEQ ID NO: 263280 - DNA, 427 bp, Homo sapiens
tatggctgaaaacttgacctccaataatcaaattcaacaatgggcaaggaggctcacagggacatttgcaaatggctttattatttgcatttgccattcttttactaggaaagcagagggacttgagactcttggttggctccctacccaacccaatgtccatatgggcttaaaaatccttccattgtatataacctgcctgttttcctaagatgctgttttacttatgataatgatattttaatcccctcagatacatcctttatgatttctccaccaaaatggtatacagaggaacacccatactgtttccatcttattttaaatgtaaatgcttaaactcttgcagacatctgtttggtctaacctggaagtttccaaaatcagaagacacactaaatataaataaacttagaggcatttaaaa

SEQ ID NO: 263281 - DNA, 405 bp, Homo sapiens
caagggcagcttcagaggagctactttcagtgaagactccatgaatactgcccctcctggacccccacgaggggccagggattccttgggaagggagagacagtgacgtccactgtcacaagctctgcaagtctctcagagcattcatcgctcagacaccgtacatgagagctctgtgtgcaggtgactcttcttagtcctctaggttttctaggcaattcaattctccatgtttcccgcttcccgtcacctccagcctgcacccctcactcatgactggagatccctccacttccatcagcctgagctttaacttaaatggggaaaagcctcagggagccatcggtggcttgggaaaccacaatctgagcgcccgcacccccagaacactgaccgtttcacaca

SEQ ID NO: 263282 - DNA, 343 bp, Homo sapiens
tgctcatttgcaagttgtcttctagggtgttgcctgaacctaggctgcagtagaagtggggcttggaggtaggcgatattgaaatcccaggttaatgctaatctccatctcagatccaggacaatgcagaccagcttccttttgggaaatggaggttcttagttaatatgttctggctcttacatttctgataccgctactggtgccaacctaaatcagcagcctagttctcagcagaaggcagcagaggatggcaaggttggagggtagatagaagctgtgggagttgggtggctcctgtctgcacactggacaaggggcaccctgagaaaaataattcttt

SEQ ID NO: 263283 - DNA, 518 bp, Homo sapiens
agaaaatagatgtcttttgaattctttcttaattatcaccatgatctcccatgtgtcaatgctagtttttctcagcaaaacacagttttggtttttaacatatatcctgaaaggggaaatagttggtgatctggtatccttctttaaaagctcctcataacgtaggctaaaagaatcgcttatattttccccaaagctgaatcctttgtgtgccaaaaaaaaaagttatttaacctaagaagcaaatattaatatttcgttgagttgaaagatgtgtctgttcttctctccgtcctaaccccaaataaagtgattgataaagaaggaattatggtgatgaataattcctgatggccttttaatgttcgtttgtatttcctgtaaatgattaaggataattactctggaaagaatccggaaacaagagaaactccatagcaggaattatttaatttatgctgttacttcctttcctgccttttccctgaatgaatctaaggcaactttggtagcatcac

SEQ ID NO: 263284 - DNA, 197 bp, Homo sapiens
agaggagctttctcccgtaccatccactatgagaggaactggagtaggcatagtggagaggagctttctcccgtgccatccactatgagaggaactggagtaggcatagtggagaggagctttctcccgtaccatccactatgagaggaactggagtaggcacggcggagaggagctttctcccgtgccatccacta

SEQ ID NO: 263285 - DNA, 321 bp, Homo sapiens
ccagacccggcgacgccggccagagcccagctccatgcctcacggctctgattcactggccacatggtgctgaagtcacggctccgacagcagctccgctgagctcccaggcccggctccttccctctggtctctccttctgtctctcccatctcccttgctgagctccccaggcctggctccttccctcctgtctctcccgctctctcccttctccctcctgcactctgtctcacacacggccccatggtccccgctctccttcccttccctccctccttccctggcttttctggtttcccgtgcagctgttgtgggatg

SEQ ID NO: 263286 - DNA, 263 bp, Homo sapiens
gccccccactctaaagcctcctccctcccagcgtccactggctccaggctcctcacaacagcagctcatagacacggggcgtctccaggtggtcccagccctccagatgtttctagctctccaggtgggcgctgttttcacgtctgcctgcatccattcattccttcattcctcacctttatcctgttatctctatttttttaagctaccaggaaggaaagggaagaagagatcacgaaactgggacccccagaaaggaggag

SEQ ID NO: 263287 - DNA, 809 bp, Homo sapiens
ttgacctttagctgcatctctcagtaatactaaaccattagtcatgcctgggtcagtgatgtgtcaataacagaataattattgaagatagccttaagaggaaggacatcagcctcaaatcagcattagctcaactcaaaccgccaccagggcttgttgaataaatgaatgcatgtctaataaaaggcctctttacatctggagacctaaagactgttgattccattaatccaaagggttatttgtagctgctaaacacgtttttagaccaataagtgacaggcttttactcctgctgactgcaacccacccttctcaagtagaacaaattcactgtacttaatggctctggcattttaaaaggaagttggtcagcagggctgtttggaacatctgcacctttgcagaacactaaatgcaggggagaaactcttcccactcacaggagatgcaatcttgagattctgaaatcagggtgcctccaaactctgcgctagacctctggtggaaaccaaacagcgaggtgctaataaaagaaataagggacactcagagaggcagcgcagctcaacaattaacatcagaaacgcaggaaatagatatgcacacagggagagcaccatgtgaagatggcaattgtgctgccagaagccaaggaactcccagaagctgggagagaggcctggaacacatccttccccagcaccttagagggagcatggccctgctaataccttgatcttggacttttagcctccagactggtgaaacaataactgtttattgtttaagccactcagtttgtgcca

SEQ ID NO: 263288 - DNA, 217 bp, Homo sapiens
gattcaaaattgtataaatgactgaacaacttagatgatttgaaattaattgaaaataagaagggcttgtggaatttgcatttggctttggccttcaagcatttggaaatattaagagaatttccattttacatgtctccaactggggtgcttcttacaaccctttcactttttttttgagacgagtttcgctctgttgcccaggctggagtgcagt

SEQ ID NO: 263289 - DNA, 378 bp, Homo sapiens
cagctgcaattagaaagatgagtagaagaagtgacaaaagctacacaccatttctcctgctagagttgtctctatagtatgaatggacagaattctgtcattataagcagagtgcctctgtgaaggatggagctgtgatcccggagccctgaaagtcatctgcagagctaacagctaaaacactaatgagcaaaaataagaagcagtgacaactgggttcctctgccccagcctggaaaacagaaaattcaatatccaaatgacagacagtggaaattagctgtgattttccctgctctgtgcgaagagctggcatttcctcatttatccattcatccaacaaatatttattgagcaactaatatttcctgttgctat

SEQ ID NO: 263290 - DNA, 1315 bp, Homo sapiens
ggcttgctgaaaataaaatcaggactcctaacctgctccagtcagcctgcttccacgaggcctgtcagtcagtgcccgacttgtgactgagtgtgcagtgcccagcatgtaccaggtcagtgcagagggctgcctgagggctgtgctgagagggagaggagcagagatgctgctgagggtggagggaggccaagctgccaggtttggggctgggggccaagtggagtgagaaactgggatcccagggggagggtgcagatgagggagcgacccagattaggtgaggacagttctctcattagccttttcctacaggtggttgcattcttggcaatggtcatgggaacccacacctacagccactggcccagctgctgccccagcaaagggcaggacacctctgaggagctgctgaggtggagcactgtgcctgtgcctcccctagagcctgctaggcccaaccgccacccagagtcctgtagggccagtgaagatggacccctcaacagcagggccatctccccctggagatatgagttggacagagacttgaaccggctcccccaggacctgtaccacgcccgttgcctgtgcccgcactgcgtcagcctacagacaggctcccacatggacccccggggcaactcggagctgctctaccacaaccagactgtcttctacaggcggccatgccatggcgagaagggcacccacaagggctactgcctggagcgcaggctgtaccgtgtttccttagcttgtgtgtgtgtgcggccccgtgtgatgggctagccggacctgctggaggctggtccctttttgggaaacctggagccaggtgtacaaccacttgccatgaagggccaggatgcccagatgcttggcccctgtgaagtgctgtctggagcagcaggatcccgggacaggatggggggctttggggaaaacctgcacttctgcacattttgaaaagagcagctgctgcttagggccgccggaagctggtgtcctgtcattttctctcaggaaaggttttcaaagttctgcccatttctggaggccaccactcctgtctcttcctcttttcccatcccctgctaccctggcccagcacaggcactttctagatatttcccccttgctggagaagaaagagcccctggttttatttgtttgtttactcatcactcagtgagcatctactttgggtgcattctagtgtagttactagtcttttgacatggatgattctgaggaggaagctgttattgaatgtatagagatttatccaaataaatatctttatttaaaaatg

SEQ ID NO: 263291 - DNA, 960 bp, Homo sapiens
tgtaactcattccgcagcttctaagaggcaaaaacctgtggcctgttctgcatgcatattctgcagaaggcctggggtcttgatggggaacggatcacacatgactttcgtcccctcgagagctcacctctgaaagcacatgagggaggctcttaagtgtaagtgaagatgagtctccggctgctcagtgctggtcctcacactggcgagttttatgggctcccttccaggtttcctgcatgctctcgtgtggatgtgactttgtatgttacgaacacgggatcaggccataaacacaatttgctttttaatctcacagtgtatcaggctgcacataggaagcggtctcatccttttcacagctgcttggtgctgcgttttgtgaacgtttgatcatttagccgactcccgtctgtttctaatgctctgctgctataagcattgctgcctcaatccttttaaatttgtctttgtgcacttgtgtgagattgcttcttaggaaagccagttcctagcagtgggattgttgagtctgaggggtctgttctgaggaccctgatcatctgtccagagggctgctctgagtcacacacctgccagggtgcggaggggccgtttccatcctcacctgcaccagatctgacaggtttaaacctttgcagaagtgactgggtggaaaacatctcatttcgtgggcacttccaagattcgcagtgagtggtaggggtgctcggtcctgtctctgtcccttaaagacgctccttgcctctgttcagtttcaaagttctggccaaggaccaatccctgcagcatggggccctcaaggctttgtctgtggtgtgcggggccagggcatcttatcttgagccgcagttatatgtgctgttttgttctctaacctaattgaaatttttgaacacaaaccgttgtagtgggattcgcttctcagaaatatcccat

SEQ ID NO: 263292 - DNA, 1609 bp, Homo sapiens
tggttagaggaagatgggagggaattatcttgcccatggtcgtgcattcagggatttaacatttacagttttagctacttgccaggaactggaccatctatggcatgaagggattagtcacattactgatgattattagttgcttgtattcagtgcctgacactgtgcaaagcgcattatatgcgttactttcttcttcacagccacgcttttggtgtttccccattttacaggtgaggattcgggttcaaacatgtcaattttcctaaagatgcatagctggtacttagtggactcaattcagctctgtttagcagcaaagtttggttgtgaccacttcattcaattaaagcctgtgtgctggcacaagtcatttaactagtgcagacgttcttaaccctggctgcacctgagaaatctgcatgggtttataaaaacaaaccaaatgtgatgtccggattccatcccttagttaacctgctccagagtttctgtaagctctccaggtgattctgatgtacatcctgggctgagaacccttgagctggtgagtgagcatttgcatcttaacatggctatatctgttgctttaaattaattttgggggataaattatatgctatagtagtttttaggaattggatgatcctgtctcagaatatatccttcataaatgttgaggcgccggcatttccacggatggaatttcctcttagtgacttaactgatcactgaactgtaattttggtttagcagtaatagtgccaagcgcaacagagctgtgtataggaagggtgtagggaagacgggaggtgcttggtctgctgtctttgtacatggacagctctgtgactcatgccgaggctcagtggttgctgtttagtgtattctgtcactgtctgcctcacctctgtcgtaggaattgtaaaataaggtagggatttttgtcttacagctctacattggttcataagtagggtcttgatacaaattgtagactgtcgaaagttaagtattgttctcaagtagggaaagttttctgagtttgatttttcattttcagtgtttttgtgtatacttcatactgttccttttttagaagtccactgtatatgaatttgaacccaaagtcaaatggttaagtgttcagatcattgaggtccccaagctaaatatcaccatcataaaatgtaaattctgggatacaaaagtaaatctcaaattttattaaacatttttcacgatagtaattgtattgcattttagtagtcagattttagaagtttggaattttaatataggaaaaatactttgtgggcactaccggctgctaggttactcctgtggtcactatgtcacatgtgtagtatcatctcaactggcacacctgaccaaacccaccttcatagtaacactaagctgtcatttgcccttcccactgcattggcatctgcaatgatggcacaaatacgacggggggtgaaatggtggcaacttagcctgaatcaaggcaggcattgaagtgtcctatcccaagaggccttgcattcttccctgacatcttctctccattaaaaacaataaaaactaaaaaattttaaaaaaaaaa

SEQ ID NO: 263293 - DNA, 496 bp, Homo sapiens
acagggtcttgctctgtcgcccagggtggagtgcagtggcacgatcatggctcactgcagccttgacctcccagactcatgcaatcctcctgcatcagcctcgctagtagctgggactacaggcatgtgccatgatgcctggctaagtttttttttttttggtggagatgaggtctcactatgttgcccaggctagtcttaaactcctggactcaaacgatcctcctacctgggcctcccaaaatcctgggattacaggtttgagccaccacacctgaccaaacccaccttcatagtaacactaagctgtcatttgcccttcccactgcattggcatctgcaatgatggcacaaatacgacggggggtgaaatggtggcaacttagcctgaatcaaggcaggcattgaagtgtcctatcccaagaggccttgcattcttccctgacatcttctctccattaaaaacaataaaaactaaaaaattttaaaaaaaaaa

SEQ ID NO: 263294 - DNA, 737 bp, Homo sapiens
gccattcagccatggaagatatattggaaaagcagccttttccccataaggtgacttcagtggctgggactgtctccaactgggccattaaacggctgattcttattattggcaaaaaagccattcctcttagctattgttgagccttgttaccgtgtgacagttttatatccctgactcccaagtatgaatagggaattgttagtaatgtaacttccatgtctctttggggattcctgaaggaaactgggagaggaaacaaatttctctccttggccccactgtcactgtgggaaccagtgcggttcttgtggactgctgcagaaacataagcagcattttccggttgtacaatagctgtcccatagagcaggtatctttggtaacattacctaacacagttctgctttccccagaaaccagaatgaggaaactacagcttgaattgcagcctttagaattgctagtaggaaaaactgccagaggataaatccacttgagtattttattacccagaacacaagattgattcagtagttcagagccaaaatgaactaatttgcccagaaagttggaattgctaatctgcctagaaaaccaaagtggaagtaggctatctgcctaggaagttggaggtgaatagcttgaacctgggaggcggaggttgtggtgagccgagatcacgtcactgcactccagccagggcaacagagcaagactcagtctcaaaaaaaaaa

SEQ ID NO: 263295 - DNA, 770 bp, Homo sapiens
cagctaccagtcttttagatgacctccatatggtaaagactgcaggagctcctcttaagccacccaaatgcctacccttatcctgagatggttcaacattaatttgaacacctcatcagacacacagttccttaactatcttagctataggaaccattacaacttctgtcacctactcacagaattatacccttaatattttcaaccagcttggtgtcagaaattccttgccttgctaatcacagagacccagccatgtctcttaaacatgaaggggtttatttataagtgtgcagaagtaggcattccagggatagtttgacacttccacaaagtcatccaggcatgtggcttccattgtcaaggttccagtgtgactcaagatggattttgccactctggccatcacatcctcattccaggcaacaggaaggaggaggcaagagaaggtaacaggatacgcccctgctgattacacttccactaaggagctttctggaagtcctacccaccaacttccacatgaccacacttggcggtgaggaattccggaattatcatcttttcttaagcttgttgccacactaaatagaattactttctgttactaaaaacaagggaataaatataaagcagatttttctccagtctcatttgccagcccaaaattataccattctttttctagacttttgttagttttattgctttaactgacatctccttctctgctgtactgcctggcctcttacccataagtaaatttttgt

SEQ ID NO: 263296 - DNA, 419 bp, Homo sapiens
atggaagtggctcagtggatatcacagacactgggtagggatgtgggaagtgatcagagttgaagcaaagcatgaaacagcctctggatcaccaacaggaagtgggcccacaggccccaagcttcagaatttcaaaagtctgaaatcatagtcccggtttcctgctgcacttgactgtgagcagactgtgacaaagaacaggtttggtgccgccagaatcctgttctctacatttgcttaacccgacccttttgggaactgcagggaggcaagagatcattataaagccatatttaacagaatgggctctcttggttaggtggtaaaaaaatacactggtaaacatagtagtatctcactatattagcatatcaatagtaaagtgttgaatttataaagcgagttccatccttgttctt

SEQ ID NO: 263297 - DNA, 1359 bp, Homo sapiens
gtgcagtggtgtgatcttggctcattgcaacctccacctcccgggttcaagcgatttttctgcctcagcctcccaaatagctgggattacaggcatccaccaccccgcctggctaattttttgtatttttagtagagatagggtttcaccatgttggctcggctggtcttgaactcctgacctcaggtgatccacctgcgtcggcctcccaaattgctgggattacaggcgtgagccaccacacctggccaaaaatgaattcttgttgagtacttcctatgtgtttagctctgtgcttagatgcttttcctgccttatattattggagaaatccttctattctcccttgttgggatagtactattgctgttttccttggtttggagatgtatattttcttccacgttaatgattccaaacttagggtataccttataatcagtgtggtgtgtttcccccctcaaaagctgtgattaggtacatgttataccatatcacctatcagtgccatcataggattgaggagagaaggtggtattttacattttacagataagtaaagaagtgtcataactcgtccatactttaggaccctgttttatgaagcctgtattgttaattcgatattaatttaactgctgaagttttgttagaactaacggcctagaggtagacttgtggacctttggtttcgctaaaggtagagagccaggagaggacatgcatcctaggtctgcatttggggctttcctctggctgaggaattgcaacagaatgaggaagggcttcataagtggttatggcaacattctggctgactcgtgggtaactagcatatgaaggatcattgtcgtcatgacaaattgtgttcctgtttcttgaccacctactgtgccttaggtgcttggcaaacctcctgtgtagttttgacaacacccagcagatggaagaggagttactgtctccaccttatgcatgaggacatttcagcttagagaggttaaaggccttatccattgctacacagctaggaggcagcagagcctttctgccaggcaaaggggtcagtggcagagaaatgggaccctcagggggttttcccccagatcccttccctgttccacagtctcctctctttccccattttcctgcatctggcatctagctcttgaagatagaactcccaggcctggaaatgaccgttgacctttccataggagatgggctttctccagcacctcagcctatctctctgagcctggccagccaacccctatttaaccccttcattctcatctttgttcctgtttactgcagctgccaacagcactgcctcccagtaccccaagctcagtctac

SEQ ID NO: 263298 - DNA, 363 bp, Homo sapiens
gtctgcatcgtaccctcacattgcttctagttttttttttttcttaagtggtttttcagcaacttctcttttcttccatgcttaatatcttagtagaggatgaatgctcagcttttaggaaggaggtttggtatctaaaagtacagggatctagaaaagttagtgttagaatgacattttccatcatatattctctggaatgctaaccctgtaagatgttccctactgcaaaccgtatctcccttgagcagtcatgattcatatgtggtgttaaaggtctaaaaggtcctacagaaaaaaaactgttaaattttattgtctcagtgtttcccaaccttacttgatgatggaaccacttaaaaa

SEQ ID NO: 263299 - DNA, 560 bp, Homo sapiens
gagagctcatcctaacctccagtgctgggatttcacaaaatgaaaataccttaaatatgcaacagtgttagcaaatgaacagcaacagagaaaaatcatttcttccccttttttatctccatcttcaaactttaatttaaaacaactatttttacataaactacaaagtcatagccagcagcatgtgcagcagagacagatagcctgaggttgcccagggacttttcattttatctttgcgcagacctagcactgcctgccaggtaaaactagtgtaacgagggctccggcgtctccaccacgcgtcagccctgccgaggccaagatgagcacgctgataacgcgggctgcctgacagccaggggagattctgtaaatcatgctgctcccattgattacagtcgggaagagcattaaccctccttcaccccaagatacgctgtctccacaagtgtttgtaacatcaacatgttacgggagcttttggaagatgaattcattgctagagagaagaccccttcgcaaaataaagaaatgccaacaagcctgagtattgtcta

SEQ ID NO: 263300 - DNA, 305 bp, Homo sapiens
acatctcatataacccataaatatatacacctactatgtatccactgaatttttttaaaaagaaaaaaaacagcctttaattagaatatttgcatgtcacaggctagggctaataatccaattaaagttttaggtaagggctggaggacacagggatgtgtagcacacgttgatgtacctcaaagaggggaattcttctaagaaagcgtcatcacgatttctcacctgttatctacaaccttcaacccattgctctaaaaaatcttacatttgagttgaagaaagaacaaatacgtttgtaaaac

SEQ ID NO: 263301 - DNA, 472 bp, Homo sapiens
ttaatgacagcaattgttcagggcatgtttatggaccagtctgcaaacaggaaactctacttcctgaatatgataggagttaaatgatactaactggataagatgaaaatttgtgagttaagtgttctttaaagatctgttgctgaaatgcttttcttgtgagaagaggaaagagaaagcacaagttagtgagtgagaggagcttcactgcagagaaactcaaagtcagtctttctgaaaagccctgctttctttattgaattaacatacaactagggttaacgacatttaccagtcaacctatttgcagtcctccaagagagctagttttgggtttaaaaaaaaaaaagggtaggggggctgggtaccatggctcagcactttaggaggctgagctgggaggatcccttgagcccaggagttcaagaccagcctaggcaatatggcaataccctgtttctacaaaaaaaga

SEQ ID NO: 263302 - DNA, 237 bp, Homo sapiens
gttttgctgaaatttaattggaggttgtatcatgactgattcatttgtgtttgacacatgtatgctgttaagtgccttatgatgttaattttcttgtctttctcttggaactgtcgcaagttttggacaacatgtcatcgtggatttactttgcaagtttgaatctgcatttatagattttctgcttgtgtgattttcccaatagaatgtaaatacaattcagacattaggactcat

SEQ ID NO: 263303 - DNA, 1390 bp, Homo sapiens
tagcagactgacatttcatagcattgtagctaagagataaggagcactttgctagtgacagtgggctacgaaaagtaaatagagagactttttgaaaatggtaaaagtttgagaaacttgggaagattagtgtgttaatcaggcttgctagttagtggattgcagaaagaaaaatgtaggtgattaagctctgggccttgtggtttatgaggtcaattttgcttcactttttttttggttcttgctaatcacttttagataagctcattgctcttagcatcattttttagaggttaaagcagaagtaaattgcaaacaaatctgtcagttgtgagcagatttcttttatgtgtgtggttctccatcatatttaactttggatgctggagtgttgaatagagatgatgtcagatattccaataggctatcatttaatgttaactggcaatcacctaactggttaatctcagttgagactgtgcttctgaactgggattgtcttactcccagggctgtgtaagaaaagtcataggtggatacaataatctcttttaagtatcagttttactcagatattttggtggagatattttgtactaaaacaagatctatatcatggaatagaatgctgaatttgtatgaattattcacataaagcttgatctttcaaaaaatagtttgcttgcagcaagtggtattagaacacatcctaaaacagaatgaaatgatgtcttttgcagcaacttggatggagctggaggccattattctaagtgaagtaactcaggaatggaaagtgaaataccatatgttctcacttataagtgggagctaagcaatgaggatgcaaagacatccagagtgatataatggactatggggacttgcaaggggaagcttgagagtggggtgagggataaaagactacatattgggtacagtgtacactgctccagtgatgggtgcactaaaatctcaaaattcaccactaaagaatgtatccatgtaaccaaaaaccacctgtacccccaaaactattgaaatcttaaaatagtaataattaacaaagtaaaacaagatcacaccctggaacaattggaggattgcttgctgccctgcatcttaaggcgtattctagcagcaaagcttgtgatgcactgacttggggcaagtaaaactgatgctgaggacaaagggagaagatgttcctcgcccagggaaatgaaaacttttcttattcaccttgcttgtgcttaaacacttatgttcatctagtgtagaatacatggctacttgtttgtaatttttttattggtggaattaaagtaatttttccttatctttgaacttttatttagagaacttaaataaagctcttctgtctccttta

SEQ ID NO: 263304 - DNA, 387 bp, Homo sapiens
agaggctggaatggcagagagagcctggcctgagagcagcgaggatggggtcacatctgggcacaggtgacatcatgagggtgccctgactttgggaaggggccttaccctgatgtgatccgtgggggatgctgtgtatgactacaggctgaggggtcccaggacgatggtactggagcttttgggtggcgcagttgccccttggtgggggccatttgctcaggttcacagaggcactgggcaggggtaaatgttcctaaacccacggggacttccgttgttggattctcagaggacacagaaattcctttgaattgaggtttttaaaaaatgtgaaattgtgccactgcactccagcctgggctacacgagactccatcccaaaaa

SEQ ID NO: 263305 - DNA, 212 bp, Homo sapiens
ggatatcagagggcaaagtttctgtcatgaaataggactaatcaacttagttgaatttgtatttaaagcaaggttaaactgaattaagaccatttttgaaagaattgtcagatgtacctttcaacccgcagccagagaagcttctgcagttgaaggccagaaagtctttgtatggttcttccatctgcaatatcaaagacaagaagtcttca

SEQ ID NO: 263306 - DNA, 408 bp, Homo sapiens
cagcacttcccccaagtaaggacagggctgggtgtgttgtcctctactaagacatgttgaaacatgcggagaaaacaaaaaagtcatataaataagaaatttccagaaaatctttatagccaatgattgctttagtcagaagtttctttctgaaaagagctaggcataagggggagatttaagctaagcatgagattccttcccaattccacagaaaaccacttaggctcaaggtagggcaataatccacaagtacagggaacaaagcacagctagctgggatctcctgccatctcagggcctatgaagacttccaggaaatgctataatataattgttcaggaaaaggctgtgtctagatcatttagcagttggacactaatcgtcagggcttaaatagattatcac

SEQ ID NO: 263307 - DNA, 378 bp, Homo sapiens
agtaagagtcaagtcaaatttaccttgtatcaaaatctacatagtgatatggcattcgtctcagtatttggttaaaaagagcaaattggaattttctggggtttttttttcccctgaatactttacgtggttacagttatgctactgctatttttaattaaataagagtggctgggcatggtggctcacacctgtaatcccaatgctttgggaggctgaagtgggaggattgcttgacaggagttcaagaccagcctgggcaacatagtgagactttgtctctacaaaaaatattgaagcaggagattgctggagcctaggagttcaaggttacagcgagctatgatcacatcaccgcactccagtcttggcaaccct

SEQ ID NO: 263308 - DNA, 452 bp, Homo sapiens
aggagttgcatactctttccctatcactctatgcaagccaaagtaaaggaccatgagctcaccagctccagactgtggccaggaatgcaagcaggcttctagagatcagataggaagtggattcagcaacgggagtgtcagaagataatgcaagggctccacatgaatctgagaagtcctacttactctcatagccagtaggatccattaattgcattcacctttcctcacacaccaggacatcatcttaggggaagaagcaggggggtgaatacataagagattgggcattttatccaaatggaagaatgaacaccaactgagaaagacagcttaaattatcaggcctgacagctccaaacttgatgggaatttaattaatttctcttctctacctcattcactactgattgagggcttgggaaggagcctagataagctgcaaccaatat

SEQ ID NO: 263309 - DNA, 515 bp, Homo sapiens
tttatatcaaaaacccacaacatttttgatagaacactcacaattctcaatattggttacatgtagactctatctgggtaagcaatgtggaaaaaaaatcaccagacatggaaatgtctgtgccagaaactatgcagggcactgagatagagtgaaaaagacattggctcacccctgaaaatgtatgatgcagttgaggggagacaggcaatcaaatatacaattgtaatagagaatacattcaataatagtggacgtatatatacttaagagagcatgtcagatgagtatttaagtcagctttagggcatcaggaaattcttacagtgacaggattgttctctgaagaagtagtgctatgtttaaagtcaagagagttacagacttatgtgtcatatcgagaaatttggatttgattttaaagggccttaagctgaaagatgttccaaaaggaagatccaaaaggatctgttccaaaaggagaagattgtgagcaaccatagcaaatgggctcc

SEQ ID NO: 263310 - DNA, 319 bp, Homo sapiens
gaatccctctcaaaggaaaaaaaaaaaaaagagatatctgctttgcttatttgttgcatgggcagctggtatttaatttgagggataagtcccataaaataattcatattggctcatttagtagcaaacatagtaatttgggttttaaacattgaataatttctaccttgttgaaataactgtggttccatttataagataatattaagaatgagtagagtaggctggtccgagtgcagtggtatttacaacctattgatcacaaccagttacagattgcttagtttcttcttcattccctctgtttcactgaactagc

SEQ ID NO: 263311 - DNA, 490 bp, Homo sapiens
tcgtgatctgcccgcctcgacctaccaaagtgctgggattacaggcatgagccgccatgcccagcccaaaatgtgttttttctaaatcactctttaaaagagttttttaaaaaactactttactaaaaaaaagtaaatttaaatttagtaacatggcattacaatccttgggaataaaattaattttatgctgttgtcctgacaaagcaaaggaaatgcatctgaagtggcatggtttggtttggttttgtttttttctaaaattgttctactcttccaaagggaaggttttagaatgtttcccaaagcatgaatgttggaatggtggtcccatgagatgctcctctaaaaaaagaaggaggtgaaagaattatttggccaaatctgctttgaaatcctctcccttttagattcatcctaatattggcataggaatgcctctttaaagaactacaataaagaagcctgtttatctttgcttaacacagaa

SEQ ID NO: 263312 - DNA, 2660 bp, Homo sapiens
atggtggtggcacaccccaccgccactgccaccaccacgcccactgccactgtcacggccaccgttgtgatgaccacggccaccatggacctgcgggactggctgttcctctgctacgggctcatcgccttcctgacggaggtcatcgacagcaccacctgcccctcggtgtgccgctgcgacaacggcttcatctactgcaacgaccggggactcacatccatccccgcagatatccctgatgacgccaccaccctctatctgcagaacaaccagatcaacaacgctggcatcccccaggacctcaagaccaaggtcaacgtgcaggtcatctacctatacgagaatgacctggatgagttccccatcaacctgccccgctccctccgggagctgcacctgcaggacaacaatgtgcgcaccattgccagggactcgctggcccgcatcccgctgctggagaagctgcacctggatgacaactccgtgtccaccgtcagcattgaggaggacgccttcgccgacagcaaacagctcaagctgctcttcctgagccggaaccacctgagcagcatcccctcggggctgccgcacacgctggaggagctgcggctggatgacaaccgcatctccaccatcccgctgcatgccttcaagggcctcaacagcctgcggcgcctggtgctggacggtaacctgctggccaaccagcgcatcgccgacgacaccttcagccgcctacagaacctcacagagctctcgctggtgcgcaattcgctggccgcgccacccctcaacctgcccagcgcccacctgcagaaactctacctgcaggacaatgccatcagccacatcccctacaacacgctggccaagatgcgtgagctggagcggctggacctgtccaacaacaacctgaccacgctgccccgcggcctgttcgacgacctggggaacctggcccagctgctgctcaggaacaacccttggttttgtggctgcaacctcatgtggctgcgggactgggtgaaggcacgggcggccgtggtcaacgtgcggggcctcatgtgccagggccctgagaaggtccggggcatggccatcaaggacattaccagcgagatggacgagtgttttgagacggggccgcagggcggcgtggccaatgcggctgccaagaccacggccagcaaccacgcctctgccaccacgccccagggttccctgtttaccctcaaggccaaaaggccagggctgcgcctccccgactccaacattgactaccccatggccacgggtgatggcgccaagaccctggccatccacgtgaaggccctgacggcagactccatccgcatcacgtggaaggccacgctccccgcctcctctttccggctcagttggctgcgcctgggccacagcccagccgtgggctccatcacggagaccttggtgcagggggacaagacagagtacctgctgacagccctggagcccaagtccacctacatcatctgcatggtcaccatggagaccagcaatgcctacgtagctgatgagacacccgtgtgtgccaaggcagagacagccgacagctatggccctaccaccacactcaaccaggagcagaacgctggccccatggcgagcctgcccctggcgggcatcatcggcggggcagtggctctggtcttcctcttcctggtcctgggggccatctgctggtacgtgcaccaggctggcgagctgctgacccgggagagggcctacaaccggggcagcagggaaaaggatgactatatggagtcagggaccaagaaggataactccatcctggaaatccgcggccctgggctgcagatgctgcccatcaacccgtaccgcgccaaagaggagtacgtggtccacactatcttcccctccaacggcagcagcctctgcaaggccacacacaccattggctatggcaccacgcggggctaccgggacggcggcatccccgacatagactactcctacacatgatgcccgcccacccgggctgccccgcctcagccccagctgccctggcgtggccatgtggctttgcccagcctgctgcaatccaagagagcaaggaagagaaattccatgggtgactttcctctgcagaaagcaaagtttggggagggctgacgattttgtagaacacaacagtgacaattttttttaaaagaatagaaggcaggagggggaattcgacattgttgaagacataatttataccaagttatgccagttggggagggaaggactaaaaataatattgcaggcagggctgggttgggtttttttttttcccccctgaactggaaggatactacctgtacaacatctgtggacacctcatgctctgttcaaggccatcacaaaggaaccgcccagggagaagcagccggctctcaaagctcccacgcagctctcccgccactggccactcgctggcgacccgatggaaggttttcaggctcctcacaaaggagagagggaagaaaagatcttttgccctggagatatggtcctgaaatctctcccctggcttattccataccatttcccttgcagatttgcagaaacatggcatctttcactgcattctttgaacaatcatgtagtcgatt

SEQ ID NO: 263313 - DNA, 944 bp, Homo sapiens
agcagattacccaggccttgcacctggatcaatgggctgccctaatgaaggatatcaaaaatgaaggggcagctaaagaaaaataaaagacacctcagaaagtagcctgcctctttgacaagggacatgccttcagaggaacataacagaaacctctgagaattgtcaacaataaaaagactgagcaacaagggaaactggtaggaagccaaaggttttaagaggtgagagtggagaaatgctgtgcttttattgatcctctccaaaggaacacctttaaaaaagcatgatataaattggcactaatcctcataagagaagaatgtcagccaagccagtgaaggaattttggagttcgctttgaagacttatgcactctccagctggtcacagacactacactcacccattttgtaaatacacttttttttgttttgttttttaagcttctcacttcagtatctaccagacaggcttgtgcaaggagtgaactagtattgtatctgttaatttctttgcaggcaaaaatcaagttaccaggaaaatattttttaaaaaccacgaacagtctaagagcactgaacattttgaatcatttgccttttctcaacactggattttaagcaaggaacaagactattccagttctaaatgctttaatgaacaaggggtattgggttttagcatcaacatgatctatcctcactctgaagctttaacttgagtagctgctgtgctttgtaaagcttcaatccaattcatttgataactacaattaccaaatctgggcattgctgactacacagttcaaaaaaacagcatggagggaagacctgctgagaaccttagaatctatcgataagctcttgaaatggtttaaagtaataaaccacttcaattgaaagggcaataaaatgtttttcgtgtatatatgtaaaaaaaat

SEQ ID NO: 263314 - DNA, 659 bp, Homo sapiens
ttttttgaaaggaagtaaagtacacttggaagaaggccaagaaggcaacttaagatatcaagtgtgccaatccaatttgcttttcattccatggggcattttcagaatacccagcttcccagtatcttcagaatcacagcttccaaaggtaacctgcatttctaagagaggccaactcataaatgacagaatgtctgctcaggataaatcttcccccagtgaggcactgcgcttggatagatgactgagcaagttacacaacccagggtctcaaatgtcattatgtatggattacctggatttaattctatattacactattatcatatgttggtagagttcaagatttgtctggatttcagtatttaacaattacaccacatatagcataagctgattaactctttccaagtactctttattgtataggaagtatcaagtggcctatttccttaaactacaaactcagttgctagatgcaataggaatgaaactcaaaagagaagactcagagataagtcatctgtaataagttaaaagctctttgctactagaatacagagaagagtccctaaccatggtaaaactggtggtagcaggaaaagttctgcctgacatccagctggataccaccatcccaaatgccagggattatgtgt

SEQ ID NO: 263315 - DNA, 418 bp, Homo sapiens
ttttttgaaaggaagtaaagtacacttggaagaaggccaagaaggcaacttaagatatcaagtgtgccaatccaatttgcttttcattccatggggcattttcagaatacccagcttcccagtatcttcagaatcacagcttccaaagttctgccaagtcccagaaacagacagccagccatggctaaggcacataacaacaacaacaacaacaacaacaacaaccaccacaacaaaaacccaaaaaggctgttggatgaaagagagttgctcacatactccacagcaacacagagctttgatacccgcaatgtgagtttctaactcttactctattggaagcatttctttctctctttgaagagggtatacgatttcaagagaaaaaggaaaatcctgaaataaaaacaaaacaacc

SEQ ID NO: 263316 - DNA, 105 bp, Homo sapiens
tatgacctcaggttaaggaaggatttcataaaggaaacaatgagtaaatctggcattttgtaaatgatattttctacacatcaaaagacacctctaaataaatac

SEQ ID NO: 263317 - DNA, 411 bp, Homo sapiens
ataaatggtctttcttcccgacccccttaaaaaaaaaacacacaaaatcaaccaactatagcatgctaagatgaaatgttgacttcttccctccaggttggagacaaggcattgatgcccccactatcaccattattattcttaaatatactactagaaattctagccagtgcagtaagacaagagaaagaaagaaaaggtacaactgctgaaggaaataaaactgtcattacacatagatgatgtaactgtataaatgatttatctatagattcttttgggtttttaagaaagtataaaaaatgtgactatgaaacaatatttttaaaaatctatttttatatgctcacaaacaaacctttagacaatgaaattaatagcaaatgccatttataatagaatcaaaaaaca

SEQ ID NO: 263318 - DNA, 227 bp, Homo sapiens
gtttcactaattcatagggtccaggctaaacttctagacacctaagtcctagccatagaaccaggcctcagttttgtcacacggcaggggaaacggatctgttctgagtggtcccagcacagttgtgaccccatttaacaaatgcggagacagagacttaacaaatttaagtcatttgccttgggatacatagctaataataataaaagcattaacaacggtatgaa

SEQ ID NO: 263319 - DNA, 624 bp, Homo sapiens
caaactctattaaaaggattttcaagggccgggcaagatggattacaggcgtgagccaccgtgcctggccattatgactgtacgttttggtgacacctggttcttacgttagaaatcaggctgctgaacgttctgctctgtgtgtgtctttgtgcccattcttgttggcttccttagagggatttctggaagttcaatgattatgtaaaaagcacaagccttgctgggaccctggagtggcgttggagtctctcgtggttaggagcccaggccctggcctggccatcgggggctggaatcctggctgtgtcctccgtagccatgtgccccaggcagctttcctcaccgcctgcctgtcatccagggatgcaggtaggtcctgctccatggggttgtcatggcgatcacagagacttgtccgtgtggaccacctagagcagtacctagcagggcacctggcgccctggggtcaccttggatcagggttgcagctgacccactcccatccctcccaaaggcccttcagcccagacttttgtgcaccccaaattccatcaaaatcctttttcctttgagagtaactttattcatttccctgcagcttattaaagaattctgaagaac

SEQ ID NO: 263320 - DNA, 727 bp, Homo sapiens
tgcaaactccgcctcctgagttcaagtgatttccggctaatttttgtatttttagtcgggatggggtttcaccacattaaccaggctggtgttgaacttctgacctcaagtgatccgccctcctcggcctcccaaagtgctaggattacaggcgtgagccaccgtgcctggccattatgactgtacgttttggtgacacctggttcttacgttagaaatcaggctgctgaacgttctgctctgtgtgtgtctttgtgcccattcttgttggcttccttagagggatttctggaagttcaatgattatgtaaaaagcacaagccttgctgggaccctggagtggcgttggagtctctcgtggttaggagcccaggccctggcctggccatcgggggctggaatcctggctgtgtcctccgtagccatgtgccccaggcagctttcctcaccgcctgcctgtcatccagggatgcaggtaggtcctgctccatggggttgtcatggcgatcacagagacttgtccgtgtggaccacctagagcagtacctagcagggcacctggcgccctggggtcaccttggatcagggttgcagctgacccactcccatccctcccaaaggcccttcagcccagacttttgtgcaccccaaattccatcaaaatcctttttcctttgagagtaactttattcatttccctgcagcttattaaagaattctgaagaac

SEQ ID NO: 263321 - DNA, 479 bp, Homo sapiens
actgaaatgatgagccagtagtcgtctttttatgcccatcctcttccacctccctctccacaaaaataaataaattaaagaaattcagcacctgtggaaaactctgccaagaggaaattacctcctgtgtggtttgtcagattcatgttcttcacactttccatgggaacaaaggctgtctacatatttcctgtcaagtgaagacaatggtgaggctctgaaaaccattttgaatccttgggttatctggggaggaagttattgaaaaaaaaatagcctgtaggaaaatgtttgattccattttattcaggctcgggataaatttcttatggcatttcagggcagtggagaagtcacggggacaggagaacagtgggtgagtcctgtgtcaatcagagtgcagggctgtgttttctggctattgccatgtaacaaactgtttcaaaactttgtgacataaagcactgattttattatgc

SEQ ID NO: 263322 - DNA, 514 bp, Homo sapiens
ttgttactgtagaaagtgtgggtagggagcctcctattctgccatcttgctatgccatatgttccgatatgttctatgtcaaatttatctgattacagattcagaatttctgaaataaagtactcagatttacacattgtgtaataagtaaatgtattgcaatgcttcattctcattagagcattttattaattattgaaatgcatttgcttttattgcggcgcatggcatgtcaaagattcaaaatgccagctcttcataagtcacagttgaaaactagttatttaaaggattgtttttatgatacgtctgtattatattcaatattttataggtcagaattttctcttgttttcaactgtattttactggggagtctcttttcatgtaggttctccttgatcatttacttttttgtgtgtttttaatcttcatatttgtatggtaattttcaactttgtaccttttatgaccatgtattgtttaattccaataaaaatcattggagcaagtt

SEQ ID NO: 263323 - DNA, 331 bp, Homo sapiens
  misc_feature (124)..(124): n is a, c, g, or t
  misc_feature (143)..(143): n is a, c, g, or t
  misc_feature (156)..(156): n is a, c, g, or t
  misc_feature (181)..(181): n is a, c, g, or t
  misc_feature (209)..(209): n is a, c, g, or t
  misc_feature (227)..(227): n is a, c, g, or t
  misc_feature (232)..(232): n is a, c, g, or t
  misc_feature (237)..(237): n is a, c, g, or t
  misc_feature (249)..(249): n is a, c, g, or t
  misc_feature (264)..(264): n is a, c, g, or t
  misc_feature (266)..(266): n is a, c, g, or t
  misc_feature (274)..(274): n is a, c, g, or t
  misc_feature (279)..(279): n is a, c, g, or t
  misc_feature (296)..(296): n is a, c, g, or t
ggtaagcgttagtttttatactctgtagtagaccttgtatcactacataggcctgtcttctgtccttgaatttttttaagtttaattttttattgactgggtgtggtggctcacgcctgtggtntcagcctccagagtagctnagactacaggaanagataccatggagatgtgcacccanaggaaaggccacgcaaggacacagcaanaaggcaactgtttacaanccaanggaanaggcctcagganaaccaaacgtgtccncnccttgatnttgcncttcccaacctccaganctgtgagcaaataaatgatgttgtttaatcaaaaa

SEQ ID NO: 263324 - DNA, 538 bp, Homo sapiens
tgtaacattgatagaaaaccggaaggaattaaaaacaatgcagatgggtgtacttcctttctctcccagtcccaagccaacccatttttccttggaatgcaaaaatggtctggaaagagatatgggggtcctgtgaacagaacagggagtcattatctttttcttctttaccaatagacgatgacaaatgtggatggtgaggaagtaaaacgtcaataaagcagtatcataaataaaaaaataaataacgtttattctgtaccacgcggctgtcagtgtccggagtctccagggcagagcgccccggggagggctgggccctcagagcagcaggagggcgcccagggacagctcaccctggcccagcaggcggccccgatcccggccgcgaccctcatcccgggccttgacgcgaacggccaggcggcgcacctcgtcttccgagaggccgtcgaagcaaaagtcctggtcaaaggaggccttgcggctgcgccccaccacagcgctgcattgccaacgcgcagtgcccggcggccgc

SEQ ID NO: 263325 - DNA, 499 bp, Homo sapiens
tgtaacattgatagaaaaccggaaggaattaaaaacaatgcagatgggtgtacttcctttctctcccagtcccaagccaacccatttttccttggaatgcaaaaatggtctggaaagagatatgggggtcctgtgaacagaacagggagtcattatctttttcttctttaccaatagacgatgacaaatgtggatggtgaggaagtaaaacgtcaataaagcagtatcataaataaaaaaataaataacgtttattctgtaccacgcggctgtcagtgtccggagtctccagggcagagcgccccgggacagctcaccctggcccagcaggcggccccgatcccggccgcgaccctcatcccgggccttgacgcgaacggccaggcggcgcacctcgtcttccgagaggccgtcgaagcaaaagtcctggtcaaaggaggccttgcggctgcgccccaccacagcgctgcattgccaacgcgcagtgcccggcggccgc

SEQ ID NO: 263326 - DNA, 426 bp, Homo sapiens
gagagctggaggcttgttggtttgctgctctttctgtctgtccatccatcagtttgaagcaggtaatacatttacctgtttctaaagtcaaaataaaattaaaattatacataaggaaatcctgctcccattccttcccctttaccctgcatctaccgtcaatactgataaccgttttaatgaattccttatttttccttctagtatttatttatgcaaatacaaaaatctaaacattctcatttcttgtaagtattttgactgatgagaagataagagaattaagacattgagacacaaaaccatttttaacgacctggagcactctactgctctagaacaatcttaattaagaacatatgctaattattcacctctcagcataaaagcttattaaaaccaattggctgcaaatgaaagatgaag

SEQ ID NO: 263327 - DNA, 395 bp, Homo sapiens
cttctgtaacacaaaacatcatcaatactttagaaaacctcattctgactgacttctgagtaccaatcaatattccccaaaacacattatagggatctgacaactggtttatattcttatattgtgtaagaggtaaggaggtgctaggtgtgagacaagtaggagagaggaaaggatgggtccttagacacagcagaaaaaccggaagatgacattataaagataaaagacacatgcccattgttgtagacgggcatgtgcatgtcagcagaaaaccctaaagatggttccctaaacagtgatgagtaggatttttgatattttcactcattccccaagaggattttccctcctaaacactggtcactgataatcagaaaaaatacaaaaaaaga

SEQ ID NO: 263328 - DNA, 206 bp, Homo sapiens
ttgtaatagagaaagaaaagagtgtcattggcagactatggttcaattgataagttgaaggagaaaatgggtcagagtgtttcgggcagtggatttgggggtcaatctcctgtagctagatgatcaatggatttgaaggatagacatatctaacatgcaatttgaatttacttttacatattttgctgatgtattttttagtagaa

SEQ ID NO: 263329 - DNA, 432 bp, Homo sapiens
agggtcaggttggtgtcccaaagtgcctgactcctccctggaattctcccacctgtccaccagggaagactgagaatcctccttttacttgggagccctgtgatggacacctccccgggcttgggctctgcaggcccacacagaggacagagagatgtgccgaggtgcctgcgttatgggccctcttagttggactttcctctgctgctgcaggccctcagccccggcagtggcagcatggtgctccagatctcctcccagcagctagctgctccaccccaccacccttcttgtctgtgactccttggagaggatccaggagccatgcagcaagaagcctgcagacctgtcacctcccacactggagaggctcccgtgaagcccggcctcagcagtcatttcccataccatgattctttctctgtttaaaaa

SEQ ID NO: 263330 - DNA, 511 bp, Homo sapiens
ttctaattacagtggacctgaacctttggtgagctggagtaattaaactattcggtgggagcaaatcattacccataggagatgaatatgtttttctaggttgctgattagagcactgaaagaggaaatttacttaatagtgcctggaaaagtgaagggcattttattttcagatagtagcttattcacacaaaatcaagccggatgctgttatactgtgatcatttttgtaatcacttcagttttactgaataaacctgagtcatgttatcagagtggaagggtggtttcaggataggtgagaacaagtacaaatgcaacagcgaagaccttcccctgagaatgagaggtgatggctgcttttgttccattaagaatctcatgactgggtgcagtggctcacgtctgtaatcccagcactttgggaggccatggcaggtggatcatgaggtcaggagatggagaccatcctggccatcatggtgaaaccccgtctccactaacatacaaa

SEQ ID NO: 263331 - DNA, 719 bp, Homo sapiens
cttcatagtaatagtgaaaattatattttcttgttcttaatttacagctgaagagactaagattcctagaggttctaagtggaaaagctatgtttcttttctctagatgcctgctagtcaggagggaaacatctgaaagtccagttgcttctgagtcatgaaaaataatccaaaggtattagaaggcaagagagttaataaagagagttaagttactggattttaccttggcatttctctaaagctgttaaactggatacttagattaattcgggggactatgatgaccaagtcctgtgatgattgtggccgtgatgtagagtggataatagtttgaccttttcttgatcccagtattgcatcatcctcttgagaaatttatggatatccctgtactcacaggtaaaggacagtaagcgctaggaccaagggctttaaccagaaaaactgctgaataaacctggggtcatgggttttcagcgcgatgtactttagggaagatgagagggtgcaagaaatttttgttaattaagagagacagaaaaacttagtggtaaggagactaaatatgttgtcaaactgcttagattggaatctcacctccacatctatcttgcttgcctatgcaagtgatttaatgtctttgaacctcagttttctgatgtactgtgaaggttaaatgtaccagctcactcatccacatttacagcatttctctc

SEQ ID NO: 263332 - DNA, 314 bp, Homo sapiens
tagggatgtgtgagcagagtcttagcgactagcttctcctcctccccatatcaacacccttcaatgctgacttctcaaagtatggtgctagggcgtcacctggaagcttgttacgcctctccccagaactactgtgtccgaaactgcatttaaaccagatcctcgggggatttagagctggttaacaaaatgaccagaggattaaagtttggaaatctccaatttcgactatattgattacattgcctgcgtgttcaacaactctgacaatatttgacccaataaacgagtgcccagcaaggtcaaagcacaac

SEQ ID NO: 263333 - DNA, 484 bp, Homo sapiens
agcctgttgttataaaatgacctgtaatctcatctctcaggtatacttgctagtatatttaatactgccactattttttctttgtctagatatgcatacatgtttctctttgacaaaaatgacattatattttaatcctctactgtaatcttcttcacttaacagagtcataaaattttttcttgcctttataacagaattcaagtattatttttttacatgtgtgatagtctatcatattctttgctactggaactagttttctttcttgcttttacaaataactaaaaaaaatgtagagtgaaatctcaattacagaggctcctgccattttcaattcaagtctctctttttcacaaccattagtatgaattctgttatagtacctgtcagttaatgttttttctaaacaatttaatctcttaggtaaaaggtttttttctttaacttttcagatatttgacctgtttactgaacaagtata

SEQ ID NO: 263334 - DNA, 394 bp, Homo sapiens
ttttgctgggcagattatgttcttaactaaattctctcttcccagagattagatttttaaaatttccttctagctcctgtgatcgtcatccagacaactttagtgatttgatttggccacagggtttgctgttttcatttcatcttgttactccactgtgctggtgatatttccattttcaaagtttgtttcaggaacattaccatttttgctaatattgcctttgtacttgagtttccatgctggcttttacttccagagggaaatcaggtttttttgtttgtttattttgttttttgccttttctttttagtatgtttggggaagacatgatcagtttgagctaacagtaaggagaaaataaaactataataattttttttttcagaaacat

SEQ ID NO: 263335 - DNA, 541 bp, Homo sapiens
aaaaaacaaaaaacaaaaaccaaaaacaatccacatgtaatgggacctacgcagttcaaacctgcattgttcaagggtcaactgtattttgatttctcaatcctagtgtttctttgttacgtaaggggagtcttcaagcagaatagcacagagatgcgctaggaataaccatggtatatacttgcgcaatgattttcctaaaagattttgtagaaaatttcggcacagcagtcatggtattttagaacctatgacaacaaaaatgctgacctggttggcctgattttccctgaaatgaggctgtttaagtttgttatagaaacaaatctagcggtaatcctttattcctctgtggtcttattcaaaactagtttttcttcttccttctcaccctttctttctcgccttttccttctttctcttcattctttcttttgaatcaacacaagtgtttacatttcaaaattcttcttttctcagttctctgtttttttttttcctagggagccgctcgtttgtgtgtgtgtgtgtgtgtgtgtgt

SEQ ID NO: 263336 - DNA, 754 bp, Homo sapiens
ctgcagctctcagcagaagggtctctacccccaaagctgaaatacatgtgcccttgccctaggcagagcctctggctctgaagccacggacaggctgacagggaaggggctccactgagtaggggaacaggtgggatcttgaagctacccctaggatatcttggagggggtcttatttagctctaagaacaaagattgtggctgacgtggctttagagctgaggatgaggggagaagtgtgggcagcatgtatccagtcctgccatgccatctaggggcacccctccctggggcttctctgacctgattctggaataaatgactaagacaaagaaaaggactctagggatagcttagcacagaacccatacaaaccacccctaaggtttctaccagaatttccttaggcttagtaattccccaccctgacatcaggaagggatccagggttttccatcttccttttctagcaaagggaaaaaaaaaaaaagtgtctcacaacaatcacacagcctaccaagctacatccaaaaagagggtctgaggaagggctgggcgggcacctgactgtccccagagcccatatcatgcaatgcctgccttgtccaataagcccagccctaggagagcactgctcccttttaaaactctggtctagatgtaggcttttgtaaagttcacttggaaaatgccggcataatggacacccaaaagaaaacaactgcagaaaattcaggcagcattaaagtgttgt

SEQ ID NO: 263337 - DNA, 179 bp, Homo sapiens
cagggaggccaagttgtaatcccctctctcctggatgaccacgactgcccacagcagccattgcattcaccatgtgcatggtgacctttaccaaacacaaatgtgactttattattgtggttccccatgcttcttcccttagcaaacactctcagtgcaaacacatccacatacacagc

SEQ ID NO: 263338 - DNA, 223 bp, Homo sapiens
atttttttttagtttaacataactgtttacatttgcattttcattagcaaggctgtacattttccatgtagtattattccttctctcatataaagtctaactgtaaattaaccaccactggtttttttcgcaacattctctctcccaccatgtataaaaggtttacaacttaaaatttctggggctaaaccattttttaaaaatactttcataaaaacatggg

SEQ ID NO: 263339 - DNA, 548 bp, Homo sapiens
tgcaataagtgtaactattgaatctatattgaagagccacaagacactgaatttaattggacgagactattttatttaggaagacaatcatctcctgtgatcagcttaaggtttttgttttgttttatctggaacaagctaagttcatatttagaaaataaagttagttttttgggtgcatgagttttagagtaaattagtaatttagtaaactttgacatttccactttgtctccaaacacatttaaattctatctgtctgactgaagttctaaggcattctgtggttacttagaaatgattccttatattaatgtttacaaatgctaaattgtatttgttaaatacatgtcttattgcctaagagttttcctttcttataagtttaatataaatgtctaggaaataagactcccatttaatagcttataaagaatgctgatgtatcagcagtggccttgacattattggatacaagtaagatctacactgatgattaaatcaaattggctaagattattcgttctaataaaagcactgactccatg

SEQ ID NO: 263340 - DNA, 422 bp, Homo sapiens
atattcatcttttgtgtcatatagttctgtgagttttgaaaaatgtgcacagttctataaccttaccataatcaagacacagattattgctctcatccccacaattccctcattcccgtttgcactcagtctttcccctaaccctagaccctggcaaccaatgattaatttttttctttgcaattctgcatttttgagaatgttgtatggatggaatcatgcagtatattgtgttactagtctgacttctgtttagcatagaacatttttgttccctgtatcaatagctttttctttcatgttactgagttatattccattatataaatgcaccacaaattgtttatgtattcacaagttaaagggtatttgggttgttttcaggtttttgtaattatgaataaagcctctataaacatgta

SEQ ID NO: 263341 - DNA, 499 bp, Homo sapiens
tgagtcttgccaccactgtgagtaagcagcctcattacccatttcacaggagaaacaggctcagtgaggtcaggtaactgactctgactcccatgctcctctccctggagtttcacgtggacatctgttcaagctctccctttactgccagtagcgtttatgtataattaaaacagctggcatctgctgagtaacaaactaacattacgacccattctcactcttccacttgatgcctgtggaagttactatgcatctccacaaattgaactttgtatctttacctaacatcctatccatcctttaatactttggacctggccaggtgtggtggctcacgcctgtaatcccagcaccttgggaggccaaggcaggagggtcgattgagcccaggaggtggaggttgcagtgagccaagattatgccactgcactccagtttgggtgacagagtgagatcttgtctcaaaaaaacaaaaaccccaaattacaagttggac

SEQ ID NO: 263342 - DNA, 445 bp, Homo sapiens
tgagtcttgccaccactgtgagtaagcagcctcattacccatttcacaggagaaacaggctcagtgaggtcaggtaactgactctgactcccatgctcctctccctggagtttcacgtggacatctgttcaagctctccctttactgccagtagcgtttatgtataattaaaacagctggcatctgctgagtaacaaactaacattacgacccattctcactcttccacttgatgcctgtggaagttactatgcatctccacaaattgaactttgtatctttacctaacatcctatccatcctttaatactttggacctggccaggtgtggtggctcacgcctgtaatcccagcaccttgggaggccaaggtgggcagatcacttgagatcaggagttcaaaaccagcctagccaacatggtgaaaccccgtctctactaaaaat

SEQ ID NO: 263343 - DNA, 299 bp, Homo sapiens
ggcacggccactctggagaagcgcagcggcttcgtaaacatctaaacatgcatgcaccatgcaacccggcagccacgtcctgggcacttaccccagagcgatggaaacgtatgctcaggcatatttacagagctttactcacaaaagccaaagcccagagatccaaatgttctttgcaccgtggatgaataagggtctataaagcagcagcaccaggagccgtgcagtgcaggatcctcctgtatcttgaccgccacagtggtggttacaggaagctatgcacctggaaaaactgcagg

SEQ ID NO: 263344 - DNA, 614 bp, Homo sapiens
ggaaagctttctctgatgggttcataatgaaagacattttataagagttgagttagagaagggatttgaaaagagaagagatgcaggtggtaggatttggagttacctgaaaggggagtgaacctttctacaaatgaagcaggttttcttttgcttccttttatgctttcctatttttatgttatcattccccaaggctctaagtcacgcatgtgcttctttaaataaatctcacaagataaaagccaagtgcatcaaaatcaccaggcattgatgcctgtctgtaaaataaaatcacacactaatcatggagtatagattcgctttcttccctaaggcaagacgttccctggcacctgtggaggtgagccccagcatgaatgatctgtttttgacagtcttttcatacatgaaagctcattgacaactcacctaggcacacaatttaacaatcccaactagcatttgtgtttgctgtgaaattatgcatccagaaaaccaggaagtacttcttcagccatgcccatctgttgctgccttgaaaagtctaacttggccatcaaatttaatttaatagtgctggctggctacatgtgggtatttaagttaaaatt

SEQ ID NO: 263345 - DNA, 442 bp, Homo sapiens
tgtaaaccactctaagataccctttttcgtaaacttttactaaatataacattcagaaaaatgcacggatcataagggtacagttcattgaattaaagtgatcacatttttataatcactacttatgtcaagaaatagaacattataaacaccccagaatcttcctttgggccctttcccaacctctgtcacctaccttcttccaaaagagaactattggctgggcttagtgactcatgcctgtaatcccagcattttgttggggccaaggcaggaggatcatctgagcccaggagttgagaccaacctgggcaacatggggagaccctgtctctacaaaaacttttaaaaaattgtcccagctactcaggaggctgaggtgggaggatcacttgagcctggaggtcaaggctgtagtgagccatgattgtgtcactgtact

SEQ ID NO: 263346 - DNA, 507 bp, Homo sapiens
aaaagaaaaagaaaaaagatgaaagtttgggggcatacctgccgatggtaacaaaaaagacaatatagttctataatactttaccgtttcagattgttttcccttgcttgttcttgtggtgatgaggtaatgaggctgggggagacagaaagaagcaggaagagcctctgagaggggagggtttgagcctggccgaggagacacagtgaaaatttgaagaaacctttccttgggattctgtccaggagagctctttggggtgtttgcccagcttgggagcaactgtgaacataagtctgcattcacaaaggaaagtgctatccccaaggggcaatcctataagactttgatcttcatatttaagccaccactctcttaattgacttaggacagtgaaattccttaagagaatatctgtcttttcaaacagaggaatgaatatttcagagtcttttagtccctttttactgtttcttcctgggttaccctagagaaagactttctaaa

SEQ ID NO: 263347 - DNA, 386 bp, Homo sapiens
tacctccgccaggtagaggttgaggagacagagcgtggagaactggagacaggaggggaagcagtagagcagccagtgggggaagaagtgcaggtgagcgggcggccggagcaagggcagggagccgctgagcgagaaggcggcggagaagagggtggtcctgagcgctgcccacaggagacagaggaagaggcagaggctctggtaactcagccgccgctcgcggtacaggagcagccgccacagctgcaggtaggcaaaggcgaacagcgcggcgtagagcagggcgtgcaggacgctcagcgccaactgcacggagcccggcaccgcggcgcctgaggctgcagcgacggcgcctccgcctccgctgcccccgccgggcgtgg

SEQ ID NO: 263348 - DNA, 421 bp, Homo sapiens
cacgaggactgccactggggattaaagcatccctcctcccacacagcctaagaactgcctgcctgtggctatagttactgtcagaaactctgcctctactccaacagcaggactgcagcatacttggacataccctaatggcaggctttccctgcctaccacccctgttgtagcagactcccaagctctctactgggagcctgagtgtcactcctctctgcccaccatagccagggcctgattacattcctggggtccctggaaacaggcctacctggcctggcactccccccactccagtgccctagaacactgtctaagggcttgtctcaccctgtccaccaccactggcatctgtgcagtcctcctagggctgctaccaccacagcagcacccactgcacatactgcctagggaatga

SEQ ID NO: 263349 - DNA, 597 bp, Homo sapiens
gtatcagctggagtctatgaataatatttcatatatgtgtactactagttttcaaatgatacagtataagagtgataagagtatgggccaggcatggtggctcacacctgtaatcccagcattttgagaggccgaggtgggtggatcacttgaggtcaagagttcaagaccagcctggctaacatggtgaaaccctgtctctactaaaaatacaaaaattagccaggtgtggtgcacatgcctgtagtcccagcttcttgggaggctgaggcaggagaatggcttgaactcgggaggcagaggttgcattgagtcaggattgtgacattgcactccagcctgggtgacaaagcgagacttcatctcaaaaaaaaaaaaaagagtatggactctgaggcctgattggctggattcaaatcccagctccacacacagtagctgtgagattttggacaagttcctgaggtctgtgctatacttttcttatctataaaatggggataactgcctagctcatgaaattattatagggattaatgcaatttaattaagtgttggctatctttattaaatagctattagtgttattatgattaa

SEQ ID NO: 263350 - DNA, 789 bp, Homo sapiens
aaaattatctaacattctcccccccgattgggacaaaaaaaaactctagtgggtcctcggttgtgtcttcaggatcatcgttgcctgccccatcaccatcaaaggagcctctcagctgcagtggtggatccagcccatccagtggtccacctgggaggtctcagccaagctatctcaacacactcctctgcttggaattggtactatgtattatctttgttttaggatgtagggtaggaactgagtctattaatgtttttctcaacactgtattcccaggcctaataaggctagtaggtgcagtaataacctgttgttagagcaaaaaagatggcataagttgtctcccttgttgtttgagcctctttgaaacttttcattggtagtgaacacaaaaaggattaaagctctgcctaccaacatctctgccacaagagactggcccccactgtgagaatgctctgcctgatctctgaagattcacaggcttccaggcacgatcatatctcttctaagtcctgcacttacctgaggtcaaaagcctttaaattggtacaggtggccgagttgggatacaacaaaatgcattcagacaatccgatcctgtgatctggcaaaatgcaaaacattatagccacttactaaaaactgggtaacattgtgcagaaactcaggggacagatacaaatgattgtttgtccatattgatttgattcctgtaagctaatgaagaaattaccttgtgacatcaaagacctagtactcaataaaaagagaaaacattcaaaa

SEQ ID NO: 263351 - DNA, 459 bp, Homo sapiens
aaaattatctaacattctcccccccgattgggacaaaaaaaaactctagtgggtcctcggttgtgtcttcaggatcatcgttgcctgccccatcaccatcaaaggagcctctcagctgcagtggtggatccagcccatccagtggtccacctgggaggtctcagccaagctatctcaacacactcctctgcttggaattggtactatgtattatctttgttttaggatgtagggtaggaactgagtctattaatgtttttctcaacactgtattcccaggcctaataaggctagtaggtgcagtaataacctgttgttagagcaaaaaagatggcataagttgtctcccttgttgtttgagcctctttgaaacttttcattggtagtgaacacaaaaaggattaaagctctgcctaccaaccaaataaaaataatcggcctttgttggcctcaaaccga

SEQ ID NO: 263352 - DNA, 529 bp, Homo sapiens
atgcctctgctgatatgacaagaggtggagctcaggtggtaatgccagcaatggggagcagctgtaaatacagatgaagctttgctgcttgctcactgctcatctccttctgtgggctccagtctgtgtccttggggttgggggcccctaccctagtccacatttaatgtaatcatttaaacttttgacattcagattagggaaaaaataaatcttactttaattgaacagtttttctcatgctcattgattgtcatacttctgaattgcctattcatctccttagcctatttttctaaaggattccttatattcttaacgagttacagaagccctctattatccagttcatcctttgtaatatatgttacaagtacttttatttggttacttgtctttttgctctgttatgaaagttttaattgatactatttgaaatctgtccactttttctttgaggtttctgagttttgtgcaggaagactttatggatggtgtgagataggaataaaaacattttttcctcaat

SEQ ID NO: 263353 - DNA, 304 bp, Homo sapiens
ccttattgacaaaatggaagcttccataaaaaaccaacttggatacccactgccatcgtggttatcccaggcaactacagtcagcttctctcaacccaagggactcaattccaaagagggagcagggagagggcagctgcccgcgaccccattaatttggatgtttggctccagatgttcaatcccaaggacatcaagtcagcatttttctctgaagactgtaaaagaacagctgcatcttctagaagaccatccaagtccatgtcttgttaggatgattacagtgttttacttgtagcataaa

SEQ ID NO: 263354 - DNA, 995 bp, Homo sapiens
caatacagagactccctggtattgagacccaggattcactgatctcattgctaccaggtccaccttctaggcagccagactggaaaagagggcaggaaaggggagcaggaccctcccctttaagtgcacagtcaggaacttggccacctcacttatctctacttggctggaatgtggtcacatggtcacacctagctgcaagaaacactgggagatgtagtctttatttctggcagcaatgcgcccagctgcaagttttcactagagaaaccagatggcagatatcaggggataaccagttatctccaccacagcagcatacagacagcctctcacctgccctgtgggacacctgagttcaatgcccagctagctagccagcacttcttcccactatcacctcccctggggcagcatgatgtggggcagtagttcccaagatgagtgattttgcccccactggacttttggcaatgtctagagatgtttttggttggcacaacctgggggggtgctaccaccatctagtggactgagaagccctgacatggggaagagtgtgcatgcccaggagtcagacacacctgcctttaaccctgaggcctctgcctcctccctgtgcaccctcagtgactaatcagagtcccttcccatcacggaacatccaggatactaatgtggacttctctgcattgtgtaagaaccaattcaagaccaggcacggtggcttatgcatgtaatcccagcactttgggaggccgaggtgggtggatcacctgagttcaggagtttgagaccagcctggctaacatggtgaaacctcgtctctactaaaaatacaaaaaattagccaggcgtggtggtgtgcacctgtaatcccagctacttgggaggatggggcaggagaaccgcttgaactgggaggcagaggctgcagtgagctgagatcgcgccattgcactccagcctgggcaacaagagcaaaactccgtctc

SEQ ID NO: 263355 - DNA, 974 bp, Homo sapiens
caatacagagactccctggtattgagacccaggattcactgatctcattgctaccaggtccaccttctaggcagccagactggaaaagagggcaggaaaggggagcaggaccctcccctttaagtgcacagtcaggaacttggccacctcacttatctctacttggctggaatgtggtcacatggtcacacctagctgcaagaaacactgggagatgtagtctttatttctggcagcaatgcgcccagctgcaagttttcactagagaaaccagatggcagatatcaggggataaccagttatctccaccacagcagcatacagacagcctctcacctgccctgtgggacacctgagttcaatgcccagctagctagccagcacttcttcccactatcacctcccctggggcagcatgatgtggggcagtagttcccaagatgagtgattttgcccccactggacttttggcaatgtctagagatgtttttggttggcacaacctgggggggtgctaccaccatctagtggactgagaagccctgacatggggaagagtgtgcatgcccaggagtcagacacacctgcctcctccctgtgcaccctcagtgactaatcagagtcccttcccatcacggaacatccaggatactaatgtggacttctctgcattgtgtaagaaccaattcaagaccaggcacggtggcttatgcatgtaatcccagcactttgggaggccgaggtgggtggatcacctgagttcaggagtttgagaccagcctggctaacatggtgaaacctcgtctctactaaaaatacaaaaaattagccaggcgtggtggtgtgcacctgtaatcccagctacttgggaggatggggcaggagaaccgcttgaactgggaggcagaggctgcagtgagctgagatcgcgccattgcactccagcctgggcaacaagagcaaaactccgtctc

SEQ ID NO: 263356 - DNA, 241 bp, Homo sapiens
tgtggttaaagaaacaaaatccaacaatcaaaaattatttcacagctcctattttttacttgcatttcttgaaaatcctgagacatattcaaatacatagtttttacttacaaaaatacttataggcctggtgcggtggctcatgcttgtaatcccatcactttgggagaccgaggtgggcaaattgcctgaggtcagtctggccaacatggtgaaaacccatctctactaaaatacaaaa

SEQ ID NO: 263357 - DNA, 431 bp, Homo sapiens
tctctctgttgctactgcagaatcatttatgagacaattagggtatgcttgcactttttttttttccctcccctgtgttattctaggaggatgtactatcttaatagattaaatacttggtgaatttgactttgtctggttatagaccattctgaagctaactaaccaacaggagggtcaaatccacagtttaaattctgatcacaactaaagtgtcctcaattcagtatcagaaattgagtctagaggggagaagccagaaagagtggacgttagccatttgattgggataaagaggcttataggctcaaactttctgtttcctatgggctatctgtctctctctttttaaatggcaaacctaaagatttgtttcttgtacatctggtgggttccagggaaaccttgtctttggaatcactatttctctt

SEQ ID NO: 263358 - DNA, 405 bp, Homo sapiens
cagagtccaagagaaatgccctgcccagggtctggcagaactgatggagagcagccttcgtggctaccaccttcccataaagtctgtgctctccagcggcgcttggtaataagatttatttaatgacacgtgtaactctaagactatttgtgatggcgaataccacagatttgactgggtttgagttttgattatagacttcgatggagaaagcaatggcgccacaacccagccagggtgccctgccaggacttcctcatctcttgcagtgaaacccccttatcaaacattacgtgctatctggccccctttgtcatactttcttgcactccacttactacatatcaaggatttgccatgttgtggaaaagttggtttcataacatattttgaactcttatttaa

SEQ ID NO: 263359 - DNA, 398 bp, Homo sapiens
cctcaagtgatctgcgcccggcggatttaacattttgatactgtgttctcacgtggtgaggaaagatatctaaaacggtaattccaggtaacacgaatatttttagttctgtattttatttattattatactttaagttttatggtacatgtgcacaacgtgcaggtttgttacatatgtatacatgtgccatgttggtgtgctgcacccattaactcgtcatttaacattaggtatatctcctaatgctatcccttcccccctccccccaccccacaacagtccccggtgtgtgatgttccccttcctgtgtccatgtgttctcattgttcaattcccacctatgagttctgttattttaaattttttcacaacatagagcaaaatgagttgctttt

SEQ ID NO: 263360 - DNA, 930 bp, Homo sapiens
cactgtgtaggtgtgtcccaggtagtggttccagtgaggagcctagagcaaaatttggattgcttttttttcccaaatttcatttctttttctttagtcatatattcattcttaagcatgtggcaggcccttactgtgtcctaggccccatccttggtgctgagaatgcagacgtgaaccagatgtggtctctgccatccaagggacttaaatatcatcatttatgaaataatattcatctcacatgcctatggtgaggattaactaaggtaatatatgaaagagtgtggcaaattgtggatattgagtaagtgtacttttcttttctgataaagttattgttgatcagacttctttggtttagttgtctctttcattgagaactggatagaaaccaagatcagagtttaggtgaactgacagaaatcacccaaagctaggtcttttttggtacctttctaaacaatgccctttggttttctccctaagaaaggtgatcatacttttctggagaacatgtgggaaaaaaaagaaaagaaaaaaaaaaaaacacctgtgtgtgtggcgcgcgcgcctggggcccctggaagaaagctttcaataaaccaactccgggtggggcgcgcgcggggcgccaagagtggagcaaaggggacacggggccatagacgcggtggttcccaagaggagagaatcgcgcgggccagagcacaagagcgggcgggggaattctccacaccaaatatataaaaagcgcccgcgggggaacaaagcgagagagcgcgttcgtgaggacacaaattctccgagagaggggaatatcagcggaggggaccaaaaacgggggacctcctctacacaccgcgggggagtctcaagagggagacacctgaatatttcaacattacgcggcccggaccgggggtagga

SEQ ID NO: 263361 - DNA, 378 bp, Homo sapiens
aggggtgggttctctgaaaggccctgcacacgtctcagcagacagagaaggccttcagccctgatgatggtgttggggggcggtgctgaggaaattaataatcatctcatctttgtccttgggtctggaaggaagaagtgcgggggtgttgggggggattacaaagatgacaatcttcccggttggtttttctcagcccctccacgggcctggccctgtggtgcctgggtctccagagccagccacctccatcctggacaccggacaccttaactggggctcctttcccctgtatgggctgccagtactggctgacattaatgggtttgagaggagaaaagaccccctgggagcctgtaaaaccttagtcaggaaaag

SEQ ID NO: 263362 - DNA, 274 bp, Homo sapiens
ggcctcagtttctctgtcagcaccagatggggacttcttcagcctgacactccataactcaaggttgcacccacatctcctacctttgggggaaggagagagggattatgggacagtggcatcaatctccttcccaggatggatcctctgagctctatatttcttgcctatagtgaccagggaattttcctctattgattgctttctgtaatcgagcttaacaaatagaacttccctcaaatgattcttccaactaaactgatagaaagctaac

SEQ ID NO: 263363 - DNA, 283 bp, Homo sapiens
attgtgccactgcactccagcctgggcgacagagtgaaactctgtctctctctctctctctctctctctctgtgtgtgtgtgtgtgtgtgtgtgtgtgtgtgtgtgtgtgtatctctatataaatctcaaaaataaaagatcatttttgagattatcattttaaaagacaagataatgttcaacttaatgactaatttaattattactattggactttttgtagactaaacagagcattcaaaacaaatgaaggagaataaaaaatatgtattacatgttgta

SEQ ID NO: 263364 - DNA, 359 bp, Homo sapiens
gtgcaatgtcccctgtgattggctgggatttctgagcttttcagcttgcatatggtgagaatgttggcacaccgcagccctgagggcctgggctttggactccggcagtcccacatgtgtgtgctacctctgccgctctctggttgtatgaagtcaagcaatgtctgtaacctcactgagtcacagcgctctgctctgtagaatggagatgggatcctctctacctcctgcagtgtctgtgaatgccataacacaagccagagtgctgagcaccgtgcccaccctagaagagggctcggtgtatagtagcagctcttaatgctcccaggatgcctaataaattctttcagaaaagtatg

SEQ ID NO: 263365 - DNA, 167 bp, Homo sapiens
tgagaaagcctctgctctccccagtatggctataccacagaggtttgtctaatgtgtgagttgttttgtattcgcttcattagaaagccttttaaaatgcattttcaggtctgtgttcagtacagtgtgtatccaaataaaaattctctggcaaatcaccttaagaa

SEQ ID NO: 263366 - DNA, 446 bp, Homo sapiens
gagggggaaaagattggatgtagggagatcagatgagaggctattatagggatccaggtgtaagctgatggtagcttatttagtctgttatggttgatggccatacaaaaagaatgattctctgaagtaatgtatttatatacatctgtggtcagcaattcataactcctgattgccaggttaagatttccaatttaggggccgggcacagtggctcatgcctgtaatcccagcactttgggaggctgaggcggggggatcatgaggtcaggagttcgagaccagcctgaccaacatggtgaaaccctgtctcaactaaaaatacaaaaattagccgggcgtggtggcgcatgcctgtaatcccagctactcaggaggttgaggcaggagaatcacttgaaccctggaggcggagcttgcagtgagccgagattgcgccactgcac

SEQ ID NO: 263367 - DNA, 533 bp, Homo sapiens
caaaacaagtagtaagatggttaatttaagtagtaacagacaaaatggactttaaggcaagacatccctagaaacaaggaaagtttgtaatgaaaaatgagtcaatccaccaagaaatatgtatgcacctaataacagagctttaaaagacaaaagccaacagaaccaaaaggacaaaaagatagattcagtgtccctatttcttctattatacacaaattagggagagcaggatatttgttgaatatggcgtaaattcacagaccaactttcatattatacttaatggtaaaaccctgaaagcagtctcttactgttataccttataacccacccctagaatttctgcttcccattctagcaactgagttctgctgggatttggagttcttattttccaatagggaatgttactaccagaggacacagaaaggttccattgaattgaaagatgaggctataacccatttgggactgttgatgccactgaaccaacaggtaggaaaagaggtcactctcctgactagagtgct

SEQ ID NO: 263368 - DNA, 644 bp, Homo sapiens
aagaggtgccatgcactccaggagaagagctgactggatcctatactcaaagaatgggccacggatccctacctgtccactgtttgttactgggctgggaagctgcaagacccgatgctggggagcccaccatgaaatctgtcccaaatcatggaaccccgaggtgaaaggcccccaggcatgccaacacatggcagacaaatccagttgtgtccagggatggcgttccctccagttttctgaaagacgctcccatattccttaagcacagggatctactaaaggatgtgctccttaaaaatgagggagtaagccgagaaagaggaagatgtgggctctagaaaatggaatccaatgcagcaaaaggtaaaggggatttttagaatcacgaccaagagaactctgaggtcaacacctgtgcagcaggcctagagaatgatctgtgaagatgggtacaggaggaggagggactctaggtgggagggctctatcatgtggtggtactggtgtcagcccattggagccaattgttaaatatttgggaatgttgtaagccagtttttaaacacagtcattatttaaaaagtaaattataaaaggcttaatcatattagaaataaagatgataaatattccaaattcaa

SEQ ID NO: 263369 - DNA, 284 bp, Homo sapiens
gaatacattagaagtgatatgtgcccgttcccagctctctcctttgtgaactttgtcttcatcttgagaacaagcctgggctagcttgctagaggatcagagaccctgtggagcagagaagagtcagcaaaggcgtcctagccagagtgagatcagtaaagccatcagcactactgcagctgaccacagatgcctcatggagtcctattgtgcctggcttagattaaagaactgcccgtttgacctgtagtcttgtgtacaataataaatagttgttagataaa

SEQ ID NO: 263370 - DNA, 390 bp, Homo sapiens
atattcccttggcagaaaaattatatagatgttatatcacagccattataggggtaaggactgtcaccagcttgggtaaaacaaataggctcttctgttatgctgattggaagagtcttacagagctgagggcctaaaggaaagtgatttcagagaacatttaccttttcaagtcatttgcgtctcttttgaaatgttatttctcactgtaatttttagcttcccataattcctttctgccagcagccaacttgtggagtatcattttcctggtccatctctaacaagagaaaatttccagtcattattttgtgcttcagaatgattctgtgtatgatcatgcaacttcagtaagatcacagttattaaaatgagtacctaatttagtga

SEQ ID NO: 263371 - DNA, 400 bp, Homo sapiens
aaatattttggctgacttctgtatttcctgagctgtgtcacctcttcttcatttaaaaaatagtacctgtttgttgttgttcgtatttttatgttggaattttgaaacaaccaaaattccaaaatttttctgtttggaaatacgtaaaactagcaacagactttgagaaagtgagaagctcttcttatgtatattaatttttgtaaaaattacttccagaagataatcttctgaaaactatttcagttgaaggtatttcaaaaatctaacactttagagtagatttaaagaaaaatttaaaattaaattcctgtgatttatatcttatttgatttttcatcctaacttcattttctccacttttctttcccttacttctcttgttaatacaaaaaagaaa

SEQ ID NO: 263372 - DNA, 333 bp, Homo sapiens
agctatatatttttctataggctgctgcacatgtcttgtatagggtggcagagaatagaatactgggagaagcaccagagttggatacataatgccttccatatggtcatgactctactccagttggctatttggcctagaaccagctatttgtcctagaaccgattcagaaattaatatctctgaattttacttttctcatttctaaagcagagataataatgtatttgcgtttaagttatataatgtttctgtgaaaatcaaatatgcttcaagtttccttgtaaactaaataatacatattttattacaataaatgcttattgaaatgca

SEQ ID NO: 263373 - DNA, 2551 bp, Homo sapiens
  misc_feature (46)..(47): n is a, c, g, or t
gggaggagaatggagtgacagagacacgcggagggtggggggtggnngggggagcgtgttgaggggagggggggaggggggacacagagggaggaagaagcggcggcggcggcggcggcggctcctctttgcagagggggaaactcttgggctgagagcaggaataatgcggtaggcaaggcgggctgctggctcccccggctccggcagcagcggcggcagcccgagcagcggcagcagcagcggcagcaccccaggcgctgacagccccgccggccggctccgttgctgaccgccgactgtcaatggagctggaaaacatcgtggccaacacggtcttgctgaaagccagggaagggggcggaggaaagcgcaaagggaaaagcaagaagtggaaagaaatcctgaagttccctcacattagccagtgtgaagacctccgaaggaccatagacagagattactgcagtttatgtgacaagcagccaatcgggaggctgcttttccggcagttttgtgaaaccaggcctgggctggagtgttacattcagttcctggactccgtggcagaatatgaagttactccagatgaaaaactgggagagaaagggaaggaaattatgaccaagtacctcaccccaaagtcccctgttttcatagcccaagttggccaagacctggtctcccagacggaggagaagctcctacagaagccgtgcaaagaactcttttctgcctgtgcacagtctgtccacgagtacctgaggggagaaccattccacgaatatctggacagcatgttttttgaccgctttctccagtggaagtggttggaaaggcaaccggtgaccaaaaacactttcaggcagtatcgagtgctaggaaaagggggcttcggggaggtctgtgcctgccaggttcgggccacgggtaaaatgtatgcctgcaagcgcttggagaagaagaggatcaaaaagaggaaaggggagtccatggccctcaatgagaagcagatcctcgagaaggtcaacagtcagtttgtggtcaacctggcctatgcctacgagaccaaggatgcactgtgcttggtcctgaccatcatgaatgggggtgacctgaagttccacatctacaacatgggcaaccctggcttcgaggaggagcgggccttgttttatgcggcagagatcctctgcggcttagaagacctccaccgtgagaacaccgtctaccgagatctgaaacctgaaaacatcctgttagatgattatggccacattaggatctcagacctgggcttggctgtgaagatccccgagggagacctgatccgcggccgggtgggcactgttggctacatggctccagaggtcctgaacaaccagaggtacggcctgagccccgactactggggccttggctgcctcatctatgagatgatcgagggccagtcgccgttccgcggccgcaaggagaaggtgaagcgggaggaggtggaccgccgggtcctggagacggaggaggtgtactcccacaagttctccgaggaggccaagtccatctgcaagatgctgctcacgaaagatgcgaagcagaggctgggctgccaggaggagggggctgcagaggtcaagagacaccccttcttcaggaacatgaacttcaagcgcttagaagccgggatgttggaccctcccttcgttccagacccccgcgctgtgtactgtaaggacgtgctggacatcgagcagttctccactgtgaagggcgtcaatctggaccacacagacgacgacttctactccaagttctccacgggctctgtgtccatcccatggcaaaacgagatgatagaaacagaatgctttaaggagctgaacgtgtttggacctaatggtaccctcccgccagatctgaacagaaaccaccctccggaaccgcccaagaaagggctgctccagagactcttcaagcggcagcatcagaacaattccaagagttcgcccagctccaagaccagttttaaccaccacataaactcaaaccatgtcagctcgaactccaccggaagcagctagtttcggctctggcctccaagtccacagtggaaccagcccagacccttctccttagaagtggaagtagtggagcccctgctctggtggggctgccaggggagaccccgggagccggggaaggaggccgtccatcccgtcgacgtagaacctcgaggtttctcaaagaaatttccactcaggtctgttttccgaggcggccccggccggggtggattggatttgtctttggtgaacattgcaatagaaatccaattggatacgacaacttgcacgtattttaatagcgtcataactagaactgaattttgtctttatgatttttaaagaaaagttttgtaaatttctctactgtctcagtttacattttgtatatttgtatttaaatgaaagtgagactttgagggtgtatattttctgtgcagccactgttaagccatgtgttccaaggcattttagcggggagggggttatca

SEQ ID NO: 263374 - DNA, 547 bp, Homo sapiens
gtcactgtaatcagagaatgtgatgtgcttaatggccaccaaggagatggaatcacagtccccagaactgctggcatgtccatacagaaatcagagcattggactgggggtgtggggtggggagtagaggctgggtcatcactggtgccttcttctacactgacgtctctctgagtctgtgaagaccatgaaatgaagaaggcgttctgagagtttgccagtcaccttcctccatccatctagggctctgagcccaggtgtgggaatgacaggaaggccctgcctggccttctcctgggtctcatcacattcttcttttcttgtctccagacagagattactgcagtttatgtgacaagcagccaatcgggaggctgcttttccggcagttttgtgaaaccaggcctgggctggagtgttacattcagttcctggactccgtggcagaatatgaagttactccagatgaaaaactgggagagaaagggaaggaaattatgaccaagtacctcaccccaaaggtaaggagtcttccaaaccccacagc

SEQ ID NO: 263375 - DNA, 773 bp, Homo sapiens
  misc_feature (46)..(47): n is a, c, g, or t
gggaggagaatggagtgacagagacacgcggagggtggggggtggnngggggagcgtgttgaggggagggggggaggggggacacagagggaggaagaagcggcggcggcggcggcggcggctcctctttgcagagggggaaactcttgggctgagagcaggaataatgcggtaggcaaggcgggctgctggctcccccggctccggcagcagcggcggcagcccgagcagcggcagcagcagcggcagcaccccaggcgctgacagccccgccggccggctccgttgctgaccgccgactgtcaatggagctggaaaacatcgtggccaacacggtcttgctgaaagccagggaagggggcggaggaaagcgcaaagggaaaagcaagaagtggaaagaaatcctgaagttccctcacattagccagtgtgaagacctccgaaggaccataggggagctgagcggatcgctgatctcctggagctcatccaccaaggagcatgggagaccaactgaaattaagatgagatgacaaatcaagaaagttccacagggtatggagcaggttgctgagctgcagaaccaaggcaaagatctatccccacttccctggaggaagtggcgtccctcctggcttaaaggatctctctgcgagctccctgagggcctggaccacaggctctccatctgggcgtctccattgctgtagcagcatgagtgggtggatggatgttgccttctcttcaacctggaagccaggactgtgagtggc

SEQ ID NO: 263376 - DNA, 455 bp, Homo sapiens
ttgaggacccctcgcgacggtatgtttcctgtggattctgagtcttggcaccatgagaccagtgtgggattcttctttcttccaggcaaccggtgaccaaaaacactttcaggcagtatcgagtgctaggaaaagggggcttcggggaggtgagtgaacattcacgtttttaattgaaagttcttacattcaagtcacctttcctgtcccttctaaatcaacctaaagggttggcccacgggtcccccgggggcaccagtggctcaatgtgggccccgggggcagtgagggtgggagagagtcagtggccttggggctatcaggtgtgtctatggtggaaagaggttgtggagctgggcaggtgagacagacgtgctctcctgccagcctcaggcaggatccagcctgcagaggacaaatgggcagccctggtcgtgtgtggggaggagatgtga

SEQ ID NO: 263377 - DNA, 373 bp, Homo sapiens
ggagtccgaggatacagtgagctatgaatgtgctgctgcaccgctccagcctaggtgacagagcgagaccctctaaaaaaaagaaaaagagagagagagattccttgccacccatctctctgcttccagtgtgagccccacgtatgaactaacggattttcaacagaactggcacagggcagacagaccatgagaggaagaaggggttctctaacgtctgctcagtgaaacatcaaatagtgactttattagttaatgggataattgttcatgggagatcattagagagcccaaatcaaagaatttcttaggatgtccgaaacttggaaggctggaatgtcatcacgaagataaaagattgttgaggtctgca

SEQ ID NO: 263378 - DNA, 2428 bp, Homo sapiens
gtcactgtaatcagagaatgtgatgtgcttaatggccaccaaggagatggaatcacagtccccagaactgctggcatgtccatacagaaatcagagcattggactgggggtgtggggtggggagtagaggctgggtcatcactggtgccttcttctacactgacgtctctctgagtctgtgaagaccatgaaatgaagaaggcgttctgagagtttgccagtcaccttcctccatccatctagggctctgagcccaggtgtgggaatgacaggaaggccctgcctggccttctcctgggtctcatcacattcttcttttcttgtctccagacagagattactgcagtttatgtgacaagcagccaatcgggaggctgcttttccggcagttttgtgaaaccaggcctgggctggagtgttacattcagttcctggactccgtggcagaatatgaagttactccagatgaaaaactgggagagaaagggaaggaaattatgaccaagtacctcaccccaaagtcccctgttttcatagcccaagttggccaagacctggtctcccagacggaggagaagctcctacagaagccgtgcaaagaactcttttctgcctgtgcacagtctgtccacgagtacctgaggggagaaccattccacgaatatctggacagcatgttttttgaccgctttctccagtggaagtggttggaaaggcaaccggtgaccaaaaacactttcaggcagtatcgagtgctaggaaaagggggcttcggggaggtctgtgcctgccaggttcgggccacgggtaaaatgtatgcctgcaagcgcttggagaagaagaggatcaaaaagaggaaaggggagtccatggccctcaatgagaagcagatcctcgagaaggtcaacagtcagtttgtggtcaacctggcctatgcctacgagaccaaggatgcactgtgcttggtcctgaccatcatgaatgggggtgacctgaagttccacatctacaacatgggcaaccctggcttcgaggaggagcgggccttgttttatgcggcagagatcctctgcggcttagaagacctccaccgtgagaacaccgtctaccgagatctgaaacctgaaaacatcctgttagatgattatggccacattaggatctcagacctgggcttggctgtgaagatccccgagggagacctgatccgcggccgggtgggcactgttggctacatggctccagaggtcctgaacaaccagaggtacggcctgagccccgactactggggccttggctgcctcatctatgagatgatcgagggccagtcgccgttccgcggccgcaaggagaaggtgaagcgggaggaggtggaccgccgggtcctggagacggaggaggtgtactcccacaagttctccgaggaggccaagtccatctgcaagatgctgctcacgaaagatgcgaagcagaggctgggctgccaggaggagggggctgcagaggtcaagagacaccccttcttcaggaacatgaacttcaagcgcttagaagccgggatgttggaccctcccttcgttccagacccccgcgctgtgtactgtaaggacgtgctggacatcgagcagttctccactgtgaagggcgtcaatctggaccacacagacgacgacttctactccaagttctccacgggctctgtgtccatcccatggcaaaacgagatgatagaaacagaatgctttaaggagctgaacgtgtttggacctaatggtaccctcccgccagatctgaacagaaaccaccctccggaaccgcccaagaaagggctgctccagagactcttcaagcggcagcatcagaacaattccaagagttcgcccagctccaagaccagttttaaccaccacataaactcaaaccatgtcagctcgaactccaccggaagcagctagtttcggctctggcctccaagtccacagtggaaccagcccagacccttctccttagaagtggaagtagtggagcccctgctctggtggggctgccaggggagaccccgggagccggggaaggaggccgtccatcccgtcgacgtagaacctcgaggtttctcaaagaaatttccactcaggtctgttttccgaggcggccccggccggggtggattggatttgtctttggtgaacattgcaatagaaatccaattggatacgacaacttgcacgtattttaatagcgtcataactagaactgaattttgtctttatgatttttaaagaaaagttttgtaaatttctctactgtctcagtttacattttgtatatttgtatttaaatgaaagtgagactttgagggtgtatattttctgtgcagccactgttaagccatgtgttccaaggcattttagcggggagggggttatca

SEQ ID NO: 263379 - DNA, 2513 bp, Homo sapiens
  misc_feature (46)..(47): n is a, c, g, or t
gggaggagaatggagtgacagagacacgcggagggtggggggtggnngggggagcgtgttgaggggagggggggaggggggacacagagggaggaagaagcggcggcggcggcggcggcggctcctctttgcagagggggaaactcttgggctgagagcaggaataatgcggtaggcaaggcgggctgctggctcccccggctccggcagcagcggcggcagcccgagcagcggcagcagcagcggcagcaccccaggcgctgacagccccgccggccggctccgttgctgaccgccgactgtcaatggagctggaaaacatcgtggccaacacggtcttgctgaaagccagggaagggggcggaggaaagcgcaaagggaaaagcaagaagtggaaagaaatcctgaagttccctcacattagccagtgtgaagacctccgaaggaccatagacagagattactgcagtttatgtgacaagcagccaatcgggaggctgcttttccggcagttttgtgaaaccaggcctgggctggagtgttacattcagttcctggactccgtggcagaatatgaagttactccagatgaaaaactgggagagaaagggaaggaaattatgaccaagtacctcaccccaaagtcccctgttttcatagcccaagttggccaagacctggtctcccagacggaggagaagctcctacagaagccgtgcaaagaactcttttctgcctgtgcacagtctgtccacgagtacctgaggggagaaccattccacgaatatctggacagcatgttttttgaccgctttctccagtggaagtggttggaaaggcaaccggtgaccaaaaacactttcaggcagtatcgagtgctaggaaaagggggcttcggggaggtctgtgcctgccaggttcgggccacgggtaaaatgtatgcctgcaagcgcttggagaagaagaggatcaaaaagaggaaaggggagtccatggccctcaatgagaagcagatcctcgagaaggtcaacagtcagtttgtggtcaacctggcctatgcctacgagaccaaggatgcactgtgcttggtcctgaccatcatgaatgggggtgacctgaagttccacatctacaacatgggcaaccctggcttcgaggaggagcgggccttgttttatgcggcagagatcctctgcggcttagaagacctccaccgtgagaacaccgtctaccggccacattaggatctcagacctgggcttggctgtgaagatccccgagggagacctgatccgcggccgggtgggcactgttggctacatggctccagaggtcctgaacaaccagaggtacggcctgagccccgactactggggccttggctgcctcatctatgagatgatcgagggccagtcgccgttccgcggccgcaaggagaaggtgaagcgggaggaggtggaccgccgggtcctggagacggaggaggtgtactcccacaagttctccgaggaggccaagtccatctgcaagatgctgctcacgaaagatgcgaagcagaggctgggctgccaggaggagggggctgcagaggtcaagagacaccccttcttcaggaacatgaacttcaagcgcttagaagccgggatgttggaccctcccttcgttccagacccccgcgctgtgtactgtaaggacgtgctggacatcgagcagttctccactgtgaagggcgtcaatctggaccacacagacgacgacttctactccaagttctccacgggctctgtgtccatcccatggcaaaacgagatgatagaaacagaatgctttaaggagctgaacgtgtttggacctaatggtaccctcccgccagatctgaacagaaaccaccctccggaaccgcccaagaaagggctgctccagagactcttcaagcggcagcatcagaacaattccaagagttcgcccagctccaagaccagttttaaccaccacataaactcaaaccatgtcagctcgaactccaccggaagcagctagtttcggctctggcctccaagtccacagtggaaccagcccagacccttctccttagaagtggaagtagtggagcccctgctctggtggggctgccaggggagaccccgggagccggggaaggaggccgtccatcccgtcgacgtagaacctcgaggtttctcaaagaaatttccactcaggtctgttttccgaggcggccccggccggggtggattggatttgtctttggtgaacattgcaatagaaatccaattggatacgacaacttgcacgtattttaatagcgtcataactagaactgaattttgtctttatgatttttaaagaaaagttttgtaaatttctctactgtctcagtttacattttgtatatttgtatttaaatgaaagtgagactttgagggtgtatattttctgtgcagccactgttaagccatgtgttccaaggcattttagcggggagggggttatca

SEQ ID NO: 263380 - DNA, 1065 bp, Homo sapiens
catcatctgaggtggacaggaagcccagccaagccactggggccgacccctcccctggactcacctgcatctgagccacacaccctccagccactacccatagcagttctgggggtgtgtcctgggaagactcccttctgctccccaaaaccccaaggcctggctcggggccactggagccgcaggcgggacatatgtgtgaccggccctctgcccctggcagccccgcgctgtgtactgtaaggacgtgctggacatcgagcagttctccactgtgaagggcgtcaatctggaccacacagacgacgacttctactccaagttctccacgggctctgtgtccatcccatggcaaaacgagatgatagaaacagaatgctttaaggagctgaacgtgtttggacctaatggtaccctcccgccagatctgaacagaaaccaccctccggaaccgcccaagaaagggctgctccagagactcttcaagcggcagcatcagaacaattccaagagttcgcccagctccaagaccagttttaaccaccacataaactcaaaccatgtcagctcgaactccaccggaagcagctagtttcggctctggcctccaagtccacagtggaaccagcccagacccttctccttagaagtggaagtagtggagcccctgctctggtggggctgccaggggagaccccgggagccggggaaggaggccgtccatcccgtcgacgtagaacctcgaggtttctcaaagaaatttccactcaggtctgttttccgaggcggccccggccggggtggattggatttgtctttggtgaacattgcaatagaaatccaattggatacgacaacttgcacgtattttaatagcgtcataactagaactgaattttgtctttatgatttttaaagaaaagttttgtaaatttctctactgtctcagtttacattttgtatatttgtatttaaatgaaagtgagactttgagggtgtatattttctgtgcagccactgttaagccatgtgttccaaggcattttagcggggagggggttatca

SEQ ID NO: 263381 - DNA, 416 bp, Homo sapiens
ccaagattctctgacctcagcgttccaggaagcccattcagcctttgactaggcaggtcggtcaacgtccagccgggtccaggcatcctattgcatctttatgttccactcctgaagagtgggcattttcctgtgtcctcccacacctgcactctcccaaggctcttgtggtcactctgagatggcagattggggtccctgttgtccttggacagatgagaatgccgagagctcgtatgccttgcccaagggcacacagcaaggccgggtgcccatgcggctgtcccagggacccactgaccctgctgtccccctcaggccacattgccacattaggatctcagacctgggcttggctgtgaagatccccgagggagacctgatccgcggccgggtgggcactgttggctacatgg

SEQ ID NO: 263382 - DNA, 373 bp, Homo sapiens
tgaagcgggaggaggtggaccgccgggtcctggagacggaggaggtgtactcccacaagttctccgaggaggccaagtccatctgcaagatggtgagctcctggtggccagatgccaccctcaagctggtggctcccctccctgggcctggccccagtctgtccccagaacagcaaacaggctgaagggacaggggtctgagcatgggggtgggggttgcagcccaccaagctagagttgagggcactccttgctgtggactggggtggtcagcggagacttccaggagaaagcctgggtggggcagggacacccaggaaccaagggaagaggggtgaggggaacagtgtggaacaccctcacatccagcctg

SEQ ID NO: 263383 - DNA, 354 bp, Homo sapiens
aaaggatctctctgcgagctccctgagggcctggaccacaggctctccatctgggcgtctccattgctgtagcagcatgagtgggtggatggatgttgccttctcttcaacctggaagccaggactgtgagtggcagccatgagcactgagacagattcctaggccaggtgcagcggtgcaggcctgagcattgagacagattcctaggccagctgcagcggcgcaagcctggaaccccagtgctttgaggggcggaggcaggaggattgctcaaacccaggagtccgaggatacagtgagctatgaatgtgctgctgcaccgctccagcctaggtgacagagcgagaccctct

SEQ ID NO: 263384 - DNA, 483 bp, Homo sapiens
ctggagagcatcttgtccaccacccattggtggtggagtaaacaggcttcaaggggagagtgacccgcccaggagagccaggtccctggtctggagtgacaccttgcaactccccatgagcatattgctgcataaacgtgtgggcagggccccagccagtactcaaggcagggagactacttaggtgctcaaaggggtggacgtttctgtctctcttgtatcttgtaagtgtgtgcagcgagttcctctgcttattcaatgcatgtttagtgagcactgaaaacatgctgtccacgggggagctgagcggatcgctgatctcctggagctcatccaccaaggagcatgggagaccaactgaaattaagatgagatgacaaatcaagaaagttccacagggtatggagcaggttgctgagctgcagaaccaaggcaaagatctatccccacttccctggaggaagtggcgtccctcctggctta

SEQ ID NO: 263385 - DNA, 1322 bp, Homo sapiens
tggcggggctgcgggagctgagcctagagtccggctgttggctagagtgggcgcggatctggtgtggggaaggcggcgggactcaggcctgcctgcgaacattgtcctacataatggtagaggacgaactggcacttttcgataaaagcataaatgaattttggaataaattcaaaagtacggacacctcctgtcagatggcgggactaagagatacctacaaggattccatcaaagcatttgcagaaaagctgtctgtgaaattaaaggaagaagaacgaatggttgagatgtttctggaatatcaaaatcagatcagcaggcaaaataagctcattcaagaaaaaaaggataacttgttaaaattgattgctgaagtaaaaggcaaaaagcaggaattggaagtactgactgcaaatatccaggatcttaaggaagaatattctaggaagaaggaaactatttctactgctaataaagcgaatgcagagaggttgaaaaggctgcagaaatctgcagacttgtataaagatcgacttggactagaaattcgaaaaatttatggtgagaaattgcagtttattttcactaatattgaccctaagaatcctgagagcccatttatgttttccttacatctcaatgaagcaagggactatgaagtgtcagatagtgcccctcatcttgagggcctagcagaatttcaagagaatgtaaggaagaccaacaatttttcagcttttcttgccaatgttcggaaagcttttactgccacggtttataattaacatacaaatagtgtatataaaaacggtttatttttcttctctattacatatctcttttttttcttgtttttattattattatactttaagttttagggtacatgtgcacaatgtgcaggtttgttacatatgtatacatgtgccatattggtgtgctgcacccattaactcgtcatttcattaggtatatctcctaatgctatccctccccgctcccccaacccacaacagtccccgttgtgtgatgttccccttcctgtgtccatgtgttctcattgttcaattcccacctaggagtgagaatatgtggtgttggttttttgtcctttcgatagtttgctgagaatgatggtttccagcttcatccatgttcctacaaaggacatgaactcatccttttttatggctgcatagtattccatggtgtatatgtgccacattttcttaatccagtctatcattgttggacatttgggttggttccaagtctttgctattgtgaatagtgccgaaataaacatacgtgtgcatgtg

SEQ ID NO: 263386 - DNA, 347 bp, Homo sapiens
gaaaggtccaaaagatatttggcataggaaaatcaagtgtatccttttttgctcaaagaatttcattaagatggaattgacattcaaaccagatgagagcatctagattagaaatacttctgtgccataaaaaaactcattctaattgtctttgatttctttttttttttctagtgtcagatagtgcccctcatcttgagggcctagcagaatttcaagagaatgtaaggaagaccaacaatttttcagcttttcttgccaatgttcggaaagcttttactgccacggtttataattaacatacaaatagtgtatataaaaacggtttatttttcttctctattaca

SEQ ID NO: 263387 - DNA, 388 bp, Homo sapiens
tggccctagctagaggtggactcagcacctcgggctgttttccacacccctatgatttcatctccaactaataggaagcaaccatcccctacccgcctgcccaccaaattgtcaataaaaaatatgaactccaagccttgggagagactgatttaagtgataactgtagttctcccatgtgggctggccttgtgacagttatactatctctctactacagtaccagagtgtcagtaaactgattttgtctgtgcagaagacagaaaaaaacccatcagatgattacattacatattttagatcataaacgtatgagtttgaactaatgacaagattgcagataaaagtgcagtggccattgttacctgtatatcaagcatagcagtga

SEQ ID NO: 263388 - DNA, 551 bp, Homo sapiens
gcccagctcttttttcctctctccctccccctgccacccaccccaccataaaatataatcaaaaagctggtaaataatttaaagaattgcctcaaaggatttgcagactagaaagagactcccttctctggtttaagttgggagaaactgttttcattttttttcccccaagatatttaaaatattcaggagtgtcccacagggtcttgaacttataagtgtctgcatttttctcactatactctcatcccctcttttctttattgatttttttaaggttgctgtcggcaacatttaggtccaactttcaaatgaaaatcatatttcagttactggtcttaagtcagaccaacttaaggtctgtttcattcatctcagttctgtgccccctgctctttagtttaatgagagagtggagggaatcttggctgctgtgatttttcatcctattagctctttccaaagggatccttatcttgtgagcagaagggagtgatgtcttatatgtggagtcactgtgtatctttttagagaaacttaatcatccctcc

SEQ ID NO: 263389 - DNA, 502 bp, Homo sapiens
atacttgtatacaaatatagaaacattatttataatatccgaaaagtggaaacaacccaaatgtccatcaactgatgaacagataaaaagttgtggtatatacatataatagaatactattcagtaataaacaatattgaacttctgacacataatacattgtagatgaaccttaaatcatgtcaagtaaaataagtcagatacaagagaccacatattgtatgattccatctatataaaatatccataaaaagcatgctaatcaagacagaatgtagattaatggttgccttggaatgggcatgagaaaaacaattaaatgttaataggcatgatggatcttatttaaaggataaagatgttctaagatttagttatgctgatgtcttccccactcaataaagttaataaaaatcattgacttgtatacatgaaattatgaatgaattttataatatttagaatattcctcaataaagctgttttaaaaataaaaaatgat

SEQ ID NO: 263390 - DNA, 542 bp, Homo sapiens
cagagaaagagggttttgaaaaactttcttttcctgggccttgttgctcaccatgtaacaacatcctcttacttttcctgtggtgggaaagtaccctgtagtactagcaaggtgcacccaggtagaggacaacaggaatagttatcctacttgctcaggcttacatttttacacatgaaacatagtttcttttacatgtttatttacttatttgttctcaggaagactgacagctgggtgatgtgaaagggacattatgttctgatatccttcagatagagaaatcctaaattgctgttaatttcttgtgcatattcagctgctggattgcatacatcacatcactagcaacctgtgcagattggccaagggatggagtatgtggcattgggaacagagattgtccttggagatttctgctgtattccctgcaacttcaggaccttcttgctcttgaaagttgcagtttcatattggctgctggaccagtcctgtatgatgtgccacttatcaataaaatgaattggtttctccagggtgtg

SEQ ID NO: 263391 - DNA, 181 bp, Homo sapiens
acatgtttaaaggacacagattcttatcagcaaccaacctgatctatataacctttatattttttgatttggtcaattgcagtggtcaagtccccacggtcaacatgctctgcaggggtatgaagcctgacagcgtagagaagattaaggtattcttcaaatcttcgggatgggtacagca

SEQ ID NO: 263392 - DNA, 259 bp, Homo sapiens
aaaaggaggcaggaagcacttcagctggacacggagaggaaagtcatgcatatcatgactaactttgggaaccacaatggagggacgctggggcagttcttcctctgcaagaacttctctccttagaaatcgaatagatgggccagtgtggtggctcatgcctgtaatcccagcactttgggaggccgaggtgggaggatcacttaaggccaggaatttgagaccaggctagacaacatagcgagaccctctctctacc

SEQ ID NO: 263393 - DNA, 573 bp, Homo sapiens
gctgctgtctcagagtcagtgctcttgccccagctcccgctgacgttcactgagttcccggtgtgggccgaggctcttgtagtcggaggctgacccgcagcctcttcacagaaaccagagccgcgctcttcctgctgtcaggcaacaacagctcagcacagggcctgacacacaatagatgtcctctgaatagccaaagaaaaacattcttggggtttctgtggccggcagcggcaccctgcgtcctgggtgtgaagaaagtgggggatccccctgattttcccctcctctatctaccagagaccttctgtcctactttagtcctcagccccacctcaggtggctaatgaggatggtgaagaaaacctcagagaacaccctccagggctcctttcacctccctcacccaagcagtttctctcataggaagtggggccaaaaaaagaagaaaaaaaaagaggcgaactcaacaaaaccgtctattggggggagcggccagtttgtacccttgtaacggaaactgttagaacaactttgcaccctccttaaaggaaacagatgataaatccttct

SEQ ID NO: 263394 - DNA, 410 bp, Homo sapiens
  misc_feature (1)..(1): n is a, c, g, or t
  misc_feature (3)..(3): n is a, c, g, or t
  misc_feature (228)..(228): n is a, c, g, or t
ngnctccagcgttttgtgattttttttctcattggccaatatcaatttgtaatgagccaaacctgacttgagtagcagatctacaggcccatatcttggaggtatataggtatttggctgttgagggcatagattaggaggtctcttgacattctgttgctaggttactgaaccctgaattactgaaccttgaacacagtatttgtgttctcaaattggtatttatgntcgaaagcagctgctattcatatttttttgggggggaatacagggaaatataaaataaataaaactaagtagttagatacagtgcatcaaaaagtaattgtaagaaaatgttattacaaaccaggtaaaagagattgattcccccttcctctccatccaacatcagaagaattatagtgttc

SEQ ID NO: 263395 - DNA, 260 bp, Homo sapiens
aggaagttgcacttttacctcatccctcaacagttcagatcctctcaccaggggcaacccctatttttggattcttgtgctaggatatgttatcaaatttttttaaaaaggtcagaccaccgtatgattccatatgtgtaaaatttagaagattacatatatatttgcaggtgtgggtatgtgtacaatatatatatgttatacatatacacaatacaatatataaaatcaatatatattattttttctaaaacgggact

SEQ ID NO: 263396 - DNA, 459 bp, Homo sapiens
gtctctctacctggagagactttctttgcagggcatcttgaattattctgattttttagttgcgttcagaaatggctaattcctggagagataaaccagatgcagattataaacttgtgtgatggacctactcatgtggggaaacccgtggcttcctggcagtgaacttggttgcagcaaccaagaaaagaaagacccttgagcaggattggcgcataatcactcccctcaatattatcactccatgaaccaatgttagacctctgcacaggtggaggttcgtgcttgagggccattgaacactacccatttccctaatgcatcataattaaacacctgtgctaagtaacttcttactgatccactgtggaaatttgctgggtgctcaacagtccttaacattttctatctcttacttgggagggaggtctcacggttattctttggttctcctggaaa

SEQ ID NO: 263397 - DNA, 446 bp, Homo sapiens
tacttggatgtttcaccagcccctcaagttcaatgtttaacgccctgccctctactcagtatcaactattcttactatgtctctgggactggcaacgctgttcactcatctgccaaaatcagaagccacatggcagtcagtcatacccagtccttaaaagtgaacttttcctttgagtctttaaaaaagttcacttaaaagtgaacttttcctttgaggggtcttttcctttgagcagctttccaagaacccgatctaattttaatggcctcattttgagatcctgtagcatgctgtacatatttttaatcttctcataccatactatgacacctgatttatttcttctactagactataaactccttgagggcaggtaacacaccatgttctttggatttccaggccaagcaaaatgcctagatggtcaatgaacattggtcctc

SEQ ID NO: 263398 - DNA, 468 bp, Homo sapiens
tagctgggattacaggcacacaccaccatgctggctaatttttttgtatttttagtagagacggggttttgcccattttggccaggctggttttgaactcctgacctcaggtgatccacctgcctcggcctcccaaaactttatgcatctttaaataaaaacttgtattattccctttagctctttttgtggttacggaaggtatttttcttgtcagttatttacataaaattgtttttggatcaagaagcattaacaagacatgtttattatgcataaattcttataaggaataaatagctggaaatcatcatttgcttctccataatccactatgtggaaatgtagttttattgctgtggaagtctgattataattttgaaacataaatttcaaatacaaaattgtgaaattgaaccacctgctggttaacgagggttttgcatcgtgaacttgttaaaccaaaaa

SEQ ID NO: 263399 - DNA, 569 bp, Homo sapiens
gtgaaagtagacaggcacaaagaagatgccgaatacaattactctcttccctttgctgatgtctactagatggtgactttttttatggtagctaatgtttctagatctttacatttctcattgtccctagcacaacacctggtactgatgaactgtcaataaatatttgttgaattgcatcagttttgtcttaagtaggctctgattcagagccatccccaatccatgcaaactaaagaggatgtaagtaaatattaataaaggctggcctggttttttaattgccctcaatttcaaaggctagagatttaaagaaatatttacttaagcctctgtttatagtttgaattggaaacaaatctgcaaaatatttttaataggagctaatacagatagctgacggaatggggagaacctattaaaaaaaaaaatttagctaatctttccaatcacattcttccttcctccccacccccatctccttggaattatgttatctctgctcgtcttaaaagctcagaagccttttgaattggagtggcattcaaaggacagtcaagggtcaccct

SEQ ID NO: 263400 - DNA, 1371 bp, Homo sapiens
  misc_feature (416)..(416): n is a, c, g, or t
gagcattcgcatagctgcgggctgatctgccgccggcagcactagcggaagcgactgtgcagaacatgctcgcgcgggcggtgaggtcagcggacccggacgtgagccggagtcgggggctgttgcagaggggcgggagggagtcggtgagtggggggatggaatggggggaggcgaaggggcgggggacccgggctggccgtatgtgtcttggggctaactaggccgtcgctgtatggtgagccccaggaggcggatctgggcccccagaaggacacccgcctggatttgccccgtaggcccggccgggccctcgggagcgaacagcttggtgaggtggacggaggggacctcgcgagcgacgcgcgcgccaggacagagcccgccccggcctctcgggagccggggggcagagnctgcgagccccaggagggtctatcagccacagtctctgcatgtttccaagagcaacaggaaatgaacacattgcaggggccagtgtcattcaaagatgtggctgtggatttcacccaggaggagtggtggcaactggaccctgatgagaagatagcatacggggatgtgatgttggagaactacagccatctagtttctgtggggtatgattatcaccaagccaaacatcatcatggagtggaggtgaaggaagtggagcagggagaggagccgtggataatggaaggtgaatttccatgtcaacatagtccagaacctgctaaggccatcaaacctattgatcggaagtcagtccatcagatttgctctgggccagtggtactgagtctaagcactgcagtgaaggagttagtagaaaacagtctggatgctggtgccactaatattgatctaaagcttaaggactatggagtggatctcattgaagtttcagacaatggatgtggggtagaagaagaaaactttgaaggcttaatctctttcagctctgaaacatcacacatgtaagattcaagagtttgccgacctaactgaagttgaaactttcggttttcagggggaagctctgagctcactgtgtgcactgagcgatgtcaccatttctacctgccacgcgtcggtgaaggttgggactcgactggtgtttgatcacgatgggaaaatcatccaggaaaccccctaccccccaccccagagggaccacagtcagcgtgaagcagttattttctacgctacctgtgcgccataaggaatttcaaaggaatattaagaagacgtgcctgcttccccttcgccttctgccgtgattgtcagtttcctgaggcctccccagccatgcttcctgtacagcctgcagaactgtgagccaattaaacctcttttcttcaataaatt

SEQ ID NO: 263401 - DNA, 483 bp, Homo sapiens
  misc_feature (128)..(128): n is a, c, g, or t
  misc_feature (131)..(131): n is a, c, g, or t
gttgagactctggactttggacttttgaattaatgctggaatgagttaagactttgagggactgttgggaagatataactgtattttgcagtatgagaaggacatgagatttgggagacaccagaggnganataatatgatttggatctgcatccccaccaaaatctcatgttcaattgtaatcctaaattttggaggttgagcctggtggaagaggattggataatgggggtggtttctcatggtttaacaccatccccctgggtgctgttctcatgacaagtgagtagttattgtgagatctgattgtttaaaagtgtgtgccacctcctcccactttcctcctgctccagccatgtaagacgtgcctgcttccccttcgccttctgccgtgattgtcagtttcctgaggcctccccagccatgcttcctgtacagcctgcagaactgtgagccaattaaacctcttttcttcaataaatt

SEQ ID NO: 263402 - DNA, 1255 bp, Homo sapiens
ctcagcctcctgagtagctgggactacaggcatgtgacactatgcctggctaatttttttgctatttttaagtagagacggggttttgccatgttggcccgaggcaggtggatcacttgaggccagaattcgagaccagcctggccaatgtggtgaaaccctgtatcactcttttaggcccttctgagtgtttgcagctgagtgttcacagggtgttaacctatttgagctttcttttgtggttcgtaatgcaggagatttctgcctttgcaggccggagccctcatgacttcagtgacctgcttctgcccctctaggtctatcagccacagtctctgcatgtttccaagagcaacaggaaatgaacacattgcaggggccagtgtcattcaaagatgtggctgtggatttcacccaggaggagtggtggcaactggaccctgatgagaagatagcatacggggatgtgatgttggagaactacagccatctagtttctgtggggtatgattatcaccaagccaaacatcatcatggagtggaggtgaaggaagtggagcagggagaggagccgtggataatggaaggtgaatttccatgtcaacatagtccagaacctgctaaggccatcaaacctattgatcggaagtcagtccatcagatttgctctgggccagtggtactgagtctaagcactgcagtgaaggagttagtagaaaacagtctggatgctggtgccactaatattgatctaaagcttaaggactatggagtggatctcattgaagtttcagacaatggatgtggggtagaagaagaaaactttgaaggcttaatctctttcagctctgaaacatcacacatgtaagattcaagagtttgccgacctaactgaagttgaaactttcggttttcagggggaagctctgagctcactgtgtgcactgagcgatgtcaccatttctacctgccacgcgtcggtgaaggttgggactcgactggtgtttgatcacgatgggaaaatcatccaggaaaccccctaccccccaccccagagggaccacagtcagcgtgaagcagttattttctacgctacctgtgcgccataaggaatttcaaaggaatattaagaagacgtgcctgcttccccttcgccttctgccgtgattgtcagtttcctgaggcctccccagccatgcttcctgtacagcctgcagaactgtgagccaattaaacctcttttcttcaataaatt

SEQ ID NO: 263403 - DNA, 222 bp, Homo sapiens
aaagcaggcaagtaccttttgctggtttgctacacattaaagcgacctaagacagagtttttgaaaatactgatgcctgtgtcctaccccagggcaattaactcaaacttctcaggaagacagtgtgaataccagtgagtatttaacactctacctctggtaactgtagagtgtatagacagagctgagaaccgctgcctacacgaagaactctcaaacctg

SEQ ID NO: 263404 - DNA, 355 bp, Homo sapiens
aaaaaaaaagaaccatgcaatgaaggcatcctctccttccttttccctgttttgatggagtaggtctcagaactgggaaatgaccagggataattttatttcttagatatttgttagattttttttaatgtgttctttttttaaatctttaaaaagtgtttttatagtttaaggtagccattgtgagactgtatgaaacagctatatgaaaatgtcttacatcatgaaagaaataatgcttttacaaaaacagcagtgctcttcaatatattatatgtatatactatgttacgtttgctttacgctttgcagttttacaaaatgctttcaaataaattattttgtaggttaaata

SEQ ID NO: 263405 - DNA, 395 bp, Homo sapiens
caccttctgcacgctcaccatggggcaggctctgccgtctctctctcacccttgctccgtccgctcattcccctttctgggatatttcacaagcacttgctaggcaccaggcagtgtgctaaggccagggacacagcagtgagtgagacaacatcccacacaaagaaaggcctgcggcagtgtgggtaataaaaagtgccagggggtggggtggcattggagctcagaggtagagggagagggagatctgggtgctgccggtgcaaaggtcttgagcagggggaggtgggccagctccagtgatgcctccagaggaacttggggctttcttagggagtggtggatctgacgcacatgttttagagggatcccttggtgggaggggggtctctagt

SEQ ID NO: 263406 - DNA, 787 bp, Homo sapiens
cccctttcatttccgtaggagccctttacctagatgagaagtgtccccccgcctggggaatatatcagtcagaacaatcttcctgcagacatgcaccattagacccgagtgacggtggtgccatttaaacctcagagcaggtaaaaggtggtcctgaaacctgtctacccacagggtgctatggaatctgaatcacttcttttttcctagagccctggggtggggagctccctcaagtgttcacatgtgtgtggaatgaggaacacccatctccttggccctctccaccctgaagagttagttattaaaataattggcaagctcttgcaaatgtcagtcatccattgttcagaatggaatagcaataatacatccctggctgccctgggcttggccaggattactcactgaaggcctcagggttactggcacacactttcttttcctaataatcccatcccctcagctttcctaaggctagagtgaatttcgtgttcctttagtttacataagatggtgaacttggcaaaagctatcattaaacagaagctaagagaaagcctatgtcgtggaatccagaatgggtattgccattcactgctgtccacagaagctgtcttgaatttctttctgtgtcttttctttttttttctttaagactgttgtttaccagactgggctctgtggaacacaggtgtcctgggagatggttaatcattacaaaatattggtaacaatctaaagatgcatacataagagagtggtcaaataaaccattttccattca

SEQ ID NO: 263407 - DNA, 468 bp, Homo sapiens
cttatattaacacatattttggtattaaaatacaaaataataaattacatgtttcttgccttctttttttcttcccatttaaccacctggatctttccctggagtgtatatgtctctacttccttcttgcaattggtacaaatccattgcacagggggtgcctttgtcatttccggggtgttgccctgtctattgccgctgtgaacatcctcgtgcatctcccataggaccagagatcgctccctacctccctctggcaggacttgctgggtcagaggacctgagctttacatttaaagagaagctgccacattgacttggcttttctcatgaggtgattgatatattcccatttctcctccagacagtagcatttctgtggcagggatgtgttcagacttcagacttcgcttctttctttgcatccttcctgacttaggttttgtattctcctagttaaacaggaaa

SEQ ID NO: 263408 - DNA, 437 bp, Homo sapiens
cacagtgctgcagagattttgtttatggccagttttggggccagtttatggctagattttggggggcttgttcccaacattatgcctgactcaaagatcctaaatgactaaagtgcttagaacagcagctccccacagtaaactctcagtaagtgttagctgtcattatccacatttcacagatgaagatccttggcgttggagaggcagagactcaaagattggcttctaatattcttcctatcctcccttaagagcccagctgatgtgcttgtaaccagatctgctgagctggggagactgaagcttctttggtggctcagttgtgcgtcagccacttgctcaaatgatcagctacctccacgtaactcaatccgtgcatagttcctcctcctaccactaggcttcttttagaaaattaaatacattttttttta

SEQ ID NO: 263409 - DNA, 544 bp, Homo sapiens
ttttctagaggatctggggtactggcatttgtgtggcaataggttaacaagagaaaggcagacagaggtttattcacatgtgcattgcctatacacatgagtgtacccagagacgagttactcaaaaggctgtttaaaatttggagtttgtatacctaacttggtagaagaaagagagggaaaagtcagggcacttatggtaagcaaatgactttttgtaaaaataaatgggtctttaggataatagattggagataggctactttgtgacagtgtctctctgggtgtggtgctgacttctgtctccagtaagagagattagagttgctcctggggagggtttttttgacaattgagttcttttaggaggctctgcttttaggcagataaggatttcagaaactgaaatgccttcagcacaaaataattcttatgccaaagtgtaatattttaggatctcagcccaagagttcaaggttgcagtgagctgtgatcacgccattgcattccaccctgggtgacagaagaagaccctgtgtcttta

SEQ ID NO: 263410 - DNA, 442 bp, Homo sapiens
attacactgtgaaataactgtctaaagcaaaattagtacattatattgtcggttttataaaatatgtaacagtaatctaaaagatgggaggaaggatttaacatctgttaaagatgtatattgtaaactgagggcaatcgctaagaaattaaaaagaaatgtaacttatctaccaatagtggctattaaatggaatgctcaatctaaaagcaggctgagagctgggcatagtggctcatacctgtaatcccaacacttggggaggtgggaggattgcttgagggcaggagttccagaccagctggggcaacatagcaagactctgtctctccaaaaaaaaaaccaggtatagtcttagctacttgggcagctgacatgggaggatctcagcccaagagttcaaggttgcagtgagctgtgatcacgccattgcattccaccc

SEQ ID NO: 263411 - DNA, 486 bp, Homo sapiens
aaagaattgaaaagatgtttcacaaaagaagaagtctaaatagtcagttggcacctgaaaatgtgcccattatgcctcatcagaaaatcaaattaaaatcacaatgaaacaccactatataccaccctagaatagctcaaattaaatagactgataacactaagtcttgatgaacatgtagaggaattggaactctttcattcattgctagcaggaatgaaatatggaataaccactttggaaaacaggcagttatttttaaaagttaaatatatacttaccctatgatctcttctaccctatcatctaaggtatttgctcaagaaaaatgaaaatatgcatccacacaaagacttacaaaacaatattcaaagctgctttttaaaatgttcatatttataataatatccccaacctggaaacaacccaaatgttcatcaacagaataatgatatattcatagaatggaacactactcagcagttt

SEQ ID NO: 263412 - DNA, 408 bp, Homo sapiens
gacaataagactgggcactgtgctattaattttcttttacaaataagaaaataggcttagaacggtcaaatcatttaatttaacccagatctctttaccctctagttttacgatgaaatttgaacacaaatttgcccaattgtccctctatcccgccaaaaatcttactgctgtcctctggcttcaaaagggtaagggaaagggggagactcagttcctgctgagggcacctcatagggcatcactttctaagaatgtgtttgccccatgtgcttagcaatcacattttcactttataaaagttagctctgagagctctccttctagacagcgacactctcaagaaatcctgttcagatgtgcattgggctaatgagaaaagatataagcagttttagctgtagaaga

SEQ ID NO: 263413 - DNA, 482 bp, Homo sapiens
ctccacgcaggccactcaggacagctgaggccacgcattctctaagcagggctcaaggcaagtttgttgctaccagaagacacatctgaggctgttattttgaagggctatttaggatggctgagatgtcaccaggatcatggctcctggagagaaggaaccagctcgggcctgagaggcaatgcccacgctggagggagaagtgggtttcagggagaaggtggacgtggacagaaaccaaccacggacataatgcagccagctgcacaactcgctgcttccgggtcaccctcgttagcctcaaatccgagtgattgaaagagctccaaacactgaagcactccaaagtgatgcgcggggccaggcgtggtggctcacgcctgtaatcccagcactttgggaggctgaggcaggcagatcactcgagcccaggagttcaagaccagtatgtgaaacatagcgagaccctatgtctttaaaaa

SEQ ID NO: 263414 - DNA, 432 bp, Homo sapiens
aacatcttatgcatgcacatctcctttgccacccacaactcggaaagcagaacagaaaaacacccactaaagcatgttcagaaggtgccctccctctaccccaagcaaggtgctagctccttgtaggtgggtgaagtggctaagagcaaatatgcagggagtcaaagccccgttcaccacctaagagcggggtaatctctgtgtctccatttcctttcccgtaaaaatggagatattaagaatatctaatttacagattggaaagattgaaagagataatataagcaaagtgctgattcctagaaagctcaaaaaattcctggcatggtggctcacacctgtaatcccagtactttggaaggccgaggcaggaggattgcttgaggccaggagttggagacaagcctgggcaacatagggacaaccaaaaaa

SEQ ID NO: 263415 - DNA, 759 bp, Homo sapiens
tttctattacctgctcaactccttctgtgcatagctcctgactgccgagctgggaagaactccagtcctttcctaggctagggattttaacaacggaacaaaatcccagttcaaggtgacaaggggaaccactaaggtttcacaaggcacagtttgtgaacaactgattggagccagcctcatcaggctagatgtacctatagcaaccagcatggatctcaaaaacatagtaccaaacgaaataagacagactgagattccgggggtacacatgcatgtttgttacatgggtatattgtgcaatggtagagattggacttctagtatgcatgtcacctgaatattgaacattgtatccagcaggtaatttttcactcttcatcttcctctcaccctcttttttgtggagtccacagtgtctactgtttccaactttctgtccgtgtgtactcattgtttagctcccacttataagtgagaacatgtgatatttggttttctgctactgagttagttcacttaggatcacagcctccagcttcactcatgttgttgcagagggcatgatttcattccttttatggccgtgtgctattgtatggtatatatgtaccacatattctttattcaatcgaccactgatggacacataggttggttcatgactttgctattgttaatggtattacaacaaacataggaatgcggggggttttttttatataattgaattaatttttatatatggtatgaggtaca

SEQ ID NO: 263416 - DNA, 441 bp, Homo sapiens
tttctattacctgctcaactccttctgtgcatagctcctgactgccgagctgggaagaactccagtcctttcctaggctagggattttaacaacggaacaaaatcccagttcaaggtgacaaggggaaccactaaggtttcacaaggcacagtttgtgaacaactgattggagccagcctcatcaggctagatgtacctatagcaaccagcatggatctcaaaaacatagtaccaaacgaaataagacagactgaggtaatagaagattactatcttctttacctgaactatggtggccagaacacggcaatacatattctgcaagaagacatctacacaaaagatacacactcaacagaaagggtgccgtggtggggagaagggggtgaggcagagacattaaagggagtgagttattaaaatgtatttaatcaatgaaa

SEQ ID NO: 263417 - DNA, 2120 bp, Homo sapiens
  misc_feature (1224)..(1224): n is a, c, g, or t
  misc_feature (1274)..(1274): n is a, c, g, or t
  misc_feature (1355)..(1355): n is a, c, g, or t
gagaacatgggccacacaacagcaagtgaacagaacagagcctttattgagacaggtccgaaaggactggagcaatcagcttacagggaacatttttgcttcgtaggaatgcggtcctgcttgctgaaaacatatcctttgtacagagaacacacataatcctaggtcaactttgccctttgaagaaaaatatgctcagctggaattttggaggtggggggctggggaatgggaggtggggaggaatctattctacagaatatctgttctacagaatatctgcttagagctagaaccttcaaaggagttaagtttttggagttctgttctataaagtgtgtgggatcaaccaatacaatgcaacagccatgaaagtgatgatgaaattttatttaagagaacatctaaattatgtttaaagttcttgttggaactatcttttgcaaagatagttccagaccttggaaagcccaggcgtgatacagacaaaagtttatcaggcccctctccctctctgcacccagctgtactatttggtggtgctatgtgttcttaaggtcatgtcaatatttccattaaaacacacatttttaaaatggagatttattactctgacaggatagtttgctctggggcataagttaacttactgggtctacacttggtggggggatactttctctaccaaatttctgaggaaaaatcagaattgatttgggaattattgtactgtgctacttgattttcaaaaaatatccattgagcagaatggactaaaatattgcaaagtaatatggtttaggtgataatttataatcttatgatttaaatgagatgctgtatttgaaagcacttattttcatgcctggtatacagtaggcattcaataaatactactttggtcctatgattactactatgattactcccgtcaccaccaccaccactactaatttctttgagttgggttaatatggagtaatagatcacatactttattcatcagaaagctgggaggcgccaggtgcccacatgttaaatattaactgtgctaaattcgatcatgtagaagtttgtggccaatagtattatattaaaataaatttggtactgtaagcaacttggacaaaagttgtggaaccgaggcagaaactcactcttgagtggtcagtttcttgcacactgggttatgtgtcactggcattttagggcattttcactttncatctgcctttgtttggtgagaaactttgcagttttctgggctgcagggngcattggagggactgagaggacactcgactttggagctggggatggggaggcctcgttacaagccttgctttgctaccagnggatttagaaaaggttacattgccactctgggcctcaggctcccatttctaggaggtaaagtagtctatggctgtcttactctgacgtttgggctctcccaggccatatctgtgaagcaacagctggtggtctggcttcactgaccctcctgctctcaagacatggccattgtagacatgtactcattcgggatcagaaaggaatggaagcaggtggccagggaacttcgaggcattgaagtggagtccatttttcggtcctgagggctcctagcctgagaaagcttgacctgtgggtcagtgaagcccttgcttgagccagcagagagttaggacctctgattctcaaaacataacttcactgctccgctcacacaattgcagtcaaggaattgaggactagaggtttcagtccctactgcacttccagcaatggactgggaaaatcaggctcaagtcattgatactggtaaataaaagggccttatttcacctgtaatcccagcaatttgggaggtcaaggcaggaggatcgcttgaggccaggagttcaaggtcagtctgggcaacatagcaaaacctcatctctacaaaaaatttaaaaaatttagccaggcatggtggcatacacctggggtctcagctgcttgggaggctgaggcaggaggattgcttgagcccaggagtttgagactgcagtgagctatgatcacaccactgcactccacactccagcctggggaacagagtaagaccctgtatctta

SEQ ID NO: 263418 - DNA, 508 bp, Homo sapiens
agattgattttattttgaaggtcctttcaaatgtttgctaacaatgtattctctttaaatgtttggagaaaattataagtgatttataagatttatcttataaaatttttataaacaatgtaattcagacatgagattatactatcccattcatcttaacctttcttgatttgagaaaaattatataaacattttaagcataaatttgacttaaaattaaattaaaaagttgtatattttattgttatcatatgaaaaatctaactcatgctatttgtggatgaagcctaatttttatatttaaattgttataactatgtacatttttttcttaggtcttcttttcaaattcatttttcaacttaaatattgagatgctgatgcacacaacttgtacttgcatgtattatgtaaataatgaaatgcaatattttatctttttattggattccagatatagataaataatttttgtatacttaagaataaagaaaatattcccccccaa

SEQ ID NO: 263419 - DNA, 296 bp, Homo sapiens
gtgggagggtgtgtggggtttgtgtgaagctgtgccaacctgtgggtgtgcaaccatgcaccctctccactttccccacacctgagtggtctgctggtcaccgtcagtagaccatgcatgcaaaatcattcttctggacgtgcaggagaaactgaaaaccagcactgtcaggtgtgttaaaacccttaagattggttctcggctgggcgcggtggctcactcctgtaatcccaacactttgggaggccgaggcgggcggatcatgaggtcaggagatccagaccatggtgaaaccc

SEQ ID NO: 263420 - DNA, 197 bp, Homo sapiens
gttttgtttcctgtgagcatcattctcacttcctaggggtgtctgttttagaaatatcatgtctaaaatgttcagaaggccgggcgcggtggctcatgcctgtcatcccaacactttgggaggccgaggcgggtggatcacctgagatcaggagttcaagaccagcctaaccaatatggtgaaaccctgtctctact

SEQ ID NO: 263421 - DNA, 111 bp, Homo sapiens
gagggtggcagcccagagccatggctctcgcgagtggtttatgtggcacttgaggctacaagtccaagtatcttcagctcaagaagaagttagaagatgagttcccccggc

SEQ ID NO: 263422 - DNA, 486 bp, Homo sapiens
gaaaccctatgaatgtactgaatgtgggaaaacctacactcacaaatcaagtctcaatgaacattgtagaatatagggcaaaagctctgtgaatgtaataaatgtgacacatcattgtgccacagttcagtccttactaaatgtcagagaattcaaagaggaaagaagcactgtaagtataatgaatgtaagaaatccttttgctagaagacaaactctgtggtacatcagatagcacacatagcggaaaatgtcttttaaatgttgaaaatgtcttaaatattgaaactccaaaattaaatccataaaccaaactcattatatatgagagaactgatgaaatgcagccgtgaacatcaaataatcataatcaacaaatcaataaaaaaaaccttgtatatataagcataattacttgtacatcaaattattagtctaggatttaaaccttatggacagttggtattaacatttgacaagatttaa

SEQ ID NO: 263423 - DNA, 340 bp, Homo sapiens
ctgtcacccaggctggagtgcaatggcgctatctcatctcactgcaacctctgcctcccgggttcaagtgattctcctgcctcagcctcccaagtagctgggattacagacatccaccactgcgcctggctaatttttgtatttttagtagagacggggtttcaccgttttggccaggttggtctcaaactcctgacctcaagtgatccacctgccttggcctcccaaagtgctgggattgcaggtgtgagccaccacacccagcctgaagcctcttttataagggcattaatccatccatgagacagaaccctcatgacttaatcactttctaaaaggc

SEQ ID NO: 263424 - DNA, 638 bp, Homo sapiens
agatcaaagaatatttggcaactcagcttcattcagtataggtcactgtcaattcaaagtttgggtcaactagttggttgcataatatgaacctctcccaactcagaataatactgaattcagggtctctggtaggtataatcatgtcagtgattttagccctacatagaagtatatcagcattttcttctcttgctgatcaagcatcctcagaatccattcccatacataatcctacataaccgtcatgtttctgcagtacatatgtggttggtagagtaatggcatctcaaaggtgcccacatcctggtctcggaacctgtgaatatgttatctaacttgattaaagggactttgcagctgtgatatcaggttcatgatcttgaggtggggagattatcctggattatgtgggtaggtccagtgtcattgcaaaggtcttcataagagggaatcaggagggtcacagggagagacggaatgtgatggggaagcagaggttggagtggtttggggtcatgagccaatccggtaacctctggaagctggaaaaggcgaggaaacttgttctcccctagagcctccagaaggaaccatccctgctgaccccttttagacttccagaactctaagactat

SEQ ID NO: 263425 - DNA, 381 bp, Homo sapiens
agagcaatggtactgaattaagaaattctggttgagaatacagtggaactttagtgtcccatggacaacccttcaacatttcttatttatttatgaactcaaaatcagtcccgtatattcggagaagacagaaataatggcagagatcttttccacctcagttggcttgattttctaggcatagatatactatcgcttaggatcatagaaagagcactggggcaagggtcaggggagctgaatcctagtcgttggtttgacacttacaggatgtggggttagcgtctatgttcctatctgtaagtgcttgtcctttcttagagttgtgactctaaggattttatttttattttatttcaacagaattatataaagttttaa

SEQ ID NO: 263426 - DNA, 517 bp, Homo sapiens
ctgggaagatagagaaggtctcaaggtctgtatttcacaagtagaaccaggatgggaggagcaagggaaggtggaagtacgcaacaaagaggtggacaaacactgaaggggaaaggagaaagggagaaggactgactccatctcgtcagctccactttggggaagtatagaatgagagagactgcaaagcccctagaaggatgtctagtaacccgggctctgtctggaggacgtcctacagcgagaaagattttgactatcacatcataatgtgcatgtctctgaggagaagaatatatttatattcattatcacacaggcctttgttctgtgtaattatttgctgaatgtttaaattaaatgctgcttttccagctgggtgtgcttgtagtcccagctactcttgaggctgaggcgacaggattgcttgaggcccgcagttgaactgaaaagccagcctgccagcctgagcaacatagtgagaccccatctcttaaaaaaaaaaaaaaaaagaaag

SEQ ID NO: 263427 - DNA, 196 bp, Homo sapiens
aaagagatgtataagcacccagacaggaaatgaggataagtgtttattaaacacaagttatttcatactagcctcatcctctttttggaaaccattattaaactggtagagtatggaaatccctagatgtcagatacccggactatttaaagttatgttttaatcatgtaataaaggaatgcattctcatataaat

SEQ ID NO: 263428 - DNA, 374 bp, Homo sapiens
gcaacttcctctgtacctttaaagacaaatatctccaacacctatcacggtatatgttgttaatgatgttaaaattgtgtccaaattaacagaaggccaaatttaacattgaagtccaaatttcttggctaataatgcaagtaaaaaaaatagatgataccttttggctgatctgaatacactgataactggctggacgcggtggatcatgcctgtaatcccagcactttgagaggccgaggcgggcggatcacctgaggtcaggagttggagaccagcctggccaacatggtgaaacccgtctctactaaagtacaaaaattagctaggtgtggtggcacatgcctgtaatcccagctactcaggtggctgag

SEQ ID NO: 263429 - DNA, 263 bp, Homo sapiens
cacaaaatgatcaaagagcatgaacgtacaatttatgagataaaaaagaaccgaaagtcatacgaaaaataaatgtttaacagcagtagtaatcaattaaatgcaaattaaaacaatagggagtggtttgtgaaagttaatgcctggtgcaggagagagtcatgagaagtagctgactccttcactcatggtgtaaggggaaattgggacaaactttctagaaggaaatttggaaatgtgggttagaagcctttagcctggcc

SEQ ID NO: 263430 - DNA, 292 bp, Homo sapiens
ctctcagaatctaagacttgacgtcagaaaaattgttgctactaatctatgtagagatattacaactttatggaattgtgtttaattaaaattattatttttaaaacttcttcattttaacttccatataaaattagaaatgttttcccaaaatcaggcatggtggtgcatgcctgtagtcccagctactctggaggctaaggcaggagaatcgcttgagcccaggagttctaatccagcctgggcaacataatgagacaccccccctcccgccccgcctccatctctttta

SEQ ID NO: 263431 - DNA, 390 bp, Homo sapiens
acttattaaatagtcaaaagaattatgtatttatccctaaattattttcttatatagttctgagaggtggaaaggagtatagaagttgtcatatacaagctcttcagttacagttgagaaagtgaaagttgatttgtaattggaacagaagggactatccacaatcttatttttatttatctcagttgtacaatgaacagcaacaacaaaaaattatctttcaatgataccagagcttgagaagacctgcagaactatccagccctctaactctgcagatgagaacacggaagcctgaaagggttagggcagtggtgggagggggcccggattttcttcctcctcatccaatcctgtcttcatctcactaaatataacatccagatgaag

SEQ ID NO: 263432 - DNA, 755 bp, Homo sapiens
tacaggtcctggggtccaggagacccagaatgaaggtgtcagttgggcatgaagtgttatttagtgtccattcttgatccttctgagcacctacagctggaaactaagcagatactggtcctgcattctgactgagattgtgtcttctttatgaggatagatcaaattggcagtcaggcccatgatagtcagtgcagttggggcagttgtagactttgctacaggatttcagggtttccaatcaccccacaggtaagtgaatgccaaagtcttcttttttcagaccatacaagaagtcattttgattttcaaagaagccgttttgattttcaaagaagcaggttctggtgacattattttcttccttggacaaagtggggggaaatttctaagtattttaactgagttcagggtccttagtgagcctggacagagcaaggagagggctccccactccctaagccccacagccagctctgcatcaccacacacagccagagcctgtgaggagctgccttcttccccatgtgacttgcaaagagtctcaggcaagaaaccagggcttcaaactgctagttcccatggagggtagttccctcgtgtggagcacttgtgttaggatcactgattatctgacaaaggctggtgcagaaaaaaaattgtaggcccaagtgtcaagaaccacaccagattggagatagaaaagaatagctgaaattatgtcagtggtgaaatgtcactccattgacccaccg

SEQ ID NO: 263433 - DNA, 237 bp, Homo sapiens
acaggatgttccttttcccggggcacggggaagacaccactcacaggagtgacttataatctgcttcactccaatcttcctgcatctgccattttctcaaattacattagtttaaaatattcaatatgtaggctgggtgcaatgactcatgcctataatgccaacactttgggaggctgaagtgggaggaatgcttgagcccaggagtttgagaccacctgggagacatagcaaggc

SEQ ID NO: 263434 - DNA, 562 bp, Homo sapiens
aatgtatgctaaatgtccctgggaagtctggccatggaaaatgactgttctgaattcctccaacccttttaactcaagctgaccagctgatccagactaaacagtgagaacataggaaacagcaaagattgaagaatgacctttttgttgtcatgacttatggaatagtcagatgtaattagcctagcatactattgaaaggtacaatagtgtatggaatatacctgatgctacaggaggaaatggaaagaaataagctatacctctccagcagaggaactagagaaaagattatcagtcagtgctgaagaatctcattggccccacttccaaggtagtggttatttaggatgcagtgggttaagacaagtatagtttagccttaagtggctacctgtaatgctaagtaaaaccatctctagtcattggtaccgaagtacagaaaaaacacacagacctataggcaagcatagggctctcatctggtaagctgagattaatggttcaggttttggcccatcagactataccaaatgaggggttaagaatcctgaacacaccc

SEQ ID NO: 263435 - DNA, 515 bp, Homo sapiens
cacatctactggggaatgacagagagaggctctgacagaggaagacccaggccacgggctaccacaatctaagcttcagggacaaccatcaaacacagggaggggctggcctagggtgaggcccagagtgcctttcttctgttctgagtagagactcaaggatatagcgatcaagggaggaggctggagaatggggactttcatgtaaacagcagatcctacaccaatcatcattagcaacaaacctttactaagggcaaaatatatacaactgtgatgctgtgcatctcccccatctgtaaaataggggagagaatacctcctagagttactgtgaagattaagttcttttcactgtatcgaataccgataaacacttaatatttcttaggctattaatattttaattttttggactagaggttattataaaacattttttgtttttaccttaagaataaaaaactcttgaaaatactggcacctgacaataaaaggaaagaatatgatactgc

SEQ ID NO: 263436 - DNA, 310 bp, Homo sapiens
gaagtgcccaaacaaatagagatactcagttacacagcacatagtaggaactttataaatacctgttgaatgaatatggttggggtctaggctgcagctcagcagggatggcagcccaaggtgacaaagtacgagtcttcacacacgaggatggacagcgtggagctcttgggttcagaagacgctccttggccaggtgcagtggctcacacctgtaatcccagcactttaggaggccgaggtgggaggattgcttgagcccaggagcttaagaccagtcttgggcaacatggaataaaccctacgtcta

SEQ ID NO: 263437 - DNA, 317 bp, Homo sapiens
ggggataataatatctatagtataggcttgtaagaatgacataagatcatttttgcaaagtacattgtagatacagataaatgtatctgtatctacaatatactttagccagtggtgatggagagcctggggtcagaatacttaggttcaaatgattttagccatattatttaacctctctgtgccttagtttccttatttgtagaatggggctataaccatacctacctcagagggtcattgtaaggagtaagtaaagtaacccaggtgaaggctacacatagtaagtgctcaataaatactagctattttatata

SEQ ID NO: 263438 - DNA, 496 bp, Homo sapiens
tctgtaagactaccagagagctatgcattactctgtacaaaggatatttctcctataaatagtgctttcaatagagaaaatctgttatcatgttgtcagtaaattcaaatattttctcttttggaatactctgttcctattaaaacaagagctgtttccttctttgaaacaagttatttatatttatgtggttaagatatcctatcttaaaccataagacctttttgaatacttcacatacagaaaaatgaaaaaaattaaacaaatatcagagttgctgggaaccccaggatataatctactgtggatagtcattcatagacaaagacacctcctatttataggcttgggacagttcagcttctccaacttgaagagagttttgaagatcaaatacaaatgggtcttgtgaagtttcaaaaaatgtttctcaaagtcctttgagaaaaataaacttgggcctgtagccaatagtttgtattccaggcttttaaaa

SEQ ID NO: 263439 - DNA, 398 bp, Homo sapiens
cctttatttatttatttatttttattatcttaaccagtttacatctgcaaagaccctatttccaaataatgtagatggcagatgagacttgagcatatattttgtggggggccatagtctaacccataacaccaggtctccacctacattaaagtgtatctgtgaggatgtttagttgtacatgcatccgggcttgccatcacagaggtccgtgtggtggccctgtggagcacacctccatgccctgtctgtgtggacctgtgcattgggtttatatcaaacatggaggtttctttagtacgtgtctggttcgctccccgccgtgttctaagactcctcacctgcctacagggtgctgtgctcatacgcaaaaccaagggttttcaatgactttccac

SEQ ID NO: 263440 - DNA, 910 bp, Homo sapiens
  misc_feature (5)..(5): n is a, c, g, or t
  misc_feature (906)..(906): n is a, c, g, or t
  misc_feature (908)..(908): n is a, c, g, or t
aaaanccctatcagtgtagtgaatgtggaaaaacctttagccagaagtcatacctcacaatacatcatagaactcacacaggggaaaagccctatgcatgtgaccattgtgaagaagcatttagccataagtcaaggcttactgtccatcagagaacacacacaggggaaaaaccgtatgaatgtaatgagtgtggaaaaccctttatcaataagtcgaacctcaggttacatcagagaactcacacaggggaaaaaccctatgaatgcaatgaatgtgggaaaacgtttcaccgtaagtcattcctcactatccatcaatggactcacacaggggaaaaaccctacgaatgcaatgaatgtgggaaaacctttcgctgtaagtcattcctcactgtccatcagagaactcatgctggggaaaaaccatacgcatgtaacgaatgtggaaaaacatatagccacaagtcataccttacagtacatcacagaactcacacaggggaaaaaccctatgaatgtaatgaatgtggaaaatcctttcactgtaagtcattcctaactatacatcagagaactcatgctggcaaaaaaccctatgaatgtaatgaatgtgagaaaacctttatcaataagttaaaccttgggatacacaagataactcacacaggggaaagaccctatgaatgtaatgaatgtggaaaaacctttcgtcagaagtcaaatctcagcacccatcagggaactcacacaggagagaaaccttacgtatgtggaaaaacctttcatcgcaagtcattcctcaccatacaccagagaactcacacggggaaaaaccatatggatgtaatgaatgtggaaaaactttttgtcagaaatcataccttattatacatcagagaactcncncc

SEQ ID NO: 263441 - DNA, 364 bp, Homo sapiens
tcacgcctgtaatcccagcactttgggaggccgaggcgggcagatcacggggtcaggagatcgagaccatcctgactaacacggtgaaaccctgtctctactaaaaatacaaaaaattagccaggcttggtggcgggcgcctgtagtcccagctactcggcaggctgaggcaggagaatggcatgaatccaggaggcggagctggcagtgagccgagatcgtgccaccacactccagcctgggcaacagagcgagactctgtcaaacagagagagagagagagaaagaaaaagaaatcaatcaatcaatcaatccggtttagatgacaacatgaatcaggtttgttgttgttgttgttgtttcc

SEQ ID NO: 263442 - DNA, 400 bp, Homo sapiens
acctgagtgagttttcgcatccataatgtggggacgatggaatctattcttacaactttagaaggtagatttaataatacatcatgaattcgtacaatgtgtaatgtttattaaatgttgactgtgattagtggttgtccagctttaaaggtgtgggagcgggattgattacaagggaacatcagagagcttttttgggttatggaaatgttttgtgtcttgattgtagtgttggttgcttgactggacatatttgttcgcacttatcaaacccttgaagttgatggattttttgcatataagttatacctcaacaaagctgattttataaagataactgcctttcccttttctgtgtactccagttacatcaactgttaataaaatagagttgatacca

SEQ ID NO: 263443 - DNA, 455 bp, Homo sapiens
acgagcgtccccaggaagacaccttgcttgtctctaattccatgaactttttgcaagaaaatcttgcttgccttccccaggggtcaggtcttcagaggggagactcctgccctggtgtgcccggctcctgcccatccagcagagcaggaaaaggtgactcgggttccatttgacaaacgtctcttctgaaagctgcccttagcaggcaggagaaaagcccccatttactggggccttgtcagagtttctagagcttaaattctcttcttcagaaaggaaaaatatctgcggccccacatccgcagatgcataaacgtgggcgtgatttatgagtgcacgtggtatccagcgctttcccccagctactgtgaaatcgttcctcttctctgactgagacgtcaacagtatggtcactgtatatgttttcccactttttccagagccaagaaccagga

SEQ ID NO: 263444 - DNA, 196 bp, Homo sapiens
ttcaccatgttggccaggctggtctcgaacccctgacctcaggtgatccaccctccttgaccttccaaagtgctgagattacaggtgtgagccattgcacctggccaggtgggagatttttaatgaccaggcctggaggtggcacacatcacttatacccacatccattggccagcactcagttacacggccactt

SEQ ID NO: 263445 - DNA, 350 bp, Homo sapiens
caggttatgaagatgatgggattaagaaattaaagacaggcataggaaattataagaatattgattggggaagtgataaatgtgcatgaaatcttaacaatttctgttcagagattgcagtaaagacaggcataagaaattataaaagtattaatttggggaactaataaatgtccatgaaatcttcacaatttatgttcttctgttgtggcttcagccggtccctccgttcggggtctctgacttcccggaacactgtctcagctttccaaagtgttgggattataggtgtgagccaccacacctggccaatatatgtttatcatagaaaattccaggagaaatttaca

SEQ ID NO: 263446 - DNA, 352 bp, Homo sapiens
attcctcacagggcaaattcatctaactgtgtgcttagaagctccagaatggaactcttacccaccaggaggttgccccgagagataacagtcaatttacaatccaaagtatgcccgctagagtttttggccaccattacaactcatttctgcccatgaagacaccagcttgacagcctgatagataaggcaccaagctagcacaaaacccctcacctgcttgtgtcctcctttgccttttaaaagtgcccactttctgctccaaaggtgaagcagtatacttaaggacggaagcctgtacttcttcccctaagctagttttggaataaaaaggcactttctttataccaga

SEQ ID NO: 263447 - DNA, 304 bp, Homo sapiens
actaaaagtacaaaaattagccaggcgtggtggctgacacctgtaatcccagctacccgggaggctgaggcatgagaatcacatgaacccaggaggtggagattgcagtgagccgagatcgcaccactgcactccagcctgggggatagaacgagactctgtctcaaaaaaaaaaaaagcctttaatatgttttaactaacatatatgagtgaatcctaataaaagagttatggcttatgtttttgtttgttcagtaacacgtaagcatccatacattgaacatgtattgagagcctaccactg

SEQ ID NO: 263448 - DNA, 367 bp, Homo sapiens
aataaaatgatagctttcctgtttgagggatgcccaaattctttgcaaaatctaattacaagtctgaataggcagtaaaatttgttcttgctatttatataattgtaaactttaactcagaaatggacattataagctgttctcagagtatccaaagatcaggttggcaccaacaggtcccgagtaagtcaggttttcttcacccctccctgtgtccctctggggaccgagcacgtccagggagcaaggagcagaccagtcagcaaaatgtaaaacctgtcttaacctggaaggtggggctgtcttatccacatttggctccacctctgagctaacttctgattaaagctgatctaaggaaaggact

SEQ ID NO: 263449 - DNA, 465 bp, Homo sapiens
gcgagaccgcccgggggagatctgcgcaggcgcggagctgccgcggtcataggagggcgcgagcagcttggctggctagggcttgtagagttgccctggtaccctagtattcctaattgcaaaatctttatgaagcttaagaaaaaaatcaccagcctgggcaacctggggaggccccgtctctacaaaaaaattaaaaaattagccgagtgtggtggcgtgcacctgtggtccagctactatggaggctgaggcaggaggattgcttaggtccaggagttcgaggctgcaatgagctatgaacgtgccactacactccaccctgagccacagagcaagaccctgtttcaaataaaatttaaaaaaagttactgaaatacagatgtgcaattttattccttagcctagtctcacctctgctgcatgtgactattgttcacatattaattccaccacaatttaagg

SEQ ID NO: 263450 - DNA, 320 bp, Homo sapiens
gaggattaagaaaaataatgggtactaggattaatcctgggtgatgaaataatctgtacaacaaacccccttgactcatgcttacctatgtaacaaacctgcacatgtacctctgaactcaaaagttgaaaaataaactatatccacactagtacacaaatggaggcatgctctgtcatacatcctgctgcatttaatgtataagaaagaaccattggtccttgttgctcacttctgtgaacaaaaagtgcactaaggccatgggagtcatccactttcaggtcaaggtctatcctttcccttgtggtaaataccaggcc

SEQ ID NO: 263451 - DNA, 2470 bp, Homo sapiens
tttataggattgacttaaaagtaagcatttattcagttataagaaaaccaggtaatttatttatttacttatttattttttctgagatggagtttcactcttgttgcccaggctggagtgcaatggcatgatctcgcctcactgcaacctccgcctctcgggttcaagtgattctcctgcctcagcctactgagtagctgggattacaggcatgtaccaccatgcccagctaattttgtatttttagtagagatggggtttcaccatgttggttaggctggtctcgaacccccgacctcaggtgatccacctgccttggcctcccaaagtgctgggattacaggcatgagccaccgcacccggctcaaatcatttaatttaaggattgcagcttaagacttggcatacggatacttggatgacactgatttcttctgtagctgggcaaatcagtttcctcaccaaaagtgaatatggtaaaattacatgtttatatcatatgattgtgagactcaataatagtttgagagctcagtattatctttgtaggaaagacataatttccaaatttgattagaatttgaaaataaatcacattttgatcattgctagatactgtgtctaaatgtggaaaaacctttgagaaggatttttgtatttttttttgactatttcaagtcaatagagaaaagaattctgttgaaatcagtgaagtggtgataagtagtgggtggaagattacagctcagacttaatgggatagatttggaatattatagatgggtgaatttattacaaagcaaatattaccccaaattgtcctctaagaaaatcctcccccaatctgttaatgaaaaaaaaattgtggtacaatccttataaaatttaccattttagccattttaaagtcttaatgccagttcagtggcattaagtacattcattttgctttgttactatcactgccatccatctccagaaagcttttcatcttgaaaatctgttaccgtacttatttaacaataagtccttatatccctctctcctcagcccctggcaaccaccatcctactttctatctctgaattcgactcttctattaataggtacctcatataagtggaacatagagtatttgcccttttttgtgactggcttatttcacttagcataatgtgcccaagagtcatatatgttagcatgcgtcaggattttatttcttttaaaggctaaataatgttccattgtatgtatataccatattttgcttattctttcaccttccatggacatttaggttgtttctaccttgtaggtactgtgaatcatgcagccataaacattggtgttcaaatatatgttccagcttctgctttcaattcttttgcatatatacccagaagttaaattgctggatcacatagtcattctatttttaatttttttgaggaactgtcatattgttttctatagtggctgcaccaccaaaattttgaatggagagaatgtcagcatcctgtttaataaattattttaaaaatcagctctgagcaaatgaatttagaatttggaatatttgaccaaaaatcagttttacacgtacatagtatgttactgataaaggaatgactagagtagtacacctacagttcttgctggccagagccaggagggggtgtaaaggaatttcctgggtttaaaaaagcaggcagcattgatgaatcatgaagttccccctacctcctttaatggttttgtaacaaagagatgcattcaggtgaaagtttcaagtctttttgtaactatagaataactgttctttttgtaattgtagaattctttaactttttttaggctgaagtagagaacatgaatcatttggtctgaaacttttgagaccctatttggtttgcttacatatgtgaaaatagttatccaaataattgcgattgctatcaaataatttcaataatatcagttacttcttttggtctagagtcttctcctccttaacctctttctttttggcgagacagggtctcactctgttacccaggctggagtgcaatggagtgatcactgcccctttgaacttctgggctcaagtgatcctctcacctcagcttcctgagtaggtgggactacagatgtgtgccaccaagcctggctaattaaaaacaaatgtttaagccaggcatggtggctcacacctgtaatttcagcaccttgggaggccgaggcaggcggatcacttgaggtcaggagttcaagaccagcctggccaagatggtggaaccctgcctctactaaaaacacacacacaaattagccgggcatggtggctggtgtctgtaatcccagctgtgggaggttgaggcaggagaatcacttgaacctgggaggtggaggtttcagtgagccaagatcatttcacctcactccagcctgggtgacagcgtaagactctctc

SEQ ID NO: 263452 - DNA, 401 bp, Homo sapiens
actccttatatatccagagagcatatatattataaatatttaacctacctagtatagcttattggatactaaagcaggactttgttaaactcttagcatgcagtggatcatctactatggtcactgtatgaggtgggtgctttgccattcccagctgtagccccaaccctcagcactgggcctggcatgagttaagtactttattgatatttgttgagtaaatgaatggaggtaaaagtcagctagcaaggcagccagggtagctacaggcagcctgatttggacaagtaattttattttatttttaatttatttatttattttgaatctctgaaagagtttcacttttgtcgcccagaggttgcagtgatccaagattcgcccacggcactcaagcctgg

SEQ ID NO: 263453 - DNA, 303 bp, Homo sapiens
atcttttaggtcttccttgttcagcagttgattttaatttgcttaatgaaaactttatccacagagcagagtgttcttctagggctcctcattgaccaaagcaaactgaaagccagagatcaaggatgctactaggtggagctcatataggtcagccgctcaaaacacagggaagggtgaagaagaatggataatagatcctggatgtgaaaggaaaaaaaattgtgacactccgtttttaataagaatgtatcagttcaatcactatcagtttgcagatgtacattaaataataacaagcaa

SEQ ID NO: 263454 - DNA, 414 bp, Homo sapiens
atttttgttttcctattagggtaatggtaggatcttttagtgatttgggccaaacgacatctatttagaacatgaattgtcaaaaaatgggaaatgtccttcacagagcagagaagagataattcctgaccttaagccacttgcattattaaaagcaaagcctgggaactagcctggcattcatctggactgaggaagagtcctaatcaatctatattgctaacaatattatttggatatgtgtgtgcatgtgtgagggcatatgtgtattgattcataaaacattaagtgaataaagcaggtatgttatgctatgaccttgtttgtgcttatgtatacagtaatagatgaattagtatgttttaaggatatgttctagaatgttaatagtgatttctacactggatacagagg

SEQ ID NO: 263455 - DNA, 468 bp, Homo sapiens
attaataaatatatatgtatcaaagattataatgcataatgttaaaagctgcagtaattttcaaagaaagtagtacctagatacaagagtcctccagtaaggaaggtgagtaactacccatttgccatgaatcagcagttagcctattagtggtgcttcacaaatacttttttgtcatctttgaggggtagaagcactgctattccatagctcctagagagatgtagcggccaggatgaaactcagaagcccagggagctccagccgtaggatcccagagctcagtctctctgctcccctggaatgtgtttttccaaactgcggtgtgaggctgaagggccagcacactggacccaggcttatgaaatggacaagactaatgtgaaagggactggttctttgcgggtgctcattaaatgtggtttccccttctcttattcaataaatagctatttggtttgtgtcaaa

SEQ ID NO: 263456 - DNA, 430 bp, Homo sapiens
gggatcttatttcaaatgcacactccaactgaatgggtacaggggtctgcatctctattgatctcccaggtgatgccaatgctgatggtccatggctcccattttgggggagcaagtctccagagctcattttgtgtccccttgtacacaactctactcactggataggagaggggggtttacttatctgtaccctattcatttcagaactgcttgagggaagcacctgtgccttcctgggctctgcacccctagcaaataatgtagtttctgacacaaagtaggccctcaggagatgttgcattaaggaatgaattatggaagacagaggaaagggaagcaggctcaagttcccagcacctggggaattctaagcctgaggaagacaaggtgcacacacaatatattaataaaagataacttttaaagc

SEQ ID NO: 263457 - DNA, 307 bp, Homo sapiens
tacaagcttctgcttctcctatactggttgctgtgagacaggacatttttcctgctggtgccaccctggccccctctccctttggctattctgtttctccggttgtgagaagagctcgtcatattttgtcattggttgggaagctgtagatggtttccctctttctccttcattaatcaaacacacctgtcgctaaggttgtttcctgtctcatacataacacctcccactgtacctgaggagtgccaacggctgcctgcaggccctggggtgcagccagacctcaacctaagccttactgtttaac

SEQ ID NO: 263458 - DNA, 473 bp, Homo sapiens
tgctctagaaaaatcaagtccgggttttttaaagtctgcttggaaatctgaaacctgagagctggctcttgtgtcccccactgttctcccgtgctcccccgccctggttacatgcagagcagtggggccatgagacaaaagagaatgacccagaaggacactgtggcggttggtctcaaatgcctgccccagccacacctgtctctccattgactttcgtgccacctaggaggaaggcggtgccacccatttcacaggtcagaaaacccagactcacggaggtgccacaactggccctacggtgacactgtaaatggtggagctttcagtccaacctgggtaggtctgaatgcaaagccaaggtccaaatactgcactgtcttcttggggacatgaattgccacagaattcgccttgtgctttaatgcctgtctcgtgtttctctgtgattaaaaaaaattcatgtgaagttc

SEQ ID NO: 263459 - DNA, 238 bp, Homo sapiens
ttttttttttgtgagctgctattttttcctgcaatgcactgttctttggtttgggaaatgtgctatatttgtaccgtgctttaaacatacacaatggttctaaataactacttttctttaaagttagatgtaacatcttaattaaaatgtcatccataaatcaggcacagtctgtgaggttgtgcgagcgtgaaagctccacagtctgaggcctggagaccccttctgtcgtcttctc

SEQ ID NO: 263460 - DNA, 670 bp, Homo sapiens
gcatcaaggctgcagtgagccatgattgtgccagtgcattccagcctgggtgacagatcaagaccctgtctgttaacaaaaaaaaagtatacacagatgtttgactgcgtgggagttggcaccctaccaacttgttcaaggatcaacattattcaaggatcaactgtagttatactatattgtttaggaaatacaagggaacaaagtcggtacgtgttcagtacagatacaatttttaaaaaaattcttgatctgcagttggttgaatccacagacgtgtagtgcacaaatacggagggccgactgtatttgtagtcaccctgatagtttgtgacacagccattgcttttttaaaaagtgtggttagttctctgtgacttcctcacttctatcctaatagtacttctgtgctactcctctggctcatgccacctgttgctttgccatagaaacagtccatcttcaggttggtgatatctgcttagatttccctgtatctttgctgccctccttcaagtttttgtacaagttagtatgtacagtgtcatacataaaataaaaattccacagcatgttttacttaattaaccttcattaaagaaagttgtaaaagaaaaaagaaaaatccagcaggtcatggacaacttaaaaagaaagtttggaaaaaaaa

SEQ ID NO: 263461 - DNA, 623 bp, Homo sapiens
ctccaaccaggccatcccccttcgtgaacctgatcttgtcagagtcacaaggacctccacgatctccacattgctaaccaaatggtcaatgttcagtcttcatcttattcagctcatcagcagtccataacttcctcttccttgatgcatattcttcacctagcttccaaaacctatacttctcctggcttttctctgccttaccggtaatgccttactggtctcgttgctggctccttctcttctgccccactttatgcacagaaatgccctagacctgccctttctctacctatactcaccctctactgcttgtgagcatcttgcggtcagctctccacctacccagccccctgcagtttgagctcaatacctgtttgttgaagtgcactgagtccggaaagtcggttctgtcagtgagcttctacagaaaggaagcctttgaaaattttttttgagaaaagaagacggggcaagaaggggggccggaataaaacactgcactcacttcactatttaccctcttatctgttatctgtagagaggaggcaacactgaggagcacagtgattctcagacttagagcacacccaaattattaaaatcacttgttaaaatgcggg

SEQ ID NO: 263462 - DNA, 250 bp, Homo sapiens
agccctttctcattcatgtgctgggtattcagcgaggctttcaatccagaaactcgtacttcttagttccagaaattttgcttaaattattcctgtatgttctttctgtagtattcacttcctagagcatctattaaatagaagttggacatcctggattgattctgtaagttttccttgtgtcctattatccaccaacttgtcttttcttccccactgtctaggagtgttcattaaaagaaaaaaactc

SEQ ID NO: 263463 - DNA, 432 bp, Homo sapiens
ctgtgctctccctagctcccggtcccttcctggcccagagcaggccctctgcaaacatctgcagaatgacggctgggcgtggggctttctcaggcccctgcccttctctctcagacctctcctggagcactcatccccttttgtgccttccaccattttctctgtttaactcatctctctgtaaatgcaagtcctgatatccaagagcctgcagattttttttttttgagaccaagtctcgctctgttgcccaggctggagtgcagtggctcaatctcggctcactacaacctccatccctgggctcaagagactctcttgcctcagcctcccaagcagattgaattacaggtgtgcgctgccatgcccggctaataatttttttttttttagacggagtctcgctttgtcacccaggctggagtgcagtgg

SEQ ID NO: 263464 - DNA, 387 bp, Homo sapiens
cactattatagtctcaaattttcggataaggagatgctcacagagaataacctactcagctagtgagggacagtgcccagtgagaacccaggccgtccagctctggcatgcctggccactataccatattgcctctttatattcttttgcaggattgctttcattttaatatgtagcaagaggactatagtatttagcaaaattggattagcgttgaaagctatattacattaaaaaattatgatttttagactttaagccttggctaataagtaaataaatcaatttcctaacatctgatactttttctgaatgaaatggttgaatttataaccttgatgttcttgccacataatggattacattaaaaatatataatcttcttta

SEQ ID NO: 263465 - DNA, 400 bp, Homo sapiens
aaatacagcattcccccatacacctgctgtgatacctgaaattgccatcaatagagtgatttctttgtgttaaggaggtataatactgagttcatcattataagtcagtcgtaggcctggcacggtggctcacacctgtaatcccagcactttgggaggctgaggctggcagatcacctgaggtcaggagttcgagaccagcctgaccaacatggagaaaccccgtctctactaaaaaaaaataccaagttagccgggcatggtggcacatgcctgtaatcccagctactcaggaggctgaggcagaagaattgcttgaacctgggaggcggaggttgcggtgagccgagatcccaccgttgcactccagcctgggcaacaagagtgaaactctgtctca

SEQ ID NO: 263466 - DNA, 410 bp, Homo sapiens
actttatgagcttgacagttggtgaaaacttttctgtttaaaattttatttggccctccccaaaagaaatgtttatttatgagtattaggatagttccagcagtaatgcctcaaaagaaccaggaggtatagtgttgtctaaaatgtggactcaggagccagactgcctggctgtgcaactagccttgtcacttcctagatatgtggcaagttaattaacttctcagtgttcttatctgtagaatggggataatcctaatatacatctcagggttatattacaaattaaaaaagttaattttgtaaaggacttagaatgatatctggcaaataaaagtgttcataaaagtaaaccctataaaagtgtttactcattaaatacaataatctgaaaccattagtaatttaaa

SEQ ID NO: 263467 - DNA, 394 bp, Homo sapiens
ttttttttttgagaaggaatctcactctgttgccaggctggagtacatcagcgtgatctcggctcactgtaatctctgcctcccgggttcaagcaattctcctgcctcagcctcccaagtagctgggactacgggcacacacaacgcccagctaatttttgtatttgtagtagagacagggtttcaccatgttggccaggatggtctcaatctcttgacctcatgatccgcccaccttggcctcccaaagtgctgggattacaggcatgagccaccacacccagccagcatttctaacaatcttaagagatgttcatccaggggttactctgtgagactccctggtaagcattatctcttcagccttgaacacccctacacaacctggccatac

SEQ ID NO: 263468 - DNA, 1145 bp, Homo sapiens
tgcgctggcaacctactcgggttcccttccatggtgtggaagcttagttcttttgctattcacagtaaatcttgctgttcctcgctctttgggtccgcactacctttctgagctgtaacactcactgcgaaggtctgaggcttcactcctgaagttagcaagaccgcaaacccaccaggaggaacaaacgattctggacgtgccacctttaagagctgtaacactcactgccaaggtctgcggcttcactcctgaagtcaagtgagaccacgaacccaccggaaggaagaaactccagacacatctgaacatctgaaggaaaaaactctggacaaaccatctttaagaactgtaacactcactgcgaaggtctgaggcttcactcctgaagtcagcaagaccacgaacccaccaggagcaacaaatgactctggacgcaccaccttttaagagctgtaacactcactgccaaggtccctggcttcattcttgaagtcagtgagaccaagaacccactggaaggaactaattctagacatgctagttcccagatcctgtttctctggagaggcctaactaatacatagacaaagccaaatgactttttcccctctctgaactttgatattctttaaacatttccagctagttcttttaatatttcttgaggatttcctgggattttttttttggtaaatactgtatttcaccagctactccttcaagaacatagtcgtcatatgctttattatccatgaagattattagtgaacccacagttcgtttgtcaaaatgactctaaattcgtgatattcagatgatcacactccataatactgccaccagagccaagttattggagttactactttttatgatcagcacaattatttttctatgaaagaattgttggtattaaaagggccacagtagactatttgctattgaatgattgttggttagtacttaattaaaacaaaaatgttttttatagctacttaactccaagttccatcttttccatctctagaagtacataagccttttcgttgaaataacacatttttctgaagtagaacatgattattgttaagaaatataaaaatggcctttaatctcaccatttaagatagaaagcttttcat

SEQ ID NO: 263469 - DNA, 485 bp, Homo sapiens
gcagcccccagaacaaggaccccagagacagagtgagagagggcaagagaaggcaagatgcaagtcacactctttttgtaacctaatcccatcacatttcctgaattctgctcattagaaagaagtcactagattcagcccacattcaagatgagaaataccagaaggcagagaacactgaggctgttttagaggctgtcaaccccagggagacagacagcaaataagtaagcaaataaataaaaatggaaggtgataataagtgcaatgaaaagaaatgaagcagagtaaagaatcaagagtagcagttgaggggatgcttggatgttttcacaccactctgacacatggatggaaggttagaagacaacaaaggaatgggctgggaaggactccaaaagcagaatcagagattatatcattccttggaaatggagaaaaggatcaaaaaagctgaataaaaggtagtcccagcaacaatgtct

SEQ ID NO: 263470 - DNA, 813 bp, Homo sapiens
gcagcccccagaacaaggaccccagagacagagtgagagagggcaagagaaggcaagatgcaagtcacactctttttgtaacctaatcccatcacatttcctgaattctgctcattagaaagaagtcactagattcagcccacattcaagatgagaaataccagaaggcagagaacactgaggctgttttagaggctgtcaaccccagggagacagacagcaaataagtaagcaaataaataaaaatggaaggtgataataagtgcaatgaaaagaaatgaagcagagtaaagaatcaagagtagcagttgaggggatgcttggatgttttcacaccactctgacacatggatggaaggttagaagacaacaaaggaatgggctgggaaggactccaaaagcagaatcagagattatatcattccttggaaatggagaaaaggatcaaaaaagctgaataaaaggcaaacatggaggaacagagtttggagcaataccctgacttacattcagtactgttaatggctccagcatcttgaaacaaaccaattttggattttcagccgctgtccaagatgacgtgaactccaggctattgactttcctctaccttcaatggaaattgtcatggagaattaagtttttgacaaatctacagcctatgtgcagggcttcttcctgggtgtaacaataaggaatttggaaactgtctctagttttggcctggagtcacactgcagcttgagaccctgtcatttccatcaagcttgaaaatatacatcttaataaactgcaatacttcttaaaccttga

SEQ ID NO: 263471 - DNA, 575 bp, Homo sapiens
acctcatttaaacttattataaacacacatacacacaccccacaggtcccaactgcagaactattaaatcaacttgaagtaatgacaggtggataggcagatggaacaaagtacttcccataaacatagagtcggatttgaacccctatcgcacagccaggcaggggctactcacaaagttaactctcattcctctttgccctcattactccccataacttgctcatctttctgttgtagaattggtcactccggattgtacttatttgtttaacttcctttctatcaccacactgagcatcttaagggccacatcaaagctttttctatcagtacacccagagctcagcacagcattggcacactgtatgtgctcaataaatgcttatgaatgaaagaatatatgaattagtggggtagactctcacttgtttttgaaagtgtggtgaaaactcactctatttctatgtacaacactgcaaaattcaggtaattgttcatttattttagaattccttaagaaaattcaataagtaagccataatgaaataatttggggaatttaagagatcagt

SEQ ID NO: 263472 - DNA, 300 bp, Homo sapiens
aaatgagggcagagagcagggccctgtaggacaatgatatcatcacacagaggccagaaggccagttccccacatggtggtcacctctccactacagagcagggccttccagtaaactctagagcagtttagggatgaagtctgggccctgaaacaacatgtttcgaaacaacatgtttctgaggtttcatctgagcccactgccctcaacttactcgcctggagttttaggggttactgcttagtgcagtaattccccttctgagattaagataaaattgcccaaaataacaaaaaaaa

SEQ ID NO: 263473 - DNA, 535 bp, Homo sapiens
cagtggtgtgaagttaaaaccaggtactatgagtctcacctgatttttggttcttatgaaggtattttttttctgtgtagatagttgttaacttgtgtttggggatgattggtggaggcttctattctgctattttgctctgcctccctaattcaaatatgtggttaacttttatgggggttccgtgaacatttgaaaagaatgtgtactgtttatagcaggagtccccacccccaggccatggaccagtacaggttcatggcccattaggatccaggccgcaaagcaggaggtgaacggcaggctagcaagtgaagcttcatctgtgtttacagccactctccatcactgacattactgcctgagctccacctcctttcagatcagtggcagcgttagcttctcattggagagtgaacctattgtgaactgcacatgcgagttctaggtcacgtgcttcttatgagaatctaatgcctgatgatctgtcactgtctcccaccatcctaagatggaactctctagatgcaggaaa

SEQ ID NO: 263474 - DNA, 804 bp, Homo sapiens
aaatactgctagaaacaaaagctaatacttattggttctatgttttctcatctcacacatcccccagttcttcaacgttaattgagactttgtcagcaaagtctcaatgtatgaatgtctacatttattgtatgaatgtatattcagatgaggttaatttttttaacaatgatataccgttgacctacatatttttaaagttctaattagtctttatcttttttcatgtctaaaatatttcattaaaaatactttaaatttacagagcccccttaagagtacaaaagccaaacagacacagtctttttgaagtttagaattgacaggattataaagaaagattcaaacactttatgtttaatgcaaagagacctaaggacaattagaataattttctagtcaacctgcattgaggtttttgtgcttatttttacttggccagcacatcgagacgtgagccaagcctttcaatatgagtttttttggtagaaattttgactgaatgtttatttcaagtaaagaagcattagtctgtcctagcagcaggccaacccactcaggaacccaaagtaaatctgttccagaaggagttgcagagaagaactttgatcagcttgtatagccttctgtgttagtaacttggttgacctcagtattacatgtgtctgttaaaacacaagtcctattaaattaggataaattaatataaattcctaatttaaaatgatcaaaaaaatattttttatcatataccttttgtgcctttaaaccaaaagtatggtgaaagaattgtaatccaccaaa

SEQ ID NO: 263475 - DNA, 439 bp, Homo sapiens
aagagtggagctgatcaggcctatattgcagtgagagctccagccgtgaggactacatcaggcagttccttaatgctggcaagcacgtgacttttttgtttgttttttgagatggagtcttgctctgtcaccaggctggagtgcagtggtgagatctcagctcactgcaacctctgcctcctgggttgaagcgattctcctgcctcagcctcccaagtagctaggatcacaggtgcctgccaccgtgcctggataatttttgtattttttagtagagttggggataagccatcttgcccgcctcggtctctcaaagtggtagaattacaggcatgagcaagcatgcccagtgaactgtgaccattttgaaagccatgatttatgggaatagcagttatttctctttgtgtaaataaacagaggccaccaaaataagaac

SEQ ID NO: 263476 - DNA, 446 bp, Homo sapiens
aagtttaattaaagaccaaagatacagcgtgctcacgtagccctggcgcaccagagactttaggccaaagaaggagtacgtttcggtgaaaagcacacaacattactgcctgttcttgaaaacttgatctgtggtccctagttcccaaggatgggaaagtggccaaagcccactcaatgctgggagccgtcctcctagagccagagggatcctgcctgttccaatgtctccgtgggttttacgggcatatttttcacaccctgttttgctattaaaaataaaatgaggcacacatcacatgtctttcccagactgcaagacccatttccttctaataagcctcggtttgcctgggctttccttaccctagaaacattaactctcccgaggtgcctattatggatttctagttttgtattttttttcctgtttctgctattttgaaa

SEQ ID NO: 263477 - DNA, 728 bp, Homo sapiens
tactttatctaactcaataagggatagtttcccatattgagttagataaagtatgaagtattttatctaactcaatatgggaaactatcccttaatggatggctctaagtcatctgcatttttcctctctgctgtgaagctattctctgctccagtttctctcttggtaaaaaactactcctaccaactttcctttctatttttttaaagcttcccatttctattcattgaaatcttgttgatatggcttttcccaaagaagaattccgaagctgaaactccaatatggtcccaaggttcttaaagtatggaagatggaatgtttgttaacaatgcagactcttggaatccatctgagttagagtaggaatcagtctccatggaagggcccagaaatctggatgtttaacgtgtgccttgttggttcttatgcataataaactttaacaacaactattctagaacgctagttctgatttggagagaacattcaaaatgtagtcgtagactttcagttgctagcttcatggatatatatgttatttaatccctctgagtcccaatttctttatttttaacattagcataataatttttaggatataatgttaatgaaaagattgcctggggccacagatgttttgtttctgtttgctttttacaaagcatatatacctagataaacaaccagagtaagaaaaacaaaacccacaagaatacagtagcag

SEQ ID NO: 263478 - DNA, 371 bp, Homo sapiens
ttttatttagtgatatatttaatagtcacacacgcagatttattctatcattctttcatatcccttgaagacatgaccaccacgcttcactccctgcctgtgacacagaggaagctctgagatgaagagtcctctccgccaccagaagcagcagcgaaaacccatccaaagggttcaagaaaaactttcattctgagaagaggaaccgggtcggggaggcacgccggactccacatcatttcttccttcaattttgaaggagagtcgagggctggaccatcaaggctttagtctgaattcaggcctaatgtgagaattaaagaacagaaaccgccaaaaaaagagcacataatgcgatcattggcctcata

SEQ ID NO: 263479 - DNA, 363 bp, Homo sapiens
gcatagattaaataatttgcccaatgtcacacagtaagtggcagagttcatatcccttgaagacatgaccaccacgcttcactccctgcctgtgacacagaggaagctctgagatgaagagtcctctccgccaccagaagcagcagcgaaaacccatccaaagggttcaagaaaaactttcattctgagaagaggaaccgggtcggggaggcacgccggactccacatcatttcttccttcaattttgaaggagagtcgagggctggaccatcaaggctttagtctgaattcaggcctaatgtgagaattaaagaacagaaaccgccaaaaaaagagcacataatgcgatcattggcctcata

SEQ ID NO: 263480 - DNA, 781 bp, Homo sapiens
gtccactcagctagtaagtggcattttggctccagagttcatgatcttaagcatattctctgttgctttattggaagactaaaccttttaagatagatattctataattcagtgggcttcctaaatacaaatggagaaaacagatgtggattcacctttcctaaacgctttgcctctctttaaattcttcaactgagtgatcctctctgggatcactcatatttgcagtaagccaagactgtgctgctgcactcctgcctgggcaacagagcaagactccatctcaaaaaaaaaaaaaaaaatcagttgtatttgttccaaaacttgtttttgcaagttgtacttaataacgatgtaatttaattcaatattaccaaaatcaaacaattatgagtgtgaagagagtaatctctatgaaaaaaagttgaaaacttgggaaagacctgataaaagacgtgttattaaagaaaaaaatgctgtggaattaggtgtgggtaaagcaaccgtgaatgtttgggagggagagaaaagtgtcaaaatataggactttgccttcattttgtttcacaagtgtcttgagtcctcattctactaaagctgaaattgataatgcttcttgctgtgctaatcaatgtcctctgtgcagcctgcatcagcaggcccacacgcaaagaaaaggtcttatcctgacatcaaaggagtgatgggtagataaacctgtttatattttaaattaaaaataaaattttgaagatatatataataattttatgaagcccca

SEQ ID NO: 263481 - DNA, 541 bp, Homo sapiens
acaggatctcgctgtgttgcccaggctggtctcaaactcctgactcaaaatttaatttttaattgtgaatagaaaaaaatatatttgtttttgcaagttgtacttaataacgatgtaatttaattcaatattaccaaaatcaaacaattatgagtgtgaagagagtaatctctatgaaaaaaagttgaaaacttgggaaagacctgataaaagacgtgttattaaagaaaaaaatgctgtggaattaggtgtgggtaaagcaaccgtgaatgtttgggagggagagaaaagtgtcaaaatataggactttgccttcattttgtttcacaagtgtcttgagtcctcattctactaaagctgaaattgataatgcttcttgctgtgctaatcaatgtcctctgtgcagcctgcatcagcaggcccacacgcaaagaaaaggtcttatcctgacatcaaaggagtgatgggtagataaacctgtttatattttaaattaaaaataaaattttgaagatatatataataattttatgaagcccca

SEQ ID NO: 263482 - DNA, 517 bp, Homo sapiens
ggaggctgaggtgggcagatcacttgaggacagtccaagaccagcctgccaacatgatgaaaccccatctccactaaaaatacaaaagttagctgggcatggtagtgggcccctgtaatcccagctactcaggaggctgaggcaggagaattgtttgagcctaggaggcgggggctgcagtaagccaagactgtgctgctgcactcctgcctgggcaacagagcaagactccatctcaaaaaaaaaaaaaaaaatcagttgtatttgttccaaaacttgtttttgcaagttgtacttaataacgatgtaatttaattcaatattaccaaaatcaaacaattatgagtgtgaagagagtaatctctatgaaaaaaagttgaaaacttgggaaagacctgataaaagacgtgttattaaagaaaaaaatgctgtggaattaggtgtgggtaaagcaaccgtgaatgtttgggagggagagaaaagtgtcaaaatataggactttgccttcattttgttt

SEQ ID NO: 263483 - DNA, 412 bp, Homo sapiens
caggagttctttatcacattgaacagagctccactgggatgtggcctccaacattctagttctcaacaatggagcccaacataacaagtctgcaccctcttttcaagtatagcccttcagacctgcaaaggcagttctagagtgccctgtcaaggtctttttttctccagatgattagatctcttaatatttccccttatagtacatagtcataattataagtcctccctatgctgacatattaatacaagtttgcttaataaaaatgaaataccaagtaataaccaattttactatttcccttctctgttccaggcagtgttccccacactagagatacagagttgaaaaagacacacaggatccctacttcatgaagcttactttattgtagagtaagaaaaaaaaaaaa

SEQ ID NO: 263484 - DNA, 531 bp, Homo sapiens
tgggtgatggctactttggtgtccattgtactattgattgtataagtttgacattctccataaaaaggataagcaagaatacattctcagaagaaaaagacaagtgaaaaatcaccaaaggtcctgggcaggtgttttgaagtgtcaacgaacagagtagattgcaggatagggaggtggggaactgagtgggaaaacctaacttgaggccagactacatttaaagcaatttgaggacttccgagtgggaaagtccaagtagggaaatggcgatatgaagatggagcttgggagagacgtttgtagctctgcacttaggataatgaaagccacaaacataaagaagcgttcagggggcagagataccgttgcaccacagggaatgaaccaactaggaaaggaaaaaaaagaaagcctgttgagctcataaaggagataattagcccaagctcctacctacattttacttttgttttagaaaaccaataaacacctctcagaaatggagctccatttcactcttgccaccta

SEQ ID NO: 263485 - DNA, 241 bp, Homo sapiens
ttaccagggatgaactgcctcccattctcagtctagatccgtggttctcaaggttctcaagggaacagtggcgacagcagcaaacgggacatgtcagaaatgcaaatgatcaggcttcatctcagatctcctgagtcagaaattctggagaatggaccagcaatctgcaaataaggactatagaagatcttataccacagaaaagctaggcagcgtgcagagaactagagggccatcgatg

SEQ ID NO: 263486 - DNA, 399 bp, Homo sapiens
ctctgtgaaaagaagtgaggatgcaaacaaacaaacaaaaacacatacaccttctgtagcccttaggctagtgatcattgtttgatacagatgagttaagaattccaaaaattatcttgtagttttacactcctgatacaaaaaccacttgagggttggatatataatcaaatattaagtataaaattagtaagtcactaaaataaaatgtaggaatgtatttatataatacattggaggaaaaaaaatatgttcaccaaaatcttttggaagacagtattatgtttgtttggaagacatatttaataagctgcttgggtttcagaccaagaccttcaaggaatgcttgcacatcaaaaagcagttcattaattgctctgcgcaattaaaaaaacaaac

SEQ ID NO: 263487 - DNA, 583 bp, Homo sapiens
attgtcacaaatgaattggcaatggcctgtctctgattcttatacctggaatatactggaagtccctactcatgctattttctagcagaataggcaaaatttctacattccaggcatgtcaggcctttccctgattcctttctctaatgtcactcgtctgctgtcttttatcacagccattaaactgcaccctaacttaaagaggatcccttatgttccaatctactcatccctcagatctttctttctctgaaacacagggttaatgagactgacatccttccatcacatattttctcagctactcagtaaaagatgtaaatgtttaaaatagtttaaactatttttcagttagtccaggaaacataaaatggcatgcttgcacataaaccattgtttagggtgggggaagtgtttttaattttgccttaaaggaaatctgcatgatccacaggctatgcaactaccaagggaattagttggtagaacagaattacacctgcacagaatacaaatttcctgcctttcatgggaactatgttgatgtttcagatatgaaatacatcttgttttctttattgaa

SEQ ID NO: 263488 - DNA, 497 bp, Homo sapiens
catacttacctggcaggagagataccctggtcacgaaggtggtttttccagagcgagtcttatccattgcactccggatctgctgacccctgcagtttccccaaatgtgggaaacttgactgtataatttgtggcagtggtagactgcattcgcgctttcccctgtatttttgtcgttttaaaaataggttttgtttgctgcagaaacgcatactgggcgtcagcgtaagctgagaatcaggtctttgttcccatctgtaacttcactgaaactaaaaatttgggacatcgtggttctcacgtttgtaatcccagcaatctatgaggtacgtcgataggttatgtttatgttaatatcgctcgacctcaggcgtgtgtgggcaaatatagtgaacccgtctctactaatctcttatctttttttgttgttgttctatagaaataaaactaagcttttcttttccctatgggattaacagcaaacagtccgctggagt

SEQ ID NO: 263489 - DNA, 522 bp, Homo sapiens
  misc_feature (519)..(520): n is a, c, g, or t
  misc_feature (522)..(522): n is a, c, g, or t
caaatccatagggagctctgccttaccattgggttcctaattaactgagtgagtgggtgtgttctgcatggtgagaggcattggaatgatgcatcagaaaacatgtcataatgtcatcactgtaatatgacaagaattgcagctgtggctggaacctttataaagtgaccaagcacaccttttcatccagtctcagcgtggggtgaagcctagcagctatgaggatccattatcttctgtttgctttgctcttcctgtttttggtgcctgttccaggtcatggaggaatcataaacacattacagaaatattattgcagagtcagaggcggccggtgtgctgtgctcagctgccttccaaaggaggaacagatcggcaagtgctcgacgcgtggccgaaaatgctgccgaagaaagaaataaaaaccctgaaacatgacgagagtgttgtaaagtgtggaaatgccttcttaaagtttataaaagtaaaatcaaattacatttttttttcaaaaaaaannan

SEQ ID NO: 263490 - DNA, 284 bp, Homo sapiens
ttaccaagaggcaattgttacaacttgataggagaaataagttctggtgttctgtgcattgcagggcgaatagggttaactataatttattgtgtattttttaaaagctagaagagaggatttttatgttcacagcacaaagaaatgataaatgtttgtggggatagtatactaattaccctgatttgataattatacattgtatacgtataccaaatatcactctgtatctcataaatatgtacaattattacatgtcaactaaaaataaaaggagaaaaaaa

SEQ ID NO: 263491 - DNA, 592 bp, Homo sapiens
ggctcctatcttgaagctgttgggcacctacgcaagtggcacagggaggggcagggtgttggctccgagtgagagatttgcttaagccagatggtggccgatgaaggaggcccaggcaaccccttctggtcttccagacagcaccacaggtttgtgtgggttggaggggtgctatctgtctgtccatccacaagcacatgccagaaagaagaggatggaggaggtgaagattttggggggttctcatcattttccctttccaagtttcatccttatccatgcttctaatcacatggagaccattaccactgggggagtcatttccatttttctttagattccattctaaaatcccctaaagacctaaagtaaagaacgtcagcagtggcatttctattcctctaaagggtattttagacaataattttggatagccccacactgcatgaagcagggaactgcatgcccttcctgctcgggagcccagccctgcctccagcagctccagcttcctttcctctctgtcatggtgctgccttctgatgagcaagaagttagtcccgactggccctcggcaagctggggcttctaa

SEQ ID NO: 263492 - DNA, 336 bp, Homo sapiens
gagatggagtaaatcaaaacaggaaatgggacctggctacattaaaagagaaagcagaggccgggcatggtggctcacgcctgtaatcccagcactttgggaggctaaagtggatcacctgaggttaggagttctgaggccagcctggccaacatggtgaaacctcgtatctactaaaaatacaaaaattagccaggcgcggtggcgggcgcctgtaatcccagctacttgggaggctgaggcaggagaatagcttgaacccgggaggcagaggttgcagtgagcctagatcgcgccactgcactccagcctgggtgacagagcgagactcttcct

SEQ ID NO: 263493 - DNA, 451 bp, Homo sapiens
ccagatactctactgactgctatatatagacattatgaatgcttttcagtgctagatctgaaagatgttttcttctgcattccaattgaagaaaagacccaacaattatcattattatttttaatgacaggaccgagagactaaaacaacctttcaatactgttagacagtggggtctcaatgtgttaaaaaatgcaccaacaatttttggggaaatactggcaaaagacttaggagacctacaacaagattaagaagcctggctacaacacatagataattaatagccagccacaactataggaaatgcttagctgatgtcattttagttctaaatcacctggtacaatatggatacaaagtattcccaagaagccccaaatatgtaagtagaaagtaacctgtcttggctttaggttaaagcaaggccaaaggagcctggtctggtaaa

SEQ ID NO: 263494 - DNA, 441 bp, Homo sapiens
gtggggagatgaatgaagagttaagcctgactcccagacttctggcttcaatgctaacagattagtggtaccatctattgagattaaaatttaccaagatggcaaaggaagtctgtttctggatatattaaatttggggcagctaccaaattttcgagaaagagccagtggttagttaaataaagatctgtatcttagggaagagatgtaagctggagaaaaagatgccacacaggtgaccatcaaagtcaaagatgctgatgagattacataaggaaaagcacatgaaattggagattagaagaatgagagcaacaaccttgaagaacaccaacatttagaagcatttaaaaagacagagcaagaagaaatgtaggatgtggtatcagagaagccaaggaagaaataatttcaaaaagtgaagtgttaagttttaactgc

SEQ ID NO: 263495 - DNA, 755 bp, Homo sapiens
tgcccagcctgctctggaactcctagcttcaattgaccctctgcctcagcctcccaaagtgttgggattgcagatgtgagccactgtgcccaacctgtttttcttggtgttttatataaatggaattgtatcgcacgtaatctttagggaagtgggggctgttcattgagcataattatgttggaattcatctatatattgataaatattttaagtgctttttattgctgagcggtgtctaggagtcattcttgcttaccctttcccactgcagccttcactcaatctcatcaaagatctagctccaatatataaaccaaatccaagccattcccacgtatattacccctgagccatgctctctcacctagattacagatacagcctagtacctggtcatcctccaatcagttttgtctacagccatgcgagtcttctctctatgccttaaataagacaaatgtattccagctcttttgaatatttccaattgtgaaatgttcctctttatttctaataatgcttgctattgtcaactttgcctcatatgtaaataacaccaccagctttctttcctgtgtgtacctttagagttaagtgagtttaagaagtgtgtgtgtggccgggcgcggtggctcacgcctgtaatgccagcactttgagaggccgaggcgggcggattacgaggtcaggagattgagaccatcctggctaacacggtgaaaccccatccctactaaaaatacaaaaaaaaa

SEQ ID NO: 263496 - DNA, 312 bp, Homo sapiens
ggcgtgggcctgtaatcctagctactccgaaggctgaggcaggagaattgcttgaatccaggaggcggagttgcggtgagccaagatcacgccactgcactccagcctgggcgacaaagcaagacttcttctcaaacaaaacaaaaaacaaaacaaacaaacaaacaaaaaatgactgtgttaacgactggcttgcaaaatttctgaaaattcacaattggctccggaggatggggttgatccaactccaggctgacactgcccctggggtgagggcccccaggaattggagggcgggggctgaggggacgg

SEQ ID NO: 263497 - DNA, 3052 bp, Homo sapiens
gcagtgttttcttcttggggtcggaataaaagggctggaataaaagagggcaggaaaaggcgccgggcgggcccgacacacgccggaggagccgggtggtgcagagccggagccggagccggagccgcgccgcgccgcaccatggcgcccaccctggccactgcccatcggcgccgctggtggatggcctgcacggccgtgctggagaacctcctcttctcggcagtcctcctgggctggggctcgctgctcatcatgctcaagtcagagggcttttactcctacctgtgtaccgagccagagaatgtcaccaatggcacagtgggcggcacagcagagccggggcacgaggaggtgagctggatgaacggctggctcagctgccaggcccaggacgagatgctaaatttggccttcactgtgggctcctttctgctcagtgccatcaccctgcccctgggtatcgtcatggacaagtatggcccgaggaagctcaggctgctgggcagcgcctgcttcgcggtttcctgcttgctgattgcgtacggagcaagtaaaccaaacgctctctccgtgctcatcttcatcgccctggctctgaatggctttggtgggatgtgtatgaccttcacctcattaacactgcccaacatgttcggcgaccttcggtccacgtttattgccttgatgattgggtcctacgcctcctcggcagtcacctttccaggaatcaagctcatctatgatgctggtgtctccttcatcgtcgtcctcgtggtctgggccggctgctccgggctggttttcctcaactgcttctttaactggccccttgagcccttcccggggccggaggacatggactactcggtgaagatcaagttcagctggctgggctttgaccacaagatcacagggaagcagttctacaagcaggtgaccacggtgggccggcgcctgagtgtgggcagctccatgaggagtgccaaggagcaggtggcgctgcaggagggccacaagctgtgcctgtccaccgtcgacctggaggtgaagtgccagccggatgccgcagtggccccctccttcatgcacagcgtgttcagccccatcctgctgctcagcctggtcaccatgtgcgtcacgcagctgcggctcatcttctacatgggggctatgaacaacatcctcaagttcctggtcagcggcgaccagaagacagttggcctctacacctccatcttcggcgtgctccagctgctgtgcctgctgacggcccccgtcattggctacatcatggactggaggctgaaggagtgtgaagacgcctccgaggagcccgaggagaaagacgccaaccaaggcgagaagaaaaagaagaagcgggaccggcagatccagaagatcactaatgccatgcgggccttcgccttcaccaacctgctgctcgtgggctttggggtgacctgcctcattcccaacctgcctctccagatcctctccttcatcctgcacacaatcgtgcgaggattcatccactccgctgtcgggggcctgtacgctgccgtgtacccctccacccagttcggcagcctcacgggactgcagtctctgatcagcgcgctcttcgcccttctgcagcagccgctgtttctggccatgatgggtcctctccagggagaccctctgtgggtgaacgtggggctgctccttctcagcctgctgggcttctgcctcccgctctacctgatctgctaccggcgccagctggagcggcagctgcagcagaggcaggaggatgacaaactcttcctcaaaatcaacggctcgtccaaccaggaggccttcgtgtagtggctgccgcctcggaactgcggtctcctgcctgtgcttcagtgactgacccctgtcctgcccctccagagtaccccacgcacccccaggaccttcgccgtctccgtgccagcgttcacgctccctcccggggccctgcctcggagctctgtggtggaaggacgggagagggccccggacacgcgagttttctcctgccgaacgcaggggctgccctgactttgctctgccgccccccggggacccggggcctggggtctctgtggtgcctgcagcaggagccaggaacgcccggcaggcaggcgctctcccgccagtgtctggattctgcctcttgccaaagcagagggggctgccatcccctgcctgccacctgcccctcggctgcatgcccacagccgtacctgcctgaggacaaaggcttgcactgtctcgcccgcgcctggcccccaccccctccccggccagcctgaggctgcctgaggaaggaaggacccgcttcctgttgtcggtgctaattcctttgtaattccagccccctgtcgcctgtccagggcctgcccacccgttggaggccggtggagaagccccacctggcttatgccctggagagggtttagcgggctgggtggacccctcgcctcctccccgagggccaatgccgcggacacgttttcactgtcaccctcgttctgtctgccacctgaagggaatttgaggaccgccgccagggcaccccgtacatacacacagctgcttttgtggaggtggacgaaaggctgtggccggcagacgtggaggtccaggccggggtggggacgtgggtgggtccgaggggtgtgtggggtcggggtgggctctaggagttagcccttatccccactgaccaggcgggagccgccaggcctgcagctgggccagtgcccaggagccatcctggcgtggggccaggagcttgtccaaggccacaggcccacagcaccccctgccggcgggctccgtggggccctggagctgatgacgggggaggcccgtccgcctggcccaccaacccgcccaccttgactgcccccagaagtgtgtcttgagacctcctgggcgtgcttagaggggtgagttgtgtttggatttttagttattttctcttcagttttattagacttcttttttataaagcaataaatccattttcctccgggta

SEQ ID NO: 263498 - DNA, 3833 bp, Homo sapiens
gtctcgggcgcgggcgggagggcacctgtcagggtccctgggagaggcagccctcggatctgcccctgcccacctcacgctgcgttccatgctggccccaggcgatgtcagtcctgctgcaggccaggactagttccacggccctgagcatgcgttagccccttcttgcctccatgcctcagtttacctcggagtgagctgcgggagacgtctccctgcctggccggggcggctctgtcgtagcggagggcagcggtggtgcagagccggagccggagccggagccgcgccgcgccgcaccatggcgcccaccctggccactgcccatcggcgccgctggtggatggcctgcacggccgtgctggagaacctcctcttctcggcagtcctcctgggctggggctcgctgctcatcatgctcaagtcagagggcttttactcctacctgtgtaccgagccagagaatgtcaccaatggcacagtgggcggcacagcagagccggggcacgaggaggtgagctggatgaacggctggctcagctgccaggcccaggacgagatgctaaatttggccttcactgtgggctcctttctgctcagtgccatcaccctgcccctgggtatcgtcatggacaagtatggcccgaggaagctcaggctgctgggcagcgcctgcttcgcggtttcctgcttgctgattgcgtacggagcaagtaaaccaaacgctctctccgtgctcatcttcatcgccctggctctgaatggctttggtgggatgtgtatgaccttcacctcattaacactgcccaacatgttcggcgaccttcggtccacgtttattgccttgatgattgggtcctacgcctcctcggcagtcacctttccaggaatcaagctcatctatgatgctggtgtctccttcatcgtcgtcctcgtggtctgggccggctgctccgggctggttttcctcaactgcttctttaactggccccttgagcccttcccggggccggaggacatggactactcggtgaagatcaagttcagctggctgggctttgaccacaagatcacagggaagcagttctacaagcaggtgaccacggtgggccggcgcctgagtgtgggcagctccatgaggagtgccaaggagcaggtggcgctgcaggagggccacaagctgtgcctgtccaccgtcgacctggaggtgaagtgccagccggatgccgcagtggccccctccttcatgcacagcgtgttcagccccatcctgctgctcagcctggtcaccatgtgcgtcacgcagctgcggctcatcttctacatgggggctatgaacaacatcctcaagttcctggtcagcggcgaccagaagacagttggcctctacacctccatcttcggcgtgctccagctgctgtgcctgctgacggcccccgtcattggctacatcatggactggaggctgaaggagtgtgaagacgcctccgaggagcccgaggagaaagacgccaaccaaggcgagaagaaaaagaagaagcgggaccggcagatccagaagatcactaatgccatgcgggccttcgccttcaccaacctgctgctcgtgggctttggggtgacctgcctcattcccaacctgcctctccagatcctctccttcatcctgcacacaatcgtgcgaggattcatccactccgctgtcgggggcctgtacgctgccgtgtacccctccacccagttcggcagcctcacgggactgcagtctctgatcagcgcgctcttcgcccttctgcagcagccgctgtttctggccatgatgggtcctctccagggagaccctctgtgggtgaacgtggggctgctccttctcagcctgctgggcttctgcctcccgctctacctgatctgctaccggcgccagctggagcggcagctgcagcagaggcaggaggatgacaaactcttcctcaaaatcaacggctcgtccaaccaggaggccttcgtgtagtggctgccgcctcggaactgcggtctcctgcctgtgcttcagtgactgacccctgtcctgcccctccagagtaccccacgcacccccaggaccttcgccgtctccgtgccagcgttcacgctccctcccggggccctgcctcggagctctgtggtggaaggacgggagagggccccggacacgcgagttttctcctgccgaacgcaggggctgccctgactttgctctgccgccccccggggacccggggcctggggtctctgtggtgcctgcagcaggagccaggaacgcccggcaggcaggcgctctcccgccagtgtctggattctgcctcttgccaaagcagagggggctgccatcccctgcctgccacctgcccctcggctgcatgcccacagccgtacctgcctgaggacaaaggcttgcactgtctcgcccgcgcctggcccccaccccctccccggccagcctgaggctgcctgaggaaggaaggacccgcttcctgttgtcggtgctaattcctttgtaattccagccccctgtcgcctgtccagggcctgcccacccgttggaggccggtggagaagccccacctggcttatgccctggagagggtttagcgggctgggtggacccctcgcctcctccccgagggccaatgccgcggacacgttttcactgtcaccctcgttctgtctgccacctgaagggaatttgaggaccgccgccagggcaccccgtacatacacacagctgcttttgtggaggtggacgaaaggctgtggccggcagacgtggaggtccaggccggggtggggacgtgggtgggtccgaggggtgtgtggggtcggggtgggctctaggagttagcccttatccccactgaccaggcgggagccgccaggcctgcagctgggccagtgcccaggagccatcctggcgtggggccaggagcttgtccaaggccacaggcccacagcaccccctgccggcgggctccgtggggccctggagctgatgacgggggaggcccgtccgcctggcccaccaacccgcccaccttgactgcccccagaagtgtgtcttgagacctcctgggcgtgcttagaggggtgagttgtgtttggatttttagttattttctcttcagttttattagacttcttttttataaagcaataaatccattttcctccgggtaagggatgccccttctggcatatcagttaatagctgcatgtgcctattttgagcttgagaagaaaaggcaggacaagactctctgccaccgaccagctccagccgtgcccagctgctcttcgtctctctgggggactgctgactcgggagggacagtgggccaggaaaagaccttcctccccaacccccaaacaaactgggcttgtgcagacatcttagaagtgtgagccaccctcctctaccgattttcccagccaaacaggcgaatcctggtccctttccatccctacacccttccacaaccctgaagattcccgctgggttcttctgcagtctcagagcagttcaggatgtgggcggcagggagggggatgaaaggagaagaggaaagggcaggtccaggccacattcaagctccacattaacagcttgggcgcctggaacacatatctcctaggctttatttcactcaaatatttaaaaaaagactgggcgtggggcacgcctataatcccagcactttgggaggccaaggcaggaggctcacctgaggtcaggagttcgagaccatcctgaccaacatggagaaaccccgtctgtactaaaaataaacattaatcgg

SEQ ID NO: 263499 - DNA, 3868 bp, Homo sapiens
  misc_feature (261)..(261): n is a, c, g, or t
  misc_feature (282)..(282): n is a, c, g, or t
gtctcgggcgcgggcgggagggcacctgtcagggtccctgggagaggcagccctcggatctgcccctgcccacctcacgctgcgttccatgctggccccaggcgatgtcagtcctgctgcaggccaggactagttccacggccctgagcatgcgttagccccttcttgcctccatgcctcagtttacctcggagtgagctgcgggagacgtctccctgcctggccggggcggctctgtcgtagcggagggcagcggtacgnagccggccgcgggctcggggntgtcccaggtggtgcagagccggagccggagccggagccgcgccgcgccgcaccatggcgcccaccctggccactgcccatcggcgccgctggtggatggcctgcacggccgtgctggagaacctcctcttctcggcagtcctcctgggctggggctcgctgctcatcatgctcaagtcagagggcttttactcctacctgtgtaccgagccagagaatgtcaccaatggcacagtgggcggcacagcagagccggggcacgaggaggtgagctggatgaacggctggctcagctgccaggcccaggacgagatgctaaatttggccttcactgtgggctcctttctgctcagtgccatcaccctgcccctgggtatcgtcatggacaagtatggcccgaggaagctcaggctgctgggcagcgcctgcttcgcggtttcctgcttgctgattgcgtacggagcaagtaaaccaaacgctctctccgtgctcatcttcatcgccctggctctgaatggctttggtgggatgtgtatgaccttcacctcattaacactgcccaacatgttcggcgaccttcggtccacgtttattgccttgatgattgggtcctacgcctcctcggcagtcacctttccaggaatcaagctcatctatgatgctggtgtctccttcatcgtcgtcctcgtggtctgggccggctgctccgggctggttttcctcaactgcttctttaactggccccttgagcccttcccggggccggaggacatggactactcggtgaagatcaagttcagctggctgggctttgaccacaagatcacagggaagcagttctacaagcaggtgaccacggtgggccggcgcctgagtgtgggcagctccatgaggagtgccaaggagcaggtggcgctgcaggagggccacaagctgtgcctgtccaccgtcgacctggaggtgaagtgccagccggatgccgcagtggccccctccttcatgcacagcgtgttcagccccatcctgctgctcagcctggtcaccatgtgcgtcacgcagctgcggctcatcttctacatgggggctatgaacaacatcctcaagttcctggtcagcggcgaccagaagacagttggcctctacacctccatcttcggcgtgctccagctgctgtgcctgctgacggcccccgtcattggctacatcatggactggaggctgaaggagtgtgaagacgcctccgaggagcccgaggagaaagacgccaaccaaggcgagaagaaaaagaagaagcgggaccggcagatccagaagatcactaatgccatgcgggccttcgccttcaccaacctgctgctcgtgggctttggggtgacctgcctcattcccaacctgcctctccagatcctctccttcatcctgcacacaatcgtgcgaggattcatccactccgctgtcgggggcctgtacgctgccgtgtacccctccacccagttcggcagcctcacgggactgcagtctctgatcagcgcgctcttcgcccttctgcagcagccgctgtttctggccatgatgggtcctctccagggagaccctctgtgggtgaacgtggggctgctccttctcagcctgctgggcttctgcctcccgctctacctgatctgctaccggcgccagctggagcggcagctgcagcagaggcaggaggatgacaaactcttcctcaaaatcaacggctcgtccaaccaggaggccttcgtgtagtggctgccgcctcggaactgcggtctcctgcctgtgcttcagtgactgacccctgtcctgcccctccagagtaccccacgcacccccaggaccttcgccgtctccgtgccagcgttcacgctccctcccggggccctgcctcggagctctgtggtggaaggacgggagagggccccggacacgcgagttttctcctgccgaacgcaggggctgccctgactttgctctgccgccccccggggacccggggcctggggtctctgtggtgcctgcagcaggagccaggaacgcccggcaggcaggcgctctcccgccagtgtctggattctgcctcttgccaaagcagagggggctgccatcccctgcctgccacctgcccctcggctgcatgcccacagccgtacctgcctgaggacaaaggcttgcactgtctcgcccgcgcctggcccccaccccctccccggccagcctgaggctgcctgaggaaggaaggacccgcttcctgttgtcggtgctaattcctttgtaattccagccccctgtcgcctgtccagggcctgcccacccgttggaggccggtggagaagccccacctggcttatgccctggagagggtttagcgggctgggtggacccctcgcctcctccccgagggccaatgccgcggacacgttttcactgtcaccctcgttctgtctgccacctgaagggaatttgaggaccgccgccagggcaccccgtacatacacacagctgcttttgtggaggtggacgaaaggctgtggccggcagacgtggaggtccaggccggggtggggacgtgggtgggtccgaggggtgtgtggggtcggggtgggctctaggagttagcccttatccccactgaccaggcgggagccgccaggcctgcagctgggccagtgcccaggagccatcctggcgtggggccaggagcttgtccaaggccacaggcccacagcaccccctgccggcgggctccgtggggccctggagctgatgacgggggaggcccgtccgcctggcccaccaacccgcccaccttgactgcccccagaagtgtgtcttgagacctcctgggcgtgcttagaggggtgagttgtgtttggatttttagttattttctcttcagttttattagacttcttttttataaagcaataaatccattttcctccgggtaagggatgccccttctggcatatcagttaatagctgcatgtgcctattttgagcttgagaagaaaaggcaggacaagactctctgccaccgaccagctccagccgtgcccagctgctcttcgtctctctgggggactgctgactcgggagggacagtgggccaggaaaagaccttcctccccaacccccaaacaaactgggcttgtgcagacatcttagaagtgtgagccaccctcctctaccgattttcccagccaaacaggcgaatcctggtccctttccatccctacacccttccacaaccctgaagattcccgctgggttcttctgcagtctcagagcagttcaggatgtgggcggcagggagggggatgaaaggagaagaggaaagggcaggtccaggccacattcaagctccacattaacagcttgggcgcctggaacacatatctcctaggctttatttcactcaaatatttaaaaaaagactgggcgtggggcacgcctataatcccagcactttgggaggccaaggcaggaggctcacctgaggtcaggagttcgagaccatcctgaccaacatggagaaaccccgtctgtactaaaaataaacattaatcgg

SEQ ID NO: 263500 - DNA, 2108 bp, Homo sapiens
gcagtgttttcttcttggggtcggaataaaagggctggaataaaagagggcaggaaaaggcgccgggcgggcccgacacacgccggaggagccgggtggtgcagagccggagccggagccggagccgcgccgcgccgcaccatggcgcccaccctggccactgcccatcggcgccgctggtggatggcctgcacggccgtgctggagaacctcctcttctcggcagtcctcctgggctggggctcgctgctcatcatgctcaagtcagagggcttttactcctacctgtgtaccgagccagagaatgtcaccaatggcacagtgggcggcacagcagagccggggcacgaggaggtgagctggatgaacggctggctcagctgccaggcccaggacgagatgctaaatttggccttcactgtgggctcctttctgctcagtgccatcaccctgcccctgggtatcgtcatggacaagtatggcccgaggaagctcaggctgctgggcagcgcctgcttcgcggtttcctgcttgctgattgcgtacggagcaagtaaaccaaacgctctctccgtgctcatcttcatcgccctggctctgaatggctttggtgggatgtgtatgaccttcacctcattaacactgcccaacatgttcggcgaccttcggtccacgtttattgccttgatgattgggtcctacgcctcctcggcagtcacctttccaggaatcaagctcatctatgatgctggtgtctccttcatcgtcgtcctcgtggtctgggccggctgctccgggctggttttcctcaactgcttctttaactggccccttgagcccttcccggggccggaggacatggactactcggtgaagatcaagttcagctggctgggctttgaccacaagatcacagggaagcagttctacaagcaggtgaccacggtgggccggcgcctgagtgtgggcagctccatgaggagtgccaaggagcaggtggcgctgcaggagggccacaagctgtgcctgtccaccgtcgacctggaggtgaagtgccagccggatgccgcagtggccccctccttcatgcacagcgtgttcagccccatcctgctgctcagcctggtcaccatgtgcgtcacgcagctgcggctcatcttctacatgggggctatgaacaacatcctcaagttcctggtcagcggcgaccagaagacagttggcctctacacctccatcttcggcgtgctccagctgctgtgcctgctgacggcccccgtcattggctacatcatggactggaggctgaaggagtgtgaagacgcctccgaggagcccgaggagaaagacgccaaccaaggcgagaagaaaaagaagaagcgggaccggcagatccagaagatcactaatgccatgcgggccttcgccttcaccaacctgctgctcgtgggctttggggtgacctgcctcattcccaacctgcctctccagatcctctccttcatcctgcacacaatcgtgcgaggattcatccactccgctgtcgggggcctgtacgctgccgtgtacccctccacccagttcggcagcctcacgggactgcagtctctgatcagcgcgctcttcgcccttctgcagcagccgctgtttctggccatgatgggtcctctccagggagaccctctgtgggtgaacgtggggctgctccttctcagcctgctgggcttctgcctcccgctctacctgatctgctaccggcgccagctggagcggcagctgcagcagaggcaggaggatgacaaactcttcctcaaaatcaacggctcgtccaaccaggaggccttcgtgtagtggctgccgcctcggaactgcggtctcctgcctgcccaggcttcagtgcctgaccaggcttcagtgcctgaccaggcttcattgcctgaccaggcttcagtgcctgaccaggcttcagtgcctgaccaggcttcagtgcctgaccaggcttcagtgcctgaccaggcttcaggtgcctgaccaggcttcagttgcctgacacaggcttcagtgcctgaccaggcttcagtgcctgaccaggcttcaggtgcctgacc

SEQ ID NO: 263501 - DNA, 1669 bp, Homo sapiens
gcagtgttttcttcttggggtcggaataaaagggctggaataaaagagggcaggaaaaggcgccgggcgggcccgacacacgccggaggagccgggtggtgcagagccggagccggagccggagccgcgccgcgccgcaccatggcgcccaccctggccactgcccatcggcgccgctggtggatggcctgcacggccgtgctggagaacctcctcttctcggcagtcctcctgggctggggctcgctgctcatcatgctcaagtcagagggcttttactcctacctgtgtaccgagccagagaatgtcaccaatggcacagtgggcggcacagcagagccggggcacgaggaggtgagctggatgaacggctggctcagctgccaggcccaggacgagatgctaaatttggccttcactgtgggctcctttctgctcagtgccatcaccctgcccctgggtatcgtcatggacaagtatggcccgaggaagctcaggctgctgggcagcgcctgcttcgcggtttcctgcttgctgattgcgtacggagcaagtaaaccaaacgctctctccgtgctcatcttcatcgccctggctctgaatggctttggtgggatgtgtatgaccttcacctcattaacactgcccaacatgttcggcgaccttcggtccacgtttattgccttgatgattgggtcctacgcctcctcggcagtcacctttccaggaatcaagctcatctatgatgctggtgtctccttcatcgtcgtcctcgtggtctgggccggctgctccgggctggttttcctcaactgcttctttaactggccccttgagcccttcccggggccggaggacatggactactcggtgaagatcaagttcagctggctgggctttgaccacaagatcacagggaagcagttctacaagcaggtgaccacggtgggccggcgcctgagtgtgggcagctccatgaggagtgccaaggagcaggtggcgctgcaggagggccacaagctgtgcctgtccaccgtcgacctggaggtgaagtgccagccggatgccgcagtggccccctccttcatgcacagcgtgttcagccccatcctgctgctcagcctggtcaccatgtgcgtcacgcagctgcggctcatcttctacatgggggctatgaacaacatcctcaagttcctggtcagcggcgaccagaagacagttggcctctacacctccatcttcggcgtgctccagctgctgtgcctgctgacggcccccgtcattggctacatcatggactggaggctgaaggagtgtgaagacgcctccgaggagcccgaggagaaagacgccaaccagtgcgtaggccagggcggtgccccggctcccagcccgcagcccctgcagaaagaccccagagctgcatgtcaggcacagggtgggtgggacagagggagagagcaatgcactccagctcctcccggagcccttagagagactcactcattcagctcagcatgcgtttcaactgctcccctctttatggaaattgtttggaatgcaatggaaatgctaaagtttgaggccaggtgcggtgactcatgcctgtaatcccagcactttgaaaggctggggtaggaagatcacttgaggccaggagttggagacc

SEQ ID NO: 263502 - DNA, 724 bp, Homo sapiens
  misc_feature (261)..(261): n is a, c, g, or t
  misc_feature (282)..(282): n is a, c, g, or t
gtctcgggcgcgggcgggagggcacctgtcagggtccctgggagaggcagccctcggatctgcccctgcccacctcacgctgcgttccatgctggccccaggcgatgtcagtcctgctgcaggccaggactagttccacggccctgagcatgcgttagccccttcttgcctccatgcctcagtttacctcggagtgagctgcgggagacgtctccctgcctggccggggcggctctgtcgtagcggagggcagcggtacgnagccggccgcgggctcggggntgtcccaggtggtgcagagccggagccggagccggagccgcgccgcgccgcaccatggcgcccaccctggccactgcccatcggcgccgctggtggatggcctgcacggccgtgctggagaacctcctcttctcggcagtcctcctgggctggggctcgctgctcatcatgctcaagtcagagggcttttactcctacctgtgtaccgagccagagaatgtcaccaatggcacagtgggcggcacagcagagccggggcacgaggaggtgagctggatgaacggctggctcagctgccaggcccaggacgagatgctaaatttggccttcactgtgggctcctttctgctcagtgccatcaccctgctgggctcatacattgagctgcccagcatacactcaagttgcctcccggagccgtgctagctcctcgctgatctta

SEQ ID NO: 263503 - DNA, 410 bp, Homo sapiens
ttgcttgaatccaggaggcggagttgcggtgagccaagatcacgccactgcactccagcctgggcgacaaagcaagacttcttctcaaacaaaacaaaaaacaaaacaaacaaacaaacaaaaaatgactgtgttaacgactggcttgcaaaatttctgaaaattcacaattggctccggaggatggggttgatccaactccaggctgacactgcccctggggtgagggcccccaggaattggagggcgggggctgaggggacggtcccttaaggccttatgcccacagtcgccttttcctcccccagatcctctccttcatcctgcacacaatcgtgcgaggattcatccactccgctgtcgggggcctgtacgctgccgtgtaagtcctggaagccgcaggtggcctg

SEQ ID NO: 263504 - DNA, 208 bp, Homo sapiens
gggctccgtggggccctggagctgatgacgggggaggcccgtccgcctggcccaccaacccgcccaccttgactgcccccagaagtgtgtcttgagacctcctgggcgtgcttagaggggtgagttgtgtttggatttttagttattttctcttcagttttattagacttcttttttataaagcaataaatccattttcctccgggta

SEQ ID NO: 263505 - DNA, 3673 bp, Homo sapiens
gcagtgttttcttcttggggtcggaataaaagggctggaataaaagagggcaggaaaaggcgccgggcgggcccgacacacgccggaggagccgggtggtgcagagccggagccggagccggagccgcgccgcgccgcaccatggcgcccaccctggccactgcccatcggcgccgctggtggatggcctgcacggccgtgctggagaacctcctcttctcggcagtcctcctgggctggggctcgctgctcatcatgctcaagtcagagggcttttactcctacctgtgtaccgagccagagaatgtcaccaatggcacagtgggcggcacagcagagccggggcacgaggaggtgagctggatgaacggctggctcagctgccaggcccaggacgagatgctaaatttggccttcactgtgggctcctttctgctcagtgccatcaccctgcccctgggtatcgtcatggacaagtatggcccgaggaagctcaggctgctgggcagcgcctgcttcgcggtttcctgcttgctgattgcgtacggagcaagtaaaccaaacgctctctccgtgctcatcttcatcgccctggctctgaatggctttggtgggatgtgtatgaccttcacctcattaacactgcccaacatgttcggcgaccttcggtccacgtttattgccttgatgattgggtcctacgcctcctcggcagtcacctttccaggaatcaagctcatctatgatgctggtgtctccttcatcgtcgtcctcgtggtctgggccggctgctccgggctggttttcctcaactgcttctttaactggccccttgagcccttcccggggccggaggacatggactactcggtgaagatcaagttcagctggctgggctttgaccacaagatcacagggaagcagttctacaagcaggtgaccacggtgggccggcgcctgagtgtgggcagctccatgaggagtgccaaggagcaggtggcgctgcaggagggccacaagctgtgcctgtccaccgtcgacctggaggtgaagtgccagccggatgccgcagtggccccctccttcatgcacagcgtgttcagccccatcctgctgctcagcctggtcaccatgtgcgtcacgcagctgcggctcatcttctacatgggggctatgaacaacatcctcaagttcctggtcagcggcgaccagaagacagttggcctctacacctccatcttcggcgtgctccagctgctgtgcctgctgacggcccccgtcattggctacatcatggactggaggctgaaggagtgtgaagacgcctccgaggagcccgaggagaaagacgccaaccaaggcgagaagaaaaagaagaagcgggaccggcagatccagaagatcactaatgccatgcgggccttcgccttcaccaacctgctgctcgtgggctttggggtgacctgcctcattcccaacctgcctctccagatcctctccttcatcctgcacacaatcgtgcgaggattcatccactccgctgtcgggggcctgtacgctgccgtgtacccctccacccagttcggcagcctcacgggactgcagtctctgatcagcgcgctcttcgcccttctgcagcagccgctgtttctggccatgatgggtcctctccagggagaccctctgtgggtgaacgtggggctgctccttctcagcctgctgggcttctgcctcccgctctacctgatctgctaccggcgccagctggagcggcagctgcagcagaggcaggaggatgacaaactcttcctcaaaatcaacggctcgtccaaccaggaggccttcgtgtagtggctgccgcctcggaactgcggtctcctgcctgtgcttcagtgactgacccctgtcctgcccctccagagtaccccacgcacccccaggaccttcgccgtctccgtgccagcgttcacgctccctcccggggccctgcctcggagctctgtggtggaaggacgggagagggccccggacacgcgagttttctcctgccgaacgcaggggctgccctgactttgctctgccgccccccggggacccggggcctggggtctctgtggtgcctgcagcaggagccaggaacgcccggcaggcaggcgctctcccgccagtgtctggattctgcctcttgccaaagcagagggggctgccatcccctgcctgccacctgcccctcggctgcatgcccacagccgtacctgcctgaggacaaaggcttgcactgtctcgcccgcgcctggcccccaccccctccccggccagcctgaggctgcctgaggaaggaaggacccgcttcctgttgtcggtgctaattcctttgtaattccagccccctgtcgcctgtccagggcctgcccacccgttggaggccggtggagaagccccacctggcttatgccctggagagggtttagcgggctgggtggacccctcgcctcctccccgagggccaatgccgcggacacgttttcactgtcaccctcgttctgtctgccacctgaagggaatttgaggaccgccgccagggcaccccgtacatacacacagctgcttttgtggaggtggacgaaaggctgtggccggcagacgtggaggtccaggccggggtggggacgtgggtgggtccgaggggtgtgtggggtcggggtgggctctaggagttagcccttatccccactgaccaggcgggagccgccaggcctgcagctgggccagtgcccaggagccatcctggcgtggggccaggagcttgtccaaggccacaggcccacagcaccccctgccggcgggctccgtggggccctggagctgatgacgggggaggcccgtccgcctggcccaccaacccgcccaccttgactgcccccagaagtgtgtcttgagacctcctgggcgtgcttagaggggtgagttgtgtttggatttttagttattttctcttcagttttattagacttcttttttataaagcaataaatccattttcctccgggtaagggatgccccttctggcatatcagttaatagctgcatgtgcctattttgagcttgagaagaaaaggcaggacaagactctctgccaccgaccagctccagccgtgcccagctgctcttcgtctctctgggggactgctgactcgggagggacagtgggccaggaaaagaccttcctccccaacccccaaacaaactgggcttgtgcagacatcttagaagtgtgagccaccctcctctaccgattttcccagccaaacaggcgaatcctggtccctttccatccctacacccttccacaaccctgaagattcccgctgggttcttctgcagtctcagagcagttcaggatgtgggcggcagggagggggatgaaaggagaagaggaaagggcaggtccaggccacattcaagctccacattaacagcttgggcgcctggaacacatatctcctaggctttatttcactcaaatatttaaaaaaagactgggcgtggggcacgcctataatcccagcactttgggaggccaaggcaggaggctcacctgaggtcaggagttcgagaccatcctgaccaacatggagaaaccccgtctgtactaaaaataaacattaatcgg

SEQ ID NO: 263506 - DNA, 3533 bp, Homo sapiens
gcagtgttttcttcttggggtcggaataaaagggctggaataaaagagggcaggaaaaggcgccgggcgggcccgacacacgccggaggagccgggtggtgcagagccggagccggagccggagccgcgccgcgccgcaccatggcgcccaccctggccactgcccatcggcgccgctggtggatggcctgcacggccgtgctggagaacctcctcttctcggcagtcctcctgggctggggctcgctgctcatcatgctcaagtcagagggcttttactcctacctgtgtaccgagccagagaatgtcaccaatggcacagtgggcggcacagcagagccggggcacgaggaggtgagctggatgaacggctggctcagctgccaggcccaggacgagatgctaaatttggccttcactgtgggctcctttctgctcagtgccatcaccctgcccctgggtatcgtcatggacaagtatggcccgaggaagctcaggctgctgggcagcgcctgcttcgcggtttcctgcttgctgattgcgtacggagcaagtaaaccaaacgctctctccgtgctcatcttcatcgccctggctctgaatggctttggtgggatgtgtatgaccttcacctcattaacactgcccaacatgttcggcgaccttcggtccacgtttattgccttgatgattgggtcctacgcctcctcggcagtcacctttccaggaatcaagctcatctatgatgctggtgtctccttcatcgtcgtcctcgtggtctgggccggctgctccgggctggttttcctcaactgcttctttaactggccccttgagcccttcccggggccggaggacatggactactcggtgaagatcaagttcagctggctgggctttgaccacaagatcacagggaagcagttctacaagcaggtgaccacggtgggccggcgcctgagtgtgggcagctccatgaggagtgccaaggagcaggtggcgctgcaggagggccacaagctgtgcctgtccaccgtcgacctggaggtgaagtgccagccggatgccgcagtggccccctccttcatgcacagcgtgttcagccccatcctgctgctcagcctggtcaccatgtgcgtcacgcagctgcggctcatcttctacatgggggctatgaacaacatcctcaagttcctggtcagcggcgaccagaagacagttggcctctacacctccatcttcggcgtgctccagctgctgtgcctgctgacggcccccgtcattggctacatcatggactggaggctgaaggagtgtgaagacgcctccgaggagcccgaggagaaagacgccaaccaaggcgagaagaaaaagaagaagcgggaccggcagatccagaagatcactaatgccatgcgggccttcgccttcaccaacctgctgctcgtgggctttggggtgacctgcctcattcccaacctgcctctccagatcctctccttcatcctgcacacaatcgtgcgaggattcatccactccgctgtcgggggcctgtacgctgccgtgtacccctccacccagttcggcagcctcacgggactgcagtctctgatcagcgcgctcttcgcccttctgcagcagccgctgtttctggccatgatgggtcctctccagggagaccctctgtgggtgaacgtggggctgctccttctcagcctgctgggcttctgcctcccgctctacctgatctgctaccggcgccagctggagcggcagctgcagcagaggcaggaggatgacaaactcttcctcaaaatcaacggctcgtccaaccaggaggccttcgtgtagtggctgccgcctcggaactgcggtctcctgcctgtgcttcagtgactgacccctgtcctgcccctccagagtaccccacgcacccccaggaccttcgccgtctccgtgccagcgttcacgctccctcccggggccctgcctcggagctctgtggtggaaggacgggagagggccccggacacgcgagttttctcctgccgaacgcaggggctgccctgactttgctctgccgcctgcccctcggctgcatgcccacagccgtacctgcctgaggacaaaggcttgcactgtctcgcccgcgcctggcccccaccccctccccggccagcctgaggctgcctgaggaaggaaggacccgcttcctgttgtcggtgctaattcctttgtaattccagccccctgtcgcctgtccagggcctgcccacccgttggaggccggtggagaagccccacctggcttatgccctggagagggtttagcgggctgggtggacccctcgcctcctccccgagggccaatgccgcggacacgttttcactgtcaccctcgttctgtctgccacctgaagggaatttgaggaccgccgccagggcaccccgtacatacacacagctgcttttgtggaggtggacgaaaggctgtggccggcagacgtggaggtccaggccggggtggggacgtgggtgggtccgaggggtgtgtggggtcggggtgggctctaggagttagcccttatccccactgaccaggcgggagccgccaggcctgcagctgggccagtgcccaggagccatcctggcgtggggccaggagcttgtccaaggccacaggcccacagcaccccctgccggcgggctccgtggggccctggagctgatgacgggggaggcccgtccgcctggcccaccaacccgcccaccttgactgcccccagaagtgtgtcttgagacctcctgggcgtgcttagaggggtgagttgtgtttggatttttagttattttctcttcagttttattagacttcttttttataaagcaataaatccattttcctccgggtaagggatgccccttctggcatatcagttaatagctgcatgtgcctattttgagcttgagaagaaaaggcaggacaagactctctgccaccgaccagctccagccgtgcccagctgctcttcgtctctctgggggactgctgactcgggagggacagtgggccaggaaaagaccttcctccccaacccccaaacaaactgggcttgtgcagacatcttagaagtgtgagccaccctcctctaccgattttcccagccaaacaggcgaatcctggtccctttccatccctacacccttccacaaccctgaagattcccgctgggttcttctgcagtctcagagcagttcaggatgtgggcggcagggagggggatgaaaggagaagaggaaagggcaggtccaggccacattcaagctccacattaacagcttgggcgcctggaacacatatctcctaggctttatttcactcaaatatttaaaaaaagactgggcgtggggcacgcctataatcccagcactttgggaggccaaggcaggaggctcacctgaggtcaggagttcgagaccatcctgaccaacatggagaaaccccgtctgtactaaaaataaacattaatcgg

SEQ ID NO: 263507 - DNA, 2357 bp, Homo sapiens
gatccctcggcaggtgtctgcccgaggagaagacgccaaccaaggcgagaagaaaaagaagaagcgggaccggcagatccagaagatcactaatgccatgcgggccttcgccttcaccaacctgctgctcgtgggctttggggtgacctgcctcattcccaacctgcctctccagatcctctccttcatcctgcacacaatcgtgcgaggattcatccactccgctgtcgggggcctgtacgctgccgtgtacccctccacccagttcggcagcctcacgggactgcagtctctgatcagcgcgctcttcgcccttctgcagcagccgctgtttctggccatgatgggtcctctccagggagaccctctgtgggtgaacgtggggctgctccttctcagcctgctgggcttctgcctcccgctctacctgatctgctaccggcgccagctggagcggcagctgcagcagaggcaggaggatgacaaactcttcctcaaaatcaacggctcgtccaaccaggaggccttcgtgtagtggctgccgcctcggaactgcggtctcctgcctgtgcttcagtgactgacccctgtcctgcccctccagagtaccccacgcacccccaggaccttcgccgtctccgtgccagcgttcacgctccctcccggggccctgcctcggagctctgtggtggaaggacgggagagggccccggacacgcgagttttctcctgccgaacgcaggggctgccctgactttgctctgccgccccccggggacccggggcctggggtctctgtggtgcctgcagcaggagccaggaacgcccggcaggcaggcgctctcccgccagtgtctggattctgcctcttgccaaagcagagggggctgccatcccctgcctgccacctgcccctcggctgcatgcccacagccgtacctgcctgaggacaaaggcttgcactgtctcgcccgcgcctggcccccaccccctccccggccagcctgaggctgcctgaggaaggaaggacccgcttcctgttgtcggtgctaattcctttgtaattccagccccctgtcgcctgtccagggcctgcccacccgttggaggccggtggagaagccccacctggcttatgccctggagagggtttagcgggctgggtggacccctcgcctcctccccgagggccaatgccgcggacacgttttcactgtcaccctcgttctgtctgccacctgaagggaatttgaggaccgccgccagggcaccccgtacatacacacagctgcttttgtggaggtggacgaaaggctgtggccggcagacgtggaggtccaggccggggtggggacgtgggtgggtccgaggggtgtgtggggtcggggtgggctctaggagttagcccttatccccactgaccaggcgggagccgccaggcctgcagctgggccagtgcccaggagccatcctggcgtggggccaggagcttgtccaaggccacaggcccacagcaccccctgccggcgggctccgtggggccctggagctgatgacgggggaggcccgtccgcctggcccaccaacccgcccaccttgactgcccccagaagtgtgtcttgagacctcctgggcgtgcttagaggggtgagttgtgtttggatttttagttattttctcttcagttttattagacttcttttttataaagcaataaatccattttcctccgggtaagggatgccccttctggcatatcagttaatagctgcatgtgcctattttgagcttgagaagaaaaggcaggacaagactctctgccaccgaccagctccagccgtgcccagctgctcttcgtctctctgggggactgctgactcgggagggacagtgggccaggaaaagaccttcctccccaacccccaaacaaactgggcttgtgcagacatcttagaagtgtgagccaccctcctctaccgattttcccagccaaacaggcgaatcctggtccctttccatccctacacccttccacaaccctgaagattcccgctgggttcttctgcagtctcagagcagttcaggatgtgggcggcagggagggggatgaaaggagaagaggaaagggcaggtccaggccacattcaagctccacattaacagcttgggcgcctggaacacatatctcctaggctttatttcactcaaatatttaaaaaaagactgggcgtggggcacgcctataatcccagcactttgggaggccaaggcaggaggctcacctgaggtcaggagttcgagaccatcctgaccaacatggagaaaccccgtctgtactaaaaataaacattaatcgg

SEQ ID NO: 263508 - DNA, 2034 bp, Homo sapiens
tgccgctccagctggcgccggtagcagatcaggtagagcgggaggcagaagcccagcaggctgagaaggagcagccccacgttcacccacagagggtctccctggagaggacccatcatggccagaaacagcggcagctgcagcagaggcaggaggatgacaaactcttcctcaaaatcaacggctcgtccaaccaggaggccttcgtgtagtggctgccgcctcggaactgcggtctcctgcctgtgcttcagtgactgacccctgtcctgcccctccagagtaccccacgcacccccaggaccttcgccgtctccgtgccagcgttcacgctccctcccggggccctgcctcggagctctgtggtggaaggacgggagagggccccggacacgcgagttttctcctgccgaacgcaggggctgccctgactttgctctgccgccccccggggacccggggcctggggtctctgtggtgcctgcagcaggagccaggaacgcccggcaggcaggcgctctcccgccagtgtctggattctgcctcttgccaaagcagagggggctgccatcccctgcctgccacctgcccctcggctgcatgcccacagccgtacctgcctgaggacaaaggcttgcactgtctcgcccgcgcctggcccccaccccctccccggccagcctgaggctgcctgaggaaggaaggacccgcttcctgttgtcggtgctaattcctttgtaattccagccccctgtcgcctgtccagggcctgcccacccgttggaggccggtggagaagccccacctggcttatgccctggagagggtttagcgggctgggtggacccctcgcctcctccccgagggccaatgccgcggacacgttttcactgtcaccctcgttctgtctgccacctgaagggaatttgaggaccgccgccagggcaccccgtacatacacacagctgcttttgtggaggtggacgaaaggctgtggccggcagacgtggaggtccaggccggggtggggacgtgggtgggtccgaggggtgtgtggggtcggggtgggctctaggagttagcccttatccccactgaccaggcgggagccgccaggcctgcagctgggccagtgcccaggagccatcctggcgtggggccaggagcttgtccaaggccacaggcccacagcaccccctgccggcgggctccgtggggccctggagctgatgacgggggaggcccgtccgcctggcccaccaacccgcccaccttgactgcccccagaagtgtgtcttgagacctcctgggcgtgcttagaggggtgagttgtgtttggatttttagttattttctcttcagttttattagacttcttttttataaagcaataaatccattttcctccgggtaagggatgccccttctggcatatcagttaatagctgcatgtgcctattttgagcttgagaagaaaaggcaggacaagactctctgccaccgaccagctccagccgtgcccagctgctcttcgtctctctgggggactgctgactcgggagggacagtgggccaggaaaagaccttcctccccaacccccaaacaaactgggcttgtgcagacatcttagaagtgtgagccaccctcctctaccgattttcccagccaaacaggcgaatcctggtccctttccatccctacacccttccacaaccctgaagattcccgctgggttcttctgcagtctcagagcagttcaggatgtgggcggcagggagggggatgaaaggagaagaggaaagggcaggtccaggccacattcaagctccacattaacagcttgggcgcctggaacacatatctcctaggctttatttcactcaaatatttaaaaaaagactgggcgtggggcacgcctataatcccagcactttgggaggccaaggcaggaggctcacctgaggtcaggagttcgagaccatcctgaccaacatggagaaaccccgtctgtactaaaaataaacattaatcgg

SEQ ID NO: 263509 - DNA, 1140 bp, Homo sapiens
gtctcgggcgcgggcgggagggcacctgtcagggtccctgggagaggcagccctcggatctgcccctgcccacctcacgctgcgttccatgctggccccaggcgatgtcagtcctgctgcaggccaggactagttccacggccctgagcatgcgttagccccttcttgcctccatgcctcagtttacctcggagtgagctgcgggagacgtctccctgcctggccggggcggctctgtcgtagcggagggcagcggtggtgcagagccggagccggagccggagccgcgccgcgccgcaccatggcgcccaccctggccactgcccatcggcgccgctggtggatggcctgcacggccgtgctggagaacctcctcttctcggcagtcctcctgggctggggctcgctgctcatcatgctcaagtcagagggcttttactcctacctgtgtaccgagccagagaatgtcaccaatggcacagtgggcggcacagcagagccggggcacgaggaggtgagctggatgaacggctggctcagctgccaggcccaggacgagatgctaaatttggccttcactgtgggctcctttctgctcagtgccatcaccctgcccctgggtatcgtcatggacaagtatggcccgaggaagctcaggctgctgggcaggtcagtgtgggtcccttagggggcagggagtgggcaggtggaccccctgggctgagttccccacagaagggtatcctggtcgtacctgatatcaggtgtactgtggagctccctgaaggccctccagaatggagttcctaccccgtccgccaccgaatcagcaggtactgtggtcctcgccgtgctccagtactgaataagaaaagctccaggctccaggccgcccagggaccggagctgcttgtcactaagaacatgtgtttcccatccctttgtagttcataagcatgataattggggtttccctcgcatgtgtgagacatgcttccctcaaaccttgttacgaagctggcacagtatccatctgatgagaaaaaaaaccaacaacactggtttccacagcccgtttgaccttataactccagcccgggtgacagagcaaggctctgtctcaagaaaaaccaaaaacca

SEQ ID NO: 263510 - DNA, 291 bp, Homo sapiens
accttggagctattcacagttccactctccacagatgcagccctgacactatgccacctgctgagctcctgggtgtcactggagagcctcacactctcctacaatggcctgggctctaacatcttccgcctgctagacagcctgcgtgccctgtcaggccaggctggatgtcgcctccgtgccctgcatctcagtatcctgggaaccctgggccaggaggttacagtggtcatcataattgctgaagagatcccctcccctgcccctgggttcctgccttccctcctcaag

SEQ ID NO: 263511 - DNA, 798 bp, Homo sapiens
ttattttcccccttgaaaccaaagagatgtggaacaaatgccttttctgtaactgagtttttgtctcatttgaagttagggtgcttagaagcccgtgagctaatgatgctaatttccccatcagaacaagtgaagagccggagttctcccagctgagggcactggatgggtgaacacgtcttgtggatggactctatccgtgtcatttcgccaacgataaaaataactctagagaagggaattttgttttacactgaagggaaaccagagttccagattgctaattttttttaagttctcattaacatttgttctttaagcccatgcgtatacttcttcccattgggataacaaagggtatggttctaattagttattggctggcatttctctaaagaaaattgaaaaattatggtggggaaagaaaatgctgtgtggtatttctttttttcttttattaatttctcctttatatagttaaaaaaaacctggggatgaccgtatatgttaagcctgcattttgcctggttcctctcaccttgacaggaactgtgagaaaacaccaaaaaaaaaaggacaaaaatgtaaaaaaacattctttatacaaaattgtcctgtttctgcctgttgtcatggtaggtacaaaagtaattgaagcttaatttttttggcttccaaaacacatattatttcagcttccaaaacacacattattatatagctgtgcataaattgtaattagatggtaatagaactttgagagcatttataacaatttcatcagcaaatctataatcc

SEQ ID NO: 263512 - DNA, 258 bp, Homo sapiens
ctttctcttccctttccaacaaagatctagattccaagtagtgatctttttgatgagtcctctatcaaactatgacacatgtgaagaacatacctgaacaaccctcagggataatgcaggattttttgagaaagttccagggtatctcctgatgtcagtgtactttcagtcctacacctcagcctcccgaaatatgtggattacttgtgtaagccactgtgcccagccttacctgctttaaaaacaaacaaacgagca

SEQ ID NO: 263513 - DNA, 463 bp, Homo sapiens
gggcagtagtagttctctacttaattcaggtctcatgattttcaaattgtaattaataaatcctacatgaatagccccataattgcaactgtttagagtattagcaaagaagactagagaattgaatactttcttaaattttatttcttgtaaataatatactaaatgagtaaacagttattttaattttgatatattacctctaactataattgactgaataggcaagttgttaataaaatactatttaaggaggctgaataatgttaatgaatctattgatatactttaatgataaagtagatagtatttcagtgaatataaatataattgttttatttatttgtttatttatactacttccagagaggacttacacatcttccagtaaaaatacagtattattctggtcattaacatttattaatacatccatcaagtaataaagggagataaaaaaaaa

SEQ ID NO: 263514 - DNA, 203 bp, Homo sapiens
ggaaattaaaaaattccttgatctgaatgacaataatgacaaaacctatcaaaacctctgggatacagctaaggcggtgttaagaggaatgttcatagccataaacacctacatcaaagagtctgaaagagcacaaacagacaacctaagatcacacctcaaggaactacagaaacaagaacaaaccacatccaaacccagta

SEQ ID NO: 263515 - DNA, 1628 bp, Homo sapiens
aggagcaggggagacctatcagtagggtgaccacgtgtcctttgcctgggcagtccaggtttatgcttgttttccagtgaattagacccccttccacttttcaaaaaagtcctggtttagatgctgtgatcaccaaacatatcaggaaacaatattccttggtcttgcttccctatcttcaggtactggtgggccaaattcctgggaccaggtcaaggtgggctgcctcagtaagaaggaaggactggagagtgcccatttcagaggagcaggctggtgggggccagccagaaagtagttccctttggggggaagatgttggacctttattatttgtggtaaccagccgaggctggttgtcaggacagcaggtgagccactttagggaagaaagtgcaggggtgggtggatgcccagattaccaaggccagccaccctgatggggtagggtctggttatctgtgttcaagaagcaaatcccaccccagccccagcactagctctctatgtatgtattttccctgtacaatgttttataaaagagatcattaatttatctgctatgttaaggctcgaggggtggggcgtagactctcagctgtatattgctctggggtgggcagggaaggctgagtctcacttgacttggaagataaacaggccagtttggactggcctccagctccgtggctgtgtttgtctaacaaggatttgggtaactactggatacaagccactgtgcttagtatggatagactgccatcagctcacccacatgactcctgttcatggcaagctaatagtctgtctggtggaagaggattgaaaaagcacacaaaaacatcataaattacaaggagtagtaagaaggaaaaaacagggaacgtgagagaataactagcgagtggggagaggagtggatttactttaacagggtagtcagggaaggcctcttgtggtggtgacatactgatttaggcaaagcatccagcacgtgcctagcgcttagtagttgctcagcaaatggcatctttgggtgatgaatacctcacatttgtatatggcctgtcacagttttccataaagcttttttttttaaggccatcttgacgtcatacttttagaatattttattttattattattattattttggacggaaccttgctctttcaccaggctggagtggaggttgcagtgagccgagattgcacaattgcactccagcctggcgacagagcgagactcgtctcaaaaaaaaaaacacaaagaggggggcacactccgcgataagaggaggaaccgtgatctcttatacagaagatctctctccattttaatgtgccacaaataaccgcctcgacctcctggctataattgaagcacaccccaatatttgattaaacaaagccatgggcaatcccatatgaagggggcagggtataggtcgggcaaaataaaatgcgtagccctttttcacaaggaacctcaccctatccccatagtttttagaccccccattatttaaagcgcgcggcgaccgaaatatggcgcacatcccatggagcgcacataaagacctctattacaatagacaagcgacccgctacctccaaaaagaagggttg

SEQ ID NO: 263516 - DNA, 1104 bp, Homo sapiens
aggagcaggggagacctatcagtagggtgaccacgtgtcctttgcctgggcagtccaggtttatgcttgttttccagtgaattagacccccttccacttttcaaaaaagtcctggtttagatgctgtgatcaccaaacatatcaggaaacaatattccttggtcttgcttccctatcttcaggtactggtgggccaaattcctgggaccaggtcaaggtgggctgcctcagtaagaaggaaggactggagagtgcccatttcagaggagcaggctggtgggggccagccagaaagtagttccctttggggggaagatgttggacctttattatttgtggtaaccagccgaggctggttgtcaggacagcaggtgagccactttagggaagaaagtgcaggggtgggtggatgcccagattaccaaggccagccaccctgatggggtagggtctggttatctgtgttcaagaagcaaatcccaccccagccccagcactagctctctatgtatgtattttccctgtacaatgttttataaaagagatcattaatttatctgctatgttaaggctcgaggggtggggcgtagactctcagctgtatattgctctggggtgggcagggaaggctgagtctcacttgacttggaagataaacaggccagtttggactggcctccagctccgtggctgtgtttgtctaacaaggatttgggtaactactggatacaagccactgtgcttagtatggatagactgccatcagctcacccacatgactcctgttcatggcaagctaatagtctgtctggtggaagaggattgaaaaagcacacaaaaacatcataaattacaaggagtagtaagaaggaaaaaacagggaacgtgagagaataactagcgagtggggagaggagtggatttactttaacagggtagtcagggaaggcctcttgtggtggtgacatactgatttaggcaaagcatccagcacgtgcctagcgcttagtagttgctcagcaaatggcatctttgggtgatgaatacctcacatttgtatatggcctgtcacagttttccataaagcttttttttttaaggcca

SEQ ID NO: 263517 - DNA, 465 bp, Homo sapiens
ctgagatttgggagagaccaggggcagaatgatatggttaggctttgtgttcccacccaaatctcatcttgaattataatccccataatcccctcgtgtaagagagagaccaggtggaggtaactggatgatgggggtcgtttcccccatggtgttctttcgatagtgagtgagttctcacgagatctgatggttttataagtgtctggtcattcctctggcattgtccttcctgccgccttatgaagaaggtgccttgcttccccttcaccttccaccatgattataagtttcctgaggcctccccagccttgctgaactgtgagttgattaaacctctttccattataaattacccagtcttagtaattatagcagtgtgaaaacatactaatatggggaggatagcttgagcccaggagtttgagaccagcctgggcaacacagcaagaccctcatctcttc

SEQ ID NO: 263518 - DNA, 297 bp, Homo sapiens
gaaggtgaccttgagtcctcagctgttgctattgttatcctctccggtgcattctaaagttccctcactcttccaagaacccttgactatgcttgtcttgatcgcttatctaattgtgacccagaatgtcatccctgagaggtctgacttcctgatcaccatgtccttcttagtccatgaccactgtacttgtcaattttctgtcaagatatggcaaggaggtaccaaaagacaccccagtgattatactcttccctgtcatggtaaaaactgtgtatctgcagccccactgctcta

SEQ ID NO: 263519 - DNA, 194 bp, Homo sapiens
acttaattcatcaacactgacatagattgcattaaaaacctttccatggatctactcttcctatgtaaaactcagagacatgccttttccatgctcctaaaacagtagccatgagaaagtagcttaagcccaggaggcagaggtacagtgagccaagatcgtgccactgcaccccagcctggataacacttctc

SEQ ID NO: 263520 - DNA, 445 bp, Homo sapiens
gtgccactgcactccagccagggcaacagagtgagatcctgtctctaaaaaagaagaaaaaaaggaatgaaaaatagttaagcttctttggaaggcagtttgggagaatttatcaaaattggaaatatacatagtttttgattcattgattatgctttaagaattgattctagccaggtgcagtggctcatgcctataatcccagcactttgggagggcaaagcaggaggattgcttgagcccagtagttcaagtccagcctgggcaacatgacaaaatcccatctctacataaatacaaaaattagccagcaatggtggtgcacacctttagtcccagctactgggaggctgaggcaggaggattgattgagttcgggtggtcaaggccacaaaaagccgcgattgcaccactgtacttcagcctgggcaacagaacaagacac

SEQ ID NO: 263521 - DNA, 471 bp, Homo sapiens
acatcagctcctctccagtggcaggacactaatactagaaaaacgccagctcctcccgggttctacagctgtgcgaccctcaaacaaaagaaacaccagctcctctctgggtctgcagctgcaggaacctcaaactaggacacctctccccctggatctccagctccacgaccctcacagaggaacagccacatcagctccttcattgccttcagctccacaatctaagacatcagtggcagcaccagctcctccgtggacgtccagctcaacgactctcagacttaaaaggcagcatcggcccctccccaaggctccagctccaccaccctcaggtttgaacagcggaatcactagctgccgtccaagtcttccgccccacaaccctccctgaacaatcccttctcatgaaattcagcagtcaagaaaactgcagcagaagtaaatgaataaatgttttgttttcaaatc

SEQ ID NO: 263522 - DNA, 1142 bp, Homo sapiens
gggctgtagcaggagacctgcggctgcatctcccaggccttccggcggggccgaggcacacaatactgagaccagaataaagcagtgcatttactaccttgtgaagaatgttcaggtgttcagtgggcttgatccagtcaggtgaaggtctgaagagaaaaaaagaccgtcctcttcccagaacaagagaatcctccaacagatacctttggactggaccttgcaccatcagctttcctgagtttccagcctcctgcctcacactccagcttttggacttgttagacttaataataacaacacaagccaatccttttaaggaagtttgtctggagaatcttgacaaacacaaacatctactgagagttcctgtccaagttttgctcacaccctagcaagaggcttctggcttaccagttgagagtgtgaggttctttgcttgtaagacctgatccaccagcggtacaccagctctggcccagggcaagacagggaatttcccaatcactgagtaggctgtagccactctctccattaggcctgacttcaccatggggaaggggagaccctttcaagggtattctttcctggggtactctcagtcctaggacatcatagctctctttcatccctcttaaaagttaataccattatcagttaacagttttttatattaaaattatccctgttcaagttaatggtatggtttctgtatcctgactggatattaggatacagtatttactgtcttatttctactactttatgtttaaagtttttcataatatttaaactgaagttttgatcattcattaaatatttacacagaacaggacaaaggatgattttcctttgtctagttattgtaaggtagcgtccaagatttaccaccacatcatgattacagatggtcaccaacttatgttttaggattttttgactttatgatgggtttatagggatgcagccccatttcaagctgaggagctccttagggcttaggaatcatacctctttcacaccatggtaaagttggaaaattgttaagtcaagctgtcattaattaggagactgctgtgttgctaacgttatatgcatttttaacttatgacgggtttattgggaattaaccacaatgtaaa

SEQ ID NO: 263523 - DNA, 1796 bp, Homo sapiens
gggctgtagcaggagacctgcggctgcatctcccaggccttccggcggggccgaggcacacaatactgagaccagaataaagcagtgcatttactaccttgtgaagaatgttcaggtgttcaggtatggtatcttcattttgtgctgctataacagaatacaggagactgggtaatttgtaaggaacagaaatgtatttctcacagttctggaggatgggaagtctaagatcaaggagctggcacttgttgactagggctttcttgctgtgttctcacatacagaaggcaagctagcaggatgctccctgaaacctcttttattatgggccttcatcccagtcctaagagaatccctcatggcctagtgatctcttaaagaccccacctcttgatgctgtcacattggcaacacttgaatttgaggggacacatacaagccatagcaaactgaacatttctcccatgccagatagcaccatgttctttgtcagtaggtggtggtagaggggcactgcaggataaaggggcttctttcacttctaagatgatactgtgacagttaattttatgtgtcaacttggcggggccacaggtgcctagctactgggtcatactttttttttttttttttttagagatttaacttttgctctgattttccaattataaggtcaaacattattctaggtgtttctgtgagggtgttttatatgagattgacatttaaatcaatcagtgaactctgagtaatgcagactgtcctcctcgatgttagtgggcttgatccagtcaggtgaaggtctgaagagaaaaaaagaccgtcctcttcccagaacaagagaatcctccaacagatacctttggactggaccttgcaccatcagctttcctgagtttccagcctcctgcctcacactccagcttttggacttgttagacttaataataacaacacaagccaatccttttaaggaagtttgtctggagaatcttgacaaacacaaacatctactgagagttcctgtccaagttttgctcacaccctagcaagaggcttctggcttaccagttgagagtgtgaggttctttgcttgtaagacctgatccaccagcggtacaccagctctggcccagggcaagacagggaatttcccaatcactgagtaggctgtagccactctctccattaggcctgacttcaccatggggaaggggagaccctttcaagggtattctttcctggggtactctcagtcctaggacatcatagctctctttcatccctcttaaaagttaataccattatcagttaacagttttttatattaaaattatccctgttcaagttaatggtatggtttctgtatcctgactggatattaggatacagtatttactgtcttatttctactactttatgtttaaagtttttcataatatttaaactgaagttttgatcattcattaaatatttacacagaacaggacaaaggatgattttcctttgtctagttattgtaaggtagcgtccaagatttaccaccacatcatgattacagatggtcaccaacttatgttttaggattttttgactttatgatgggtttatagggatgcagccccatttcaagctgaggagctccttagggcttaggaatcatacctctttcacaccatggtaaagttggaaaattgttaagtcaagctgtcattaattaggagactgctgtgttgctaacgttatatgcatttttaacttatgacgggtttattgggaattaaccacaatgtaaa

SEQ ID NO: 263524 - DNA, 1740 bp, Homo sapiens
gggctgtagcaggagacctgcggctgcatctcccaggccttccggcggggccgaggcacacaatactgagaccagaataaagcagtgcatttactaccttgtgaagaatgttcaggtgttcaggtatggtatcttcattttgtgctgctataacagaatacaggagactgggtaatttgtaaggaacagaaatgtatttctcacagttctggaggatgggaagtctaagatcaaggagctggcacttgttgactagggctttcttgctgtgttctcacatacagaaggcaagctagcaggatgctccctgaaacctcttttattatgggccttcatcccagtcctaagagaatccctcatggcctagtgatctcttaaagaccccacctcttgatgctgtcacattggcaacacttgaatttgaggggacacatacaagccatagcaaactgaacatttctcccatgccagatagcaccatgttctttgtcagtaggtggtggtagaggggcactgcaggataaaggggcttctttcacttctaagatgatactgtgacagttaattttatgtgtcaacttggcggggccacaggtgcctagctactgggtcatactttttttttttttttttttagagatttaacttttgctctgattttccaattataaggtcaaacattattctaggtgtttctgtgagggtgttttatatgagattgacatttaaatcaatcagtgaactctgagtaatgcagactgtcctcctcgatgttagtgggcttgatccagtcaggtgaaggtctgaagagaaaaaaagaccgtcctcttcccagaacaagagaatcctccaacagatacctttggactggaccttgcaccatcagctttcctgagtttccagcctcctgcctcacactccagcttttggacttgttagacttaataataacaacacaagccaatccttttaaggaagtttgtctggagaatcttgacaaacacaaacatctactgagagttcctgtccaagttttgttgtaagacctgatccaccagcggtacaccagctctggcccagggcaagacagggaatttcccaatcactgagtaggctgtagccactctctccattaggcctgacttcaccatggggaaggggagaccctttcaagggtattctttcctggggtactctcagtcctaggacatcatagctctctttcatccctcttaaaagttaataccattatcagttaacagttttttatattaaaattatccctgttcaagttaatggtatggtttctgtatcctgactggatattaggatacagtatttactgtcttatttctactactttatgtttaaagtttttcataatatttaaactgaagttttgatcattcattaaatatttacacagaacaggacaaaggatgattttcctttgtctagttattgtaaggtagcgtccaagatttaccaccacatcatgattacagatggtcaccaacttatgttttaggattttttgactttatgatgggtttatagggatgcagccccatttcaagctgaggagctccttagggcttaggaatcatacctctttcacaccatggtaaagttggaaaattgttaagtcaagctgtcattaattaggagactgctgtgttgctaacgttatatgcatttttaacttatgacgggtttattgggaattaaccacaatgtaaa

SEQ ID NO: 263525 - DNA, 1308 bp, Homo sapiens
gtaccaatcacaagtcttgttattttgtttcattatgagaaagataatctactaaatattaaaatactggaaggagcaagatagctttgatccagggagaccttttccatttatgtgctttagtaatctgccgccaacaagctatcttctttatgttcttctacaactgatgttgtttgttttctcatgttgtctcttaatagacaaatggaggcatgagcttccttagaattaccccttcgacgcatagttctgtttcatctggacttttgaggcttagtatctttctactacttagctttcctgactcaaacggaaaagccatttggacagctcacctgaatataacatttcaggttggaaatgagatcacatcggaattaggagagagtggagtgttcgggaatcattctcctctggaaagggtgtctggtgtggtggcacttcctgaaggatggaatcagaatgcctgtcatcctttgaccaatttcagcaggcccaaacaggcagactcatggctggccctcatcgaacgtggaggctgtacttttacacataaaatcaacgtggcagcagagaagggagcaaatggggtgatcatctacaactatcaaggtacgggcagtaaagtatttcccatgtctcaccaggggacggaaaatatagtcgcggtgatgataagcaacctgaaaggcatggaaattttgcactcgattcagaaaggagtctatgtgacagtcatcattgaagtggggagaatgcacatgcagtgggtgagccattacatcatgtatctatttaccttcctggctgccacaattgcctacttttacttagattgcgtctggagacttacacctagagtgcccaattctttcaccaggaggcgaagtcaaataaagacagatgtgaagaaagctattgaccagcttcaactgcgagttctcaaagaaggggatgaggaattagacctaaatgaagacaactgtgttgtttgctttgacacatacaaaccccaagatgtagtacgcattttaacttgcaaacattttttccataaggcatgcattgacccctggcttttagcccataggacatgtcccatgtgcaagtgtgacatcctgaaaacttaagaaatctggagaattttctgaagatgtaaccagatctttccaaatacaaagattagataaattgtcttattgtactttatgtagagagaaaatttcagcttctctacccaagtatgaacaagggtgaaatttgtgttttaaaaataaaactccttatcatgcccagctatttgaa

SEQ ID NO: 263526 - DNA, 1142 bp, Homo sapiens
taagcataaaataaatttattaagagataataaatggacaaaatattctccaggaaagccagggatcgactttagaggctagcaccagaaacgattcccaggtcacaccactggattgctgttttggcaccactaaaatggcagtaaatccatgaaaaaggaaagtcataagctgacaaatacagcaggggaagagaccagcagtagcagtttggaggccagaaaacacataaattactactttaatagactagggaaagttgagatctatgtctctggcatgaaaacttcaaaatttggctgattaggacgtcaagaccctaaaatagttcaagaattagagataacatttacttctgaaccaggaggtgggtttgggggaaaggagtatagaactaagaacaagagaattcatcgaaaatctgtataaaaagcagttacagccttggaaactgttccccaccccatgtagcagggtgactgctgattaggattaagcgcttattctacggagagacttcaaattctgggatattaggcataggtgagagcagaaatagtacatgccaacaccacaaaacagtgagaggttccatactgaaaaatctacatgttgaatggtaacgatcatagccccccccccttctttactctgattctaattccctggaggatttctttccaggaagcctaaagaggctaaaagaaaagtcctacagatagaattgacggtacccactgaaatagcccagtttcataatcatacagtgaagtccagcaattgataaggcccatccaggatatggtttccaatcaatttcttgctacttgaaaattaaatgggaataagagaggaagatcactaaacacttgaggaatgtctcaataggaaagacagagaccaaaacaagcaaacaaaaagtggacttcagaagaaacagaaacaaatttcaaatgaattttctaactataattaaattccttagctggccacagtggcttaagcctttaatcccaatactttgggaggctgaggtgggaggatcacttgaggccatgagctcaagcccagtctaggcaacatagcaaaatcccatctctacaggaaaagaaaaaggctttaaaaattccttaaagagttt

SEQ ID NO: 263527 - DNA, 694 bp, Homo sapiens
tctcgatctcttgacctcgggatccgtccacttcagcctcccaaagtgctggaattacaagcgtgagccaccacacctggccagcattaggttcttaagcagcacaaaccctattgtgaactgcacacataagggatctaggtcgtacactccttatgagaatctaatgcctgatgatctgtcactgtctctccttacaccagatggaaccatctagttgcaggaaaacaagctcagggctcccactgattctacattactgtgagttgtataattatttcattatcttacaatgtaataataatagcaataaagtgcacaataaatgaaatgtgcttgtatcatcctgaaatcatcccacccaccccagtctctgaaaaaattgtcttccacaaaaccagtccctggtgccacaaaggttggggaccattgatatagaggattttgtgatggatgctatctgggaaataagaggagtcaaggataactccccataataggagaaacattagagaatgtggaatcacacaaataaaaaaaaaagttttgaagaagtagaaatgatcaattttcaattgctgctgagagatcaaacacagtaaggactaaaagctgaccactgaatttgaaaatatagagcagattggcagccaaggtaagacaagttttggaggagtggtggaaatggaagcat

SEQ ID NO: 263528 - DNA, 170 bp, Homo sapiens
gttaattgcagcactcttcataatacccaagatatgaaaacaacttcagtgtttgctgataagtgaatggataaagaaaatgtgatgccacattttctttacacaatagaatatatatttctttatacaatagaaattttatgcaaagaatacacatacacacactacat

SEQ ID NO: 263529 - DNA, 479 bp, Homo sapiens
agatttagctaagtttatgctttctacctgaaaatgaaggaatttgacagatttctctggtacaaagggaaaatagcccagagtttccgctggaatgtttctgtttactcacagaggcagaatccttgccatgcagcctctcttgtgctgtgcctgaggctagtcttcgatcctctctgtaaactgagggcttccattcactagtggctatagagcttggcagctccgttatgtgcccagctctttgcaagggcatactgggaaatgagtggagataaaggacccaatcataagcattttacagtatggataccccattttaaaaaggtaaactgaggcacaatgcaatttttttttttttttaaggagtttatttgagcaaacagtgattcatgaatcaggcagcaccaaaccagaaggaggctttgctgaagaaggatgagggacaagcatttataaagtgaatgtagatgtaatac

SEQ ID NO: 263530 - DNA, 524 bp, Homo sapiens
gctgcagcctctcatgccttttgattatggtgctgatgaaagcggtggaagcagctcttctctcagcatcggctactccactttgcaaggcctgcgtttgggttgtgcttttcaagtaaggagatgttgctaccctgggaatcacatcaatgtgttcttaatatttagggcttattggtacatgcctgctgactcagtgaaggtcctattggatgacaaaaacaagcagaccaaaaactcaaagggactgatatggtctgagtggccacagcttgatctgggctcattttagaggcgctgggctgtgctgccctgtcccaggctgcttgctgcacacagctgttgggcgctggaagagtggagagtcgagcggaggtgggtgccgagttgaaaacccacaccagatttcaaagacaaaacaaaggaaaataactcatgaatagtttttctatggattacatgttgaaatgctaatttttagatatttaatatattaagtgaaataaagtaatattaaaattggt

SEQ ID NO: 263531 - DNA, 474 bp, Homo sapiens
cagaaaagaagagtcggggacctcctagccagttacattccagaggatgaggcgctgatgcttcgggatggacggtaagagcaaggagtggctcaagcctgagggttctgcggttagaggctcaatagacttttttttttttttcctttgagacggaggtctcgcggtgctgcccaggctgccctcgaactctagggctcaagtgatcctgcctcctcagcgtcgcgattagctgggtttacaagcgcatgccaccgcgccgggccaaacagttttagatggcagcccaactcagaactatttttcattatattcattatcttatttctcctaggaaagacctgctttgtggcatgttataatgtctcattgacataattaacatctagcttacagtttttcttgttgcagtcatttgattttattattctgagtgctggaaggattgaaataaatacaggttttattgctaaa

SEQ ID NO: 263532 - DNA, 926 bp, Homo sapiens
tttttttttacattaagtgtgaattgtctaaagcttagaaaattcaaactgcaaaataatgtcaaagaaaataatactggctttatcttaaatgttattacatggaaatttttttatcaaatacgaaacaaaactgtagtaagcaaaaagaactcatcagattcttaataatttagcttaattttctatctctgtaatttcctccaaaatgtgggcaccaacatacacaacacatcttgcttgttattttttcttatatccagtaatagggagtttcagagaagtggatttttctcaataaaacatgacaatctaaaggtgttaacccccccttgatttttaaaggaaatatagtgggaatatattaggttttacaaagcatctgctaaccaaataccaactgactacttaattccaggaaagccttacggcaccatttttggcaactgcgaaaaagctgaaaacaaattttatgttccctgccctcagaggtcctcctgtactttctcctaattgtttcacaacatgttaaaagcctgaaatagccaactcaattacacaggctacaagcatcccctttgaacagatatttgatccttcttcaacatcaagtaatacaattaactcattgtcacacactaaatcaataatacacagcagaacagaatgggcaataatcaataaccttaacaagaatgcagtggcatggctcagtaaatcaaactgtaaacacataactcatacccagaattagactataacaagaacagttacagacgctgtcaagaaaaacccagaactggccataggatgtttgtttccccctttacacttgctggaaaaagtacatgctctcctatttctaatgatgttaaaagtctcaaactcataaatgaggcaaatgctttttaaaattttggagctag

SEQ ID NO: 263533 - DNA, 293 bp, Homo sapiens
cgttttccatataagtgaatatggatgtgattattatttttagtgacttcatagtattcgaatcccattctatgttagtaccataaaatgaccagagcccagttgctggctattaaaactgcttccagccttttttgttgtgcataattctgtaccctgcccttccacgtagatctttccaggcatggtcattgccttagaacacattccttgaaggagaattgaccattgtgatatgtgtttgaaatgagaacatagagattttgttctcatgtgccttgcccattgagacc

SEQ ID NO: 263534 - DNA, 590 bp, Homo sapiens
gggtgattttttttcacatgttcaagtttgagcgcctcgagggcctgtgaatggctgcatataaggtacagctggccatatgtcttaaatgacttcaaaggggtgtgagccaggcctcttcccacaccagacttcatgaaccatgcctggtattgtcatgtttttgtgagcagccgtgaatagggctgggggagagagatgttcagccaagaaagtctaaaatagaaagggaatgttcagttataacaaaacaaatttttgtaattagagtgctgggttgtgctcagcatcattggagttaaatgtggagcagtggcttacacttgtaatcccagcactttgagaaactgaggtgggcggatcccttgaggtcaggagttcgaggccaccctgggcaacatggtgaaactccatctctacaaaaaatagaaaaattagccggctgtggtggcaggtgcctgtggtcccagctaaggaggctaaggtgggagaatctcttgaaccctggaggcagaggttgcagtgagctgagatcacgccactgcactccagcctgggcaacagagcgagagaccctttctcaaaaaaaa

SEQ ID NO: 263535 - DNA, 477 bp, Homo sapiens
  misc_feature (19)..(19): n is a, c, g, or t
  misc_feature (35)..(35): n is a, c, g, or t
  misc_feature (45)..(45): n is a, c, g, or t
tcctggtttttaaaattgnctttataagatctcgngttttcttanatctgatggtgatgaaaatgaatagggctgggggagagagatgttcagccaagaaagtctaaaatagaaagggaatgttcagttataacaaaacaaatttttgtaattagagtgctgggttgtgctcagcatcattggagttaaatgtggagcagtggcttacacttgtaatcccagcactttgagaaactgaggtgggcggatcccttgaggtcaggagttcgaggccaccctgggcaacatggtgaaactccatctctacaaaaaatagaaaaattagccggctgtggtggcaggtgcctgtggtcccagctaaggaggctaaggtgggagaatctcttgaaccctggaggcagaggttgcagtgagctgagatcacgccactgcactccagcctgggcaacagagcgagagaccctttctcaaaaaaaa

SEQ ID NO: 263536 - DNA, 385 bp, Homo sapiens
aaatctgttgcttatcatcatattttccagagaatggagcaaccccacttgtcatctgttcactcagtatccatctatgctgttggttctgtaagatttcccttgagattaaaatgttgaaagacagcttcattctttccgtgctccagtccttttcataacacctgctccataaatgcacatcactcaagtggaattgtaagtcgtccagttctcaagtgatctgttttagaattttaatttgtaaaataaaaacagtttatgtaatcctttcaccataccattacccaactaccttatctgttctgttatttatttttccctaggtattttgtgtaaatctggtttgataaactgtaaaaatggcaaaacatacatttaaaga

SEQ ID NO: 263537 - DNA, 382 bp, Homo sapiens
tttttttttgccaatttaggtatactagttttctttaacagaattcaaaatcgttcaatactggagaatcatctttgcaatactggagaatcacctttgaattagaataacggagtgacaggacttaactacctaactggaacacatctgtaaaaagaatttggaaggggaaggtgaattttaaaagaaaaagaaggtgatctgattgtatgtcctgggaaagttacttagcctttctggagctggtttccagcctgtacaacttggaggattcttgggaggattatatgagataacatacataaagcatctaccaaagtacctgataaatggcagctattatcattatgtggaatattaggggataaaagaacttgagtag

SEQ ID NO: 263538 - DNA, 253 bp, Homo sapiens
atctccacgttcaggagcatccctgtaactggacagtggcacagagccaccgctgcacacagcagtaaaaatgtacagccctccctctctgcgttcaggagcagagggcatgagtttcacctccctacaggacaggaaactacgacagtcatctttgcacctgaagaaacaaattatttaaactttctcatcctgcagtttacttcttagacatgtctactttctatagcaaaatagatctggacacgaataa

SEQ ID NO: 263539 - DNA, 582 bp, Homo sapiens
tttttcttttttgagatggagttttgctcttgtcacccaggctggtgtggaatggcatgatctcagctcattgcaacctctgcctcctaggttcaagagattactctgcttcagcctcccaagtagcggggattaccggcgcctgctaccatgcccagctaatttttgtacctttagtagagatggggttgcactatattggccaggctagtctcaaactcctgaactcgggtgatccacccgccttggcctcataaagtgctgggattacaggtgtgagccactgtgcctggccagcaatgaacttctaagagaaatcagatcaagccctcaaacattaatttacagtcaagagacaatctctgaattcagccctccccgtcccccagcactggtattgacatactgcagaccttctattgttggtggcaaatatgagcaggttaaggcacttttcgggattagagaatcttcaaactcaatatgcataagaacaatttatcctgatgaccagatataatagattctgttcattaaggaaactgcttgccatttgctactatttaacccattctttctatt

SEQ ID NO: 263540 - DNA, 535 bp, Homo sapiens
tgtaatcccagctacttgggaggctgaggtgggagaattgcttgaacctgggaggtggaggttgcagtgagctgagatcctgccactgcactccaggctgggcaacagagtgagaccatgtctcaaaaaataaaaataaaataaaataatatcaggatgcatacatcagaggctgttcctagtgtaaaggcactttggagggagaagactttcagagttaggcagaccaactaagaggtcagctgaagcacctaaccagttgtaaggaggtgaaagacagcaccccaagaagagatgtgcaggaaggaggaaagaggcttggtcataaaggatggaggaattccaaagtgacactgaacaggctgcgtttatcctaaaataaaaccactcctcactctgtggatgcgttgaagactcattcccaaacatctttattctctaacttgccctcttcctcttcctaatatgctcactcaagtaaaattactagtgtcctaatgcccctatgcatattgtcaaaaataaaaatcagaag

SEQ ID NO: 263541 - DNA, 553 bp, Homo sapiens
  misc_feature (4)..(4): n is a, c, g, or t
aganagtcggcaccagatgaagaaaatgaatcacaagtcaactgacagtccaaaggctccacagctcagaggaggtagatcttagttcttcctgagaaggtatgaaggtgggtattccaccctacctgaattataggaatttcagatatctgtgagcagctgcaaaggggattttactagatgacatcctgctgggcacactttacgccagtcctgaatgtgtaatagaaatctgcagtttaatgacactgaactaaagaaccagaaaatagaggggtgtattagtgaactacagaaaattcaagtcccaaaagctgtaaatactctgaggaccaaagaaaatacatacgttgttcagatttgccctgaggggtcagtttgtacccaaacatttgctgccacaagtagtaaatgtagaagcaatgcaatatctactattttacttttctttcagggttaatcaagtgccttgttataattcttcaaactaaaaacattattataataatgaaaaatatttctgctgaacttccgaataaaaaaatttagtaat

SEQ ID NO: 263542 - DNA, 606 bp, Homo sapiens
acactgtgcttccagtacagcagccagccccagtgtgatgagcacttgaaatgtcgctagtgtaactgaggtgtcctggaagcatacattataccctgggttttgaagacatggtacaaaaaatgtaaaatatcttaataattttatatggattacatgttgaaatgacaatagtttggatatattggattaaatattttatcaaaattaattttacctgttcctttttacatgtcaaatgtttttaatagaaaaattacaattatatatgtgtctcactttctatttcttttggacagcactgaactaaagaaccagaaaatagaggggtgtattagtgaactacagaaaattcaagtcccaaaagctgtaaatactctgaggaccaaagaaaatacatacgttgttcagatttgccctgaggggtcagtttgtacccaaacatttgctgccacaagtagtaaatgtagaagcaatgcaatatctactattttacttttctttcagggttaatcaagtgccttgttataattcttcaaactaaaaacattattataataatgaaaaatatttctgctgaacttccgaataaaaaaatttagtaat

SEQ ID NO: 263543 - DNA, 282 bp, Homo sapiens
agctgtacctttctcctttccccatgtcccttgatctctctttggaaacgtgcaccgccttggagtgcgcacaggaggcccctgaatagagagaataaagctaaggggtagtggacagctgcggctagcagccgtagggggagcagaagatctcgtggccagaggcagatctatgacaagccccctgcccaggctgcctataccgactgctgcaggacctctgcctggggggtgcagctggcttgttagccgggagggacaattgggtgagggatgcagaag

SEQ ID NO: 263544 - DNA, 346 bp, Homo sapiens
tataccaagtaatgggattgctgcgtcaagcggtagttctaagttctttgagaagtctccaaactgcgcacggccagtcttttattttaattggtgacttaaaaatcagctggttgttgttacagaaaacagtgctaattctaattttgtgtgacatccgtagccatgttgaaactgctggatcaaatcttgttgggtgaaaaaagctgccatctatgtcctagtcttttggaactgtatttatatagcttctcggggacatttacatatatttgagtttgaacatacttatgggactggggttctgaatcagacctgcttactaatcatatggaactagccaaga

SEQ ID NO: 263545 - DNA, 398 bp, Homo sapiens
tggacaggattgggtgaggatgggccccagatttaaacaacaaagggcactctttctgcgaagttctacagtcagcaattctattaggagtatcccatttgactccagatttcattctgcaagacaactgattgacttattttctcctaatctaattggtcactaaattcttccaattctttgatttttgaacctcaattacagctgacccttaaacaacactggttcaaactgcatgagtccacttatatgtagattttcttccatctctgcaaccccagacagcaagccctccacttcctcttcaccttattcaatgtgaagatgacaaggatgaagatgtttatgatgatctgcgtccattcaatacacagtgttttctctttatgattttctta

SEQ ID NO: 263546 - DNA, 292 bp, Homo sapiens
ggggtattgtctggcagtgaggctggggacggcgtctgctgcggggtattgtctggcagtgaggctggggacggcgtctgctgcggggtattgtctggcagtgaggctggggacggcgtctgctgcggggtattgtctggcagtgaggctggggacggcgtctgctgcggggtattgtctggcagtgaggctggggacggcgtctgctgcggggtattgtctggcagtgaggctggggacggcgtctgctgcggggtattgtctggcagtgaggctggggacggtgtctgct

SEQ ID NO: 263547 - DNA, 610 bp, Homo sapiens
gcattaaatcttcttttgtttctacaaaggctccccaagggttggctaaccttagagatgctatgtctcttgcacctgcagtcacttatcccgctctatcaagcttgcacttggccagcccatctgcccctcctgctgaaggtgatgcatgggatccatgctcggactgttgtaaaccaagttctgtgatacgtcaattcctggtgttgtcctatttgaatatcctaaatttcccataagagttgttatgaatgtaacatgtaaatttactatcactgatgattcctctgaagaatttcatgcaaccaccagaaggtgcaagatcctagagatctacatatcttaggcattttccaggagtactccttcaactgtcgccctgcacctgattaagctggatatactatagtaaaacaatatgtaacagatccatgcactacatggtgttattgtggaaatggccctgacacatggccactcacttgacagctgtacaaaagacagttatgtttttgcctagaggacgctaaggttaaaattgtctttattgctcatcttccccactgatactgagcacacctggcatagctgagattaaactatgagtatg

SEQ ID NO: 263548 - DNA, 441 bp, Homo sapiens
tcccctcctcccctaaggtaccctccccccctttattgggcagaatttgcttggtgcctgggaccaaccctgcagggaaggcttttctctggttgttgtgaggattacaccctcctgctcttcacctcccctcggctccccctacagcgggacacagtgggcttccataattattattagtacataataaactttatcggtaaatttcttgtttgaaaccaatcagctcgtttccgaggtatgttggattttcagtctaaggtgaaaatgtacagaaagcagttcctctggataattttttttagtaatgggagagttgtgatgtggtttgtggtagagatctgagggcgttttctcgtgtgaatgagggtttgatgttgcttaatgtggtgggtgtattttcctcgttgtgtagtaattagtatgtagagagggtccagg

SEQ ID NO: 263549 - DNA, 462 bp, Homo sapiens
tcccctcctcccctaaggtaccctccccccctttattgggcagaatttgcttggtgcctgggaccaaccctgcagggaaggcttttctctggttgttgtgaggattacaccctcctgctcttcacctcccctcggctccccctacagcgggacacagtgggcttccataattattattagtacataataaactttatcggtaaatttcttgtttgaaaccaatcagctcgtttccgaggtatgttggattttcagtctaaggtgaaaatgtacagaaagcagttcctctggataattttttttagtaatgggagagttgtgatgtggtttgtggtagagatctgaggaggaaatgtgacgccggacgcttccctgtctttgacctttttaaaggaagaggaagttcaccgacattacccatcacccacaaaagtctcacttcttggaagatttgtgttaggc

SEQ ID NO: 263550 - DNA, 110 bp, Homo sapiens
ggttggaatttgaatagtggagtagtgtctgccacagtcaggggcctggatgaagtagaccaccagtacggagctatactcaggtacttttcaatgtatatatcttcatt

SEQ ID NO: 263551 - DNA, 462 bp, Homo sapiens
acctcaatactgttttccataatggctatacaattttatattcccactaacagtatacaggggatccaatttctctacattcttgccaacactagttattttctgttcttttggtagtggccattctaatgggtgtgagatgatgtgtggttctgatttgcatttctctaatgattagtgatgttgagcatcacttcatacgcctattggccatttgcataccctttttggagaactctctatttgaatcctttgcttattttattatttggcttgtttttttttccccttgtgttgagttatagacgtttcttatatattctggatattaaccccttttcagatatgtgatttatatatattttctattctgtgttgtcttttcactctgttgtttcctttgatgtgtatcagtaattctttttgtaaataaaattgtattggaacactactatgcctaat

SEQ ID NO: 263552 - DNA, 783 bp, Homo sapiens
ctgtttcatctaaaataaaacattcattaaccaatattatataaaaattttaatttttgtcatgggctacagtatttattagcaatagaaagagatgagaaggccaagataatcagaagagtagttaagtctgaagtagtttctggcacatgagaaaacactcaatacatttactactgttaactgcttttattttcatttctgggtaattttgatgtaggtataatgaaacctgctttcgtttgccattaatagtttaaactggaaaaaatcctttttctctttccagaaataattatgaaatagccttgatgtggcctgttcccataccacattctcaaaccaaaaaatttttagcattagtttttggtttggagactaaagataaactgtggcaacttatcaagtttgttgtattgatcttatacatttagttcttatcaagtaatagtcttaaagtacgaatgacacttttcaaatttgtgttctttaattagaatcaagaggggaataattttataaatcctatcaaaagctttatttacatgtcattgtgttaaatcagaaggcaaatttattctctgtgaatttttgtgaaacttttgagaccattacttgtgatatgtccatgtgtttgtacttttcttacttgtattctcatagcctagagcatgtggtttacttttcagctttcaaagatttgcccctgtttaatattgttataaatatcttaaagtttcccatcattttttattggtttggagctccattttaatgccatct

SEQ ID NO: 263553 - DNA, 373 bp, Homo sapiens
agtattttaagtggatactcacaatactcaccttctagttggctcagcagtgaacagtatttgcacagtcataataatataagtatcttctattttatttattctcctgccacactgaaagtgaagacaaggactttcttttactcatctttttttttaatctcctttgttattttgcatgaagtaatcatacaacaaatattagtcaaattaacctaaagtttaatagttcattgcataatttctcaacgttattgactctctttaacttcataattcttaaacgaaataatgatgcgggatacttctggttaacatacaagtgagtatccccatccagaaaggcacatcaataaagaggaaaccacccaaa

SEQ ID NO: 263554 - DNA, 807 bp, Homo sapiens
ttcagtatacagctggtgttttgattgatacagtatagaagtgacaccacatattattatatcagtctgatttaaagagctgaaagaaggtgtttatggagtaaactacactgcataaacttttttttcatggctcttagtagaaaaataacaacagcaacgaccaaaatatgtacacaaatgcacattttatatttcatagtcagacattaactaaaccaataaaacaatcttcaaagatttttattgcataaaaacaaaatataactttctagttaagcattaagctcaacaaaggaaatgtataaaaatgaaaaaacattttagctttgttcctagcactgctattaactcaccgtgatattcattaaaccaaaagtcaaatatatgaacagcaagggccactgggcattgcaagtctgaaatggtgtgctagaaagtgttttgaaatttaaaggaaaagaaaaaaaaaaaccttcccgacaggtgaaaataagcctcctattcagttatgatatctaagaaaatttaatggaattattaaaggagcacttacagaatatgtgcaattactttctttagatgggacaaatatatttcataactgatttcttcatttccaagaacagttttatttctttgatctttctttcatgataatgaggtagatgtgtacaggattgaacattacatttcaaatgtaatcccaacagacttgcaacaagcaaattttttatgttattctttataaaatgatacctctgtttaaaccactcactttcttcaacatactatgaattcatatat

SEQ ID NO: 263555 - DNA, 467 bp, Homo sapiens
ggtgccccctctgggcccaagttccagcatctggtgtttccaagtcaggccttcccccagctcttgtctcacaggagatatctgacccatagggctggaggggactcctcattggccacccccctcccccatgcccattgtgtgcagtgggaggtggtctggcctggcccggcccttgggagctcccaaagtcctggtcttcctggaggaggggccaggcatgagggtattgaaagaggaatttgaggccgggcaccgtggctcatacttgtaatccccagcactttgggaggcagaggtgggcagatcacgaggtcaggagatcaagaccatcctggccaacatggtgaaaccccgtctctaataaaatacaaaaaattagccgggcatggtggtacaggcctgtagtcccagctactcaggaggctgaggcaggggaattgtttgaaccccggaggcggaggtct

SEQ ID NO: 263556 - DNA, 210 bp, Homo sapiens
tgcacaatgagtttaagtaaattgcagaagggttacatcctgtgaggtggagctaagagtaggcctttagtttctaatccaatgcttttgtactaatgatataaaaagctcttggccgggcgcggtggctcatgcctgtaatcccagcactttgggaggccaaagcgggcggatcacgaggtcaggagatcgagaccatggtgaaaccct

SEQ ID NO: 263557 - DNA, 237 bp, Homo sapiens
ttccctgatatgtatctgctacttggtagcagtaatgaaaaagaataatctgacaccaaaggtctgaagttaacttctagctggtcttctctacccccaggtatcaattctatattttgggactcattagcacaaaatgaaaaaaacaaccagcccaatttcccctatacccacaccaaatgggcaatgatctcaactactatttaagaaagttaaatgcttaaaaagtcttttaca

SEQ ID NO: 263558 - DNA, 517 bp, Homo sapiens
tgagacggagtcttgcactgttgcccaggctggagacagtggtgtgatcttggctcactgcagtctccacctctcagattcaagtgattctcctgcctcagcctcccaagtagctgggattataggtgcccgccaccctgcctggctaatttttgtatttttagtaaagatggggttttgtaacattggccaggctggtctcaaactcctgacctcaactgaactgcccccatcgggcttccaaagtgttgggattagaggtctgagctactgggcccgggcaaacttggaaacatttttttccttcctagtgcctcagttttctcaaatgtaaaatgggaataaaatatctaccttgtaagacttttgtgagggtctaataactgttatatacattatctcatttaatcttcacaacaacctttaaaatagggatacgatcattctcaatttacagttgagtgaaagtgaggcagttcagatggcttgactaaggttacctggcatttgagtggca

SEQ ID NO: 263559 - DNA, 292 bp, Homo sapiens
tgtgtgtgtgtgtgtgtacatgaatatttctatgtaaccatacatgcgtattttcttcttattttaatgagtggttacagaatatagacactgttatataccttgctttttcacctaacaccaaatcttggaaattattctgtattcctagaaagaaagcttttgcacttttaaaatggcatgcgtctacagtaggttaaagtaattcctaatgcgtggattaggcctattacataatagcactcaagaaattgttactgcctgtagcactgcccaagaacacggaaaaaaa

SEQ ID NO: 263560 - DNA, 288 bp, Homo sapiens
cccagctactcaggaggctgaagcaggagaatcacttgaacccgagaggtagaggttgcagtgagctgagattgtgccgctgcactccagcctgggcaacaggtggagtggagaattaggctgtacaaggctggtgtttaactattttatggtttggtaacagaaagaaaatatttactaactgggtatggcacatttttgtagtcctagctacttgagaggccaaagtgggaagatgacttgaacccaggagttcaaggccagcttgggcaacacagcaagagaccc

SEQ ID NO: 263561 - DNA, 395 bp, Homo sapiens
aatgaagagcaaataatactagcttctatttgtggagtacctcctatgtgctagacactttaatacctaattctgatcctaacactaactcaacaattttgttatttaccttatattatttcctttgttctccttcagatgaagaaactgaggattagaaaggttaaataacatattcagacacaccctgtcaagtgatggaaccaggattcaaagcccattctttcttgtccaaaccatgttcgtttcaagtcagaggataagatagaaaatacagtaattgggcctggcatagtgggtcatacctgtagtcccagcactttgggaggccaaggtgggttgaggtcaggacattaagatcagcctgggcaaaatggtgaaaccccgtcgcttac

SEQ ID NO: 263562 - DNA, 273 bp, Homo sapiens
agtgggatggggttggagtggaagggaggacaggagacacgggccaggaatccaggcccaatcagaagagccgcactggggctggcgctgacattcaggtggtacctactgtgtgcagacacccctcctccactttatcaaggtctctcacttcacatttctttcttgttttagagagagggtcttgctctgttgccgaggctggagtgcagtggtgcagtcacagctcactgcagcctcaacttcctgggctcaggcaatcctcccacctca

SEQ ID NO: 263563 - DNA, 409 bp, Homo sapiens
ggacaaactcagagtttgcactggacagcaaatttgatggctgacataatcagcaagcgttcaataggttggaaagctgccaagataagtgcattatgagcacaatgagtgttgtgtgatttcattagaatagaaaaaacaaatatctacatctttgacggagtgtgtgcctctcccagttgtcccttgagttgctgctgatgagctctttagtgccccagcccctcattaatgttaaattctttgtaattggcagagggaaccatcgagacagtactaatggatcctggcagaagtagcagtgtcaggtgctgtaaatgagaaaacctaggcggcgacctttcagaaaagaggcaggcaaaaattaaaaccctcaatgattcctctacctccatggaaacaaacagtt

SEQ ID NO: 263564 - DNA, 559 bp, Homo sapiens
aagcacagtaagactgtctgtagttttttaaataaggtatgttaatgatcatttatagataatatcattatatacccagaaaacccaagagaatcaggagtgtcagtattagaaaatgctgtaaggtagccaaactccaagattaatatacactaaagggacaaaaggagcttagtacgtgaagacatgccttggttcctagataaataataaaagagaagggagtaagacccacatgttgaaacatattatagggctctagtaaataaaacagtttaggtctggaaagggggaaggcaaacaactccatgtaacgagggtggacactgagtgtctgatgaggacagtatttcacagaagagggaggagacagatcactccatccagcagcactgggatgactgggagccatgcagaaaaccatttagaccagagtaaattccagagggatcaaagatgacaagcacaattctagggaagaaatgtttcatcatctcagaaggggaaagcctttccaagcaaaaccacaaaccaaaaagtaaagaatgattgacatatt

SEQ ID NO: 263565 - DNA, 423 bp, Homo sapiens
ctaagcatcagaagcacatagaatttgcaaaagtaaatttgacacgtacttaatcataatgcataatttttattgtcctgaatgataattaggaatctgtagtaagacattttttaatgactgcaattatattattgttataaaatcaaactgtttttctctcttttaaaaagttagttttcctgatatttttgaatataaatgataaatattaagtttatctgactctataggcagtttaaatttgatcacactcataccaactaacgcatttaaaaatccaaaatcttggatttctactttacagacttataaggattaaattgttcaagtttatattgttgaagatgaattatgtctctcaaaccttttctcttatttttgagccacaactcaggacaagcaagatcacactgctcctac

SEQ ID NO: 263566 - DNA, 383 bp, Homo sapiens
cctaccggggtgccgtctcctgccggtcttttcatctcaccagggccctcgcccgggcaccccccggccaatggaccacagctgcacccggttcatccaccgccggggaccacccactcggacccgagccggcttcaagaggggcaagaggccaaggatccagcagaggcctcgggctcgagtctcagggaccatccctgcgtcacgtctgcacccagcaccggcctcacagcccggcccctgccctgcaccaggccactgccctgttggcccggcccacgagaggccaatggggagcagccaggaggagggactccggtgtcagccaagccagccgtgctgcctgccctcagggacctataaagcccactttgctacaaaca

SEQ ID NO: 263567 - DNA, 2429 bp, Homo sapiens
cctaccggggtgccgtctcctgccggtcttttcatctcaccagggccctcgcccgggcaccccccggccaatggaccacagctgcacccggttcatccaccgccggggaccacccactcggacccgagccggcttcaagaggggcaagaggccaaggatccagcagaggcctcgggctcgagtctcagggaccatccctgcgtcacgtctgcacccagcaccggcctcacagcccggcccctgccctgcaccaggccactgccctgttggtgaggagggtcggaggggcgacctccctgccccctgctccaagctccccacccccacctggaacctgccggcaggaagcctggccctggagggtggtcacggcccctccccagatgcccggcccacgagaggccaatggggagcagccaggaggagggactccggtgtcagccaagccagccagaccacgacgcagatggacactgtgggccggacctggagggggcagaaagagcctctgccacacccggaccccctgggctcctgaacagccaccggcctgcagactcggatgacactaacgccgccgggccctcagctgccctcctggaggggctcctgctggggggtgggaagccatcgccccacagcacccggccggggcccttcttctacattggaggcagcaacggggccacaatcatcagctcctactgcaaaagcaagggctggcagcgcatccatgacagccgccgggacgactacacgctgaagtggtgtgaggtcaagagccgagacagctacggcagcttccgggaaggtagcgggagccagcaccagaggcgggcagcctgcaggggcctcctgggccggagcacagggcaggttggaggggtggggaccgaggtcctgcgctccctccacacgagccctggcctctgacctccaggagagcagctgctgtaccagcttcccaacaacaagctcctcaccaccaagatcgggctgctcagcacccttcggggacgggcacgggccatgagcaaggccagcaaggtgccggggggggtccaggccaggctggaaaaggacgcagcagcgcccgccctggaggacctcccgtggacaagcccaggatacctcaggccacagagggtcctgagaatggaagagtttttcccagagacctaccgcctggacctcaaacacgagagagaggcctttttcaccttgtttgatgaaacccagatatggatctgcaagcccacagcctccaaccagggcaaaggcatcttcctgctccggaaccaggaggaagttgccgccctgcaggccaagacccggagcatggaggacgaccccatccaccacaagacgccgttccgggggcctcaggcgcgggtggtgcagaggtacatccagaacccgctgctggtggacgggagaaagtttgacgtgcgctcctacctgctcattgcctgcaccacaccctacatgatcttctttggccacggctatgctcgcctcacccttagcctttacgacccccattccagcgacctcggcggccacttgaccaaccagttcatgcagaagaagagccctctgtacatgctgctgaaggagcacacggtgtggagcatggaacacctcaaccgctacatcagtgacacgttctggaaggcccggggcctcgccaaggactgggtcttcaccaccctcaagaagcggatgcagcagatcatggcccactgctttctggccgccaagcccaagctggactgcaagctgggttactttgacctcattggctgtgacttcctgattgatgacaacttcaaggtatggctgctggagatgaattctaacccagccctgcacaccaactgcgaggtcctgaaggaggtcatcccaggtgtggtcatcgagaccctggacctggtgctcgagaccttccggaagagcctgcgcggccagaagatgttgcctctgctgtcccagcgccgcttcgtgctcctgcacaacggtgaggccgacccgcggccgcacctggggggctcgtgcagcctccgccgctggccgcccctgcccacccgccaggccaagtcctccgggccacccatgccgcatgccccagaccagccgggcgcccgcaggcctgcgccacctcccttggtgccgcagcgtccccggccacccggccccgacctggacagcgcccacgatggggagccccaggccccgggcacggagcagtcgggcacaggcaacaggcacccggcgcaagagccttccccggggacagccaaggaggaacgcgaggagcctgagaacgcgaggccctaggggcagccacccgcgcccagcgccccgcgccccgcgccccaggccgtgctgcctgccctcagggacctataaagcccactttgctacaaaca

SEQ ID NO: 263568 - DNA, 2184 bp, Homo sapiens
cctaccggggtgccgtctcctgccggtcttttcatctcaccagggccctcgcccgggcaccccccggccaatggaccacagctgcacccggttcatccaccgccggggaccacccactcggacccgagccggcttcaagaggggcaagaggccaaggatccagcagaggcctcgggctcgagtctcagggaccatccctgcgtcacgtctgcacccagcaccggcctcacagcccggcccctgccctgcaccaggccactgccctgttggcccggcccacgagaggccaatggggagcagccaggaggagggactccggtgtcagccaagccagccagaccacgacgcagatggacactgtgggccggacctggagggggcagaaagagcctctgccacacccggaccccctgggctcctgaacagccaccggcctgcagactcggatgacactaacgccgccgggccctcagctgccctcctggaggggctcctgctggggggtgggaagccatcgccccacagcacccggccggggcccttcttctacattggaggcagcaacggggccacaatcatcagctcctactgcaaaagcaagggctggcagcgcatccatgacagccgccgggacgactacacgctgaagtggtgtgaggtcaagagccgagacagctacggcagcttccgggaaggagagcagctgctgtaccagcttcccaacaacaagctcctcaccaccaagatcgggctgctcagcacccttcggggacgggcacgggccatgagcaaggccagcaaggtgccggggggggtccaggccaggctggaaaaggacgcagcagcgcccgccctggaggacctcccgtggacaagcccaggatacctcaggccacagagggtcctgagaatggaagagtttttcccagagacctaccgcctggacctcaaacacgagagagaggcctttttcaccttgtttgatgaaacccagatatggatctgcaagcccacagcctccaaccagggcaaaggcatcttcctgctccggaaccaggaggaagttgccgccctgcaggccaagacccggagcatggaggacgaccccatccaccacaagacgccgttccgggggcctcaggcgcgggtggtgcagaggtacatccagaacccgctgctggtggacgggagaaagtttgacgtgcgctcctacctgctcattgcctgcaccacaccctacatgatcttctttggccacggctatgctcgcctcacccttagcctttacgacccccattccagcgacctcggcggccacttgaccaaccagttcatgcagaagaagagccctctgtacatgctgctgaaggagcacacggtgtggagcatggaacacctcaaccgctacatcagtgacacgttctggaaggcccggggcctcgccaaggactgggtcttcaccaccctcaagaagcggatgcagcagatcatggcccactgctttctggccgccaagcccaagctggactgcaagctgggttactttgacctcattggctgtgacttcctgattgatgacaacttcaaggtatggctgctggagatgaattctaacccagccctgcacaccaactgcgaggtcctgaaggaggtcatcccaggtgtggtcatcgagaccctggacctggtgctcgagaccttccggaagagcctgcgcggccagaagatgttgcctctgctgtcccagcgccgcttcgtgctcctgcacaacggtgaggccgacccgcggccgcacctggggggctcgtgcagcctccgccgctggccgcccctgcccacccgccaggccaagtcctccgggccacccatgccgcatgccccagaccagccgggcgcccgcaggcctgcgccacctcccttggtgccgcagcgtccccggccacccggccccgacctggacagcgcccacgatggggagccccaggccccgggcacggagcagtcgggcacaggcaacaggcacccggcgcaagagccttccccggggacagccaaggaggaacgcgaggagcctgagaacgcgaggccctaggggcagccacccgcgcccagcgccccgcgccccgcgccccaggccgtgctgcctgccctcagggacctataaagcccactttgctacaaaca

SEQ ID NO: 263569 - DNA, 965 bp, Homo sapiens
cctaccggggtgccgtctcctgccggtcttttcatctcaccagggccctcgcccgggcaccccccggccaatggaccacagctgcacccggttcatccaccgccggggaccacccactcggacccgagccggcttcaagaggggcaagaggccaaggatccagcagaggcctcgggctcgagtctcagggaccatccctgcgtcacgtctgcacccagcaccggcctcacagcccggcccctgccctgcaccaggccactgccctgttggtgaggagggtcggaggggcgacctccctgccccctgctccaagctccccacccccacctggaacctgccggcaggaagcctggccctggagggtggtcacggcccctccccagatgcccggcccacgagaggccaatggggagcagccaggaggagggactccggtgtcagccaagccagccagaccacgacgcagatggacactgtgggccggacctggagggggcagaaagagcctctgccacacccggaccccctgggctcctgaacagccaccggcctgcagactcggatgacactaacgccgccgggccctcagctgccctcctggaggggctcctgctggggggtgggaagccatcgccccacagcacccggccggggcccttcttctacattggaggcagcaacggggccacaatcatcagctcctactgcaaaagcaagggctggcagcgcatccatgacagccgccgggacgactacacgctgaagtggtgtgaggtcaagagccgagacagctacggcagcttccgggaaggagagcagctgctgtaccagcttcccaacaacaagctcctcaccaccaagatcgggctgctcagcacccttcggggacgggcacgggccatgagcaaggccagcaaggtgccggggggggtccaggccaggtgagtctgcccctgcccctgccc

SEQ ID NO: 263570 - DNA, 414 bp, Homo sapiens
tgctgctgaaggagcacacggtgtggagcatggaacacctcaaccgctacatcagtgacacgttctggaaggcccggggcctcgccaaggactgggtcttcaccaccctcaaggtgcgtccactgtgccctccagtctgggagtgagatccctcggggcgggggtgtgtggtcaggctgggcaccaggcacacagatgtccgtggcgtgcgtgggcggctgcgctgaagtgtgacctgaccgtgtggaaccaaacccttccagcgtctctgctcacttagctggcagtgcctgtccccagcagccagcaaaggcccggacggaaagcccagtcgggggtctgtcggcacgagtcccgcgggcagcctcgccgtagggtcaggggacagctcggcttcagtgacagccaccatgt

SEQ ID NO: 263571 - DNA, 2532 bp, Homo sapiens
cctaccggggtgccgtctcctgccggtcttttcatctcaccagggccctcgcccgggcaccccccggccaatggaccacagctgcacccggttcatccaccgccggggaccacccactcggacccgagccggcttcaagaggggcaagaggccaaggatccagcagaggcctcgggctcgagtctcagggaccatccctgcgtcacgtctgcacccagcaccggcctcacagcccggcccctgccctgcaccaggccactgccctgttggtgaggagggtcggaggggcgacctccctgccccctgctccaagctccccacccccacctggaacctgccggcaggaagcctggccctggagggtggtcacggcccctccccagatgcccggcccacgagaggccaatggggagcagccaggaggagggactccggtgtcagccaagccagccagaccacgacgcagatggacactgtgggccggacctggagggggcagaaagagcctctgccacacccggaccccctgggctcctgaacagccaccggcctgcagactcggatgacactaacgccgccgggccctcagctgccctcctggaggggctcctgctggggggtgggaagccatcgccccacagcacccggccggggcccttcttctacattggaggcagcaacggggccacaatcatcagctcctactgcaaaagcaagggctggcagcgcatccatgacagccgccgggacgactacacgctgaagtggtgtgaggtcaagagccgagacagctacggcagcttccgggaaggtagcgggagccagcaccagaggcgggcagcctgcaggggcctcctgggccggagcacagggcaggttggaggggtggggaccgaggtcctgcgctccctccacacgagccctggcctctgacctccaggagagcagctgctgtaccagcttcccaacaacaagctcctcaccaccaagatcgggctgctcagcacccttcggggacgggcacgggccatgagcaaggccagcaaggtgccggggggggtccaggccaggctggaaaaggacgcagcagcgcccgccctggaggacctcccgtggacaagcccaggatacctcaggccacagagggtcctgagaatggaagagtttttcccagagacctaccgcctggacctcaaacacgagagagaggcctttttcaccttgtttgatgaaacccagatatggatctgcaagcccacagcctccaaccagggcaaaggcatcttcctgctccggaaccaggaggaagttgccgccctgcaggccaagacccggagcatggaggacgaccccatccaccacaagacgccgttccgggggcctcaggcgcgggtggtgcagaggtacatccagaacccgctgctggtggacgggagaaagtttgacgtgcgctcctacctgctcattgcctgcaccacaccctacatgatcttctttggccacggctatgctcgcctcacccttagcctttacgacccccattccagcgacctcggcggccacttgaccaaccagttcatgcagaagaagagccctctgtacatgctgctgaaggagcacacggtgtggagcatggaacacctcaaccgctacatcagtgacacgttctggaaggcccggggcctcgccaaggactgggtcttcaccaccctcaagtgcctgacacaggacaggagctgcacgagtttgttgagtgagtttctggctgtgaacctgtgaggctgagtgcacgaacgtgtgggcaggtgtggctgtacagaagcggatgcagcagatcatggcccactgctttctggccgccaagcccaagctggactgcaagctgggttactttgacctcattggctgtgacttcctgattgatgacaacttcaaggtatggctgctggagatgaattctaacccagccctgcacaccaactgcgaggtcctgaaggaggtcatcccaggtgtggtcatcgagaccctggacctggtgctcgagaccttccggaagagcctgcgcggccagaagatgttgcctctgctgtcccagcgccgcttcgtgctcctgcacaacggtgaggccgacccgcggccgcacctggggggctcgtgcagcctccgccgctggccgcccctgcccacccgccaggccaagtcctccgggccacccatgccgcatgccccagaccagccgggcgcccgcaggcctgcgccacctcccttggtgccgcagcgtccccggccacccggccccgacctggacagcgcccacgatggggagccccaggccccgggcacggagcagtcgggcacaggcaacaggcacccggcgcaagagccttccccggggacagccaaggaggaacgcgaggagcctgagaacgcgaggccctaggggcagccacccgcgcccagcgccccgcgccccgcgccccaggccgtgctgcctgccctcagggacctataaagcccactttgctacaaaca

SEQ ID NO: 263572 - DNA, 501 bp, Homo sapiens
cttttcacttctctaggattaattttcagtaatggaatgactgggtcaaaggagatcaacattgctgtggctctttcaggttctcttaaattccatggattttaactttggcccatgacctccttgacctctggaaatgtgacatcctgcacctgctgcatcagggctcttccctggtcttgcctacacttgtgtctacacagcttgataaaccagagggatagtctgagagagaaactgaaggtcaaaatcaacgcagtggtgccgaacagaagggcccgaggtgcgatgagtataatatgaacacgaaggaaaacagcgagttcagaagcctggagaatcagaagcaggtcaagcgctggggttcagggcaaagaccctgaacactgtgaaggtgttggagacctgttttgaggtggcactgcggctcaatgtgagtgcagacctgagagattaaagtgcctacgaagggccaaatacctgtcccttcatgacatgact

SEQ ID NO: 263573 - DNA, 183 bp, Homo sapiens
caatattggtaaataaaatggattactatcaggctttaaaaactcttccttttgccaagttattctgaaataacttcttagactctaaagaaaattagccttgctctgggacttggagagagaggagccttcagtaagtaataaataacctatccaggtggtcacctccctttccaaccgtcg

SEQ ID NO: 263574 - DNA, 333 bp, Homo sapiens
aagacaaggtacattgatctgcacacaggaggtgctcagcgacgccagcactgatgggctcctcctgccttgagtgaagagcatctgcccctggacagtgaacaaaaggtggggccattttatgcctccaacaagacatctggctcaaactcaacttcaaagattagagtaccttgtcttttctaactagtgctttcaagaaactttgaaatccagttctagtcacattcccaccatgaaatcttgtttgccagtgatcacaaggttgtagcaatattaactcaagcctacctggctgggaccttggcctcgccacccccatcatgtcagtcg

SEQ ID NO: 263575 - DNA, 339 bp, Homo sapiens
atttggatttttcaaagacaacatctaatcatccccagagaaatttcagctgagaagacaggatgatgaagtgccctgggggccagagtccagacaagtattttggcacctccaaggactcgcagaacacagagaggaaaagagagaccctgttatctttccgcaggggtggccgttcaaactctcagagatggaagttaagatttcctttggtataagtggcagtttgactggctgcaaggagagcctcagtttgtttaatttggagtaaaattttatgagttaatctctagtgagggaaagcagcagtaaacacagaacatactggtcattaaataa

SEQ ID NO: 263576 - DNA, 666 bp, Homo sapiens
agctcagatttttgaattgggaggggaataaaaattatgagggtccctcaacacaccattgggccctgcacagagctggagagatggagtggcagtaccagggcttggtttgctgcctgattccttataactatcttctggcaatatccatgactcattgccagcctcttctgtgctagcaaaaagtatcccaaatgccagaagattgacaggcctgtcccatttataaaacccatggatgtcttctagcacatagcacagaatggtgttttgctctggagtgaataagaagccaaaaagcagattgggagatatcttttctttctggtcttcctactcacagggagccctgtggattaatgggttgttttttcataattggtgatcaatttcaattttctttgacccagatacactcccctcatcaatggcacacataattgttggctggagttggggtaaaatccatggtctgtgagccactccagtagtcttaaaatagacctccgttttgcttaagctagctggaaagaatttcacttagttacagcaaaaatagtgttaaaactaaggttaccatgccaattcattgtttgcattagtggattaactatttttggagcctcctaatgactttgaataaattgtatttgataagagtaatga

SEQ ID NO: 263577 - DNA, 893 bp, Homo sapiens
agttcaagagtttatccccacccggggcagtggggagcctggtgcccattcttggagggtgtcccatgacaggagagatggaaggcacttcctctcccctcgagcactcactcctctccacaccccagcatcaccagaggccagcgggaaatgtcttggaccaagcccttggacacgggtgctgggtccagtggaaaatatctgcctcagggtccagggagggctgggtaccaagcagccagagcagcctgtaaaagggtcacagctctggaggtgggcaccccatgggcggtggggatgggggtgcacttctagctccgccaccttctgactgtgtaacctgggacacagtacttcaccatcgagcctgtttcctcctgtcgaaagctgaattcccattcctgctttggagcgttgttgtcagggttaaaacaggaaagatcaagtattcagtacctgcctcacagtctgacttatagatggggctctgaaatgacccctttcctgtatgcaccacatgaatttgacttcaatcaataaaacaaactccactctagtctcccatagatagagtgagcgagctcaccctcctcctccagccaccttccttttcccaggtcctccacattttccccgtgccctactgaggacagagcacacccctcagccattcaggaccccccatgagtatctggctacctgtctctagcccccaagtgactcattctccctgaacaaagcaggccctatctttgtcccccagtgcatccttcaaggcccagatcatccgctgcctcctctctgaagccgcccccagatccctgagggagaatgaatcacttgctccactgtgctccgacagttctgagctcattctgctttgtgttatgggt

SEQ ID NO: 263578 - DNA, 196 bp, Homo sapiens
atctgcacggccaagactgagtggtggatggcaggcatgtggtctttggcaaggtgaaagaaggcatgaagattgtggaggccatggagcactttcggtccaggaatggcaagaccagcaagaagatcaccattgctgactgcggacaactctaataagtttgacttctgttttatcttaaccaccggaccattcc

SEQ ID NO: 263579 - DNA, 537 bp, Homo sapiens
acctgattgacggtgctgattatgatggcttaatacagctcatcgtcacttcaccgggacacgtggactttgtgggcttcacagactaccccccaccccccttgtttgtggtacagttgattcttctgctaagtggaggttgattatttctttattcattatctctttaaaatgcaggagaaaagggcaaattatcaaataggtgatgattatcctagtggaagctctcttgggcagagtcaaaagaagaacttgcagttcaacttgcttgatacctcatagttgattcctattcattctgccgttgaagggtttcagatgatacgacttaattttagctgttgtggaacagcaatgaaaatccatcgcaagaccccctttcttgatgttagggaagccgggggacgcaggatgaggtagtaggctccagctgctgcccatgtgaatgatttttcctctgcagatagatgggtcatggtccctttctagatgagcagaagattattctcacattggagaggtaacattaaatacatt

SEQ ID NO: 263580 - DNA, 484 bp, Homo sapiens
acacacaggaagagggtcagatgagaaactcatagactcttagagccatagctattccttaaagctggctaatgggtttatgggggttgattttactattcttttctcattttgaacatattgaaaattttctatattaaaacatttttttaagaaacaaatgtgcaggttttgattgagtggatgttggaaaggagaaagagtgtctttaggacaaaaggaagcacggttttgtacagtaagtcagacatttaattacacaaaaagctgatatatgctgataatatacattgattcatatagcacgtagctaaatttgtgaattacaggtacataacttcagagaaacaaggatggtttggatttattttgtctgtttccctcccctgagaaattcgtatgaccttgccttaaaacttttaaagaatacatttttaaatctatattcctgctaaagaaaacagtgaatcattaaaataccacc

SEQ ID NO: 263581 - DNA, 1059 bp, Homo sapiens
aaacctcatttaccagccattccaatctcatcatagcatggcatcatctgaccttttttctgctgtttattatgagtatttctaattttaactttcaattttcaccatcttccagtcaatttgcaactaaattatttccagggtgaggacactatcactggacaactgggtgcaaatacatcttgaaatgcaatgaagctaaaccattgattgctatcagaccccacgtaaatatatagtccaggcgtaatctgattgtatgctgtgcatgaagatttatcttgattttttttcaatccacatacggttcatatgaatgaacaaattgcaccttattgcaaaataacccagttttaatttagaaataaggtcaaggatgttatggaaacaaagtaaaaataaacaaaaaaaatacattctatttcaactgtggatagagatgcatgttttataccttataagtaatttcagaaatttcaaattcagaaagaaatatgaaagcaagagtgattccatgcagatcaaaattaaaatataatttaaattacatcatgacaataattttattctcttggggttcatggtagatacagaattaatgcaaagttttcatcagattatactgatactactgatttctagatttacaagcactagaatttatttgagttggtacatttgtcttcatgtatatatatatgtgtcggagaaatttaggttatttctagatatttgaaaaaataatttatgatatttgaatttgaatgaacttaaatccaagaaagactggaaagtttcattacactgatttaaaaatgcccaagtatttgatatcgaaagatatgtcaaaataggaaagtcataattcctattaccttgtcataattaagtctggaatcaaaaaatatatgtttctttctcaaagctgaatatactttggaatattgttttagaagtgttaaaaaacaaacatttaagaaaactatgatattttatattttcaaataaaacttactgcttaaagtgtcaaaccaagttgtataaaatcattgccattta

SEQ ID NO: 263582 - DNA, 458 bp, Homo sapiens
tttctacttgcagacttccaaacatttactgaaaccttaaactcttactgattctttaaactgtccccattccagttttctctacagcaagtagctctcaatgtgtagtcctcagatgggcagcatccactggaaaactgctaggaatgcacattctcaggcctcacccaagatctgctgaatcagaagctctggggtggaacccaacaacctgcattttaacaagccttccagatgactctgaagcatgctccatactgacaactaatgcaatgcattatgtcttcatgtgaccagcagcaccaactgcaagactgtctgtcacctgagtgtgacttgcaaccaagcacatgtgggaattcagtgaaggcccctgccttgacctcattatcaacaggaaccagccaaagacagtggtcactctttatccatgtaaatagacaccgtaatttattttc

SEQ ID NO: 263583 - DNA, 738 bp, Homo sapiens
ggctcatgcagaaactgaagaaatccgggtctctactgcagctgaccttcagggataatgctgatttgcgcaaatgtttcctctaccaactaagccaaaaaacagggctgcagtattttaaaaacgtcgtgctggttgcttctccccaagaccgttatgtgccatttcattcagccaggattgaaatgtgtaaaactgccctcaaagacagacacacagggccagtttatgcagaaatgatcaacaacctcctgggccctctggttgaagccaaggactgcactttaatccgacacaacgtgttccacgccctgcccaacactgccaacaccctgatcggccgagccgctcacatcgctgtgctggattcagaactcttcctggagaagtttttcttggtggcaggactcaactacttcaagtagtggctttgagggagcaggtctttggtaatgcttacgatcggtggagagctttagctgagacctgcttttacagacctcaccatttcagaatgaagcttcaacagcattgggggacggaggctcgggtggaacctgacatgagaggtgcttttgttttggagattcgagaaagctgagcaaatagactaaatgacaacaaactttgcttgaatttgtatagttacctggagtgtcattcaagatgttttctaggaaaaatatgagagaataaacagaatacttgggagttggtgagctccccttgctagccaaa

SEQ ID NO: 263584 - DNA, 1227 bp, Homo sapiens
atgcccagtgctgggctctgcagctgctggggtggccgggtgctgcccctgctgctggcctatgtctgctacctgctgctcggtgccactatcttccagctgctagagaggcaggcggaggctcagtccagggaccagtttcagttggagaagctgcgcttcctggagaactacacctgcctggaccagtgggccatggagcagtttgtgcaggtcatcatggaagcctgggtgaaaggtgtgaaccccaaaggcaactctaccaaccccagcaactgggactttggcagcagtttcttctttgcaggcacagttgtcactaccataggatatgggaacctggcacccagcacagaggcaggtcaggtcttctgtgtcttctatgccctgttgggcatcccgcttaacgtgatcttcctcaaccacctgggcacagggctgcgtgcccatctggccgccattgaaagatgggaggaccgtcccaggcgctcccaggtactgcaagtcctgggcctggctctgttcctgaccctggggacgctggtcattctcatcttcccacccatggtcttcagccatgtggagggctggagcttcagcgagggcttctactttgctttcatcactctcagcaccattggctttggggactatgttgttggcacagaccccagcaagcattatatctcagtgtatcggagcctggcagccatctggatcctcctgggcctggcgtggctggcgctgatcctcccactgggccccctgcttctgcacagatgctgccagctctggctgctcagtctgaggcaaggctgtggagccaaggcggctccaggcaggagacccaggagaggctctacagcagcaagaggagtccaagtcacaccccaggacttccccatatccaagaaaggactgggaagctgaggacccacggactcttcacacagcctagacgcttcctccactccaggtagagggatttcgggggccttctcagaagcaaggagtggacaagcctcttggttaaggctcctcttacctcccaagctcatggacaagtggcaatcagctggggtccctcttttggggtacaaaggaaaggacagaggtgtgggagacccaaggtggtcttgagattgacagacagcaagtccttggagatagcccccgagtccaagaacttaggcaggggccccaagacaataaagttggtctctacta

SEQ ID NO: 263585 - DNA, 125 bp, Homo sapiens
tttggcggggcagtcggaggagagctggggccaccgagcagcccaactccagggaaagaccatcacccttatggctcctcgatctgctgagagctacttccactcaataaaactttaaactcatt

SEQ ID NO: 263586 - DNA, 294 bp, Homo sapiens
agttttcctgcaagtgactgtgtcccttgaccaaaagtcattgctctcctcaaagaatttcctttataagactgtctccttccaggtttccccactgctcccttcccttgtccctttgagccatacaagccccacatgatggtactacttccctaatctccacacctttgcaatttctctctttattaaatccttctcaaattatccaaatttggctatgccatttgttcaggacccttcttgataaagcatttgtctctaaaaatatgcagaagccaattgtggtagttcacg

SEQ ID NO: 263587 - DNA, 406 bp, Homo sapiens
ttctggtcaaggaattgaggtggaggctgaaggtcttgttcttcaggccttgtcatgtgcaatggcctaactgccaccaggggaccctccctcattctgtcccattggctgctcacataatctttaatgcaccctggtcctagctgtcctgggcctcagaccaccccaggaactccctagtggttgcagtgtaaagtacacattccttttgttcatttccttggtccttccaccttattttctttttttcttctttgacacagggtcttgctttgttgcccagggtggagtgtggtggtgtgatcatagctcactgcagcctccaactcctgggcttaagtgattctcctgcctcagcctcctgaggagctgggactgcaggttgcaccaccacatctggctccag

SEQ ID NO: 263588 - DNA, 375 bp, Homo sapiens
actagtcttgttgactgactgtattaacatggataatgaacgtgacaatcagaaaggttttggttagatgtgaaaaccagggtaaaacgacagtttcagaggcaaatgttgcaagtgcctatccaaaccgtatccatgttatcattaaacattggaagcatataagtaatcttccttgttctggctccatgtttaacaagcactcttccgagcatggtttttcttcacatgtttttatttatattgagaatatgttgggcagacactctgagtgtccagtccccttatgttcttactgtgagctggcactttattttcatgatagcaatctcatatgcgctgtctcagggatgtctgtatttccaagtgtaatgg

SEQ ID NO: 263589 - DNA, 393 bp, Homo sapiens
ctagctctccctcacaggagagttcttatcgccgtccccgaccgcacggcacttagcaaacgcggactggatttgaggcctggaggatcaggcggagtttctgggcgtattaactccagcggcagagcagccaaggaagggggcagggctgccaggacaaaccggctgaaaatggcagaggatgtgctcccattttatccggctgcacagcgtgcatggattgggcccgaggacaagggaacaacctattaaaatccagagagtcaactgcaaaatgtggaaccgaggcctggagggtttgctaggagagggaaacgtttgcagggaagacagcccttcctttctcgcaatttgcttcccctaaatgtctgaaatacaaaactcaacaaacaa

SEQ ID NO: 263590 - DNA, 438 bp, Homo sapiens
cagattgggtaaaatacatgtttattgcatgtctggtagacatagatgtggccaggagaggaaaggggaagacgtaaatgtaagttatattgagaggtgagagagataactgatggttagtactgtggttttccccctataaaagaacatataggctgggtgtggtggctcacgcctgcaatctcagcactttgggaggccgaggcgggcggatcacctgaggtcaggagttcgagaccagcctggctaacacggtgaaaccccatttctgctaaaaatacaaaaaattagccaggcgtggtggcagcacctgtaatcccagctactcgggaggctgagacaggagaatcgcttgaacccgggaagtggaggttgcagtgagccaagattgcatcattgcactccagcctgggcaacaagaacgaaactctgtcaaaa

SEQ ID NO: 263591 - DNA, 462 bp, Homo sapiens
  misc_feature (18)..(18): n is a, c, g, or t
tctcgaggatccccgatngtgaataggtaggtatcataagatttagtccagagtcaatttgagaagaaattactttagtgatatgaaatgaaaccatgctatttagtcagaatacttctgagagtatcccctgtccaagcatttgctgaatttctatctactaattttcaggtggaacagtatggttgcagagagtccatttggacatagatacactttcatgcattcatgtctttaacaataatttgtggccctactgtgtttgttcactaactcctttgaacctaccacacaagctatatgtgtattttccttgtaatttgggaggtccaatgcttcattaagctcacatgcctgaaactaatgaagaaaatagctcgttaaccagctagtataaaagtagccaccaaatcaagtcaatcacctgccttaaatcacacagtattcccatcttgagcggag

SEQ ID NO: 263592 - DNA, 463 bp, Homo sapiens
gcaggtggctaagtacaatcagaacaagtaggtatcataagatttagtccagagtcaatttgagaagaaattactttagtgatatgaaatgaaaccatgctatttagtcagaatacttctgagagtatcccctgtccaagcatttgctgaatttctatctactaattttcaggtggaacagtatggttgcagagagtccatttggacatagatacactttcatgcattcatgtctttaacaataatttgtggccctactgtgtttgttcactaactcctttgaacctaccacacaagctatatgtgtattttccttgtaatttgggaggtccaatgcttcattaagctcacatgcctgaaactaatgaagaaaatagctcgttaaccagctagtataaaagtagccaccaaatcaagtcaatcacctgccttaaatcacacagtattcccatcttgagcggag

SEQ ID NO: 263593 - DNA, 697 bp, Homo sapiens
acataaggtctaggtacgaggctgggtggcgtttgtcttttttaataagttaaagtaatcagttctaaagtaaaaataaaccttatctcataaacccaagtttatgtgtcagcctgggtgcgcatacctggatttaatctgatgtctagtgccttgtaagcattctaagagatgacctcaggctgggtgtggtggcttacacctgtagtcccagcactttaggaggccgaggtgggcagatcacctgagttcaagaccagcctggccaacatggcgaaactccatctgtactaaaaataaaaagtaaaatagttgggcatggtgatgcatgcctgtaatcccagcttcacgggaagctgaggcaggagaattgcttgaacctgggaggtggagattgcagtcagcctagatcacaccattgcacttgcacccccagtctgggtgacaaactccgtctcaaaaaaaaaaaaaaaaaaaaattggggggctaaatgtgggggggggaaaaagagcttgatgaacgtgggcacatgggccataaggaggtccctgacccaattttgtgtgtaccaagcgggtgcacactcggcggggtccccgaatagggagaccaaataagctcgaaaaagccgggttaaccctggatcagaattctgcgacaaagaaagaaatccgtacaacacgcgaaaaacagcaa

SEQ ID NO: 263594 - DNA, 430 bp, Homo sapiens
agggagcagcctggtctctgatgccccaggacctccctggccctcctgctctgcgctccttcctgggaggagaaataagctcttgttgggttgaagtcacttgtccctcagggttttgctgctgttacttccagctaaacctactcccagctaatatttacaaccagagctgtttccatcacaccaaactggaagaaatatgtctgtgaagggaaagcatgacccacactgatgggagggagaccccaggctccctgtggaagcaagaaatggaaagagaattcaattcttagtagctacaggccaagctcaccttcagtcctccctaaagtgaaaattttatatgtgcatgtgtgtgtatctgtttgtgtctgcacacatatataaagaggtcagttcctgtccaaataaaaagggaaaatatgtggat

SEQ ID NO: 263595 - DNA, 474 bp, Homo sapiens
ccgggggttaggggattccacagatccccaagaaactctgtgtctcatgatcctctgtcctcctgaggttccaggaggctgcacacattgtaatccacaccctgagtggggagggagagaggaggagaatcgcaggagctggggccccccttggtttctgccatccaccccatcgggaattttttctagtgtctggtgtcaacagggagcagatacaatatttttccaaataattaaggcagagtctctcccccttggcattcagggctgggtcgttctctggggtggggttgtcctggccactgcaaggttctgatcagcatccctggcctccacccactccacgccaggagcatccctgagtcataacagtcacaaatgcccccagacaccacctagcatcccctggggaccagaaggacccctggttgagaaccacggttgtatagaaaggaattgaagcaaaaaaaaaaa

SEQ ID NO: 263596 - DNA, 292 bp, Homo sapiens
gcattttggtcagaaattatttattgtaatatttctgctttatggaaattgccagtattttctttgtgacctactataggatcagcatttataactgtgctgtgattgcttagatgtatattctccataatcaaggtctaaagtttgatatatatccatgagatttactgtatttattatgttgcttagatcttctgtttcttattttttgtaaataagtgatctgttttgtactaaggttatactaagagttgtatattaaaatctactgtgtcctgtgtttccatgtatc

SEQ ID NO: 263597 - DNA, 914 bp, Homo sapiens
agatgccaaaattctacacagacaaggtcctttatagagtgtatttggaatcagctctcactggaccagctccagctaagtgccctgtgaagggcactaggatttcagagatgaataaacattgtccctgccgcggggggtgacaatctcattgaccctgcagtcattctccatctgcctttatggtacggcatctctgttcaccaaaaacaccatggttcaagccctgtgatttagcctgtagaacgctaaaagactttctctacttccttattgtgacagacagattccattaaagcatccacaaccctgaagctctgtttctcccccactgcctccccccaagaagtaaaagaggatgattattaaaaattacaagtgccaccttccacactccatctcccaaacttcatttcacaatggctgctgacatcaataatgtcagacaggataatcaagtttgcataatgtaacagttctccaagggtccctctgcacaatcacccctcccagcctgcatatagggaaacagaccttagattaggcagaaaaggcccttagactgtcaaacacaagagtcctttctccacatgcgattttacaggagttagcctccatcagaaaagctgacttctgattccagtttgaccctttattggcaggaggacaggggcaaatcattgaatcatcctgtgcctcaattttctctgctttaaagtggaaataactctgtagtattctaaaagaatgtcgatcttgaatggcatatatgtaccatgtaattgatgaagtttattaagaataaaaatatggtgatagttcaataagttactttgtcaacttaatatttgttaacatacattgccaataatttatttggaaaataactaatatttagtaaaatagaacaacag

SEQ ID NO: 263598 - DNA, 218 bp, Homo sapiens
aatatctttttgctttaaaataagaataattaaatggaatggctgtttaagtagaaactaagtaattataatgttaatgacatgtgcagtaagctaataatttagtcaggtgctgagttgaatgacatctagggttgttttttctcccccacatcttttttttgatttgccacccattaattaatcttccctagttagtaactaacaaaaaaaaataa

SEQ ID NO: 263599 - DNA, 412 bp, Homo sapiens
cagattcagtatatatgaatcagtatgtatgaataatgatgttcagtgatgggcattgaatagcgatgaaatgcccagtgccaggagctttcaagagataaggctcactggccgggtacggtggctcatgcctgtaatttcagcaatttgggaggccaaggcaggcagatcacctgaggtcaggatctcgggcagatcacctgaggtcaccaggctggccaacatggtgaaaccccgtctctactaaacatataaaaattagccaggcatgatggtgtgcacctgcagtcccacctactcgggaggctgaggcaggagaatcacttgaacctgggaggcggagcttgcagtgagccgaggtcgcaccattgcactccagcctgggtgacagagcgatgccatctcaaaaaaa

SEQ ID NO: 263600 - DNA, 548 bp, Homo sapiens
agctgttttagtaaaccaaaaaagtgtttactatatcagcttggaaacatgctttgtttccaggagataaaaggtagagctgacaagatgctttcctttgagtaaagacattatgtcacctatgaaatgttagtagatgcagagcaatgctgataaggtgtgtagtcttagactactgaaataagaaatgtaacgtcttcatgttgccgcattttaagagcataatgaagcaggtaagtggaaatgcttgtacctgaaatgtgtattttgaaaatcagattcaattaagtgagctgctttgacacttaattctagattttccagatgaactgaagtgtgttgctgtgtcttgtgatgcttttccttcagtggctctctcttatatgtattttagttggtgtaactttgttttgattcatgccaatgtgacttaagtctgaaaatatgtcagtctcacattatgtatttttctgaccacttagtattttaaagacttctacttgttataaaatcacaatttggaataaatgtggtaaattttagcaaaa

SEQ ID NO: 263601 - DNA, 781 bp, Homo sapiens
gagacagagtctcgctctgtcgcccaggctggagtgcagtggcacaatctcggctcactgcaagctctgcctcctaggttcacggcattctcctgcctcagcctcccaagtagctgggactacaggtgcccgccaccatgcctggctaatttttttgtatttttaatagagacggggtttcaccgtattagccaggatggtctcgatctcctgaccttgtgatccacccgcctcggcctcccaaagtgctgggattacaggcgtgagccaccgcgcccggcctcctttactttttttatctagtttctcctacagatctataaagagttgttggcagctctagatgcactgcctatgacttagccctgctctgcatggagcagttaaaaaaaaaaaaaggagctgttgattttttagtttgttcagcttttacttgttgttatcatggagtggtgacttccgagcttcttttctgctggtctggaaactggatgtgtatatcttttcaaagcagtaacaagaaggtcaatgaggccagagcagagtagtgagtgagggggagagcgttatgaaatgagattggagaggtagccagggtctagctcatgtaatagtgttattaggcatggagagattttgtgttttattctaaaaataatgagaagctattagatagttttgagcaaaggtgtgacatgttctattttaggttttaagagcattgctctggcttttgtgagagtaaaccacaggaggttaagagtggaagaaggaagatgaa

SEQ ID NO: 263602 - DNA, 721 bp, Homo sapiens
ggacgttcagagggtccccgtcggatgcaagtgtcacataagtggagagctcaggaacagggactgtagcttatctttttttttttttgagatggagtctcactctgtcgcccagggtggagtgcagtggcgcgatatcggctcactgcaagctccgcctcccgggttcacgccattctcctgccttagcctcccgagtggctgggactacaggcgcccgccatcacgcccggctaattttttgtatttttagcagagacggggtttcaccgtgttagccaggatgatctcgatttcctgaccttgtgttccgccggcctcggcctcccaaagtgctgggattacaggcgtgagccaccgtgcccggccggcgatttccactttctagcaacagttggcgtagaaaccctggcccagccagcgacagttagccagcgacagttggggaatatctgtttatcgttatttctactttgattcctcaaaaggtgattctgttttgacgtgaaaaaaacaacccaactttggtttatgaaccagcccaactctgacaagtgtgttcctgttccgcctacatcagttctaggttctctaacttcagtgtgcagaagattcaaccaaggaagttcctgggctctaccccttgagattcagttttaataggaaccgggcttgatgctattagccccaaggcttttgaaggggatctggggctgccttt

SEQ ID NO: 263603 - DNA, 899 bp, Homo sapiens
aagctgtgtgcctttggaatcagctctaagccagggccccctgggagtcatgttaagaaacacgtatcataaagtgacatacatcaaggttatcttatatagtcataacagtattattgggtctttcaaaaacagctggcagattgagcttttaatggctatattgatacagtagatagagcacctctaaggagtaccaggtataatgtgccatttctctcagcaacaccatttttgtgtgcagctgaccctctaacatggtatcaattctagctgaccaaagcacattctatcaggcagccaggcttggaaattaggtccatttaaagtatgtggcttacagccaggtatggtggtgtgcgcctattgtcccatctacttgagaggctgaggcaggagggattgcttgggctcaggattttgaatccagcctgggcaacatagcaagaccccatctctaataaataaattatgttttgggcattaatgatgtttgtctattctgatttctcaaattttatttaggtctttcatagcttttttatttaaaggtatatgattaagataaaggaaaagtaaaatgaaatgtttatgtaattttatattctcaaaattttctttaaatttgctctgttttctgacagtgctcaaagtgggaatttttttagaagtacggttatcaaaaaaacacatttcctatgggacacacatttcaaagatgtttagtacgataaaatttttagtaaaagggtagcacttttaagtcatttgaatagaatatttgtgtaatatttagtctagtgttagtccttaaatctgccaacaaaaccagatagatgtcttaaagtaggcacatttattccattgtgactgttaagaaataataaaagattaaatta

SEQ ID NO: 263604 - DNA, 801 bp, Homo sapiens
aagctgtgtgcctttggaatcagctctaagccagggccccctgggagtcatgttaagaaacacgtatcataaagtgacatacatcaaggttatcttatatagtcataacagtattattgggtctttcaaaaacagctggcagattgagcttttaatggctatattgatacagtagatagagcacctctaaggagtaccaggtataatgtgccatttctctcagcaacaccatttttgtgtgcagctgaccctctaacatggtatcaattctagctgaccaaagcacattctatcaggcagccaggcttggaaattaggtccatttaaagtatgtggcttacagccaggtatggtggtgtgcgcctattgtcccatctacttgagaggctgaggcaggagggattgcttgggctcaggattttgaatccagcctgggcaacatagcaagaccccatctctaataaataaattatgttttgggcattaatgatgtttgtctattctgatttctcaaattttatttaggtctttcatagcttttttatttaaaggtatatgattaagataaaggaaaagtaaaatgaaatgtttattcctgcaagagctggttgttaaaaggaacttggcaccaccacctcctctctttctcgctccttctctgtgtgacatgccttctccccccgtgccttctgccatgagtaaaagctccctgagacctcaccagaagctgagcagatgctggtgccatgtttttacagcctgcagaactgcaagtcaaataaacgttttctttataaggta

SEQ ID NO: 263605 - DNA, 1413 bp, Homo sapiens
aagctgtgtgcctttggaatcagctctaagccagggccccctgggagtcatgttaagaaacacgtatcataaagtgacatacatcaaggttatcttatatagtcataacagtattattgggtctttcaaaaacagctggcagattgagcttttaatggctatattgatacagtagatagagcacctctaaggagtaccaggtataatgtgccatttctctcagcaacaccatttttgtgtgcagctgaccctctaacatggtatcaattctagctgaccaaagcacattctatcaggcagccaggcttggaaattaggtccatttaaagtatgtggcttacagccaggtatggtggtgtgcgcctattgtcccatctacttgagaggctgaggcaggagggattgcttgggctcaggattttgaatccagcctgggcaacatagcaagaccccatctctaataaataaattatgttttgggcattaatgatgtttgtctattctgatttctcaaattttatttaggtctttcatagcttttttatttaaaggtatatgattaagataaaggaaaagtaaaatgaaatgtttatgtaattttatattctcaaaattttctttaaatttgctctgttttctgacagtgctcaaagtgggaatttttttagaagtacggttatcaaaaaaacacatttcctatgggacacacatttcaaagatgtttagtacgataaaatttttagtaaaagggtagcacttttaagtcatttgaatagaatatttgtgtaatatttagtctagtgttagtccttaaatctgccaacaaaaccagatagatgtcttaaagtaggcacatttattccattgtgactgttaagaaataataaaagattaaattaacaaaaagcattttaaatttttatgatacctatagaaaattgataatgaagatgaaaagtaaataacctttctgataatattctactttacacatatactgaaaacttacttacatatacccaaattcttctagtgaagaagtttgtaatatggtttgagtatttgtcccctccaaatctcatgttgaaatatgatccccagtgttggatatggggcctggtgggaggtgtttgggtgatgggggctgatccctcataaatggctttgtgccttccccagtggtaatgagttcctgctgtgtttattcctgcaagagctggttgttaaaaggaacttggcaccaccacctcctctctttctcgctccttctctgtgtgacatgccttctccccccgtgccttctgccatgagtaaaagctccctgagacctcaccagaagctgagcagatgctggtgccatgtttttacagcctgcagaactgcaagtcaaataaacgttttctttataaggta

SEQ ID NO: 263606 - DNA, 726 bp, Homo sapiens
tacagcctgaggggcacattcattagtgagatatgcacataagtaactatcaaaatgtcagatggtcagtgcagtgaacaatgcatggtagtctaggaatttaacagagtgaaaaggacagagaaaatggcaatagggctgcaacataaagaatgggtacgaattgtctgaagacagtatgatgattaggaatatggcaaattcgaaggccagagcaagaaagcgtgctaattattcatttattcagcaaatacttcctaaatgcctcgtatgttccagttaccatcaggtgctggggaatcaggtgaacaatactgacaaagtccctatccttccactagtctacatcctagagaggaaaacaggtaacagataaacataaatacctgataaacacctcagacagtggaaaataccattaaatatacacacacattttcagataaaagagagtaggggagcacacagtggcagtcaggtggccctctctgaagaggcagcatatgcgcggagagctgaaggaatgacacaggccttacaaataagtaatggggaacgtgccaggcagagggaacaacaaatgcaaaggccttgagaccagaacgaagcaaggaggccagagtgcattcggtggagagcatataggatataagagtgaagggacaggcaaggccaaactaaaaagggccatataggctgtgatgagtacagatatgattctggaga

SEQ ID NO: 263607 - DNA, 418 bp, Homo sapiens
ggcatgagcactgcgtctggctttttttgctttttaatgatagccattctgactggtgtgagatggtctctcattgtggttttgatttgcatttctctaatgattagtgacatggaacatttctttatatacttgttggccacatgtatgtcttcctttaaaaagtgtctgttcatgtcctttgctgactttttagtggggttggtttttttttgcttgtacatttgtttaagtcccttatagattctgtgtattagacctttgttggatgcatagtttgcaaatgttttttttccattctataggttgtctgtctactcttttgatagtttcttttgttgtgcagaagctctttagttagttagttagttcgttagttagttatttagttagttagtttatttttgagacagagttt

SEQ ID NO: 263608 - DNA, 177 bp, Homo sapiens
ataatacctatttttatcttaggtactgttttgtagcattggctatctttgtctacataaaattctaataaatattttctatgcacgaaatagacctaaaatcaaagttgaacaaatgttgcaattttctgtacctcacttttagatagaccttatttatattgcatgcgaactcag

SEQ ID NO: 263609 - DNA, 434 bp, Homo sapiens
ggggctgatggtgatgacctggaagacactcagtgcacacagccctgcccactctgtgaacataaaacacaaatttgcatccaatatcactgagggaatctttcaacccaaaagcagccattgtttgtgggattcctttagagagtataaccaaggagttggctatggtcaggtgcttgagaatcagatctgtggactgtaacatacctctggtgaaacaaaggaaactatagtggtagagaagaaagaaattccccaggaatccgaccatgatctgagataataagatcatgcctattgcaaaatccttggaggccatttgtcatttttcagtgactgataattacattcaaagtgagagaaccctgtgtggaaacataaagtttcacttttgcaaataaaatccactattgtacacttaccattgtttccaa

SEQ ID NO: 263610 - DNA, 655 bp, Homo sapiens
tgatgagctgagcttcaaggctggggatgagctgaccaagatggaggacgaggatgagcagggctggtgcaagggacgcttggacaacgggcaagttggcctatacccggcaaattatgtggaggcgatccagtgatgagtcggggacaggccagcgggggggacggaggcggcgggcccaggagcctcagccagccacgtgggcatccactccttttcctgcaagagatgatggttccattgctcttggcttcatggtgttcctggaaggcagatgagctggtcatttcgcctgggactcggcacctttccgagtgcagctggagggatctgagcgcaggaagacgcagaacaacagaaatagccgcccctccccgcccactgtgcctgttggcctatcatagatctctatgttcttgactttgtctctcctttccgagtcaatggtgggttacactgatcttgttccactgattactctctctgacgagtccatcacctgcaacttaaatgaacaagcttacatcccattttgagtgaagattttgaggtttttaatttaaaggctgtgtacagttatacttttttatacacctgttcatttctacttaaattatggcacagattgatgcgcaccagtcttgaggaaacgatc

SEQ ID NO: 263611 - DNA, 487 bp, Homo sapiens
atcctgtttagatggtttcctagaaacatgattgtttattggcgttgatctcgcagtctggtgagaacttctttactgataatgtcaagttcagtttatcctcccaaccaaggagcattcagcacagaacaaagtcgttctcctcctcactctgtaaagtatacgtttcccagcacccaccaccagcaggatccagcattcggaggcaaacatgaagctccatcctctccaatttcggggcaaccatgtggagatgatcaaaatgctttaccttcaaaactttcaaacgaagagttaatacaaagtatggatcgtgtagattgaaaaattgcaaaagtagaacagcagatccttaaactgaaaaagaaacaagtaaaagtctttgcctaatatattctaagaatgtatgtttttctccctacagaagataattttgagttttccatattttgaaactttacataaaaggaatcatgccttacgtatt

SEQ ID NO: 263612 - DNA, 303 bp, Homo sapiens
gtcctcccgcctaggtctcccaaagttctgggatttacaggcgtgagccaccaccacacccagcctcttctctgtctttaactttgcctccgcctccaaattccaattccttcagcaattgctgggaagggattactttttgcacaattctgtctggagccccttgcaggcaggagcttgtggacaaaagcttcagcctttgcgggcctggcattcctcatactatttggtcacctgcttttttcactttgtgtcctgaacatttttctgtattcttttttttttttttttccacctcctagg

SEQ ID NO: 263613 - DNA, 351 bp, Homo sapiens
tatggagaaaagtgtgagcaaatgtggggccctaatacagaatgtcagccaggaagacgaggaaggcagacctccctagaacagtggtacaagacattggtggtcatcttaacagatgtgcactgactgatatccttcagaataggaaggaaatgtgagatcttaagaaggaattctaggggaggtctcagctttaccccctgtgacttgcacttggtcagtatacaacttattcttcccaccagagtgatagaaagaaaaaaagaaactgagttctgtatgttgagaaatatcatcttggcctttaaattattttaaaattatagcaacatgagtcttcctgaaacttta

SEQ ID NO: 263614 - DNA, 418 bp, Homo sapiens
cctcttaaccagaaaattgtctcactacaaatatagcctaaccacttgctcaaccacagtcttctttccagtttgaatgtgtacttaaggagagcaaactgggggaaaataaagttgaaaattgtagtacaggcatcagccactgcttaaaggcttcactgaagagccattagcagccacacagcaggaagcaaaaggtagagagagtaaaaggggccaaatagagtaaatagaaactatccataaatgtctctcctggggttaattatgctgccagaattttcatatggaagaacatcagctcattttgatacttattttaagaaagggataggaggcctataaaatgtgtatcaggagccttattcaataatataaatctctgaaaagaaaagcttaagttttgtggttgtttaaa

SEQ ID NO: 263615 - DNA, 309 bp, Homo sapiens
tcaatactttcaaagtcaccattgaaagaagtttctgaaaatatctatgggcatattcaagaagtgcactcagcctgtcttctttaggttgtttacttctacttttaagagctagataaatattttaagaaccctagctatttactaaccctcaactccagaacagtaacaaatgctacctacattatttggagcaagttttgagaactgggtttcatgtttgttattaaatttacctatagccatgcaatagacccatcactgttaattattaccattgagcaacagttctacaatacagataaatac

SEQ ID NO: 263616 - DNA, 421 bp, Homo sapiens
agaccactttccttgagaaagaaaacatgttttatccatagcttcagtaatgaggccactaaaatattaattttctgagcattcttaaacataactgaatcagcttcaatttgcctggatagatagacattttagtggcttatagcaaaatgtaataaactgaataactgtaggctttaatgtaatctcacacaatcctattacatcccaattacttatttgacctttttaaggataattcctgcctaaacacacacaatcctgcaattccgaatgtcttcttcccgtgttgttccaaggcaatcaatagatcagaaagaattaatatcttgctgtgtcctccatttgtaatatacactgtcccaggaaggtataatgcatccctcccaggcataataaatgtttattgagcactgtttgt

SEQ ID NO: 263617 - DNA, 529 bp, Homo sapiens
aggtgctgcaggctccagagcccaggtgctctaacaggaagcagacagctgctgctgggtaccgggttcctgcgtgcctacctcccggctccacgctgtctcctgctaacagacccagctgtcccagggcagcctttgccgctcactctcagtctgtgggactcagtggcccaggaaaggggtggaaggggacacgactggacctgggcaagcagaaaaccacgccttccagcccaaagagaccggtccagtccacagggctctgaacgcctgctgggaagagaggatctctctctccctctgctgggcttggatccaggctcgcggcaggggccaccacgtagaaggctacctaagaagcctgcctaagaacagaccaggccaggagaggggagccaccaggcactgcgggtggcacataagccccgtcattcactctgccagggcgcctcctccatgctggagtggacttcggccccggggacacagggcaccatatgcaccagcacccagtcacacctgcggccgc

SEQ ID NO: 263618 - DNA, 101 bp, Homo sapiens
tgggattacaggcatgagccactgtgcccggcccgacacagctccttttataacaaatattttgtagtgtaccttaagtgaaataaatactataatttact

SEQ ID NO: 263619 - DNA, 387 bp, Homo sapiens
ctagagaaaggcttagatcgcagtcattctcttggctttgattccagatgtttgtacagactcagtaaagtgaagtctctgtcctctttcggggcaaaaccataggattgtccatctctgcttttcattcctccccaaacccgctgcctgctgctcctctcacacttttctttcgagtcttcccagcacttgcttaagaataccagtggcaagaggcgtgcagcccatgaagaacagtcctgggtgaaagctgggctggcagggggaagaaagcgcaggtggatttcctccatggcttttgcttttccccattcacctgtgcttatgtaatcacagcctggagttttcaggaataaagcgactagttatcactgctggttacacggg

SEQ ID NO: 263620 - DNA, 1188 bp, Homo sapiens
tgtgaatgtgctgggcctgctgttaatggtgcttgctcccagccctttgacttcaaagctggaagaaggccttagagattgtctgaaagcaactgaggcaggaagaaagctctgtacccaggattacacagtaagtggcagagccagcactcaacctgagctttcagagcctgttcccagtgctgtttctacaaggccactgtctctgctactgctggggatcccgaatcaagctcacttcaaagaatgtagctatgagagcatgaaaccgtgcgctcacgccgcacacgagttgggtaaatggagcgcctcattttccagatgtgttacagaaactgtgctggaggatgtgactggccagtgagacaactagggggaactgggtgattcaggctgtttcaacactgacttcttcaaagtccaacaatcagagaagcagtttagtcatcgggattttctcacatcacaccattttttgatctggaatgctttcttcatactttgacttgtatgtgatttatttaggattggtcaggagagaagagaaggaatgcgatgccctcctagctagccgtcacgggatggagggcttcatggactcagggacacagacggacgccgtggtggtgctgtccttggctcaggccgccgtgcttggcctggtctccgaaaatgagctctttggagctaccataagcgccgaggccttctacccggacctggggcccgagctttcaggggcagccatgggagagcccgagccaccaggccccgacgtctaccagctggcctgcaacgggagggccttggaggagccggcggaggaggaggtgctggaggtggaggcagcctgtgagaagcacacccggcggaagacgcggccacctgtgcggttggtgcccaaggtcaagttcgagaaggtggaggaggaggaacaggaggtctatgaggtttctgtgccaggtgacgacaaggacgcagggccagcagaagcccccgccgaggcggccagtggcggctgcgacgccctggtgcagagcagcgccgtcaagatgatcgacctcagcgccttcagccgcaagccccggacgctccggcatctgccccgaaccccgaggccggagctgaacgtggccccatatgaccctcacttcccggccccggcccgggatggcttccccgagccca

SEQ ID NO: 263621 - DNA, 759 bp, Homo sapiens
cgcgcgtggaggcgggcggcgggcgcacagcagcagcccgggcggtgggcagccaggagcccccggcccggcccggcccggcccgccgagggccccagcgcaggagccgcgcccggacccagggcgatgccctcctagctagccgtcacgggatggagggcttcatggactcagggacacagacggacgccgtggtggtgctgtccttggctcaggccgccgtgcttggcctggtctccgaaaatgagctctttggagctaccataagcgccgaggccttctacccggacctggggcccgagctttcaggggcagccatgggagagcccgagccaccaggccccgacgtctaccagctggcctgcaacgggagggccttggaggagccggcggaggaggaggtgctggaggtggaggcagcctgtgagaagcacacccggcggaagacgcggccacctgtgcggttggtgcccaaggtcaagttcgagaaggtggaggaggaggaacaggaggtctatgaggtttctgtgccaggtgacgacaaggacgcagggccagcagaagcccccgccgaggcggccagtggcggctgcgacgccctggtgcagagcagcgccgtcaagatgatcgacctcagcgccttcagccgcaagccccggacgctccggcatctgccccgaaccccgaggccggagctgaacgtggccccatatgaccctcacttcccggccccggcccgggatggcttccccgagccca

SEQ ID NO: 263622 - DNA, 698 bp, Homo sapiens
tcctaattggatggagctggggggcgtgagcaccagcgtcagatcggggccctcaggctaccgcgatgccctcctagctagccgtcacgggatggagggcttcatggactcagggacacagacggacgccgtggtggtgctgtccttggctcaggccgccgtgcttggcctggtctccgaaaatgagctctttggagctaccataagcgccgaggccttctacccggacctggggcccgagctttcaggggcagccatgggagagcccgagccaccaggccccgacgtctaccagctggcctgcaacgggagggccttggaggagccggcggaggaggaggtgctggaggtggaggcagcctgtgagaagcacacccggcggaagacgcggccacctgtgcggttggtgcccaaggtcaagttcgagaaggtggaggaggaggaacaggaggtctatgaggtttctgtgccaggtgacgacaaggacgcagggccagcagaagcccccgccgaggcggccagtggcggctgcgacgccctggtgcagagcagcgccgtcaagatgatcgacctcagcgccttcagccgcaagccccggacgctccggcatctgccccgaaccccgaggccggagctgaacgtggccccatatgaccctcacttcccggccccggcccgggatggcttccccgagccca

SEQ ID NO: 263623 - DNA, 2044 bp, Homo sapiens
caaagacaaaataatttactagggaagcccttactaacgacccaacatccagacacaggtgagggagaagaaatttcctgacagccgaagagcaacaagtatcatgatggggtgctggattttgaatgagggtctctccaccatattagtactctcatggctgggaataaatttttatctgtttattgacacgttctactggtatgaagaggaggagtctttccattacacacgagttattttgggttcaacactggcttgggcacgagcatccgcactgtgcctgaattttaactgcatgctaattctaatacctgtcagtcgaaaccttatttcattcataagaggaacaagtatttgctgcagaggaccgtggaggaggcaattagacaaaaacctcagatttcacaaactggtcgcctatgggatagctgttaatgcaaccatccacatcgtggcgcatttcttcaacctggaacgctaccactggagccagtccgaggaggcccagggacttctggccgcactttccaagctgggcaacacccctaacgagagctacctcaaccctgtccggaccttccccacaaacacaaccactgaattgctaaggacaatagcaggcgtcaccggtctggtgatctctctggctttagtcttgatcatgacctcgtcaactgagttcatcagacaggcctcctatgagttgttctggtacacacaccatgttttcatcgtcttctttctcagcctggccatccatgggacgggtcggattgttcgaggccaaacccaagacagtctctctctgcacaacatcaccttctgtagagaccgctatgcagaatggcagacagtggcccaatgccccgtgcctcaattttctggcaaggaaccctcggcttggaaatggattttaggccctgtggtcttgtatgcatgtgaaagaataattaggttctggcgatttcaacaagaagttgtcattaccaaggtggtaagccacccctctggagtcctggaacttcacatgaaaaagcgtggctttaaaatggcgccagggcagtacatcttggtgcagtgcccagccatatcttcgctggagtggcaccccttcacccttacctctgccccccaggaagactttttcagcgtgcacatccgggcagcaggagactggacagcagcgctactggaggcctttggggcagagggacaggccctccaggagccctggagcctgccaaggctggcagtggacgggccctttggaactgccctgacagatgtatttcactacccagtgtgtgtgtgcgttgccgcggggatcggagtcactcccttcgctgctcttctgaaatctatatggtacaaatgcagtgaggcacagaccccactgaagctgagcaaggtgtatttctactggatttgccgggatgcaagagcttttgagtggtttgctgatctcttactctccctggaaacacggatgagtgagcaggggaaaactcactttctgagttatcatatatttcttaccggctgggatgaaaatcaggctcttcacatagctttacactgggacgaaaatactgacgtgattacaggcttaaagcagaagaccttctatgggaggcccaactggaacaatgagttcaagcagattgcctacaatcaccccagcagcagtattggcgtgttcttctgtggacctaaagctctctcgaggacacttcaaaagatgtgccacttgtattcatcagctgaccccagaggtgttcatttctattacaacaaggagagcttctagactttggaggtcaagtccaggcattgtgttttcaatcaagttattgattccaaagaactccaccaggaattcctgtgacggcctgttgatatgagctcccagttgggaactggtgaataataattaactattgtgaacagtacactataccatacttccttagcttataaataacatgtcatatacaacagaacaaaaacatttactgaaattaaaatatattatgtttctcca

SEQ ID NO: 263624 - DNA, 819 bp, Homo sapiens
gctctggaacaaattcgtacagtcatcttaattgttttactttttactgagtaacactgctattgaaaaaaacattctgaagtgagggtttgatttatatatgtctttgaataccttccacggtgacaatcacataaactcttttaaaaaagacttgtatttattaaatattgactattttaaataatattacaaaatataagtaagatatggagaataatggtacagcgaacacccgtctcctcatcactcagtttaagaaaaataatattacgattgcctttaaaaaccccgggcactccttcccaatcttgtctcattcccaacccccacgcagtgaaaagccctgaattgggggtttatcattcattcacttcttcactttatagtttcctatctcctaaaaatcacttttaaaatcttcatatgtttttgaaaatcctgtataccgtaagttctagaggtgtgtgtgtgtgtatatgtatatatgtatatagagagagatatatatgttttttgtgtgtgtgggaaggaaagggtggaagtaatggaagaaattatgcatttaaacttgatagttaacaccttctcttgtttcagaacttaaaatattttttacatgtttaaagtaatttaattggtggcaatattttaattctaaaattaaattgggatttactgaattggaaacctaggttttgttattttgtaaatcctgggaagagtatcagagttgaaatcccttcaatttaacgtccctataaaaaagaaatccagaacctactgcctaagacctcggtgcttctccagtgttgtaat

SEQ ID NO: 263625 - DNA, 454 bp, Homo sapiens
gaagagatactgagtgaaaatgatcagttgtcaaatcaggtggttgtatgtttgctgccatttatggttatcaataatgatgatacggaatctgctgagatgaaaattgctatatatttatcaaaatcaggaatctgctccctgcaccctctattaagaggctgggaagaagctcttgaaaatgtaattaaaagcacaaagccaggaaaactaatcggtgtagcaaatcagaagatgattgagttgttggctgataatataaatttaggagatccttcttcaatgttaaagatggtggaggatttgataagcgtgggtgaggaggagtcctttaacctgaagcagaaagtaacgtttcatgtgatcctgtctgtgctcgtctcttgttgttcatctttaaaagaaacccactttccatttgcgataagagtcttcagtttgttgcagaaaaaaa

SEQ ID NO: 263626 - DNA, 666 bp, Homo sapiens
catccaaccaacagcaggacttttgttaatgtcccccaaatggtgcacaccatgaccattcacaggcttgaataagatctactgttgagtattttctatccagatgttctgatctgtttgagaaaatgtctgtgtttataaacactcgtgcatttcatggaaaaaggtttttttctgatattgtttgttaatgctatttaaattttgtattttaggtgagtacaaagccccactggcagcaggcagctccatcattccatttgagtgtaaagcaggatgatgagagtccagaaccatttagtgttaaaaatgaacagtcccatggtaagaacttcaatattctaaattagatttaaggataatttgtagagagagaccagacaatatttagttaatagtgtaatagaagtacaaaacctgaatgacattaatgtcaagtagaaaaaaattttcccaatacatcttccctcagaaaataattgattgtagttctcagttattttaggctgttgtaaatgctataagagctgatattttaggaattgggttgttgatactaaaacgtttatttattgtggtcagaatttgcctctacatcaaagactgagatttttataagagagattttaataaattatatttctttttaaaattttttgtgggttt

SEQ ID NO: 263627 - DNA, 626 bp, Homo sapiens
tgcttagcaacaaacgctgcccggacgctagacggctctggtgcggagggagctgagaccgctgcaagtcccggggccctgcctctatcgtcctaggggttccgcgggcaggagcaacccagaagcaccggtgaggccagcgcgtcctcgcagccatgagcagtgagcaggataaatcggccagcaaagaaaaatccaagaaaccagtaagatttctaccacagctgtctatggtaatttaccaatataccatcatacttcattcctttatgataatgtttgtttactacttttcaagcttgaaagagaaattagccagcaaagaaaagttcaaggcaccagcaagagctttaccacagctgtctatggtgagtacaaagccccactggcagcaggcagctccatcattccatttgagtgtaaagcaggatgatgagagtccagaaccatttagtgttaaaaatgaacagtcccatgctgaatacatggaacgttttggaaaaaagggcaaattaccccaccaagttgatgatagttatgttggaccatctacttccaaatcaaagggcaaatctccacataaagaacgagaaaactttagaagtactcttgttaatgtcattatg

SEQ ID NO: 263628 - DNA, 806 bp, Homo sapiens
  misc_feature (774)..(774): n is a, c, g, or t
cccgcgaggcagggtgaggggcgccaccgaggaagcgcccaccgggctcccggggctgccaggccccaaattgaggaagttgactgccagatcacactctgttggcccacgcagatagattccattcatcctttctaatgtctacaccatattttggataacatgccatcatctcacattgtgttgaaagaagaaaccagaatgttggggttgatgtatgccatatggatgaatttaaacagtttcggccttgcaataattggtatacttctaattgcatgtgaaattatactctttttaacgaaagatgaaactattcagtggccacatgtacccagtaacagagggagcaaagcaaatcttatcctcaaagaactgcagctgcttgttagatctacctggtggttccatagagaaactgctcagagaacctgcctttacctcgcctaaaacagaactatcccggagctcagttcatcaactcaggatccagtagtgtaatacagaagcctgttacgagatataaggcacttcgccctcggaaatctcactgtcggaatccttggaaatcacaccacgcacaacttctatttcttcataatttgcaaagaaccagtgtgactccagtcaagaacaaaagattaattgtgaattagcgaagaactctaattttttcaagcagccacatggaaaacgcattctaatgaaatcctttccattgctcttttttcttagttcttcaataaagcatgcgatttgatcacaaaaaaaaanaaaacggcaaaaaaacagaattctcaggggct

SEQ ID NO: 263629 - DNA, 1011 bp, Homo sapiens
  misc_feature (979)..(979): n is a, c, g, or t
cccgcgaggcagggtgaggggcgccaccgaggaagcgcccaccgggctcccggggctgccaggccccaaattgaggaagttgactgccagatcacactctgttggcccacgcagatagattccattcatcctttctaatgtctacaccatattttggataacatgccatcatctcacattgtgttgaaagaagaaaccagaatgttggggttgatgtatgccatatggatgaatttaaacagtttcggccttgcaataattggtatacttctaattgcatgtgaaattatactctttttaacgaaagatgaaactattcagtggccacatgtacccagtaacagagggagcaaagcaaatcttatcctcaaagaactgcagctgcttgttagatctacctggtggttccatagagaaactgctcagagaacctgcctttacctcgcctaaaacagaactatcccggagctcagcaaaggagtccattcatcctctataactgctatacaatatctctgttaaaatgctgagaagatttatcctaaaagaaggcaccaaagcaatggggttcatcaactcaggatccagtagtgtaatacagaagcctgttacgagatataagcaattgtaatgaacagcataactatttgtgtgactacacttggtataattctattaagcatggagattgcaacttttgcattaaatgcaaccacatacaattggtcaaacgcacttcgccctcggaaatctcactgtcggaatccttggaaatcacaccacgcacaacttctatttcttcataatttgcaaagaaccagtgtgactccagtcaagaacaaaagattaattgtgaattagcgaagaactctaattttttcaagcagccacatggaaaacgcattctaatgaaatcctttccattgctcttttttcttagttcttcaataaagcatgcgatttgatcacaaaaaaaaanaaaacggcaaaaaaacagaattctcaggggct

SEQ ID NO: 263630 - DNA, 1028 bp, Homo sapiens
cccgcgaggcagggtgaggggcgccaccgaggaagcgcccaccgggctcccggggctgccaggccccaaattgaggaagttgactgccagatcacactctgttggcccacgcagatagattccattcatcctttctaatgtctacaccatattttggataacatgccatcatctcacattgtgttgaaagaagaaaccagaatgttggggttgatgtatgccatatggatgaatttaaacagtttcggccttgcaataattggtatacttctaattgcatgtgaaattatactctttttaacgaaagatgaaactattcagtggccacatgtacccagtaacagagggagcaaagcaaatcttatcctcaaagaactgcagctgcttgttagatctacctggtggttccatagagaaactgctcagagaacctgcctttacctcgcctaaaacagaactatcccggagctcagcaaaggagtccattcatcctctataactgctatacaatatctctgttaaaatgctgagaagatttatcctaaaagaaggcaccaaagcaatggggttcatcaactcaggatccagtagtgtaatacagaagcctgttacgagatataagcaattgtaatgaacagcataactatttgtgtgactacacttggtataattctattaagcatggagattgcaacttttgcattaaatgcaaccacatacaattggtcaaacgcacttcgccctcggaaatctcactgtcggaatccttggaaatcacaccacgcacaacttctatttcttcataatttgcaaagaaccagtgtgactccagtcaagaacaaaagattaattgtgaattagcgaagaactctaattttttcaagcagccacatggaaaacgcattctaatgaaatcctttccattgctcttttttcttagttcttcaatcaaaagcagcatgcggaccggaatgtcgaatactttgatgatcaagcgtgagttagttgcatatctaaccaatacacaa

SEQ ID NO: 263631 - DNA, 788 bp, Homo sapiens
  misc_feature (756)..(756): n is a, c, g, or t
gggggatgaaggacgccaccgaggaagcagaccccaccgggctcccgaggctgccaggccccccgctcagggcgctgcctgcagaaccacgcccccctgtccctgtgctaagagggtgacgcgagtgcccgaagccctggcctggttaccattcgcgactccctcgtcctgggttctcccattgccaggaatgttttactagtaaccatggtatagttgagacgatccactcttgtcctacgcatttcggcacaatacaggcgtctaggaggcttacctggcattgcctgagagaatcttccatccatttaagtacccagtaacagagggagcaaagcaaatcttatcctcaaagaactgcagctgcttgttagatctacctggtggttccatagagaaactgctcagagaacctgcctttacctcgcctaaaacagaactatcccggagctcagttcatcaactcaggatccagtagtgtaatacagaagcctgttacgagatataaggcacttcgccctcggaaatctcactgtcggaatccttggaaatcacaccacgcacaacttctatttcttcataatttgcaaagaaccagtgtgactccagtcaagaacaaaagattaattgtgaattagcgaagaactctaattttttcaagcagccacatggaaaacgcattctaatgaaatcctttccattgctcttttttcttagttcttcaataaagcatgcgatttgatcacaaaaaaaaanaaaacggcaaaaaaacagaattctcaggggct

SEQ ID NO: 263632 - DNA, 486 bp, Homo sapiens
caagatggacaataaactagtaaattaaaagaaattctgaaagcaataaatgttatgtagagaattaaggtatcaggtactattttagagtaggaaagaacatccctctgagatgagtattaagctgagatgtgcatgataaaatgttatcagccaggtgagtgttgaggggataacattgcaggccagtggaatacattcacttatgaactgtggctctctgccacctcatttcctgcttgcccagcgaccatggaccagctctgatctgagtgtcctaggaaacttctctggaggttgcaactacaccttctccaacaagacctgaaccccaccttggaatccccacttcaaccttgtccttcattgcatcatttccctgagccctaggctaaccagcagagttctctttacatccttatatttacttccctgccatatttaataattctttacattaaaaagttcctgttcaaattacaaaga

SEQ ID NO: 263633 - DNA, 413 bp, Homo sapiens
gaagttacaaaagatggaccttcatccttctgcaacccttaggattaagggtcctcttgtaaaagggaggggaaatatgtaagaagcattcaaaccagagcgactccattttgaacaagggctaagaaaaatgaagctgggtcctgttgggctgcatgcccaggaggttaagcattcttagcctcaagatgtttacaattgagggaacagattaataatgtttcctaaacagactcaggacttaacagactcaggaacgtcttgatactttgagaacaaaagcacttctagttttaaatacgcattgtacctaggctggatgcttttcttacttttggaaatgccctaccctgtctatggagtcactattcattccctcctttattaaagttgcttctattttgcactgtgga

SEQ ID NO: 263634 - DNA, 232 bp, Homo sapiens
gctcgacagcagcttcagtaagagattctgggacaatatctttgaacagtaatttttttttttcaaatagattcctaaatgtcatttaagtagaatatgtaaacttaaaacttctggattaaaaaatagaataacaaaaaccctgaaaagctagccacagtatcaggactatggtttcatttgttatgaaacataccaatagaatttgggaactttaccagttttgttattg

SEQ ID NO: 263635 - DNA, 499 bp, Homo sapiens
tttcttcaattgtgaggccaatctttattgtatttttttgatattgaacctttctttgcaacatatgagttttacttctttttttaatatattgttaagctacagatgatctaaaatttgacattgagggggtgaatatttagggcaacttgaatttatgcttctggaaaaaaattacatgaaaaaataatgataaaataaataaggctgggtgcgggggctcacgctcgtaatcccagcactttgtgaggccgaggtgggcagatcacctgaggtcaggagttcaagaccagcttggccgacatggtgaaaccctgtctctactcaaaatacaaaaattagccgggcgtggtggtgcacgcttttaatcccagctactcgggaggctgaggcaggagaatcgcttgaatccgggaggcgggggttgcagcgagctgagattgtgccattgcactccagcctgggtgacagagcaagactctgtctcaaaaaaataaat

SEQ ID NO: 263636 - DNA, 277 bp, Homo sapiens
ccactgcgcccagctaattcctacagtcaattttagaatattttcatcacctgagaggaaaccctgcactcattagcagccactgcctgttctccttgcccctgactccaggcaaccagtgatctcctttctgtctatttgcctattctagatatctaaaaaccttctaaatgtttacggaaccatatcattattagatggaaccatcaatgaagtacttgaccagtaatttccatacatattttggatgaaggcaagggtattgtttctcctctgc

SEQ ID NO: 263637 - DNA, 351 bp, Homo sapiens
gtggccagagatcacctacaccaaacagatttttgtctttcaaggcctttgtttcccagggtgcacttcagccaacacaaccaagggaagaagaaaatgggcaaaagtgtgcatgaggtggtaggggccagactgtgcttgtgcccacagaaacaccaagcttctcccagcaaaagccccagaactgaagtctgcaaaagggaagaggcaaattagtaatcattctgtgctacagagcagccacgtctgagcattacctaatgcttttctcaattgttttgacacatgtagttttgttttaaatatgtatggtaatttttaataaaatgctgataagtgtgccaagccatt

SEQ ID NO: 263638 - DNA, 312 bp, Homo sapiens
aaacgaataaagaaattctcatttcactctcctccacactggactcgctgaagaaagagtagctggctggaggaagctatccagagggaagcagcacagcatctatgcacagacatagcaaataagagcaagtgaaccacgccacacttacgactatgtcaacaaaggaatagaagcaaaggaaaagactgacatagcttagactgggaatccttctagaaagtaagaaagaattcagagagattcctctctctagtcttgaagaaatgaaggtcttcaaaatgaagattgaagaaatatagaatatctaaa

SEQ ID NO: 263639 - DNA, 232 bp, Homo sapiens
aggagggactggagaccacccccggcagagaatgtatccccatacgggtcaccaaaattgtttgaaatgtttgtttcctggtgtcgtaaagcaatattacttgaatataaatttaattttttttagcgaggccattttttattttctgtagaaagggtgtacttgccagcagttttgttatgagagtatattgaataaaggagacagggtcatttataacctgacgtgtcca

SEQ ID NO: 263640 - DNA, 295 bp, Homo sapiens
cactttcagaggctgaggcaggaggagcccttgagcccaggagttcaagaccaacctgggcaacataaggagaccctgtctctttttcaattttataattttatataaaaaaattaataaataaaaatttgttaggcaatttagataccttaaagttatcactgactcaccccatcatataggcttagaaaagtgagttgaggttggggtcagtggctcacgcctgtaatcctagcactttgggaggccgatgtgggtggatcacctgaggtcaggagttccagaccagcctggc

SEQ ID NO: 263641 - DNA, 511 bp, Homo sapiens
tgcttttgttgtcatatctaagaatctgttgcttaattcaaggtcatgaagatttatacctatgtttccttctaagagttttatagtcttagttcttgtatttaggtctttggtctattttgagtatattttgtatattgtgtaaggtagaggaccaaattcattcttttgtgttcagtgtcctataacacaaaaaatacacattaatttgagatgaattacagatttaaatatcaaaagaagaaaagtaaaacctcattaagatacagaatatcttcataaccttggagtagtcaaagatttaatgaaaaagccaccaaaaaagcactagccattttttaaaatattaactggactttattcaaattaagaacttctgttcatcaaaagatcttattaagagagtaaaaaaagacacaccataataaacattatttacaacacgtatctttaacaaaagatttgtatctagaatacgtaaagaactctataaaccaatagaaaaaaatga

SEQ ID NO: 263642 - DNA, 308 bp, Homo sapiens
attgctctcctggggtggtgaagctgtctgcatactgtaaaaatggatgcatgacactgcacatttttcagaagccatggaactgcacaaaaagaaaaatgagccctcatgcaaactgtggtgtttcattaatgataatgtatcaatattgtttccacagttgtaacacacatatcacaccagagcaccacggtaatcataggggaatctgtgagagggggaggggggtatatgacaactctacattatctgctcaatttttctgtaaacctaaaactgttctgcaaaaataaagtctcttaattaaa

SEQ ID NO: 263643 - DNA, 384 bp, Homo sapiens
aagaacttacatgtttatgtgtttcctgaaatactaaatataattgtcattgcagttaattcttaaaaatatttgaaatgttagatttatattaaaatgtttggtgccttccacattttagtcagtagacataaattgtctgattgtgaaagtggatttgatatatgtgggatattcctgtgatgtttgttttataacaatagcttttctcttaacaaatcgtagcaactactaatataaaaattctttgagcaattaggtttaatcaacagtgtagtatggttcaatttgagtgctagaaataatttcaggtaaaagactgttagtatagtcttttgaagtgtatgtttcactccccttatggatttggtaatacccaagtga

SEQ ID NO: 263644 - DNA, 265 bp, Homo sapiens
aatttattcagtacaattaggtttgcttaatctgcctttatacctgctgcaaaattttagaaaatgagtaaacaggtttaatcacagaaaataaaacaaaatcactaccaccaaacgtctaaatctcatgcttgacagttttaggacttattttacttcctcttcaaaatggactgagaaattgcttaaagtatttaaatgtatcttttatggggctacaatactttctctctctctttcctgtattacagatttataattacaa

SEQ ID NO: 263645 - DNA, 386 bp, Homo sapiens
aaaaaaaaaaaattagccaggcacagtggtgtgcacctgtagtcccagctacttaggagtcagaggtgggcggattgcttgagcctgggagattgagactacagtgagtcgagaccatgccactgccctttagcctgggcaacataagtgagactctgtctcaaaaaaataaaaatcaaaatcaagtattcatcttaaatcacttcaaggcaaattcctcagaaaacatctgtggaaatagcaacataatcgtttttggcatttgtacacttcatttgagttctgaatatcctgggtagcttcactaacactattaaagaagttacattcttttaaatgtaatgtgttatacatttattgttagaataaaaaaattggaataattg

SEQ ID NO: 263646 - DNA, 145 bp, Homo sapiens
catctgacaagggattaatatttagaacatacaaggacctcaaacaactgagcaacaacaacaaaaatatccaattttaaaaatgggcgaaagagccaaataaacatctctgaaaaccagacgcaagtggccaacaggtatatga

SEQ ID NO: 263647 - DNA, 280 bp, Homo sapiens
ggccgcctgcctcccatgtcaccccgtgtgtggaggacagcatggagggacggctacgcacgctgcacacgcgtccatcaaatctgctttcttgttcctgccaggagccgcagagcctgccttagaacttcccccgcgatggatctaaatgatatttaaggtttgacaagttacacttgtggttttcaaaagaaatcatttttttgtgaagaattacctttcttggcataaaataattggaaagtacccggatatctcaataaaacacatcaaaagtaac

SEQ ID NO: 263648 - DNA, 397 bp, Homo sapiens
attacttcctatagtttcttttttacaaaatgcaaatgctctgacattttacctgtatgtttccccataaattaatttacttaaaatatgcttctagaaaaaggcagtattttaccaaaatgaggaataaaacaacatagtatatttatgaatatacttgtacatttccatcctctataatttaagagtcattaaaataagcaccgtaaatataagaaatgatattcaattgtttaataaaaaacacaaaggggtctcaatatatggtattgaacagctagtttgacaacaaggagattttttcagtatctgttcattgtgttttatggatattcctcttccactatttacttatattcataatatttatatattattttataagtaatattatatt

SEQ ID NO: 263649 - DNA, 623 bp, Homo sapiens
ggcagtctgggtagcctcaggaacctgtgtgctgtataccttcaattgttcaactatctcctcaaattcaagccaaccattatttctttttgctgtcactatgtgttttgaactatttccaggcttagcattttgttttagagtctagaagctgaagctgctgaaactgtcagaaatttgacttccttttgaataagggcattaaatattcctacactcctaatatcattctctataccaaaccaaattccctgggttctcaacccaaggttgggttctgtgctctcatcatgccctatgagtccagccacatagagatgatttgcaactttaatcttttttccttctaagctagtctctcttcatttttaattcaagaagctgcctttctcatagaaaaacatacgcttcattaaattttcaaatttcaagatgctcacatgatataattcaatccaaatagctagcacaactaaaccttataaaaataagtcatagcaatttaggggttttaaaaggtagaatgaggatgccaagtgtttgcacattattttaaaatatcttacaatattcttcttgaattaagaggtcctggccaattccctgtgactcaggtgatgtat

SEQ ID NO: 263650 - DNA, 424 bp, Homo sapiens
gccaatgtccaacctatgtgaggaacgacagaatagcagaatgaccagacatacagaaagaagggaaaagaacgtgtgcaacagaatcaaatggcatatcctcctgcccacattccccaagcctcagccccatccccgcaggaacaggcgactgtctgggaatcagccccctctccctgaagctgcttacctagtcaccaacttctgggaaccagacacttgcacgccattgttatttggggacccacttggttcaggtgcttctcagcaccatccaaagggattattttaaccaggcgtgttagagaggcagcaagaaggaacacttggacccaaacccacacagtggcttgagggctttatcatttttaccttaagcatctaaatatgtacagcccaaaataaaattcagcagtaacaacaa

SEQ ID NO: 263651 - DNA, 83 bp, Homo sapiens
gaataacaattgtattgatattatgttgtttagagtaagtggcaatgtattctttgaagagttaaaactgttttctgtgttta

SEQ ID NO: 263652 - DNA, 326 bp, Homo sapiens
gagaattgatgctgatggactcttggttgcctacctgtatcgtttcttctttgtttctaccagaaccttgattttgtttagatatctcctcctgtcccacatagtaatgcatttcaggggaagctgaccccaatcccacctctaggtgtgggcctgattggcagaaacatgacaatctcatccccttgctcatgtttagttcagtgataggcatggggcgcagctctggccagtgaaactagaggcaaagtttgctgggtgggggcagaagaggagttccaaagaccatttctgagagaggattataaagatatatttcccttatt

SEQ ID NO: 263653 - DNA, 440 bp, Homo sapiens
gccctgatctaggggcccctggcaagaggtggggtgagcctctgctctcacattgcctcacccctcaatagtgagtgctcagcgggcaggctgcaccccaccctctgggagaacaggattagtgggaagatgagacccacacacagctctgagagagtaaggcagctcaccagcactgagctacaagttgaggagccgccagggacctgcagatgcccggcaggaggaccgatccctcatggagtttacattccagcgaggagggggtgctgggagacatgcagagctgtgggcggggcttccttggaggaggggagaggtgttcgccactgaccaggggcctccttggttcttttagctggacagccaagggggcttgggccggggcaggtggccttcagatggacaggggccggctcaggagcccagcctggctcagg

SEQ ID NO: 263654 - DNA, 693 bp, Homo sapiens
aaacactcctgagtatcccctgcagtgcctggtgtgtgagctctggctaagggaatatggacaggagagttaaatgccacttccaagcctgacctccaaaacccttcccacagtctctcacatgttgtctcttccccattaaccagcagaggactctggtagtggagcttaactgtgctccactagcaggaccagagctaagattctgctaggtaaagaagagggaactgcaggcaccctggcccagaggcctgacacctgatgcagccaggagaataaaggtaaagagccccacaggagagaaaggattctgagtctctgaaaaactgcaaagagaagagcctcccagcccaacccacactcacacacacacatacacaagctgcactgggctgtgatatgaataaaagataatcacattgtgttaacccactgagatttgggggttgtttgttacagtggctaacgttacttactctagctaacatactcttaggttttattaacagatgggatgagataatgcatgcaaagtgcccagttctatgtctgatatacagtaggtccctagcatagcactctacctgaaacatggtaggtgctcagtaattaagggttataaaaagtcaaccagttgcttttcttagaggccctagagacagcatcgtagccaacatgagccttttgtagctg

SEQ ID NO: 263655 - DNA, 456 bp, Homo sapiens
ggaatctggaggaaaactgaccaggtggcttgttaacagtcagtgggaatttgaaagaagaaaaccagatggaacaagaagactgggacttccccatcctgtggatcccattgtaggagagccagaatactgccctatgagactgggaatgacaactggaagacttcagtctggagtgaatattctgcaggggttcaaagaggataaaaggaacaaagtaactccagggttatatttgaattatggaccctggagttcttatgtaccgcattatgactccacatttatgaatatcaagcaaggataattcagatttaatctatgcaatctatgggggaagactgatcttccaagcaatttcagcaaccatgagtttctggccccatgccaagattacccatatgttatgacagataagtttgcttggatgttttaacaaaaggaggggattccagg

SEQ ID NO: 263656 - DNA, 793 bp, Homo sapiens
gacacaaagatgaaatattttgttccctcactgctcggtaactattctcctaagtccccggagtttctgagctgtgaaaacaaaacaaagcccatctcaggacagctgaggcccttttgccctcttggtttgccttgattttgttagtttcacctagaggacaggactagacactgtggtccaagttgggaagataaaatgttgtctgtttctgaagcaaaaaagctgaggctgagataacaattagcattgataaggtccctataggggcttgaaagagaaccctggcttgtttgtcagcttccgtgtgaggctgtgagcccactggtcatggttagcacttgagctatcccctgtttgtgggtaaaccagaactccaagaaaaaagcagctctgatttgtagcattcaccaatttccatggtgtaaatactcccactacagccaatttcaactggtaagtggtgatgtcacagaaggaggagctggaaagagaagaagatattcagctcttgctgttctgggaggaagtggccccagcacaccactgtttggaaccattttctcagggcttccttcccctgcttataactttcttcattacagggcccatactgttgcccatgagttcttctaaaatgtgggcatgatcgtggtgcttccagggttataaaccatcaatggctccctattgtctatgagataaaacctaaggttcttagcccagtattcaaggcctttttaatttggcctcactcttatttttttttttcagtcagatacatgacccatgt

SEQ ID NO: 263657 - DNA, 412 bp, Homo sapiens
tccaaataagctccaagaaatgtttttggtaatggaagcagaaaacaagcctgtagctcatgactactttggaggaagaacatttggatttgtaaatttagtgtgttaaaaaaatcacttatcacagatgtttggaatcttcccactgatttctgcatggctgcttatttttcttcccttaagtctcagttcatgtcacagagggcttccctgacctctcacacctcaccaccatcaacctgttttctccatagcacctatcacagtctgaattgtcttattatggccttacctatccctaacacccatttaaaaatgtaagcatgaaagaaggaacgttgtctatcttgttcattgctgaatccccagtgcctagaatagtaccaataaatacttgttaaatgagcaaatg

SEQ ID NO: 263658 - DNA, 480 bp, Homo sapiens
ttgatcatcctatgattctcagaataagatcttataatagtaagaatattgagagttatgaaacattgataaattatacctggatgggatgctgagagttgttctttacctccatttatttatgattataacaataagattaataataatgctaataatgttattgcacatactatatgtcaatgtaagtactaatgcaaaacattattacctccattttgctaaagagaaaaattaggtacagatagtttgtgtgacttgtctaatattgcatagcctttgggtggcatgattatgatgtaaacctagtcactgcggtcctagagtcagagttttcaaaattagtacagtatttccaaaccttgatcttttcatggtcctaagtatataatttttattctcatattcttaatatcttgctgtgttaaatggagacagtgtggggaattagctccttgagttgctattaatagattagtt

SEQ ID NO: 263659 - DNA, 482 bp, Homo sapiens
gaaggtgtaggggtgctgggctaatgctccctgagtttggagcaatccttagaatcagtcaatcaatggtcctgtgggaagatgcagaaaggccatgggtttaacataactggtcttgaatagtgaatccagggccatggagcccaggcggccactttccccaccctccgcccccaaccccccactgccaggttctgctctaaaatctggcaaaaagggggctttaggatctctctttacaacatggcaaaaagctggtgttttaggcaggtcacacgtattcaagcacccatgccaccagcttgtggtgggatacccagcagaaggattgtttacctcacccttggaaatatttgaagtgaaagaaatcaatgggctgtagttaatgtctcaagatcattgcttgtcatggaatgaaatttttcacctatgactatgagcgtatcagaataaaatgtgcttttatgtttaaataaggaata

SEQ ID NO: 263660 - DNA, 366 bp, Homo sapiens
tttttttaccttcttgtgggcgtgttaaatgaagccattagatgataagcttcgaaaggcagaccttggatgtcctccaacctgttttcctatcagacccagcacacagtaagcatatatggtcaggaaactacctctgtgttcctgggcaataggtaggtctgtgatgggaaaataaccaagccagaacaagcagaggtcagtcgatcaacaccaagttttcataacttctgtgtgcagagatctgtggggagacccagaggaagaagccagtaagtcttgcccttagagaccctctggtctagtggggataaccgaaccacacacattgggaaaaaaatagtgtggcaagtcttgctagaaaat

SEQ ID NO: 263661 - DNA, 451 bp, Homo sapiens
cacacaaaaaaagctgtgagtgtgcatgtgtgtgtgtgtggcagatttatttatttattactcaaaattggaagtaacccaaatgtccttcagctggtgaatggataaaaatatccatacattggagtactactccccaacataaaggaatgaattattaataaacagccacatggatgaaactcagatgcattatgctaagtgaaagatttcagaatcaaaagactgcataatatatgatatcatttatgtgatattctggaaaaatcaaaactataaggacagagaacagatttgtgttttctagggcataagcaaggaggagggagagttcaactacaaagagacactacaaaggaatttttggaagtgatagcaactcttctgtgtgtttattttggtggcgattatgtgactgaatgcatttgtcaaaactcatagaactctatac

SEQ ID NO: 263662 - DNA, 1251 bp, Homo sapiens
ggcccgtactaagcagactgcccgcaagtcgaccggcggcaaggccccgaggaagcagctggctaccaaagcggcccgcaagagcgcgccggccacgggcggggtgaagaagccgcaccgctaccggcccggcaccgtggctctgcgggagatccggcgctatcagaagtctacggagctgctgatccgcaagctgcccttccagcggctggtacgcgagatcgcgcaggagtttaagacggacctgcgcttccagagctcggccgtgatggcgctgcaggaggccagagaggcctacctggtggggctgttcgaagacacgaacctgtgcgccatccatgccaagcgcgtgaccatcatgcccaaggacatccagttggtcagccgcatccgcggggagcgggcctaagcgaaatccgctcctgctcccaagaagggctccaaaaaggctgttacgaaagtgcagaagaaggacggcgagaagcgcaagcgcagccgcaaggagagctactccgtttacgtgtaggaggtgctgaagcaggtccaccccgacaccggcatctcgtccaagaccatgggcatcatgaactccttcgtcaacgacatcttcgagcgcatcgcgggagaggcgtcccgcctggcgcactacaacaagcgctccaccatcacgtcccgcgagatccagacggccgtgcgcctgctgctgcccggcgagctggccaagcacgccgtgtccgagggcaccaaggcggtcaccaagtacaccagctcgaagtaagagtgtgcaagggacgcaatagatcaaccacctaaccccaaaggctcttttcagagccacttcagtaatcgagaaagcagctgtaaacacttgtcagagcgtttgatagcttttggtcaggtagggagtgttaccatggtcacggatgcattcgggtttaggactaaggagtttcctgtagtcctgtaatgagttggccctcagtcatccccgtctagtcttactgagttgcttgttatctgtgctacgagattagaaaggtttgactcgttctgggatatttgggagggatggagggaaggaggcggggggtggttctacaccccttcagcctttaacctgtatctttaaagtcgttttcctttttgtttctgaaagtaatgaacgagatgagatttcccatacagatgagaaaccctcggtccaacctcttactatttcttagtgttttaatctgttttccttaccatata

SEQ ID NO: 263663 - DNA, 363 bp, Homo sapiens
atcccgtctccagggaagcatcaccacagttccaacacggcgtcggaggccccgaggtcttgggtgctcagtgacgtgagccacatttcttggtgggaggcctgaaacacctccatctcctcctaggtcgctggactcagcctccgctccgcatgacctgggcccagcttcccaaatgcccctgaacgccagccatggctctggggccaggctggagaagattcctccccacccccagccccaaagcaaccccagagcatttggtaacaaagaggccagaccacaaagcgcaaacagtaggcaggccgttccagcctgccccggctggagcctgcaggcctgggcaagaaaccacgagaaaca

SEQ ID NO: 263664 - DNA, 354 bp, Homo sapiens
gtttctgtggtgggggtgaaaatgctagaggtgtgcaccaaaaagggtgaatctgcctctgcatgcaggtgacggcgtgatgtaaacagaaggcttttctctctagagccaactaatttccagaataatctgagccaggcgtgttggctcacgccggtaatcccagcactttgggaggccgaggtgggcggatcacgaggtcaggagatcgagaccctcctggctaacacagtgaaaccctgtctctactaaaaattcaaaaaacaaattagccgggcgtggtggcgggcgcttgtagccccagctactgtggaggctgaggcaggagaatggtgtgaacccgggaggcggagc

SEQ ID NO: 263665 - DNA, 315 bp, Homo sapiens
actaaggacaaggccaactgataactcagtaaataatcgagtccattttgtgcttgcgagttaggggcttaatttggggtggtttgcagattaagtactttcactgcatataataaacgtacaccagcaaaccactcatggaattcttaaaaaaacttctgagctagtttaccagtttcaaagactaattcagagagcatgttttacctattctaggctggactggaactcctggactcaagcgatctttccatttatcagggactactgacgcgtgtctcccaataaatacctgagtataaacaaaaagaggac

SEQ ID NO: 263666 - DNA, 415 bp, Homo sapiens
aatttttttatttttgtctgacacacagattaaagttttccagtatttcctacataacattaaagggggaaaggtaaagaccagatatgtaattacaaatttttttaaaaaaaatcactccccaaatagtacatgctttattttttaagattaatatactggaaaaatcaaactttacctcaaactcatggtggttccaggagatcacatttgcacttccaagttctctgtcaatattaaatgctctcatttcagattcaagagtatctttcagttcttctcgtgttttgaaattccaaataaggtttgacctggcatggtcttgaccaaacctagacatacatataatgaggaaatagcaggatgcactaagcattttaaaaaatctataaatatcccttactgaccttataat

SEQ ID NO: 263667 - DNA, 441 bp, Homo sapiens
cagtagacagagtcattcaccaagcatgcctgatcttataaagcatgtggcaatgagcacagtagatcatgtactgcatgctaggacctcattcctgagaaagcagaaccattcaatccaagcattcccaactttaccaaacaagaaagtcactctatcctccctggtgacaagagagtaagaggcaagagaaagcagaatgacagaaatagatgtccctccacaagtcagaaaatgtcagaagtaggaaagaagtggctctgatcccaatattttttaaaagtggagttttcaatttgaaaataaataaaatgcacttagaacatgaaaatttttcaacaaatattaagcattattaattggtatattatcatcagtgtcttttattctgtatttcttcttgtaataaaacatgtctttgacaatgcctaaaatagctaa

SEQ ID NO: 263668 - DNA, 443 bp, Homo sapiens
tacacttctagacaacacaaaccttaacacacaacaggcatgcattacaaatttaatgaaccacaaattcaaattcagctggtgtttactgagtgctaggcaggtatttgaatccctctgaggccaggtgatgttacaacgctcctaagtggcagagatgaagtctaaattctgactctgcactgccttttccactacatcacgatggccctatggaattcagtctattcaaggagggcagcagaagcggtaaacgtcatccacgctttgaatacctgggcaacaaggtaaccaaccacacatgtccctgaggtcatagccaggcggtaggttggcaagcagtgtctgtctgtttcacttagaggaaaggagtctgaagcaaaaccattttaatcctgtgcattttgtcatgtacaataaaatacagtaaaagcaaaaagaat

SEQ ID NO: 263669 - DNA, 621 bp, Homo sapiens
acttctcagctaacattcatgggaccggcacaatctagtttttcccaacctgctgtttccagctgtacctaaaaccactcaactctccacaaattcactgaggccctttcagcccagtcgcatgttggacaaaaaaaacagaagaaagacttagtacctggcaagacttaatacctggctctgaggtgctctcagttacaagacagaggagtaaataattaccagaagatgcagtcagtgataagataaacaaaggacactgcttgccctaatgtccccactccaaaataaatgatctattcactgtcccctgaatactggcctatgcttattttttcccgctaggattttatttggccttttttctcctcctttcctgtctaaacatttcccattgttaaatgctcaggccctagtgcccctcctttgagaattctgattccaaggcaagggatctttccctcctctggagttgaatgttccattgagaaacacctactcttccagcatgtctcagcttatctgctgtgtgtgtgtgtgtgtgtgtgtgtgtgtgtgtgtgtgtgcgcgcgcgcgcgcgcgcgcttttgagccggagtttagctcttatcacccaggatg

SEQ ID NO: 263670 - DNA, 242 bp, Homo sapiens
tttactaaattttaaacctcaagcacacatctgtttaatagtcagtgtaagaacataggcagcatttctggtgcatactgatggaaaggcagttgtcctgtggaaaagccattatgtaattgcatgagttgtgagtgaagttaaacattttttttttagtgggtcatcattttccttgaaagaatgactgaaaggcacactgtgattattcagacttgggtatttggtagaaattttctcaa

SEQ ID NO: 263671 - DNA, 443 bp, Homo sapiens
ggccccaacactggctaaaggagcatatgtccacagcattagttggtgttggtgacgcttcagaagtatatgcaagctccacaattttacattgcatgggccctgaaggacaaatgggaactatctgccccctcattacacccattcctgttaacctgtggggaaaagatcttttatatcaatgggggacatagatttcttttccacaaggcagttacagccagcaaagtaaagacattatgacaaaaatgggatttgttcaagatatgggcttgggaaaatcagcacaaggcatcaccgagcctattatacctacccataaaccagattctacaggacttggttattctttttagaagtggtcactatcaagtctccagatcccatccctttgacttggaaaactcagaaactggtttgggtagatcagtggctgctcccaa

SEQ ID NO: 263672 - DNA, 687 bp, Homo sapiens
atcagactgcatgtggcattttggaacctattttgttcatttagtgatgtctttccaagtcattagcaattgacttcaccactatttgcgatggcttcatgaaggttcataattaaatgtactataatttttttaaattttattttattttaagttccaggatacatgtgcaggatgtgcaagtttgttacataggtaaacatgtggtttgctgcacctatcaacccatcacctaggtattaagccctccatgcatagctatttatcctgatgctcttcctcccaccgccctccccaccctgacaggcccaagtgtgtgttgttcccctcgctgtggaatttgaccattttatatacctcatatgagtggaatcatgcagtatttatctttctgtgattggctaatttcacttagcacaatgtcttcaaggttcattcatgttgacacatatggcagaaattttcttcatttttaaggctgcatagtatttcactggacgtatacaccacatttatttaaatttaacttttaagttcaagggtacatgtgcagatttgttatataggtaaacttgtttcataggggtgtgttgtatagattattttgtcacccaggtagcaagcttactgcccattagttatttttctgatcctctccctcctcccaccctccatcctccaataggc

SEQ ID NO: 263673 - DNA, 276 bp, Homo sapiens
aaagttttgttaactgaaggatgcatcaaagttcctttattgccatcagaggcaaaaatgagtaggtggggatggatggttgcctggctggctagtttgatggactgctggcagaaattaatgtacctctcaaaaggattttaagcttctttccacatagacaggatataatggaagaaaaacggtgagaaccattatgccaaaatgtatttgatattcatattgctggggaatacttcactgagatcaatcagctatttagcagcaaaagaaatt

SEQ ID NO: 263674 - DNA, 204 bp, Homo sapiens
gcgggagtggttgtttagatattttcttcctcacgtgaaacctagactaatgagttatcatctaacaagctgtaggtagtttggctgggctggatccagatggtttgagttaaatctagattgtacttgcctaaaattctgtaaacctctagctacgcaaatcctatttccaaaaatgctgggaagtcactgtataagagttta

SEQ ID NO: 263675 - DNA, 242 bp, Homo sapiens
tttttcctgaggtgttccaaccctgggctcaagccacggagggtggacagactgcacggtctggacttgtaactaagtctcctctctgtaactttggtccttgcaagccaaaacaaatccataagccactgcttcagagtcccagagttgtaggaacaccaccttaggggaaaagagaaaacattgtggtcagtttcagatgaacctgcgaagaaatgttcctagagctgctttgcagtgct

SEQ ID NO: 263676 - DNA, 109 bp, Homo sapiens
tttaatttattatcaagtttcctggcaggaccacaaggttacagaaaccaaaatgaatcaatgagttagggtgaaagtgtagatttcataaagactacccacaattact

SEQ ID NO: 263677 - DNA, 981 bp, Homo sapiens
agccgacttccgccccggaaagcgaggccgccaccatcttttgggtccgggaggattgagtcatcgggctccaatgcgtggggatgtttaccgccgtttatccgggatagagactccatcgtgctgacagcatccttttattcaccgcctccgaatttgcaaagaggaggaaggagggacttcttggcttctcccagcatagccccagttatgccatctcagaactatgaccttccccagaagaagcaggagaaaatgaccaagtttcaggaggctgtgacattcaaggatgtggctgtggtcttctccagggaggaactgcgactgctcgatcttacccagaggaagctgtaccgagatgtcatggtggagaacttcaagaacctggttgcagtggggcatcttcccttccaaccagatatggtatcccaattggaagcagaagaaaagctttggatgatggaaacagaaacccaaagaagcagcaagcatcaaaataagatggaaacactccaaaaatttgcattaaaatacctttcaaatcaagagctgtcctgctggcaaatctggaaacaggttgcaagtgaattaaccaggtgtcttcaggggaagagttcccagttattacaaggtgactctattcaggtttctgaaaatgagaacaatataatgaaccctaaaggagatagctctatttatattgaaaatcaagagtttccattttggagaacccagcattcttgcgggaatacatatctgagtgagtcacagattcagagtagaggtaagcaaattgatgtgaaaaataacctgcaaatacatgaagacttcatgaagaaatcaccatttcatgagcatattaaaactgacacagaaccaaaaccctgcaaaggtaatgaatatggcaaaatcattagtgatggctccaatcagaaattacccttaggagagaaaccccatccatgtggtgagtgtggaagg

SEQ ID NO: 263678 - DNA, 720 bp, Homo sapiens
agccgacttccgccccggaaagcgaggccgccaccatcttttgggtccgggaggattgagtcatcgggctccaatgcgtggggatgtttaccgccgtttatccgggatagagactccatcgtgctgacagcatccttttattcaccgcctccgaatttgcaaagaggaggaaggagggacttcttggcttctcccagcatagccccaggtacctgctcttgaacgcactttgttgttccattttctgtcctttcagttaatcaagtttccgtcactcagtaagttactactgaaaaatgatgaaatatttgttgaataaatgtgagagtgggtaggaaaactacttggaaatgagtattaccaataacatcttaccactttgattttaaggcattcgtctgtggaccatagctattgatgaagtaggtcttgttattttgttatgaggaaattaggcagagtttatgttattaaatactttcccgaagttattcaactgatagtaagaggtggatttgggattgaacccaagcattccttttcagactgtgtgatcttttttgtttgtttttgtttctttggtttttgttgttgtttattttctattcctttttctgagtctgtggtcttaatctcaatgatacagtcgtcttcagttatcttaaatagtaatccatatggctaccggtgagtcgttggaaatcagccttgggaatgtag

SEQ ID NO: 263679 - DNA, 1394 bp, Homo sapiens
cggccgcggcggaggccgagaggccgagggcgggaagtttgctctcctcccgcacttggcaagcagcgccgctagttctgtgggtataataaacagcgagttacctatgatccgcgctcctgtttcctcatctttaaaatagcaataaagatagtcgttactgtgtagggttgtaattagaattaaacaagataatacgggtcaaaccttagaacagtggtggcacctgatactgggttggctcctgctattgatacagtgattccctcacaagcgccctttttactggaagctccagtgaagagagaagaaaagtcagggctttatgccatggcctttctgtcgtatccttcaggagaccgagctcttcccgaacttttacagatcttttttttttttaagaaggattgagtcatcgggctccaatgcgtggggatgtttaccgccgtttatccgggatagagactccatcgtgctgacagcatccttttattcaccgcctccgaatttgcaaagaggaggaaggagggacttcttggcttctcccagcatagccccagttatgccatctcagaactatgaccttccccagaagaagcaggagaaaatgaccaagtttcaggaggctgtgacattcaaggatgtggctgtggtcttctccagggaggaactgcgactgctcgatcttacccagaggaagctgtaccgagatgtcatggtggagaacttcaagaacctggttgcagtgggtgaggacaggcactctctgaccctgaacttcagttcccttgagaatctctttgctctcagggcatcttcccttccaaccagatatggtatcccaattggaagcagaagaaaagctttggatgatggaaacagaaacccaaagaagcagcaagcatcaaaataagatggaaacactccaaaaatttgcattaaaatacctttcaaatcaagagctgtcctgctggcaaatctggaaacaggttgcaagtgaattaaccaggtgtcttcaggggaagagttcccagttattacaaggtgactctattcaggtttctgaaaatgagaacaatataatgaaccctaaaggagatagctctatttatattgaaaatcaagagtttccattttggagaacccagcattcttgcgggaatacatatctgagtgagtcacagattcagagtagaggtaagcaaattgatgtgaaaaataacctgcaaatacatgaagacttcatgaagaaatcaccatttcatgagcatattaaaactgacacagaaccaaaaccctgcaaaggtaatgaatatggcaaaatcattagtgatggctccaatcagaaattacccttaggagagaaaccccatccatgtggtgagtgtggaagg

SEQ ID NO: 263680 - DNA, 254 bp, Homo sapiens
ttttttttttgtcagcaataaaacctgaatattttgaatttttctaccacacagcagttcaatggcttaaagttttactacaattgttttgagttcaggaccaagatttcaaatcttttgaacaagaaaatctaccctcaaccactactgtataacattgaatggatttataaattagtttttgcagtggtaacattgataatttgttgaaatgaatttaacataaaattaaagatgaaacagtgatgtctaaa

SEQ ID NO: 263681 - DNA, 469 bp, Homo sapiens
gtaaaaaatatgtcagactaatcttactagtagtttattgcctctatggtattgtttgattatattgtgttatattacatggtgtcacatagtttttcctgttaaaatatctgaaagtttcactgctagatattaaaaacttttgtattctctagtcacctaatgaaatacagatatctctgggagttgaaataattttaaccattatcaggtaattcttaaggagctcattgtaagaaacgtgataaaccacatgaaaattttgcatggtaagtaccaggagactactgtgcactacagtgtatcatggatatattttacaagaggagcacgtgattcagtcctgggaagatgccatctaggctgaatctcaaatgatgagtagatgttagctgggcagattgttctctaagcaaaaatcttaaaactcccaattcctctttgcccccaaaacctttcatttgttaaa

SEQ ID NO: 263682 - DNA, 702 bp, Homo sapiens
tgttaaaatggaaacatcatctcttcatacatatgcttgttctagagtttaagtgaacagttgtgtacaacaaatgttcttgtcttcctttagtattatttcaaatcatttgatatgtaagtacaatattaggtaataatttatatcattttggaaatgtgctatctttccaactagacttgaaaatattggtaaaatctttattaagggcctgcatgtttttggaactcaataaatgttacttctgtttcctgctttaaagattttatatcatgctaatgttaggaggccatagcaaaaatacacagaggacaaagcttaacacttattaaagataaagactatattttcatgctttgagaatgtcttaaaagtaatcatggaaaataggaattggaaacttctaatcctaaatgttgcctgtatcagactaaccaccctagttggataaaacttaaaatagtaatacaaaacagaaaaacaactgtttgaaagcactggagaacaaccaaagcagctaagatttgaggagccaagatcatactataattaacccgacattctccacatcttttccgttcaaggcagttgccagttcctaagctggctgtgtagctgagacgctaagcagaaaatagttcctaaaaggctaaaaaattaactacaaatccagtagtttgatagtgctaggagaaaaaagaa

SEQ ID NO: 263683 - DNA, 219 bp, Homo sapiens
ggcttctttctcttttcccagttctgccttcccaggaccctgcccttccccagaaggagcaggagaaaatgaccaagtttcaggagatggtgacattcaaggatgtggctgtggtcttcaccagggaggagctggggttgctggaccttgcccagagaaagctgtaccaagatgtgatgctggagaacttcaggaacctgctgtcagtgggtgagcaca

SEQ ID NO: 263684 - DNA, 125 bp, Homo sapiens
tatgcacaaagagaatagtcagcctcattgtttttaaatcattattaccatcatcattattaaatcagagcaatttacttgattacgtgtatctcaaagctattttaagattaaagagtaaataa

SEQ ID NO: 263685 - DNA, 292 bp, Homo sapiens
cttcgtggaaaatttgaagacagagacaatgttttactattttcatttttgcacctacagtttctagcataggcttggcatcttgtaaatattcaataaatgtttgttgaatgagtgcgttaattgattctcctaccagtctgagctatcagttatgtctctgtggctagatggacaccatgtcttccatccctgccaagagttcaactgaattcaagtttataaatggaaatgtgtgtgtatgaaggaattaaaacaattcagaaaatataaagttttaaaaacgaccttt

SEQ ID NO: 263686 - DNA, 145 bp, Homo sapiens
ctcaaaaaaaaaaaacaaaaaaaaaaaaaacaaaaaacttatagcatcaggagaggtttaggggtggagcgggacttctggcctactgtagccaccctgcctcaagccacataagaccataaacagcctttatgcttcctattga

SEQ ID NO: 263687 - DNA, 287 bp, Homo sapiens
caaacgcatttctaattctgcagcaaagcatatgaatattcacattgagtctataaatagtctcccatcagttcccatcagttcaggtcagtttttgcctccaaatgagttacaaagtatttgcatttgttggaaatgcttctttcttgtcataactagggcttggcgtcagtatcacccaattacttatttttaaaagagtcattaatccattgttcctggaatgtgtcaaggtttaagatcagggtcagagtaggatacattgatacagccccacggctgttctt

SEQ ID NO: 263688 - DNA, 751 bp, Homo sapiens
gcagaattcatgattcagacctcaaaagtggaagcaagaggggctgagtacagtcactcatgcctgtaatcccagcacttgaggctgagggaggaggattgcttgaggctagaaatttgagactggcctgggcaacgcagcatgactccatccaaataagttgggtgtggtggtgcatgcctatagtcccagctatgcgggaggatcgcttgagcccaggagttcgaggctgcagtgagctctgattgtgccactgcactccaacttgggtgacagccagactggtgtcttaaacacaacaaaaacaaaatgggacttaagtaagctacgaagttcttgcacagcaaaagaaataacacagtgaacagacaacctgcagaatgggacaaaatgtgcaaactatgcatcaggcaggggactcatccagaatttacaaggaattcagcaaaccaaatcaccctatccaaaagtgagcagaaaacatgaataggtatttttcaaaagaagagataaaaatggccaagaagcgtatgaaataatactcaacatcactaattagagaaatgcaaattaaaaccaaatgagatatctctcatcagtcagaatggctattacaccccattcaatgtaagagaatagtaccttatcctgtaggctgcctgaatttattaggtaggcgcaaaagtaattgcagtttatgccatattaagcagagtatacaaaccaatttctaaggaagttcatcacagca

SEQ ID NO: 263689 - DNA, 431 bp, Homo sapiens
cacacacacacacacacggagagagagagagagagagagagagagaaataatcatataggtgctagaacatattctataacttacataaaacaagttgaattttcatttgagtttgaggagaaatattatggaccatgttcagtggtgacccagtaactctttctgaataataactctttctgctcccccactgggatttctgggagctttgcatttacctcacagtggtatgagccatgtggtcacatcctataaagtcatcactttctaaggtcaccagatgtatggagaaaaggccaagcaggcttcttactgaagtctttaaccccagagtcaacaacagtgcaccatcaatttagttagaaaacaagaatgacttagtgtcccatttctgagcaaagatttcttctgaattaagcctcgtttttat

SEQ ID NO: 263690 - DNA, 883 bp, Homo sapiens
cagtggctggcgcagtccccaacaggactgagaaatgttggcttaggctttcctagtctttggttgccgcttcaaggcactgactgggccctaccttcagatgaagcaccttctccatgactgctgcccttcacgtttgacctcttctaagaatccttccctaactctacctggcttcaatagcttctcttcgacattctcttgctactatgccaagagaagagaacagaaatgaaatctgataagtgtgtgcctcccacgaccatcccttatagacgcactctcgctctgctcgtagatgccgcggcccatctgtggggcctgcctgcccacgggccggaagtgttggactcaaaagcaatccatcaaatgcggagacacatttgcactgtgttctgaaatacatttttaacttttattgcattctcacagagcctaaaacaataaattcattaaagaacagcaagagtgtagattaagctcacttttctatttagcctgcaaaaagaggtgtgtttaaaattaacggcagtatttttttttgtaaagaccagagtcaggcttttcttcggtactgcttgctgattggccagtgggcagagttctacatgtgggcctaacatgcaccccaagggcttcagtcgtccccactggcatcgccatcagtctatgtgcgtccacagggcagtcgagcttgagcgtctgttgggcggtaagttctcagagcccagtctgtttggcaggttttttacaacatgcaaaccaagcttgccttccagaagcatctgagtcctgctctgaccacagggacttcttataggctttcttagagcatcatgtatatccctctgcaaagccaccttatttctatgacaccctgaaa

SEQ ID NO: 263691 - DNA, 432 bp, Homo sapiens
agagggaactcgcaggagcaactctggaaattagttgaaaacagcaggattctagcctgggagcacttctagaactctgccaagttggccgtggccactacctttgttggaaacaaagcataagggagtgaaagtgtctaaagaaaggtgggggctgggtgcagtgacccacgcctgtaatcccagcattttgggaggccgaggcaggcagatcacgaggtcaggagattgagaccagcctgaccaatatggtgaaatcttgtctctactaaaaatacaaaaattagccgggcatggtggtgcatgcctgtaatcccagctactcaggaggctgaggcaagagaatcgcttgaacccaggaggcggaggttgcagtgagctgagatcatgccattgcactccagcctgggtgacagaatgagactccatctc

SEQ ID NO: 263692 - DNA, 372 bp, Homo sapiens
tgctgagtgtgcttctacaagttagatttcaacatatatatgttgatttggtcgattatacaaatcacatttcatacaaaatgagttgtatcaacaaccactgctttttaagaagtgcttttaatgtaaatctgaatacttttactgaccaaaccattataaagtcttctctgtggtttaggctggaggacagtggctggtaaagtacagttcagagtagactaggaacagaacaaactttggagatttgacaatggaaatgagattttgggggctctgactggtactacctttaaaggttttatactgagagtattattggcagcggcaaaactcctgctctatacaacgtggttagtgttgttcccttat

SEQ ID NO: 263693 - DNA, 491 bp, Homo sapiens
gattttacctgttttgttcactactttacctgcaatggccagaacagagcttagcacacagtagaagctctattaatgaatgaagctggagtatagtgtgtgggaagagactggtgggaaatgatgctaggaagctgggcagattgtgaagagtcttaaaggaacttagactttatgtcatagaagaaagcgaaccactgaaggcttctgagtaggcaacactgggcaacgctctctgctgtatctgaataggcagagaatgtgtccctgagtgggctcaggactggcaacctttctctatataggcaccagaagaagttctctggacagcaggacagagccaacactgcagccaaagaatgacattcctatttcttgttcttctatatatggtacagcagaaaatcatatggtaaaatcaaaagaaaattatattctgaatcaaacatatctaaagtttactataatcagtgggcagcttggtccccaag

SEQ ID NO: 263694 - DNA, 805 bp, Homo sapiens
taaatcttgagggtatcaaaggattgaaatggaagagccctgaaaattggacattaaaaaggcattaatttcaagagcattttctctgtcctgtaatttcccctccagtatgagattgtggtgggaagatgcacctctccacttcaccaggtgtgagatgaattttgtttcagtttgatgtcactcagaaatagatcccgagacaaggtttcaagttctcagggtttatgtggaagataatccagaaagcactagtggagaagtgggaaagtgatacaggaaagagaaccaacaaaggatgtgttaccccactgatgtcaactggagtaggatcccactaggatacgcatggtcctgggttctcatcttgggcagaacaaagatctacctattctggatgtttcatataaatagaaccataaatattgtgacatttggtgtctgggttctgtatcttagcataaaaatatattttaaggcaaacaaaaaattgttactactcaacaagacaaataacacaattaaaaagtgggcaaaagacttgaacagatgtttctccaaacaaaatggccaatgagcacagaataacgttcaatatctttagtccttagggaaatgcaaatcaagaccagtgattattggaataaagtgaatcattgtgcttaaaggtttgatttacaggccgggtgcagtggctcacgcctgtaattccagcactttgggggccgaggcagagggatcacgaagtcaggagatcgagaccatcctggctaacatggtgaaaccccgtctctactaaaaatac

SEQ ID NO: 263695 - DNA, 897 bp, Homo sapiens
tgtcacttcagaagtggtcagtggatgttggcattattctcttgaggtggtcaccctgggttttaagtgctaggcattgagccagtggcaccccttagagtggggattggtattctatgaccacagatgtgttaggcaagactttcctggaattagtgataaaaccaaactcaaatggcttaagggagaggggatttattggctcacataaccaaaaactccagggataactgcccagagggaaatgagggaaaaaaaggaaatactcccttcctgggatctcccacttcccagtttgccaaggaaaactgagccccaggaggacactgaggcaaagtctcaatactttctccccctcctctctgaaaagagaataaaatgaaggcttggcacacacaccatcttcgagacagtgctagctcctgcctcctaggaactgattccaaggtgaactgctggtggtggaagaagcccttcaatatagcatgtattgattgcacttgatgtacaaaagaggacatagatgctgagggacataaagatgaacagagaccttgtctccagagttcacaatccaacggaggagggagacttgacatcagtattctagtaggaaggcaacctgtgaaccaggcacatttagtttcaacctcagctctgccatttactcttaaaatttccaaacctctgtgtcttcacctgaaaaacaggcttaataatatttgcgtatataggtgattgtgaagactagaaatggggtataaaaagcgctttgactgggtgtagtggctcatgcctgaaatcccagcactttggaaggtccagatgtgaggatcacttgaggccagcagttcaaggccagcctgggcaacatatgcagacctctgtctctaccga

SEQ ID NO: 263696 - DNA, 403 bp, Homo sapiens
atgcccctatttgtttggccacccatttagacacttctggcagcaaaatttggaaactacttcagggcccatgttctggtgatatcttagtggcttgaggttggggaagggctgagtggaccagattctaatggctgtaggagtccaggggaatctacttgcataaacctccagggatttccctagtaacttccttttttttttttttttttcatataagccccaagggctagtttccctctttactgttaggacctactgctttgcctcttcccatcactgaaggtttttaaagttttttactgctggcttttatagagaaacagacacagtagagcgaaaggacagtaaaaatcagattatctgtatcagttaatcaatttcctgagctttcttaatgctt

SEQ ID NO: 263697 - DNA, 532 bp, Homo sapiens
cactctgagaattgccccattgggtgggcatgtgaagcccagctctgttccatccaggtgcctcgggcctgaggagtctgaggatctgacttgggtcttggaagggttccaaccccaagtcagtcaggaagctgcccatttttttgcaaggcattttaatgccctttcccagacctctctagtccctcctgccttctgttctctgtagctgtgagccctttgtgagaatatgactcttaattttgaatcttatgtaagaggcttgagatgtgctggagagggcaggaagaggaaagtatcaggccttgagagagggaatgtagctttgcttctatgatctggagtcaccttcacttgctagctgagtcctaacacaacttccaagtccatgattctcttggggcattggatgggctcagtgtgggtctcttaggctgttcttgtgacttcatcatttcctggttcaaagttgtactgtcaaggggcagcatttctggtatttctataataaatttttctgtgatctcaaaaa

SEQ ID NO: 263698 - DNA, 516 bp, Homo sapiens
cacttgcgggctttaccgggtggctagcttcccccccaattttctccacaatccatgctaattggattcccatccacaccactgctctgaaatgtcactcataaatgtttccagttgtctaccccttgctagagccaatggtcagttactggccatcagctttcttggcctgttagcactatttcactttcatgaccttgcatcttgaaaccctttcttctccagacatttcttcccaccctcgctagatttccttctatttaactggacattttctctctatttgtttgttggttctttgactggccctctgaaagttggtgtccttcagcatcttggttgctaaggatatgggtagaattttaacacacagagataaacatgaggaggactgggaaaagaagaaaaggtaaacatgctgtaaatcttacagagaagttctgtttggctggagaggaggtgaagaggagattcatttatgggagaagtttgaaacatcccatcaaatatataaga

SEQ ID NO: 263699 - DNA, 304 bp, Homo sapiens
cagggacatggtgcatcttctctcttattaaggaaagttttactgtcaggtctcagaggctgaaagagaacctgagaaagctcttaacacctcaccggaagcacctttaacatccatatttttggggttttgtttttgtgtgtatgtgtttgttttggttttagttttggttttggttttggttttggttttggttttaggacggagtttcactcttgtcacccaagcagtgagctgagattgcaccactgcactccagcctgggcaacagagcaagactctgtgactcaaaacacacacaaac

SEQ ID NO: 263700 - DNA, 437 bp, Homo sapiens
ttttttttttcactaaaaacaatctacacaaataatttatctcatggcagaaaaactacctgttttcagaacaaaaaaagagaagacagtaagagcacctagaatcccaccatctagtcaccactagttaatatttggtggatattctcctctatccttctatagtttttttatatatacttattttttccaaaaacgggagccacactctatatatggttttgtagcctttttgtttgtttgagacagagtttcgcttttgttgcccaggctggagtgcagtggcgcgatctcggctcactgcaacctctgcctcccggggttcaagtgattctcctgcttcagcctcccaagtagctgagattacaggtgcctgccaccacacctggctaatttttgtatttttttaatagagatggggtgtttcataattttgg

SEQ ID NO: 263701 - DNA, 443 bp, Homo sapiens
agaatggcgtgaacctgggaggcggagcttgcagtgagccgagatcgcgacactgcactccagcctgggcaaaagagcgagactccgtctcaaaacaaaacaaaacaaaacaaaacaaaacaaaaatccttgctaccactggccctaaagcaggaggcatagggctgcgtgtgaggagtagtccattgcatgggcttcctccagtttggctttggatttttgagctctctgaatttgttgtttgtgtcctttgcacagtgtccctcccaggttgcacccgtgcctgcccctcagggtcccccactcccagtgaatttcacaccatgcagcatgtactttaagccatacatcttacgtatgttccagacatttggtaaaacgccgtttatgtgtttttcagtgactcacaaacattttatttacgtagatgaggaatgtactca

SEQ ID NO: 263702 - DNA, 665 bp, Homo sapiens
tgtccccgcaaagctgtctcttttggggaaaatctacattctgtagagaatcccacccttttccaggtctttttcctgatccaggagagaataaactaagagtttggcacctttttaagcctgataggaaacatttgcaatctcttctctctgaagcctcctacctggaagcctcatctgcatagtaagaaccccctggtctccacaaccccttattttaacccagacactcccttctgttgattctgggtctttagataaaccaattgccaatcagaaaattcttgaatccacctattatgtctccctaaaacatataaaacccagctgtagcccgacatccttgggcacgtgttctcagcatctcctggggccatgtcacaggccatgatgactcattttgctccgaataaatatcttcaaatattttacacagtttgactcttttcatcaacaataagatgcttcactatgttttatgttaccagaaattcagaaatataaatgcaaaataaatgttaacacttagtgtatacttaaattcttcagcttttgtgaaaataagagtattgtacaaatattcttcagcttttgtgaaaatagcattgtagatacaaatgaatactttttaaacttagtaattggaattaaaatactatgaaaat

SEQ ID NO: 263703 - DNA, 471 bp, Homo sapiens
ttttttttttgctacttttatgactaatgctgccttagaggccactattaccttgttgttcaggttattctgtaatcctcatagcaatatcttataaaacaagagacctatgataggttaggttttcactctatatattgaactcctcattgatatgtggacagaaatcaacaagtagaggaccaagcaaactaattaagtttacccaccatctccagtgggatgggtcagatggaaggatctgtttccttgattcctgtcacatgtacctgttgatctaattggattccttggcactacctgcttataaaattagtattgaaagtgttgtttcctttctctccagatgctgcctttatgcctgcatcagttttccctagcattccccatacttccaaattaggaagtctctgcttctaacaaaatatcgttgttattgctgatatggacacaaatcagcaagtactggat

SEQ ID NO: 263704 - DNA, 353 bp, Homo sapiens
cgactgaaaagaggatccctgcctttgagcagaaccttgtctgaccgaatgaaaactcccccggccattctttgctataaaagccggtcatttgccacgggttggagaggccattcccccacccccactccgtctccactgttgggtttgaaataagcataaacctcatttataaaagaacccacgtcacacacaccctccccgaaatcacagggcctggttggtgaagttgactgtgtctgttcctctctctccttccatttttgtaagcaaaaatgttttccaccccgcattggtgatgctgcaggcttctttaacaaaataaagtggtcacagcaacaaggaaaagccct

SEQ ID NO: 263705 - DNA, 411 bp, Homo sapiens
ctcacgcgctctgtgcaacagtgctgggttgcaggtagggagttcgggattatctgtgctcaacaggtaagaaaccaaaactcagagaggtttagtgacttctccagtgggcacaacatccaacctgggtaccaaaccctggtgtctgactgggagcacagtgtggtttcccttaagcccacattcctgtggggcaagaaaacaaccagcgcaaatgatgtgggccagttctgtctgctcaccagagtccccagcacccggcctggggctcagcacatccaggatgcatgctgtaagaacctgcaggataaatggaagcaggtcgctgcttcacagagcctttgttgtgttgatggcccagggaacagctctgttgtcctactgcaagaacaatggggtaacttttttgtt

SEQ ID NO: 263706 - DNA, 557 bp, Homo sapiens
ttccaaaagccaaaaatagaggtggcagaataagagagtgacatccccatcagcttgagtgactatgtagagcaaactccctgatgtctcatattgaatggacagcattatcaagtctgaaaggaaaataaaatttcactatgaaaatcactatgccaaaagggaaaaattcagctgaaatctaagtcatgcaagaaactgctcttccttttgtccctaagcacacggctgcagataaaaggccagatatctccacaggtagctactctatgttcaccttatcttatgtaaagtgctgatttactgagcaccagacaaatacataattggcttttcccctacctgctccttttctcgtgcaacacgtggattcagtaatgtgaccacaccttctctctttcccctccaaactgcgtttcccctttaaatactgaagcctttttctctttggagaaaggcacacaggacagactgtttctgtgatttctgtgttcctttcttcaggggatgtccttaatgttgacaaaataaacttctaaattgattgagaattgtct

SEQ ID NO: 263707 - DNA, 418 bp, Homo sapiens
gaactgcattctcccccaccccaaatatgtccaaatcctaacccccagaatttgtgaatgtgagcttatttgagaaaagtctttgcacatgtaattccagatcgcaagacaggattagcctggatttagggtgggccctaaatccctaattacctgcctgtaatcccagcactttgggaggccaaagcagccagatcacctaaggctaggagttcgagaccagcctggccaacatggcaaaaccccgtctctactaaaaatacaaaaattagttgggcatggtggtaggcgcctgtaatcccagctactcgggaggctgaggcaggagaatcacttgaacccaggaggcggaggttgcagtgagccaagatcgttgccactgcactccagtctgggcgacagagcaagactcggtgtc

SEQ ID NO: 263708 - DNA, 407 bp, Homo sapiens
cactgcctgaagatcctctgtgtggtggacacacaggtgtcgttcccgtgtgagtgtgtgcacataggtgtgtgtgcatgtatgtcgtgtgcacacaggtggggtgcgctgtgtgtgtgcacatattgcgtgcatgtgagtgtacatacatgtgtggtggtgtgtgcacggtttgcgcatgtgctgtgtgcatgtgtgaacatgtgatgcacgtgtgtgatgtgtgcgcacaggtgacagcacatgtgtccacgtgtgtgagcatctgtgtggtgttggtgagcaccttggaccttcgcaggggtccaagaggtgagctgtgtggaccttcgcaggggtccaaggggtgagctgtgtggaccttcgcaggggtcctccttgtgctgggtggctgcctgtctgttcag

SEQ ID NO: 263709 - DNA, 327 bp, Homo sapiens
ggctgcagtgcaatggcgcgatcttggctccccgcaacctcagcctcctgggttcaagcaattctccagcctcagcctcccgagtagctgggattacaggcatgtgccaccacgccctgctaattttgtattttttagtagagacgggggtttcaccatgttggccgggctggtctcgaactcctgacctcgtgatccacctgcctcagcctcccaaagtgctgggattacaggcgtgagccaccgggctcagtcgcagcttatctatatttaccataaacaatggccaggcaaggcagccattgactgacacattaatgtaagaca

SEQ ID NO: 263710 - DNA, 493 bp, Homo sapiens
cttgccgtccttcctgtggccttcactatttctcatctgtacttaacttctctgaactgacactgctactgctcccttcaccgtagtatagtacaaagcttagtgacactgagataatctgaagaaataatttctatagtctaaattaaaatcatgaacactttaatgattaagatattagaacatgtttacaaattatatgattacatactcactttatattaatataacgttcatttaaatgtgtgctcatatctttatataaaaacttctgcttgactatcaagtttatctgatacaatttaacaacatctgtagttatcaagagagcaactggttaataaactaagtattctatgagcaaatatagttggaatgttctaaagtcaaaatgaccgaaaaaattatcaagtattttcccttttaaacacagaccaatcttccacaaattgaaaattctaagaagttttgatctacttaatgagatcatcat

SEQ ID NO: 263711 - DNA, 365 bp, Homo sapiens
ataaagccagccacggacaagcgtggccatggggaacggcttcgcggaggggcagggggagtccagaaagaaaggttttgtcatcaaaacccatcttggtgacttatggatttggcatttggctcgatactttgttttgtttcctggcagcaggggggtctctttttcccttcacttacctattatcagtctcattaataacagaggtataggatcaggacataaatatataccaatgagaattacaattaccacaattaaactgagcatttattaagtgctcatgttgagcctcaccctattcggagcacgttacaagaactaacgtatttatttttgaacaatttgagacattcttgcctttc

SEQ ID NO: 263712 - DNA, 362 bp, Homo sapiens
ctcagtttcctcacgtggaaaggtgcagctataacaccgaccttacaaatgtaagaataaatgagagaaataatttgcccaaggatgtgcactaggaggcggcaaagccaagattccaaccagcatctgcatccacagccaagctctgcattacgctgatctccaagctgagccttcatattcatctcaggagttgcttttgaatgtcttcagcagccaaaagcaaccaaacacaataatttgttttacaaaatggggattattccaacttggagttgggaacattaaagaaatgaccatgaatatcagcaaataacggaagaactaaaataaatctcccttttacttttaaatggacaatg

SEQ ID NO: 263713 - DNA, 589 bp, Homo sapiens
aggccgtgtttgagttctggctcatcttttttgctaatttgctcttatgcatatcacccaacctcgctaagccagtttcatcatcagcgagaacagcacactgacatgcagggccagctcaggcgctaccacgagctacacatccgtccattcgtttaatcttcacagcagccctggaggtcacccaggcatggaatgcacagctctgccagacagaaagcgctttggatgcctgagaaacaacagcttgtccgggctactgatgcgaagagaggccatggtttcctttttctctgctctgaatggcagccttgacgtcacaacagctaggaaccactggagggacaaataacaaggcgcaagccagaagcgccctgctctgtcgcaggggcagggccattttcatccagttctgatgtcttctgtggccgctgcgagtcggcgggagtagagacaaatgactggagctttaggcgtaaaggcggtctctctctaggctgatcaaacagccctttgcccagtgctaattgccttcacggaacctggataaactacagttcccgaattaaacttgtttctgatgaactag

SEQ ID NO: 263714 - DNA, 269 bp, Homo sapiens
taggatcttgctatttttcccaggctggtcttgaactcctgggctcaagtgatcctcccgccttagcctcccaaagcactgggattacaggcataagccaccatgcctggcttgtgtcaagtactttaagtgagcatcttgacagtgctgcaagtctgcagacaccaacctgccttagaagcgaggaaacagtatgaggagatcaactaacttgtctacgatctgagagtcggcaagtggtagcaacgggaccttagcctctgtgattc

SEQ ID NO: 263715 - DNA, 625 bp, Homo sapiens
ggtgaggtgggaaagggcttggtgtcgtggggttgtctaccctggcaaggagtttattctttgtgctgtataggcaggaggaatgtggcaccatttctaggagaagtgtgacatggtccagtgtgtttctgaaagttagttctgatggcacagtgaacagagggactagaatgaatgggtgggagacaattgtaacagtccaggctagagacaaaggtggtgctgggtttcttatgtgtggatgtgttgctgttggccaagaagaatgagaaggagcgaatttgggcagtgggacctccaggcagccttacagttttcagttggggagtgagatgagacctggaatttatgggtctgtgtagttaaaaccatgcggtgtacaagattgcccagattgagtatgtggaaggtgtgatggggaggagagagagtgttaggaagtgctggggtcctgccatctgagaacaggagcccagaggcagcatatgcagccagaaaggagagaacccatgctgagggtcgtggataccgcctatccccagaaacagaaagccagtctacaatgtccagatcccccgggagctcagcagttgaggcttcccaggggctgcccttggctttagct

SEQ ID NO: 263716 - DNA, 439 bp, Homo sapiens
cctcacttccctccttatgcatctgagactgtggtcagtcactttagatgctgcctctccactgtacttgtgtccatcttcttacctaccacctctagccctggagcaggctcttcccctgtctttgtcttcctgggcccaggctcctaagcgctgctggaaaaaaaatcccccagtattgagcccctagaaatccagtctttaatcccaaatctgtctcccccagcatctggccatcagatctaaagcttacctgccatcctttccacctcatttctctcacaggggaaaaggagcctttgctcctagagtctgcgctcctgaccccttcccatctcacctgttcaaggcatcttgcaataaggggttggtgactctcgaggaatggatcccaggccctccctattatcatcttatgtatgccagttcaacgttctca

SEQ ID NO: 263717 - DNA, 422 bp, Homo sapiens
ttctgccttctctgtcctatagacatggttttaatgagttatcctaattaggtcaggcccacctgagataatctctcctgattaacttgaagtcaactgattagggacctttattacattgacagaatacctccacttttgccatataaggtcttttagcacaggcgctgcccttggagttcccagtgtatcagcaacagcctggagatcacgttctcatcaaagggtagaaagaagggaaactcaagccaccctgggaagaaccctaccttgtgctgctaaccactgagactgctgttggcacagtggaaaggggatggacacatcacaccaagtcaagcaagcacaattatcatcagaatcatgggccattattcctggatcaagtcctatcaaattaaagctaaaaaaagattagtcta

SEQ ID NO: 263718 - DNA, 217 bp, Homo sapiens
cgctctcctgcctcttgtgatcctctccctgtgcagtcaccttggactggtcaccccaagccacaatgcattctggctgtttagataccgattggggatcccctgcaggctgctccttcagagcaggttgctctagactggtggctggccttgctctaaacttccaccattcctttctgggggcagtttgatggggaatgctatcgatgcccctttc

SEQ ID NO: 263719 - DNA, 268 bp, Homo sapiens
gtgatgtctaaggggaggcaggatgggtagttgtttgatgggaacagagcctcagttggggatggtggtgacagctgtacaacaatgtgaaatgtacttaacgccactgaactatatccttaaaaccggttcagatggtaaatgttatgatatgtgtattttgccacaattataaaacaatgaagaggagcagcaggcaggcgggccagcaggaagagaacaggggccttggtcttggccttcaccttgcatgtggtctgaggctcta

SEQ ID NO: 263720 - DNA, 391 bp, Homo sapiens
gtccccagcgatttccctggggatacatcacccagactagagagagaggaggcatttgaaatgtcagggtggcgtcagaacagagatatccaataggcatgagagggtgcacagggtgtcttagctgaaaacaaagggcttgggaatcctccctggaaggacggtcagcagagacagggaagtgggtgaggtcacccaggaggagcgtgtcgagaagagaagcacgtctagaacgaacccaggggaaagtcgtcattcacggctcggtagagatcatgccatgccttctctctctgatacagcagtgttttgtagactctagaaacgtttgttaaactgtaatagatgaaatgaaatgtattaatagagccaaactgttttgttttttttc

SEQ ID NO: 263721 - DNA, 184 bp, Homo sapiens
tggtgactctgtacaaacactacacatactccttgtcctagattctttccccttatctgcctatcccaaccctgctactccctcgaggcccagttcaaggccacctcctccatgcagcccaccctgactactccttcccacacaatcaccttgcagaattcctcaagcgtggctgtggcattct

SEQ ID NO: 263722 - DNA, 197 bp, Homo sapiens
tttcagacaaaaagtgaagtcctttagaagtaggaagactttttaagggtcacagtcagagggcctcatgtggaactgctgacttggggtgaatgagattggctcctctgaagatgatccaagagataccaccaccttagaggagtatttggtgcttgtgtctggtgcgtgtagttacctagttaccagaaaataat

SEQ ID NO: 263723 - DNA, 226 bp, Homo sapiens
aataataaaaatttaaaaactccacaagtgtagggtattgtggattgctagcatatccatttagattatgtgcagttttaattattgctttatgtgaagactgtataaaacagttttccattgagaggaatcgtttaaaatttgccatgtcatatgttatttatgcaggttctagtttaaatctaaaaaaatcctacacatacacagataagagaaattataagaa

SEQ ID NO: 263724 - DNA, 152 bp, Homo sapiens
tgtagattctctggaattttctgcatagacaattatgttgtccacagatcgaaaccatttattcctttctaatctgtacgccttttcttttctttttttctctttttattgtttgctcctccttcccttcatgtgtcactttccacctctgt

SEQ ID NO: 263725 - DNA, 444 bp, Homo sapiens
tggttgttccagcctatgtgtaagggtactggctttctcagcctttaatatttaacctaaccatttagtcagtgctgaaacatttgtttcggaggcctgccttttcagcttttgtgagatctggcctgccagaagttcattaaccctccaggccattctccacactcctgctagatgatgcttcaagacacaggtaagactacatgacccctctgtctaactagaaaactttggccccaagccatgggcactcactggctaaatacaggcagacttcttagaggttaagagtgtgagttctgtgagcataatgacagagcaggagatatcagccttctttgccccagacacgaaaaaacaatgagacagctatttgtgaatgaaaatagccccaggagggctcaacagtccaattaagaagctacagcaacacagtagagcaaa

SEQ ID NO: 263726 - DNA, 966 bp, Homo sapiens
actgtcttaaaagactatgattaaaatgggcatcagtgtaggcgacatgtagggcgcaagagaatagccagatgtgaaggttgaaaggctatgtgggctagttgtcatggtattcctggtgcctctccccgtttgggaagaataacacattgaccaccggctcagaggaggtggcattataggtccaggccccttcaggagggcactggagtcaatgaaagcttttgctctcacccaggctcttggtttctcacgggcaggggtagcccaggaaacaaaggctgtatagactttaagtcgtgagaaaaacgacattcttatggtgaggctcttagagactgtctccatttaagcagcagcagtaaaacatcttaccctaaaatgaagaagcaaatccatttttattggctttcatagcctctctctttcaatgacaaagaaaccattaaaatgaatgtttaaagttcttagaagagctttctctaaatatttactctgtcagtggaaaaataaacattttttacatcgggtctattgagtttgttatatacagtaaaattcaccctttttagatatatagttttatgagttttaacaaaaatacatagttgtgtaaccaccaccatcacaatcaagatatagaatatttcaacatcccaaagttcccgtttcccttttcagtcaatcccttccccactacccctagcccctggcaaccattatctgttctctcttcccatagtttcaccttttccaatttgtcgtgtagagttacacagcacatagccatttgagtctggcttctttccacataatgtccttgagatccatcggtgggtacaccagtagttccattttttttctgagtagtagtccattgtatggatgtactgcggtttattcaccaacatatgggttctttcctgtttggggagattacaaataaagctactataaaaactcgtg

SEQ ID NO: 263727 - DNA, 560 bp, Homo sapiens
caatactttataccataccaattatttcttctttgagaccttgacacagtaaggtttatattctaagtgtgtttttagcaattatatatcaaatctaaaccaattagtttaatacaggagacttgttaaatcacatatttatgtttttctctctatgatgctaccagtttgtcagctgaacagttctgggtgcagcttgtccgatgacggatagcacagcacctcaatctgagtgctcagcagagtgcttgtgaaggcagcaccacagcaacagttgctcagagggaacggattcaggagccttgatttagcaatagagtccagggttttcagctcagtgtctttagcctgtctctgctggtcatgtcagttatgtactattcaatccaggaggtgctgtttacattgtagtacatacatagtcattgcctaatgagtcatacagagagaaaagtaagttataaattatgtcccccatttgctgcaactctcagtggtaagaatgattcagtgcagctataggagagtacttccattggcatgccacctgcctaaaatac

SEQ ID NO: 263728 - DNA, 665 bp, Homo sapiens
ttgagatcgggagttcgagaccagcctggccaacatagtggaaccctatctctactaaaaatacaaaaattagctgggcatggtggcacatgcctgtaatcttagctactcaggaggctgaggcagaagaattgcttgaaccagggaggcagatgttgcagtgagctgagatggcaccattgcaatccagcctgggggataagagggaaacactatctcaaaacaacaagaacaacaacgacaacaacaacaacaaacaaacaatgaaataaaaggaaaatgggagaatgatgaagtcatctagaagagtagtgcagtagttgaataaatggtcactattgctttatcctttagttttatcaagttgtccaaaatattgcatgatctttcatgaatatataaataaaagaagatcagagaccccatctttgtagtctccttttccagttgagaattcagaatttttaatttttttttcaaactttttttttgcttgggggtaaattttccctttaattcttcttttccataatgaaaaagttatgaaaattgagaagagactttaatatttactagtcaaatcagatatcagggctctaatgttaatggcaaaattggtcttagaagcagatcctcatactgagtcatcagatgacacattccaa

SEQ ID NO: 263729 - DNA, 404 bp, Homo sapiens
caaaaaaggtgtttaaaagcatcaatttattatgtttaccctaacttttgcattacaaatggactccctgaaccccaaccatgctaaatttaactttcatagtagttgccagttttacttatggatgtcttccggcctccctgatcaaactatataaatctttttcttttctttatgttgcttgactcactagaaacaggaacagtaagccatacttgcatttgatctttgtctttttttgctaaatagttggtaaaaagtagagaggattttcccttaataacttgaagactttaggacagagacgttccatcttttggctcccctaggccacactggaagaagaagaattgtcttgggacacacataaaatacactaacactagtggtagttgatgagctta

SEQ ID NO: 263730 - DNA, 461 bp, Homo sapiens
ctttggaaatccagggctttttaccctttggatcccagcttcagagagctgggctattttccatcaacttctctttgcttcaactctttagtagcaatctcttgtcttagagcccggtgttggctgacaccagagggggccccagcccagacgcacctggggttcaggctcctgactcgggacatctctcctccctcctcccaccccagccatgccaagactcacactcaccgtgcacctgtctggcttcaaaatctctctgatcctcccagcctcgttgagtcctctcaggtgaaagtcatgagccgatctgtctcttgtcagcatcacagtgtagccagccagaaaaagaaataggactttggggtcattttcccactttttgtagaaagtaaacagctcagagaactgaaagctatgggagaggtagagatttagtcaaaaagaagaagaaaaaaaaa

SEQ ID NO: 263731 - DNA, 293 bp, Homo sapiens
gaggccatggtggtggtggtggtggtggcaggtgtgttcccgtctccacccctcagggaagaagcaagttccaggagcctggacttttgccctgcgcactctctgtgtcagatggggagacagccatgaggacagacacttgaagtaccctataactggcaccatgcaagagagacaggcaggaggagactgtgggagctcagaggagacacttgtgctggcctggatcagggagaaaggaggggtgtcgggaggcttcctggaagaagtggcttctggattaattattgaag

SEQ ID NO: 263732 - DNA, 365 bp, Homo sapiens
agtttcctcaacctgtacctgtaacctcgtggagacttagctataaccaaggtagtcagggaaatatttgagcctggattatagattgtggcaccagccagagtggtcccttacagtattacagcctcacaggaacctgccattcctcttcttgggacctctctggtattatatgcatctcgtacctttcctctcccgctctggattttagtttctaggtcgccattaataaagcctgccttcttcagatttcttctgtctctgattctgagtcccaccctctctgactttattcattgcatgtcattgaaattttactggaatcatcttgactctgaccttctctagccaacaatacactcaaa

SEQ ID NO: 263733 - DNA, 246 bp, Homo sapiens
ctttttttttccaaattaaaaataccaggtaagaattataaagcagtaattcaaaagaactaggtaagagcctaagtttacttcagaacatatttctgaatcctgatgacaccttttattgtattttaaatgggcaagagaattagagaacttgagagaaaatacaataagaaaccaatatagagttgacttatttcaatagttcccaaagttaagaacttcggatttgtagcttgattcttcaac

SEQ ID NO: 263734 - DNA, 403 bp, Homo sapiens
tttttttttttgagacaaagtcttgctctttttcccaggctggagtgcagtggccacaatcttggctcactgcaacctctgcctcctgagttcaagcagttctcctgcctcagcctcctgagtagctgggattacagacatgtaccaccatgccaagttaatttttgtattttttgtagagactaggttttaccatgttggccaggctggtcctgaactcctgacttaaagtgatccatctgccttggcttcccaaagtgctggggttacaggcatgagctatcgcgcctggcctgagaaatctcattcttactcctactcccttgcacactatctccattctgtaggtagccatttctattaatttcttgtttacccttctgtcgtcttctctcattctttt

SEQ ID NO: 263735 - DNA, 1081 bp, Homo sapiens
ggagaaaagggatatatcaagggtaaatattattgccataatttgttccctttgcactcaagcaagatgaaaaaccagaaaccatgaacagcttagcaaattttaactatataaaaaaactaaaacttaatatggcaagaagcatcataaagggtaatgcataaaaagcaattggaaagcatgactgaagtaaaaactcctttacaatagcaccagaaacatgaaggacctggaaatagatttaaataaaatgaaaatcaattggaagggagtatgaaaatgctactgagggacatgaaaggaaactgaaaataagtggaaaggcatacaacacatgtagaggaagactcaggatgaaaaatgcattaattctgcctaagttaacctatcagtttctgtgtaagtccagtaaataaatcaacatatttttgagccagacaaatgacattgaagtttatgtgtaaaattaataaggaagaataattggaaagactatgataaataataataatgagggtgactagcactaccaactagtaaatcatgttgctcaccaaaagaattagaatggttttctattagtacatgaacagatagataaatattataggtaattgttaatctattaaagtataagaaaatatcaattttaaaataatatttacatgggaaaagtctttataactatgatataatacccaggagccataaaacaggaggtcaacaatctgactacataaaaatcaaatatttatttctgcatggcaaaaacaaaacaagaataacaccgtgaaataaccaaaaggcaaattacagaccaggaaaatgtttaaaatttatatcataaaatgcaattttctgattatataaataacttttagaaatgaatacaaaaagaggccaaacaccagaaagaaaagaatggacaaaagctatgatgagggaaatacaatttgaaatacaaaaggtaaggaaaggaagagaaagaagggaagagaagtcagaaaagggaaggaaaggaatatgctagaatcagtttccatgagaaaagaaagaaaagtccattttctcagtttgtgtg

SEQ ID NO: 263736 - DNA, 735 bp, Homo sapiens
gattcaccacccacataggatgatttaatttcatgatagcaagccttcttgaattcatctacaaatttattacaattattatcacaactgtaatttgaccagctgattttaaaatgttcaaaatgaaagatcaactatggccaagataatgttgaagagcaaaaacccaaggggatttatcctgaaataaatatttataagaaaattaccattatagaagtgcatactgttgcagagacacacaaaccaatggaacaggacaaggagcttagaattacacctatgtgaaaacttgattcaccattgaagtgacactgcatgtcagtagagaaaaaatcgaccacttagtaatatgatgctgtgacagtcatttacatagaaatatttttaaagtttgatcttttatgcaacacacagataaaacagaattggtttaagacttcagtataaaagaaaaaaggtatattttattataacttttattaattatattgagataatccacagaacaaaaaatctaatggccaataaaagtgtaaaattactcattctcattaatgatctggcaaagggcaagtgaaaacagagaaaccattctaatcaaattggtagaaatttcaaaacctggcaataccaagtgttgacaagcaaagacagaaaagggaattttatgcacttctgctagaattgtaaaatgatatacccatttggaggaacattataacaatacatcat

SEQ ID NO: 263737 - DNA, 585 bp, Homo sapiens
attagctcaagtggtagagcgcttgcttagcatgcaagaggtagtgggatcgatgcccacattctccaagctttattatttagacatcgtgtctccaaacactcaggtctccaaacccaagttagtgtctgagaacaggatgctgctttggttcaagacgtaggagcagcaataatagagggctggtgatggctccctcttggcattcagtatagtgtagatctaccatgtaattaattctctgtttctttgaggagctgtgaaaccaagggacatatacaactgctcttttctccctgtttctacctgcagctttgtcctaaatgtgagacaattatgaaaagtgcagggcagagccacttgggtaaatacagccccggctttctgctcaggggacagagtttgaggcactgcagaggaaccagccaaagtatgagacccatatgttgagagtgacagtgtaaagttcaaaaaaatcaaaatgtttaaagatttatcatgggtcttgatgacatgatggaatctctctactctctggactgattatgtgtggtaataaatttactttttaaaagccaaaagagt

SEQ ID NO: 263738 - DNA, 448 bp, Homo sapiens
ctgagaggggcctgcccaggactctcgagactccgtgagaaaggcagaaggcccccaaaacagggtgtgcgtggccgttttctgtgttcctcaagaggtctcaggctgctagaagtctcctatgtggtactgaagatggtacaaggcaggagaagcacaagcagaggaaaacggaaggcgtcacagaggagccggttctcaagattttaggctttctaaaaggtcagtgacgttttacatttttcgcagcaaactcatgccgacaagaaaagcaaacaaagggaccaaacttattttaaaaggggtttcagtcgactgaaaaaatcccagcaacaggatccaggtaagaagtgtcagcacttagggaagctgaggcaggaggatcacttgagccgaagaatttgagaccagcttaggtaacgtagcaagactctgtgtctgccaaaac

SEQ ID NO: 263739 - DNA, 699 bp, Homo sapiens
aaaaagaaaataaaatcctgatcaatttagaatccaacacccgagtcctgatcccagctctaccacctgtatgttgtaatctacaacaagccaccaacatctctgagcaccacacctaccatccgtgggactgaatctgggattcccttgctcatttacctcccacttcttcctgaggagcacagggactgacagatgggacagtgcagaggaaactgtgcacaactctcctccaaagacaaactacaacacctggacacgtctctatattgatgtttgtagtgggttaattcaactctatggcagaaagactttaaacagtgcaagtgattccaccagcctcctcctcactgaggacgattaagtctctgccctcaaagggaacgcttctaacaatgagtgataacttaatgtttaaaggtatttcttggcagggtgcgggagctcatgcttgtaaccccagcactttggctggtggatcatgaggtcaggagtttgagaccagcctggacaacatggtgaaaccctgtctctactaaaaatacaaaaattagccaggcgtgatggcacatgcctgtaatcccagctacttgggaggctgaggcaggagaatcgcttaaacctgggcggcagaggttgcagtgagccgagatcactactgcactccagtctgggtgacagagcaagactccgtctcag

SEQ ID NO: 263740 - DNA, 738 bp, Homo sapiens
gcttaacaaatgtggttttatcattgcctttctttactgaatgaccagttaatataatccttgaaaagctgctaataaacgcctatcatagttcaactgatttataatttagcaattcattgtgtacttttgctcacaaatatgaatgttatatgatattccatcttatattttttatattagtatctccaatttcttattatctatgtagtattacatcacttggatgtaaactgactgacttaatatttacataatacaggaaattgtttttggacaaactcttcctaaagttcatttccaggtgttatagatcagtggttcaaaacatttttgggttgtatatacccttaatactctcataaaattagagacttttgccgaggaaaaaatacgcatgaataaaataaacatacaataattaggtatataattccaaggcaaattattccaggtgaagtatccctgttctagacagagcatatttgtgagccactgcacttgaactccacaaatttttgaattgcatataattttcacatgtcatgaaatattattctccttttgatttgttgtcaactattgaaaaagttaaaatcaatcagttcacaagccatacaaaaataggctacaagcagggtttggcctacagagccatagtttgcaaacccctgctatagacccagagaccattataccatacacaggctacacaattatgtaacttggaaaaaaaaa

SEQ ID NO: 263741 - DNA, 231 bp, Homo sapiens
tgtccaggcttgagtgcagtgttgcaatctcagcttaccacagcccccaacttcccagactcaaacaatcctctcacctcagcctcctgagtagctgggactacaagcacatgctaccacaccctgctagtttttgtatttttagtagagatgggggacgggggggcctcactctgccacccaggctgccctcgggtcttttatgatcgcatctcctcctccttacaggct

SEQ ID NO: 263742 - DNA, 704 bp, Homo sapiens
cactaactagctgtgtgaccttgggcaagttatttaacttctctgtgccttagctgttatgaaggttaaataaactgagccatgtacaagaactggaacaagtcctggcttatggtgagccctcagggcatgttcactattcccctggccgctgagtcttggctcccaccagccctggctaggatgccattcctcttaaggcttccctgaccactgcaccaccatggggaattctcatctcagaacccctggggcactcaaggttgggcacctgactgcacatattcccaactggtctgggacccaggaatcttcctactgttggtgagctctgtccccagagcaccctggctcaggcctaggcacaccgagatgttgagaaatgcttggactcctcccctgcaggacgggcaggccaatggaaagagaaagctgttggtgaccctggagaccacccctgaccagggaccattggagctaagcagtggagcaggcacaggtctccctcccagctgccactccccctggtatccaggaagtccctgtacctgtgacatcacacttcatccacaaaaatagccggcgcatctcagcagcctgggtgcagcctgctctgtcgggtgacaggctgtaagtgcgagtcagcatctgctgggtggatgacacccctcccttctgaccccagagcagggacgcgctcaccc

SEQ ID NO: 263743 - DNA, 426 bp, Homo sapiens
ctgtcaatgattcagaattcgtctctgtcatccctctgctacttagcattcagtgccctctactgccctccccgactccaccaaaattctctcaggccccaacagtggcatggattctgctctcgatgctttcttccactttcctgtcaaaatgcatttaaatcccattcgccatgagtatttttatgagctgcttctcactagagtgattacgactgtccttaaatgtggcttaatgtttgccctctgaaagaatttgaattttaacagagaacttctgaatacgcaaaaccttcaccccaaataatcaatctttaagggatttcgggcgccaactagaaaagtaataagggcacagactgatctgtttgtatctgctaatagaaacacggatttttgtctattaaaaagtgatagaaatgtcta

SEQ ID NO: 263744 - DNA, 200 bp, Homo sapiens
aaggcgcggggacccgggcatcccccatgttcagaactccctagacgcgagcacatacacaaaggcgcggggacccaggcatcccagcacctcatgctcacacttccctagaacttgctttcccgttactgcagctcacaaagaaaccgaaaaaaggcaaaaccaactgtattaaaccttattagtgatcaatatctact

SEQ ID NO: 263745 - DNA, 351 bp, Homo sapiens
gctgaatactacaacatgtgttccagtagcatgcattatttagtaacagcttacacagctctaagttatcatctttcccacctcattcccaggaagatttgtttaatttataagcagtccatttcagacagcactcctcgggatatcacaatattgctgttcttctgggtgattcattggcattatgaatacccttgtttcttccatgggtaaaacatgtttcaaggccactaactgggctattggcaaggcctggtacaaactaagtgcaatgtaactcttagcaatttgtgaccattaaacatagcatttataatgtgctagttttaaagttgaacaaaacaacaacaa

SEQ ID NO: 263746 - DNA, 452 bp, Homo sapiens
ttggatatgtggggttgttctagcacttctctggcttctgggcttagggagtgagatgttcttggccctctaggaaggactgtctggctaggcatggttagaaagtgggatcatgaggagtcaccttctggggaagctgggggacaggctacaatcagaatccccacatccataatctaaaacaaatgtatgaccctgtttacactgttctagacaactgcttatattaaaatatttcaatcttacagaaaaattggagatagaagtacaatgaatgtctagatatccttcacttagagtcaccaattgttcacattttgtcctatttgtcctctctgtagatctgtacagttttttaaatgaaccattgaaactcagttgcaagttttctgaaagattttatataataaaatcaaaaattacaaagaacaaaaataaaaaaatgtaaatta

SEQ ID NO: 263747 - DNA, 311 bp, Homo sapiens
tttctagtgtttatgtgaaggcatgaggcctactgttgctacatgaaagctgtgagagtttcttctatattcgggtgggtgttgttcatatccttttctttggaagattatggacattgcattgtaagcttcctgaagaaatttaactggagaggctctttgtacttgtcttataatagggttgtaagtgattcatgagataggtcttcagagtactattctgcattatatttaagaaagaaacatttgagttttacaagtcagttgtttttcctattgcacattaaggtaataaaattcagtggattttg

SEQ ID NO: 263748 - DNA, 305 bp, Homo sapiens
tgtggatctacccttcactatgatccatccatagcatcctgcactcattctactctagcgttgctaaaaaattgcaaaaagacattcacccagttacctgtcctttcaccctattgcagtctccatatgcttgtcctcttgcctgttgtctttccagacctcagcagagtactagacatgtacacatcacttaatacatacatgtttctcaatgaatgcattcataggaatttcagaagacttcctgagattcctcatgtttacttctacctagcaagaatccttctaatgatggtttttcctat

SEQ ID NO: 263749 - DNA, 345 bp, Homo sapiens
gaaaattggctttttgttaattggcagatgttccattggcgctcagtttttgttgggatgtgttatgttgtatgtacacatatatggaccagagtctgctgaatttataaggttcaaaaattatggtaacatcttgatttttgttaatttatctcaataaaagcccaatggaactccaaaaaaagagaataaatataaataacattagataataaaccgacaataaatggcacagctttttttagagtgaaaatataaaatattgtatttttattggtgaaaaaataaataaaccagtaatttcaatgttagtatgaacctgattcagtaaggccagaatattaa

SEQ ID NO: 263750 - DNA, 456 bp, Homo sapiens
tactcagttctccttctgtcctggctcaggtctaggccagtcaagagggtggctgagaagcaggaggagcctcagagaccctcccctcgaaagcactggggcttccacctcacaagcggcaggttcgctttgggagctgctggtccatcgcccaggcctggccaggggcaggcgaggatcctggttgccgatccatcgtccaggcctggccaggagccggtgaggaacctggggctgttgtgcaggggtcgccgtctccagctctctgccgtggtgaggggattgtgctgtgtgcacaccaccgggctgcatcgaatcccaccatggcccagagggtggacctgtggctccttggggggccagcatctccagtctaatgggtgcccctgccactctcctgagttcccgtgcagagctccccccaacacctcagccttcacctttctcagttaatca

SEQ ID NO: 263751 - DNA, 418 bp, Homo sapiens
aaagacagatgcttaatctgttctggctcttttttaaaaaaaatgtagttgacttttgttctaaacattttttctcatttcctttgtgatttcttctttgacccattagttacttacatgatgtttaatttctacgctttggtaaatttcccaaatttctttctgttattgatttctagtttcattccattatggttggaaacatatttttgtgatttcaatcctgttaaatttattgagcctttttttatggcctagcgtatggtctagcctggagaatattccatatgtacttgagaagaatctatattctgctgttgttgggcagagtgttctatagatgtttcttaggtctggttgcttttagaatattgttcaagtcttctatttccttgctaatcttctccctagttgtcct

SEQ ID NO: 263752 - DNA, 471 bp, Homo sapiens
acaaccaggtgcatgttgcctttgggccttgtgtcaaaatatcttcatcatctaagaataaaacccccaaagaggtcagcctgatcttgtagaaagccgtccctgggaaaatgattaaatgtcagtaaacaagagcatttcagaaactgacatggtccctaatgtttgtgtttagagactcctaatgtgtcagaattgagttggagacttacgatgtaattgcatgtcttgtatttcatgccagcctctcggcttggtgctggggcagagtgggaagcagaccacagagcagagagggcctctgccctttatgttctgtgagagagatggatattcacaaataatcctgtccctaattaattgcagctgagataaccattataaaagaaactagagagtgtgacaaggggtgactatctcttggtcttggttgtcaggcaatgctatggaagggttatttagagtcgtaga

SEQ ID NO: 263753 - DNA, 648 bp, Homo sapiens
caactggtaacatgagaggattaaatgaagataacgatcaagtaaaataactggcatagcacctggttctaataggcttctataaatgctgcttcccaccactcctctctcttccacctgtttcaccttttgagaaccctgaatcatgacttccagctacattatgcctgggcatcatgactattcagctccctgaagggaatgccttctgatgattgacacttagtatctctttcttactcctctgcctatccccttgtcttattcccttactactctcaaccaggaagctggagtagctgaaagtagatttcttccaacacgaaaatgcctaggtcattaggtacataagaggtgctaactaactgataaataaataaggagagagacagagagagaaaggaaggaaggaaggacaaaacctaagatagtataagccactgctaacctgtgatgttagatctaagacgtcaaagaggaactggagtgctggtgattccaccactgtgatgccttgctgtggtcacagtgcaagcgctgggtatatatgtcattctaaactggagatataggacctatttcatgtgagaacaagcctgtttgatatcagacatcacctggtcaagccctagcattgaccattattcc

SEQ ID NO: 263754 - DNA, 234 bp, Homo sapiens
acttaaattaagacctgaaattgaaaaactactagaagaaaacaagctccattacattgggctgggcaatgacttttttatgtttttgtttttgtttttatcattttaaaaaatattttattaaccattccagagttctcattaaagagagaccatcctgtcatttcctatttttgcagcctgtgcctgatgggttacaggttgataaagcagtaatcctcgagaaaattgacc

SEQ ID NO: 263755 - DNA, 521 bp, Homo sapiens
ttacccaagagggaatttttttctcaggagagtgaagaaagcctggctttcctcatcagctctctttgtgttgaattcatcagtcatgacaatcatttgagaaaccttagaagatcatcccaaacctggaaaaagtcagttacattaggaaaggagtgagcataaagagcacctactagagagagggtcctttcacacacatgacctcatgtaaccttcacaatcatgccatgagagtatttacagcctctgctgttgctctgcttctatctggtggattaaggaaagtcacaactcacagccctagtggaaagttacaactgggatttgagctaacgaagagttgaagactcagcaacaggcgcttggcttcactattaacctggacaaggccattaactcgcctgtacttaattggcttgttctgtgacacactgttgccccagaaacacccatatgggtgtaccccacattaaagaagcccgctctatgaaaaccgagacttgttgaaaagataaatg

SEQ ID NO: 263756 - DNA, 708 bp, Homo sapiens
ctgccaccatggaagaaggatctggaaagaaggatgggatctcagcctgatggcaggtcttacccaagagggaatttttttctcaggagagtgaagaaagcctggctttcctcatcagctctctttgtgttgaattcatcagtcatgacaatcatttgagaaaccttagaagatcatcccaaacctggaaaaagtcagttacattaggaaaggagtgagcataaagagcacctactagagagagggtcctttcacacacatgacctcatgtaaccttcacaatcatgccatgaggtgggtagtattatcaccacccctatccccttttttggaagaaaggttgagtaccagagaagcaggggtgatattcaaactctttaattagggttaaggtatgggggctgaccaatcagagctgccatacagatttgttttatcagagaagtaaaggccttggtcaggatttgaaatgaggctcatatgactgcaaagctcacattcttttcaccgcaatttgatttccttatgccagctgcttccccagagacagtgacaccaactcttctgggttgttgagagggtaaacaaaccgtgatgaatgaatctcctctcctaatatgaatgccttattgttgttattcttcatgccctgacagagtatttacagcctctgctgttgctctgcttctatctggtggattaaggaaa

SEQ ID NO: 263757 - DNA, 615 bp, Homo sapiens
aatatatcattttgacatatttgttttctttttagctgtttatttgctgtttgggtataataaatcattaccctagtacttcacatatatgtctatataagtatacaggtaaacatttcttgctaaaagagctcttacactgtttctttaacttttacctgtggtaattggtttcttaatgaattatatcaacctattaaaaatcacttacacagttgtctttagtattttgagttcttagggtgttttgaattactgaatagacagactagaattttagttttaaattaatttatttaaattataccaaggaattgataccctgggttttctgggtttattttacctagttgatattgataaaatttcactgctattggactctgtggttaaaataactcttaggcaagtaacattgtcggtaatttgaataaattttctcttgggttttggggtaagggaattaatatgggaatcaatgtgggagaccaaaaatatattgagaagtaggatgaaagtagttagttaatcttctctattcttactggagctttccatttagtctatattttagccttcatattcagggttagaaaatttaactgaaaaaatcat

SEQ ID NO: 263758 - DNA, 751 bp, Homo sapiens
ggattacaggcatgagaccgcacccgaccccagtgtggaatattggtgcccaagtgggttaggagggcatccgcatgggggaggtaccctggagttcgatgttagagcctaagcagggtgagggagttactgcagagagaagggattagagggtggcccaatgtggggtgttagagctggaggaatgtaaggaaggcatcatccacacagaggaacattagcccagtgcaagggtcaaagcctgaggtgggtgaagaaaatacctgctttatactgttctggaaactcttctataagtttgtaatcatatgtacccaaaatgtacctgtatttcattttgtaaactgtcacaaaattaatatttccaatgcctcatatgtttttaaaaaatatgaaactattatttatttgaatatattacatgaaactcctcaaagacatctctgattaaagcaactttgccatcacagaaagtcagtttattttctataatgtatatattttactaattataatctatactgcctttcatctatatagatgttttttattttaattttcagtggaatagaactaaagaagtttattttttcacaactgttctctggtactctttttaggtttcaaatgcaatctgataaaaattgtattttgaggaaaaaatatcaggcacactgctatccctcccaaactctttgagttttgtaaacaaaattttcagttcaccactaatactgacaccacagcacag

SEQ ID NO: 263759 - DNA, 555 bp, Homo sapiens
  misc_feature (264)..(264): n is a, c, g, or t
  misc_feature (524)..(525): n is a, c, g, or t
tgttatcgattgccaccttagttaatccctcaagcatgaaagctggatcttttggggtttaagaagcccagagcttgttcctgtcctgtgctagggagcactcaggagggttccttggtcctcatctctcccacctccgttccctctgggccccacactagccacagcgcgggccttgtgctggagtttgagcctgggacagggagagggaggcttggagacagtctgacccagtgccctctaggccacccacttctaggcctngcctgcctgcgtggcatcgataaacaccggtgtttatcgatgccacaagattccagccttccttcctgggtatggaatcttgcggcatccacgagaccaccttcaactccatcatgaagtgtgacgtggacatccgcaaagacctgtacgccaacacggtgctgtcgggcggcaccaccatgtatccggcattgccgacaggatgcagaaggagatcaccgccctggcgcccagcaccatgaagatccacaccgagtacnncgctctgggggtgcgatgatcttgatcgtc

SEQ ID NO: 263760 - DNA, 343 bp, Homo sapiens
ctggggtgggacccaacagtctgtcttttcaccagctctctagtttgagaaccactgctcctaaactaattatatcatttagatgattgggaaattggctctggaagagctgcgtacaaattagaaacactgaagagtagaactcgggtgtctttgttgccactgttactgttctcctcgctaagaggagcagggtctaggcatgggctaacgacatgtgaaacttgaggatttcagcataattcagaagcagagttccccaatagtaatagctaacatttattgagcactttctttttttcatgcactttacaagcaccatttgaattttataacattttgc

SEQ ID NO: 263761 - DNA, 406 bp, Homo sapiens
gtttttataaacttaaagcaccatgcaaatgtgtagagctcttgcagatgtaaatcctctttacagaagtcatggagaaaattagtttgaagccctggttaatcatgtttttaagatatatcaggccgggtgtggtggctcacacctggaatcccagcactttgggaggctgaagttggaagattgcttgagcccaggagtttgaaaccagcctgggcaacaaagtgagaccccgtctctacaaaaaatttaaaaattagctgggtgtagtggcatgcacctgtggtcccagctacgtggaggctgaggtgggaggatcacttattgagcccaggttgaggcttcagtgagccatgattgcaccactcctctacagcctgggcaaccgagtaagaccttgtctcaa

SEQ ID NO: 263762 - DNA, 279 bp, Homo sapiens
tctacctgtaagttcttgtaatttgggattgggattaagaaactccagaggctggtgtaaattgatggggcaccagctgttgtttgctgcacctcagggaagtcatggtgggagtctggcctggccctgttggctggggcccccaacagatccttgctgtgtctgggtttgagtttacgctacacaattacaaactttttccagtgctgctttttgtgaatctttgaacctgcagttgtgaatgaacagaaatttgaactgagcttaaaaaaagaaaaa

SEQ ID NO: 263763 - DNA, 368 bp, Homo sapiens
atcaaccacagcagccaaaagggggaagccacccgagggtcggctgtcgggcgaacggatcagcaaagtgtcgtgtgcaaaacgcagtgacgtgtgactcagcctgagaagcagcgaagctggggcccgcgctgcagcgtggatgagcctcggggacactgtgccgaatgaagtaagtcagccacaaaagaacaatgtatgactccactgatgtgaaatctccagaatggaccaatccctacagaggggagcagatcagtggctgcccagagcttggaggaggggaatagggagtcactccttcctgggcaccaggtttcggtttggggtgatgaaatgttgtcgacgcggccgcgaatttagtagta

SEQ ID NO: 263764 - DNA, 675 bp, Homo sapiens
aagtggaagtttccctttactttcagggattggtcaggggtggcagaaaacatgtgggttctttgtgtagatgtggctagttccaattagagaagtcctgcagctgatgttgccctcaccgtgatagcaggaggatgttgagaaatgggcttgggagacctggaggagaagttaccctcggcccggacgttgccttcctttcatcacagggcctttaactcctcctagggagtagcagagtggccctagggaaagtggccatcctgaaacctagtgttgctgtgacctggtgacagaaatggaaacctctgtggctcttctggtcatccttggtgggagtgggaatggtgtcacctttctagagggccatctggcaccatgtaatcacgccacagatctttacgaagctcctgctatgtaggaaacactatgcctggcactgggtatccattaaaatgtaaaatgcacgtgacctggcaattccacttctagaaatgagccttcagaagtgctcatacaaaagagctcaataagtatcatgcactaattcattgtgccaccagagctccctatgcagccttttaaaagaataaataggatctgtagcaccaaacaaaagacaaaaaaaaaaataaagggagaacgcacaaaagtacccagaagggaccaggacga

SEQ ID NO: 263765 - DNA, 646 bp, Homo sapiens
ataaatgctatgaaaattctgcacaatgtacttacatcaataacatccttttgtctatcaagcaattcctaaacagaggaaggagactgagtttgagttcctcattaaaaaattaaaaaataatgcctcaattaaaagaattcaaggatttatcatataattcattatgaaatcatgaaactataaaagaacctgagaatgtatataaactatatacatatatgccttactctcaggaggcctacaagcaatttcttttttttcttgacaacaaagtaaacacaattatttttacgttttttaacattttcttaagtatttaatatattagttacagtttcttgcatggtgtttgtaaaatattaactctggccacctgggagcatggcaatactacatggagaaggaaacaaaaaggaaatcaatgaaacctattcccaatataggatcccagttcaaacaccaagagacttaaagtaagtaatacctgaaaatttgtccatgtccttgaaaggcaagctatacacaagttgttggtcattctgttgtaataaagtagctccaggtatatgttgtttaaccagtgaagaaagagattctgtggcacaatatttgtctatgtacatgctagagaataccaaaaatc

SEQ ID NO: 263766 - DNA, 1263 bp, Homo sapiens
ggcaagtgaagtcctactaggtcgtggctgcaggttttcaaactccttgatttaggtttgttattatgaccactttgctattcccaaggtgatctctaggatcatttcaggaatgtatgaagatagtcatgaatgtactgagtgttcgtatcctgcttcagttcaccttggctgtgcctacatgatgacagatattggtgtttttttttttttgagacagagtctcactctgtcacccagcctggagtgcagtagcgcgatctcggctcactgcaacctctgcctcccgggttcaagcagttctctgcgttagccttctgagtagctgggattacaggcacctgccactacgctcagctaatttttgtatttttagtagagaaagggtttcaccatcttggccaggctggtcttaaactcctgatctcgtgatccacccaccttggcctcccaaagtgctgggattacaggcatgagccactgtgcccagcccatgataacagatgtttgaaagggaataaagtcgtgtctagtgtcattgtgctagcgtgcccctcccccttcagtgttggccccagatcttccctttatttttttatgtttgtgggaaaggggccacatcagcagcaatcatcaaccaatcaataggatctacttagtggtgaacatattggctgtttaattggtaagagtcgctggcctgaccacaccacagcatggccacttgggttcctgtagagatggcctcagtttccaatgttcctcccagacgtttgcttcttgcccaatcgagaggggatctcaagactcctgattggtcattgtgagctctcaccctgcgtggctgtgtagatagactgcatagatacatgaagtggggatgggggccaaggtcctattactgctgtttggaaataacttgcctcttacagatccagccttattgtttttctgacatcctagtaatggcagatcctgcacaaagtggatttcagagttaatactgtgaggagacaaaataatgagaatagttttaccaaagacaatgaaatattgcataatgtctgcattttgccattgatttgagtgcatctttagaaaactgaatttcacgaaaacccaggacattgctggaaattgtatgccctttagaaactttatgtgaatttttatacaaatgctgttttatgagttatgtaaaatgttacaaaaatagaaaaaaaataccctgtgtctataaggtggtgctgctgttgaagtcgt

SEQ ID NO: 263767 - DNA, 552 bp, Homo sapiens
ctgccttccagggctaagcaaggctgtccttggtgtggcttgcagactgaattcagccagcatggtgctatttgattttacttacaacaaacaaacaactgttcagattattagacaatggaatgggaatacctttggagtcacaatttctccaattcgccatgtctctctgttgctctacaactgtaaggagagaaaaataattagaagaagagtctccctcaatagagaggcagacatacacacctggtgatcatcactgtggtcctgcccaccctggcacaggtgggtcagacaaacctggtctgattctgatttactttgcctgagggagttaacaaaggtttcagagagagggaatcagaaaaccctcatgtaaaacagataccatacatgttagatcgaattacaatggagtaaacatttctttcttattaatgttgttagtgctgtgtttcttgtcctattcagtgacatgctttgacctagtaatttttatacgtggactgattttcagatgcatgtgggcataaattaaataccaagcatcta

SEQ ID NO: 263768 - DNA, 376 bp, Homo sapiens
atctgagtttcagggaaataataaagagtggtcagaggtgcagcaaataggatagggactgtccctgcctaagcttgcaaacaccagctccagctatcacgtgcaaatgctggcacaaaatagccagacattcagattttccaagagaagctacaaaaccaaattggtatgtaaatctccttaattctaaaatgttggtagctaaatgatttatttcaaaaccattattcagacaaacacaatatggcctacagtgaacataacttgtatgacaaatacaaccagcaagctattagcttgagtgtttacctgagatagattaaaagaaaaataggctgggcatggtggctcatacctgtaatcccagcactttggg

SEQ ID NO: 263769 - DNA, 428 bp, Homo sapiens
ttgaaggttgtgggtgaggtctaaatctcgcttcttgctgttggcgtagagaaggtagcctggagtcaagtagtcaggcttcatgcaatcaacatggccccggctattgttgaccgtagtgtgaacttcactatcagcaaagggcaacacattctgcgggctcaaagtcaagcagatgatctgcttgatccagaccatcagttactggatcagtcacagtcctccagagaagcagaacccataggttacatatttaaggaactgactcatgagattgacaggtctgaaatccgcagggcaggcagcaggccagagaccccggcaagagctgatgcttcattcttgaggcagaatttcctcctccctggaaaaccagtgtttgctcttagggccttcagctgattggatgaggcctacccacattctcc

SEQ ID NO: 263770 - DNA, 536 bp, Homo sapiens
atttcttgttgttataaataacaaggggagaggaagctagttccagaggacatctggaatgaaagatcgttcactggaattttttagagtttgattatgaaatacttattaatctggattctctaatctacagtataatcctgtcgttgtatgtagctttgagatacataaggtttcagattaaaaagtctttccatatgtttataaccagtcacataaaggtcgtgtattttactgaaatgttttgagttatcttaatgatacttagcttctttcataaggcatatagtcacagttgagctaagtagcaggacacacagggaagacaatgcattattaattttagaaatctttccctttaccattcttgcaaaattaatctgatactaaaatatgatactaagaggctgggcatggtggctcattcctgttatacctgcactttgagacgccaaggcaggtggatggatcgcttgagtccaggaattcaaaaccagcctgggcaacatggtgaaacctcatctctaccaaaaaaa

SEQ ID NO: 263771 - DNA, 423 bp, Homo sapiens
actaactaccacgatgacagaggaaaaagtaacacaagaaaagaattactttttaaaaagttaggaaaatggacaaacaccccggaagttgaatttgcgtactttttaatgtatttatttttatttattttttcaagatggagtctcactttttcacctaggctggggtgcagtggcacgatcttggctcactgcaacctctgcctccagattcaagtgattctcatgagtagctgggattacaggcatgtgccaccactcccagaatcccagcttcttgggaggctgaggcaggagaattgcttgaacctgggaggcagaggttccagtgagctgagatcatgccactgtactctagctacagcttgggcaacagagtgagtgagactctgccaaaaaaaaaaaaaaaaacacacaaacata

SEQ ID NO: 263772 - DNA, 1296 bp, Homo sapiens
ggcccggacccgggaacaaagggggccgggcagccaatggcagccgggcagctccgggccgccgccaatcaccgagcgccgcacgcaccttcgcggcccgagcgcggcgctggcaaggtgagaggcggggcggcgtccgaggcggcgccctgctgggcaagctcagtgaccctgacctggtctccgaagggattctctgggcgtccacgggccggcttctaaagagctgggatccccagcctccctctagctgaagatggagaagaactttttccatttggcaatttgtacctgtgtttgcccaggactttttatttgggtcaaggggaatagttatcccaatactaacttctcagtttattttcagggtaaagagagaaaaaaaagagagagagagagattgtagggatcgttagggattcctgtgatggaccttgggcactaaattcaatattgcgttgtggagatgccctttcctcaattgcttttttccacaatcccaaatactgtcaagaaaccgtatcttacatccctaaagtcagcgaagattcttagattgttttctgagcattgggttgttcaaaagtaaagatgatgtgaatcacttcagaaacaggttgtgtcattcctttggaagcagagggttgccctttgtctctgtgtgagatggtgctaggcctatcgcgtgctcaggctttgatgaagcagagtcatcacattggtgcaccaaagctgaattcatttcatgccctaattcaggagcaattgcatctaataccatcagattggtcggtctggaagggagcctaacgattacttagtctagcttcctcactttgcagggaactgaggactccagaggtgcagggacctgcctaatgtcttagcctgttggggacagaggcattgctcatgaatctaaacaacttctcaaagatgtttggggctggaagcacagcatgttgactaaggaaaaagagcagtcaattttcttcaatttgtggttatggcaaaaaataacattgcccagacagcaggtgacctaatttggcacctacttttaaaaataacaaaacaatataaaacaaacaaacaaaaattccctaataatgcagatattcaggtccagatgtatgtctgccttgcctcgagaaatttggtagctaaaaatatccaaaattcattttagccaatacttgcaactctgcttacttgattatttgttaacacagagcattgatttataatgtgcatgtttcctttatcctattaagaattaaaactgaaattaccaaa

SEQ ID NO: 263773 - DNA, 396 bp, Homo sapiens
  misc_feature (396)..(396): n is a, c, g, or t
agcactcaccacccacaggccatcagaggtaggggatacctcatccagcccttagcaaagcgggaacgctttctaagtgcctttgctgggtaccatctctctaggaatatcatttctctctgaggatgcacagtccattttttaaaactctggttgttgaaaataattataattataaaagctttcttttttattttgcagaagccctcctcctgtggggaaagcacggcagacttcaggcaatggtggttggacatttgccctgccccttattatatggtcatgtccacccccctcacttcagtgggcctccgtttcctcacggggttgttaaaatgcattaatcattaaaattattggcctcgttggcctcagcggtggagctctgcggccagn

SEQ ID NO: 263774 - DNA, 116 bp, Homo sapiens
caagaccttgtaaatcactacatatttacttatcaaatagtaggtatttgaatacctgctatctaaatactagctgtacctcatatttaaacttattaaacactgggtatttaaac

SEQ ID NO: 263775 - DNA, 234 bp, Homo sapiens
gagttgctataatcagtattaatctgtaaaatcacattgatttatcttagaaggataaaaagaacagaaacaaaactctaccagctcatataatttttctttgcaaaaattttttgcttctttactatactgaattagttacatcaattgttgtatcaatgaaataattaggtattattacctgtaactattttgaaaattaataaaagaaccaagaagaatagagtaatatcc

SEQ ID NO: 263776 - DNA, 526 bp, Homo sapiens
gagtaaaataacatctagttcatagggttgttgactagtacctggcccatggtaatcactgtgtcatgttggctgttactaccctttaacatgatttgctcccctccctgtggtaaaaagtattcattggcactactaattaatctgttagctcaacatatactaaccaaaatggaaatttgttttgtgaaatacaattgtcagttccttttcattataagaaacgttagtttattagtagtatatacccctgagaaagcactaatttattttgaaattgagtggattaattcataatatgaaagctgagaatgtagattgtcttctttctctattttgaatagttcatagaataatttatttcttttatctgggaacaaaaataactggtctaatttgtgacattctcaaacatattttacaagtttagataagttgagaatggcaaaaaccacaattacttttgcaacaatctaatacttttagaagaaaaatctatcttaccttattttatactaaaaaaaaa

SEQ ID NO: 263777 - DNA, 2067 bp, Homo sapiens
agtattagctccaaagaaggctgaggactcagccccaggaaagatccagtatgaagtccatggaaggtcccaaccagaagaacaggggccaccccagagcccagcgtctgagaccatcaggaaagccacaggacagcaactgactaccaatggggcacagacctttggccctgatcatgctgaccagctgcctgctggtcagaaggagagttcccaggttctaggagttgaaccaggaggcacagtggctgaaccagtgggcccagcagccatgaaccagcttctgcttcaactaagggaggagcttgctgcagtgtggcgagaaaaggatgctgcccggggggctttgtcaagaccggtcatggagggagccctggggactccccgtgctgaggcagcagcagctgcctgggagaagatggaagcccgactggagcgggtgctggcaaggctggaatgggcaaaggcaggactacaggtgaaacctgaggttccttcccaggagtccagagagggagccctaaaggcagccccagggagcatcaaacaggatgaagagaaggagaaaagggttcctggggctcgaggagagcctctaggggcccttggaggggaaaaggccctaggaggcctggcaaagggacagctggagaaggagatgtcagtactgagactgagcaacagtaacttgctggaggagttaggggagttggggcgggagcggcagaggttgcagagggagctacagtccctgagccagcggctgcagcgggagtttgtgcccaagccagaggcgcaggtccagctacagcagttgcgacagagtgtggggctgctgacaaatgaactggccatggagaaggaggccacagagaagctgcggaagctcctggcctcccagagcagcggtctccgagggctgtgggactgcctgcccgcagacctagtgggcgagaggagtgcacaaagcaaagcagcggagtccctggaggagctgcgggcctgcatcagcaccctggtggatcggcaccgggaggcccagcaggtgctggctcggctgcaagaagaaaaccagcagttgcgggggtccttgtccccgtgtagggagccaggcacctccttaaaggccccagcatccccccaagtggccgctctggagcaagacctggggaagctggaggaagagctgcgggcagttcaggccacgatgagcgggaagagccaggagatcggaaagctgaagcagctgctctaccaagccacagaggaagtggctgagctaagggcccgggaggcagccagcctacggcaacacgagaaaactcggggttcgctggtggcccaggctcaggcttggggccaggagctaaaggctctgctggaaaagtataatacggcctgccgggaagtgggtcggctgcgggaggcggtggccgaggagcgccgccggagcggggacctggccgctcaggcagccgaacaagagcgccaggccagcgagatgcgggggcgctccgagcagtttgagaaaacggcagagctgctgaaagagaagatggagcatctcattggggcttgccgagacaaggaagccaagatcaaggagttgttgaagaagctggagcagctttcagaagaggttctagcaattcggggagaaaatgctcgccttgccctgcagctgcaggattcccagaagaaccatgaagagatcatctccacctacaggaatcatctactgaatgctgctcggggttacatggaacatgaagtgtacaatatcctgctgcaaatccttagcatggaagaggagtgaggcagcctcactgtgtgccctcagggatacgagattctctgttggaataagaaaccctggttgacagaggcttcatcaggctgtggtgggcgggggtgttggccactaggcaatggtatgggcagggcttcacctgacattatggacctcagacctgagaacctggaccctggaatcagcatggatgagaccagaggaggtatggatggaaacaagctctatggaaaataaagcatgaggcaggacggggc

SEQ ID NO: 263778 - DNA, 510 bp, Homo sapiens
actagtcacggttggcttcctgcgagacaaggaagccaagatcaaggagttgttgaagaagctggagcagctttcagaagaggttctagcaattcggggagaaaatgctcgccttgccctgcagctgcaggattcccagaagaaccatgaagagatcatctccacctacaggaatcatctactgaatgctgctcggggttacatggaacatgaagtgtacaatatcctgctgcaaatccttagcatggaagaggagtgaggcagcctcactgtgtgccctcagggatacgagattctctgttggaataagaaaccctggttgacagaggcttcatcaggctgtggtgggcgggggtgttggccactaggcaatggtatgggcagggcttcacctgacattatggacctcagacctgagaacctggaccctggaatcagcatggatgagaccagaggaggtatggatggaaacaagctctatggaaaataaagcatgaggcaggacggggc

SEQ ID NO: 263779 - DNA, 399 bp, Homo sapiens
cacgcatgtacttctctaagaggggaaaataccagttgataatttgtagaagtacctataatacatcctaatgttgttttagtatgccatttaccctgtgttccagaatatgtacttgctatgccttgtttataaaataagttttaatgtatcaagcctctgaaagagtaaattttatgacaaatctgggaagtcatgctttatgtactgggagttcaaaaaattattttttgagtctgttgctttctagtcatttgtcccaacttaatattttaatatgtatacatcttgtataaaacaatttctaaaggattaagttgtataaatttatggatgaacactcaaagacttttgtcaggtcatatttaaaaatatatagtttcctaggagaaaaaagtt

SEQ ID NO: 263780 - DNA, 573 bp, Homo sapiens
gtaactatttcttttggagtctttttttcatttttcctctttctcttttcctggtttggaggaagctcggtgctgggagcttgcaattttgttcttattcaaggtttccaacccacccccccaccgccagtacttcatcatgttgtggtttaattctaattggtgggggggggggaggactagtgagggaggtgaaagaacagggataattttgtaaagtgtattaaacgttaatattcagatccagtcaatacatgcagaccagtaaaatctgatttgtgcagagttctccatctgactctcacttatttctgtagatatatacatatataaatacaagtatgttcttacggcacagtattgctgacctttagttcgaggttttgtcggttgttgttgattttcttcctcttgcaagtgctatccatgtgagtgtgtgaagtttctctaataagtaaaacacaggcccttttccttgtttgttttgtgttagtttattgtaaacagccatttgttgtaaattattattggcattaaattataatttatgattttcaaagcaaaagaaaaaaa

SEQ ID NO: 263781 - DNA, 758 bp, Homo sapiens
ggaaattcaaaacttagggattatttctgaaattttccatttaaaattttctatttaaaattgacgaagggtaactgaaaccagagaaagcaagactgacgataagggaggggcctcctgtactccaagagcactgaatctggaaaaactcaacacatcgatggagtcatatatttaattttttcttaaaagccgcctgcggggtattgtagaaacgctgcgctgcctatcacagcttgtgatgtgacacgttcattctgcaagtttaaacttcgcctagatcggttcttggggaaaagctgtgcttcagagacaaggttgaagaacttcgcctgcatatgatggaagatgacaatgggaaccacaggtgtcattggtggctttgttttacaaagtcttcacctttctgctgagtcacgggactaagttcaacacaatttctactttccgccttcctttggaataatagttttggaagccaagtattagtatatgataccaggtgtgttttctaaagattcaggttcagtgggctgaatgcactttcatgacttcattagaccactgagcccaaggagaaaagtgccaatcttactagacatgaggaaaaagacacatcttttgctcttgctggaagtggtgtcctactttctacaagcagtcgtcatctggtttatacttgccttgttcagtttttgtgtgatattttattctctgcctaatagatattaaagtatcaagctgtcaaaatgattttt

SEQ ID NO: 263782 - DNA, 1016 bp, Homo sapiens
gtaaccaggctcatcagacctcccatcccctcacagccacagacccagctttaagtttcccagacggaagattattcttactgcagatcttagcaacctcagcacatgactctttttctttcctcattaagtcaagaacctttggccttttcacttaaaagaagcactctaaggcttcgctttgacataccccagttgccagcatcactactgtttgggaccattaggaagtaaattcagggagacttgaacacaagcactgcttatctcgaaagctgatctgctcaccgaggtggcccttgagcacggacagcctggatctgctggggtaactgaaaccagagaaagcaagactgacgataagggaggggcctcctgtactccaagagcactgaatctggaaaaactcaacacatcgatggagtcatatatttaattttttcttaaaagccgcctgcggggtattgtagaaacgctgcgctgcctatcacagcttgtgatgtgacacgttcattctgcaagtttaaacttcgcctagatcggttcttggggaaaagctgtgcttcagagacaaggttgaagaacttcgcctgcatatgatggaagatgacaatgggaaccacaggtgtcattggtggctttgttttacaaagtcttcacctttctgctgagtcacgggactaagttcaacacaatttctactttccgccttcctttggaataatagttttggaagccaagtattagtatatgataccaggtgtgttttctaaagattcaggttcagtgggctgaatgcactttcatgacttcattagaccactgagcccaaggagaaaagtgccaatcttactagacatgaggaaaaagacacatcttttgctcttgctggaagtggtgtcctactttctacaagcagtcgtcatctggtttatacttgccttgttcagtttttgtgtgatattttattctctgcctaatagatattaaagtatcaagctgtcaaaatgattttt

SEQ ID NO: 263783 - DNA, 805 bp, Homo sapiens
gtaaccaggctcatcagacctcccatcccctcacagccacagacccagctttaagtttcccagacggaagattattcttactgcagatcttagcaacctcagcacatgactctttttctttcctcattaagtcaagaacctttggccttttcacttaaaagaagcactctaaggcttcgctttgacataccccagttgccagcatcactactgtttgggaccattaggaagtaaattcagggagacttgaacacaagcactgcttatctcgaaagctgatctgctcaccgaggtggcccttgagcacggacagcctggatctgctggatcggttcttggggaaaagctgtgcttcagagacaaggttgaagaacttcgcctgcatatgatggaagatgacaatgggaaccacaggtgtcattggtggctttgttttacaaagtcttcacctttctgctgagtcacgggactaagttcaacacaatttctactttccgccttcctttggaataatagttttggaagccaagtattagtatatgataccaggtgtgttttctaaagattcaggttcagtgggctgaatgcactttcatgacttcattagaccactgagcccaaggagaaaagtgccaatcttactagacatgaggaaaaagacacatcttttgctcttgctggaagtggtgtcctactttctacaagcagtcgtcatctggtttatacttgccttgttcagtttttgtgtgatattttattctctgcctaatagatattaaagtatcaagctgtcaaaatgattttt

SEQ ID NO: 263784 - DNA, 822 bp, Homo sapiens
gggtccccttggccaagaggagggtctgttctgtgggttgagagccttaggattttatttttctttcttcttgttcatgccttcaacaagtataaagccctttccatcttaactaagcacttatcacacactgtggctgtaacttctgcagcttgaggtgcgatggcgaaagtattattaatttctttttccttcttcacagtttcccagacggaagattattcttactgcagatcttagcaacctcagcacatgactctttttctttcctcattaagtcaagaacctttggccttttcacttaaaagaagcactctaaggcttcgctttgacataccccagttgccagcatcactactgtttgggaccattaggaagtaaattcagggagacttgaacacaagcactgcttatctcgaaagctgatctgctcaccgaggtggcccttgagcacggacagcctggatctgctgggtaaagggagaagttatgtccagggtgggacagagaggacggcgagagatttcctcactactcagaacagcgggaaattcaaaacttagggattatttctgaaattttccatttaaaattttctatttaaaattgacgaagggtaactgaaaccagagaaagcaagactgacgataagggaggggcctcctgtactccaagagcactgaatctggaaaaactcaacacatcgatggagtcatatatttaattttttcttaaaagccgcctgcggggtattgtagaaacgctgcgctgcctatcacagcttgtgatgtgacacgttcattctgcaagtttaaacttcgc

SEQ ID NO: 263785 - DNA, 678 bp, Homo sapiens
gtcaaatcccaataaagacaatgttaataatgacatgaattttcatcttgccattattttttctaattataaaagttagaaaaagttaaattaagatattacggaaagaagtaatctaggaagtaaaaatccttcataatgccacctcttttgttgctgcctatatagtccttcagctatttttctatacacaatgcttatattgttactgtcttatttttatagaaaggtatcatgcaaaacataatgtttgaaatttgattttttacatttaacagtgtatcttaacatattttcatgctgctacatttagttctatcttttaatgtttaatggctgcatgctactccattaaatgggtctgtaattgttttcccttaatgatgaaattttgagtttttatctgtcaaaacaaagcaaaagggaatattcttgtacatatatgttgctgatatggtttggctgtatccccacacaaattcaccttgaattgtaataatcctcacatgtcaggggtggggccagctggagataactgacttatggaggcagtttcccccatactgttctctcagtagtgaataagtctcacgagatctgatggttttataaatgagagttcccctgcacaaactctctcttgcctgctgccatgtaagacatgactttgctcctcat

SEQ ID NO: 263786 - DNA, 359 bp, Homo sapiens
aagtgcatgtttccgtaagtgcactttttccataagtgaggtgaatttcacttaattcatatcatttagctttaatttcctctaagtgtctttataaatggatgactaaatatttatatttatgctatcagatttgataacatgcatctatctatatgactggatgtgtgaatattatattggtcagctttcacccaggtggtcatgtcagaaaaggctgttagtttagcctgagtgtagaatttctatcttagatcacatatatcatgtgtcttcctgtcttatatccctgtgtcttcctgtctcaccaattatctagattcagtgaatggtgtgtggtacaagacttgtaggaacta

SEQ ID NO: 263787 - DNA, 498 bp, Homo sapiens
ctactgtcaacctgcctgactactatatccttggctttgaaaggttgtagtgtaaaagttaatcataggaattcggtcattcttgacatacccaacagagccaagaaaccaggaggaaaaaccactcagggtgcaaaatattgtctgaagaaagcaattgaaataggccctattatcctatggaactaatgtttatgattttttgaataaacatagaaactgactcccccagtcttaaaactcaaggtagttacatttgttaatctgagttcttttttcaggaaaccaaccatcaggcctctagatactatcaaggagctgaaagttatatatcactgaatggggacagtgagacatcagacccttcacccattatgattgcctaactgacctctagcttcctgttgactaaattatcttccttacccctctctaattcctgttttccacatttcttccctgctatataaacccctaatttattttgtcagggagata

SEQ ID NO: 263788 - DNA, 308 bp, Homo sapiens
tgctttcaggagaactactaaatttaaaatttcaaaattggctatagaaggatccaggaatacttaattgttcaatgtctttaatatgtgtgcttcccctggtgctgaatcattagatgattagacttattcttatcctcaaaattctgccaccaagattggtaaacatcataattttaattaatttacataaatcatttacaatcttacagtatccaaagcaatgctaaatgttgaatgaataccaaatgacagccttatataagaaagaaggttaacagtaaaacaacgtagctttctttaaaaaa

SEQ ID NO: 263789 - DNA, 571 bp, Homo sapiens
gtgccgccgatatttctatggcatttcattagtcatggatgaccttacaatttctggacctccatctccactagtcattttttactccatttagcaaaccaattttaagtccacacttcggactcatcagaaatttattttctgaaatgtacagcctaatttattctatgattttaatgtcttttcctttaatctcttcctctcagtatacttactctttgacctcaagaagcctccaattccttaaccaaccttttcccccccctctctgtcagtttactctggctttaccgcttccccatttagcatagactctggcctgtcactctggctctgcagaaccttatccgtggatcagtttggccatctgacttctttgatttcatgggctgctgcatgctactgagtatataccattggttggtagcaccacagattgactcaagtaggcaggctcttgaagcagtttagcagccctggcggtccaacctcttccgttcttaaagactatttcagattttcacctcttgtcaaatactcagcctgtcacctctgctgcctcagcagaagc

SEQ ID NO: 263790 - DNA, 2092 bp, Homo sapiens
aatataaacatgttagtgtgaaactgttctaacaatacaaatagtatggtatgcttgtgcattctgccttcatccctttctatttctttctaagttatttatttaataggatgttaaatatcttttggtgttttaaagagtatctcagcagctgtcttctgatttatcttttctttttattcagcacaccacatgcatgttcacgacaaagtgtttttaaaacttggcgaacacttcaaaaataggagttgggattagggaagcagtatgagtgcccgtgtgctatcagttgacttaatttgcacttctgcagtaataaccatcaacaataaatatggcaatgctgtgccatggcttgagtgagagatgtctgctatcatttgaaaacatatattactctcgaggcttcctgtctcaagaaatagaccagaaggccaaattcttctctttcaatacatcagtttgcctccaagaatatactaaaaaaaggaaaattaattgctaaatacatttaaatagcctagcctcattatttactcatgatttcttgccaaatgtcatggcggtaaagaggctgtccacatctctaaaaaccctctgtaaattccacataatgcatctttcccaaaggaactatcaaagaatttggtatgaagcgcaactctcccaggggcttaaactgagcaaatcaaatatatactggtatatgtgtaaccatatacaaaaacctgttctagctgtatgatctagtctttacaaaaccaaataaaacttgttttctgtaaatttaaagagctttacaaagttccataatgtaaccatatcaaaattcattttgttagagcaggtatagaaaagagtacataagagtttaccaatcatcatcacattgtattccactaaataaatacataagccttatttgcagtgtctgtagtgattttaaaaatgtagaaaaatactatttgttctaaatacttttaagcaataactataatagtatattgatgctgcagttttatcttcatatttcttgttttgaaaaagcattttattgtttggacacagtattttggtacaaaaaaaaagactcactaaatgtgtcttactaaagtttaacctttggaaatgctggcgttctgtgattctccaacaaacttatttgtgtcaatacttaaccagcacttccagttaatctgttatttttaaaaattgctttattaagaaattttttgtataatcccataaaaggtcatatttttcccattcttcaaaaaaactgtatttcagaagaaacacatttgaggcactgtcttttggcttatagtttaaattgcatttcatcatactttgcttccaacttgctttttggcaaatgagattataaaaatgtttaatttttgtggttggaatctggatgttaaaatttaattggtaactcagtctgtgagctataatgtaatgcattcctatcaaaactaggtatctttttttcctttattttaaaataataattgcacctgacacataaacatagaccacccacaaccaaaattaaatgtttggtaagacaaatacacattggatgaccacagtaacagcaaacagggcacaaactggattcttatttcacatagacatttagattactaaagagactatgtgtaaacagtcatcattatagtactcaagacactaaaacagcttctagcaaaatatattaaagcttgcagaggccaaaaatagaaaacatctccctgtctctcccacatttccctcacagaaagacaaaaaacctgcctggtgcagtagctcacacctgtaatcccagcagtttgggagactgtgggaagatggcttgagtccaggagttctagacaggcctgagaaacctagtgagacatccttctcttaaacaaaacaaaacaaaacaaatgtagccatgcgtggtggcatatacctgtggtcccaactactcaggaggctgaaacggaaggatctcttgggcccaggagtttgaggctgcagtgagctataatcttgccattgcactccagcctgggtgaaaaagagccagaaagaaaggaaagag

SEQ ID NO: 263791 - DNA, 947 bp, Homo sapiens
gcaaatatacaatcggctgaagattccttgggcctcagagctggtatgatactgctctgtgagtttagtctcctcacagtgaatcagttgagaaggatggccgagggcccagtggaagagaaatgccttgtgattagaaaagagcgcatcgtggatatgttcatggcatagacatgagttgttttcctttgtatctgaacaatgggaaatgttggcgcaagtctttctttgcagagtctttctatgacagccaagagtctgtttgccattcaagaccaaaatgaggccatgtgcctgctacctgccaaggcttctgacgtggcagtgccagggagcagagtggcatcccaccacagaggactctgaccaaagcaaaagcttcgccgggaggggaggttactttccacccagcactgggagacagagccaggtattagatgagagaagactgagagcctctaggtttgcaggaatgcacttggctgttcttaggtttttgtgtatctttaactgttactctaatttattgatgcttaacttggggcctgtgtacttcttgtagtttggaggcccatgaatagtctttatcgaccctgggaaattgtacagaaaattgtgggtgagtcattcttgggagggaaccccagctcctcacaaaggttcctcgctcaccctgccaaggataaggaccattgctctaaattacatattattctgaatgtaatgagagcattgatactagttgaactatttcatcttgtagaacaatttacagttgtctagctcatgtgctgccctgtactgcgacatattcacttctgttggaggcctgcaggtgaccatggcttgcctcttgatgaccatgctcatgtgaaagcttggtgcccaaaagaaaaataaaaagcatctctaaagaatgagaattgtcaaaaaggaaaacacagtgt

SEQ ID NO: 263792 - DNA, 807 bp, Homo sapiens
aacctgggcgtcagagtaaaatcccagctctgccatttactacctacccaccagggctgctgttagatttaagatgctaaagatagaatgctgagcacagagtgaatgtctaagacctactagttccactcccctccccgataccattttcattctaccgttcttgtaactactctgggtttgagaattatggcaggagactgtgctaaggagccaaagtctaatctctggattgctgagaataaaaggaaggtctggggaaagaaaggagggagggcaagtgggcatgaagaagaacagagctttcattaggcaagtgtttatgggcaacccccacgtgccaggctctctgctgggtgttgggttatgcaggtgattaggacacaggcactgttcttaaggagctcaggtgctgaaggggaagttactgttgtggactaactggtctgtaagtcgtacatggggtcccgtaccacaggcaggcacagagcttggcagcagtgcgaccctggacagaattgtttgtgaaacgtctccccttccagacgaagttattatagctcttgtgattttgtgtggtgcctagatttcccccgttgtacactcagttcaggagtacttactcaagtctcactcaagggcatggggaccccaaacaccttgttcatgtgcaccccagggcccagcacactgtaggcagatgtgtgttgactgagtggtcttcagtttccttattttaagatgaagataatgttgatcttaacaggctgttgtgtggattaaatgaagtaatgtttatcaagtgta

SEQ ID NO: 263793 - DNA, 703 bp, Homo sapiens
attccatctatgagaaatctctctgttcagtcaccataagccagattgaagcaatgtagatagggtttgattgctaagaatggcagcttcaaactctatggaaatgaggaaatttgaaagagagttcagtttcagccaaatcatgcatgtgaggtaacgagacatcttttaaatgcagaacaaattgctacgcataggactgatcatcttattctccactgttgatggaaacttaggcagagggatttcattatgcaaaaacatcatgtgtttcttttttcctgtacaatttgagggcagaattgttggcagtaaatcaaataagtcatactggatgtaagttaaaatatagccatgtatccttagaaaatatttgcatatgtagaaagactggaaccttaagtagcagccatgatgaacacagtggaagaattaataggtgttgttaacagtagtaacactgaaatgaatcacagtggatttatgtaatacatgtgctattgaaggcaacagtgattacacttgaacattgttaacatatagctaagtgtcttagtctgtttcttgttacttagaataactaaatctgggtgatttataaataaaaaaattatgtcttatagaggctaagtccaaggttgaggggctccttttgtgagggccttcttgttagtggggactctctgcagagtcctgaggcggt

SEQ ID NO: 263794 - DNA, 1134 bp, Homo sapiens
gttccagaaaataggactgaccaagaagcagaaaagcaagatgaatgatgtgaagcttgctgtcttgggtggtgaaggaacaggcaaatctggtccctacatccttaaataactgcaaatacttggtagtgtctttgtgactattacacatagtaccttgaagccagactgagtttgacagagaaaataaacagatgtcaaacttcttgcatctcaaatataatgagaaatctgtttctgttacaaaagcccttacagtgaggtttcttactaagcgattcattggagaatatgcttctaattttgaatctatctataagaagcacttgtgtttggaaaggaaacaactaaatctagaaatatatgacccttgttctcaaacacagaaagcaaaattctccctcacaagtgagcttcactgggcagatgggtttgttattgtgtatgacatcagtgataggtcttcatttgcttttgcaaaagcgctgatctacagaatccgggagccacaaactagtcattgtaaaagagctgtggaatcagcagtgtttttggttggcaacaaacgagatctttgtcatgtgcgagaggttggctgggaagaagggcaaaagctggcactggaaaaccgatgccaattctgtgaactgtctgcagcagagcagtctctggaggtggaaatgatgtttatcagaattatcaaggacatcctgataaacttcaaactcaaagaaaagagacgtcccagtggatctaaatcaatggccaaattgatcaataatgtatttggaaagagaaggaaatctgtttagtagacaggtaatcctgggagatttcctatatcagagagtttcaaacattcacatgataattaaactaacctttgtatgcaatttttttttggtaaaaagaattctcttggagatatgaaatgattgagtatgaaccacagctgtgttttcaaatatgtagtttgcctttttggttgttgtaccctgctcactctccttcacacagaacctttcatttattgtacaacatcacactcaccctaacctactggcggacagcgatcccagtttgccttgccaaataaactctgtttatgtgaatttattaaacgaccatgccata

SEQ ID NO: 263795 - DNA, 874 bp, Homo sapiens
gttccagaaaataggactgaccaagaagcagaaaagcaagatgaatgatgtgaagcttgctgtcttgggtggtgaaggaacaggcaaatctgcccttacagtgaggtttcttactaagcgattcattggagaatatgcttctaattttgaatctatctataagaagcacttgtgtttggaaaggaaacaactaaatctagaaatatatgacccttgttctcaacgctgatctacagaatccgggagccacaaactagtcattgtaaaagagctgtggaatcagcagtgtttttggttggcaacaaacgagatctttgtcatgtgcgagaggttggctgggaagaagggcaaaagctggcactggaaaaccgatgccaattctgtgaactgtctgcagcagagcagtctctggaggtggaaatgatgtttatcagaattatcaaggacatcctgataaacttcaaactcaaagaaaagagacgtcccagtggatctaaatcaatggccaaattgatcaataatgtatttggaaagagaaggaaatctgtttagtagacaggtaatcctgggagatttcctatatcagagagtttcaaacattcacatgataattaaactaacctttgtatgcaatttttttttggtaaaaagaattctcttggagatatgaaatgattgagtatgaaccacagctgtgttttcaaatatgtagtttgcctttttggttgttgtaccctgctcactctccttcacacagaacctttcatttattgtacaacatcacactcaccctaacctactggcggacagcgatcccagtttgccttgccaaataaactctgtttatgtgaatttattaaacgaccatgccata

SEQ ID NO: 263796 - DNA, 1123 bp, Homo sapiens
attcggacagaaaacatcagaaggaaaaccttcatatggcccaatgtcaaagattccatctggtgtcattttccttgtaccagaagtatttaatttggcatttctcatgtgcctgctagctgactaatttctttcagcatctgtttacgaaatatatagctaaaatagaaatatttgaaaagaggaaaacctgaagatcagtaatctaaattaacagcaaaatataatcaaagaaaacaaaagaagaaaaataataaagatctcaactgagatcctcccattgtcagattttgacctaggaccatcttggaaagggattcttctgtgattcagaggtgaagcccttacagtgaggtttcttactaagcgattcattggagaatatgcttctaattttgaatctatctataagaagcacttgtgtttggaaaggaaacaactaaatctagaaatatatgacccttgttctcaacgctgatctacagaatccgggagccacaaactagtcattgtaaaagagctgtggaatcagcagtgtttttggttggcaacaaacgagatctttgtcatgtgcgagaggttggctgggaagaagggcaaaagctggcactggaaaaccgatgccaattctgtgaactgtctgcagcagagcagtctctggaggtggaaatgatgtttatcagaattatcaaggacatcctgataaacttcaaactcaaagaaaagagacgtcccagtggatctaaatcaatggccaaattgatcaataatgtatttggaaagagaaggaaatctgtttagtagacaggtaatcctgggagatttcctatatcagagagtttcaaacattcacatgataattaaactaacctttgtatgcaatttttttttggtaaaaagaattctcttggagatatgaaatgattgagtatgaaccacagctgtgttttcaaatatgtagtttgcctttttggttgttgtaccctgctcactctccttcacacagaacctttcatttattgtacaacatcacactcaccctaacctactggcggacagcgatcccagtttgccttgccaaataaactctgtttatgtgaatttattaaacgaccatgccata

SEQ ID NO: 263797 - DNA, 1226 bp, Homo sapiens
attcggacagaaaacatcagaaggaaaaccttcatatggcccaatgtcaaagattccatctggtgtcattttccttgtaccagaagtatttaatttggcatttctcatgtgcctgctagctgactaatttctttcagcatctgtttacgaaatatatagctaaaatagaaatatttgaaaagaggaaaacctgaagatcagtaatctaaattaacagcaaaatataatcaaagaaaacaaaagaagaaaaataataaagatctcaactgagatcctcccattgtcagattttgacctaggaccatcttggaaagggattcttctgtgattcagaggtgaagcccttacagtgaggtttcttactaagcgattcattggagaatatgcttctaattttgaatctatctataagaagcacttgtgtttggaaaggaaacaactaaatctagaaatatatgacccttgttctcaaacacagaaagcaaaattctccctcacaagtgagcttcactgggcagatgggtttgttattgtgtatgacatcagtgataggtcttcatttgcttttgcaaaagcgctgatctacagaatccgggagccacaaactagtcattgtaaaagagctgtggaatcagcagtgtttttggttggcaacaaacgagatctttgtcatgtgcgagaggttggctgggaagaagggcaaaagctggcactggaaaaccgatgccaattctgtgaactgtctgcagcagagcagtctctggaggtggaaatgatgtttatcagaattatcaaggacatcctgataaacttcaaactcaaagaaaagagacgtcccagtggatctaaatcaatggccaaattgatcaataatgtatttggaaagagaaggaaatctgtttagtagacaggtaatcctgggagatttcctatatcagagagtttcaaacattcacatgataattaaactaacctttgtatgcaatttttttttggtaaaaagaattctcttggagatatgaaatgattgagtatgaaccacagctgtgttttcaaatatgtagtttgcctttttggttgttgtaccctgctcactctccttcacacagaacctttcatttattgtacaacatcacactcaccctaacctactggcggacagcgatcccagtttgccttgccaaataaactctgtttatgtgaatttattaaacgaccatgccata

SEQ ID NO: 263798 - DNA, 973 bp, Homo sapiens
ggctggtacggcccggaagttagggatggcctgggaggagagtctgacgagcaaggggaaggtagccaagtatggagtgaaatacaggcccttacagtgaggtttcttactaagcgattcattggagaatatgcttctaattttgaatctatctataagaagcacttgtgtttggaaaggaaacaactaaatctagaaatatatgacccttgttctcaaacacagaaagcaaaattctccctcacaagtgagcttcactgggcagatgggtttgttattgtgtatgacatcagtgataggtcttcatttgcttttgcaaaagcgctgatctacagaatccgggagccacaaactagtcattgtaaaagagctgtggaatcagcagtgtttttggttggcaacaaacgagatctttgtcatgtgcgagaggttggctgggaagaagggcaaaagctggcactggaaaaccgatgccaattctgtgaactgtctgcagcagagcagtctctggaggtggaaatgatgtttatcagaattatcaaggacatcctgataaacttcaaactcaaagaaaagagacgtcccagtggatctaaatcaatggccaaattgatcaataatgtatttggaaagagaaggaaatctgtttagtagacaggtaatcctgggagatttcctatatcagagagtttcaaacattcacatgataattaaactaacctttgtatgcaatttttttttggtaaaaagaattctcttggagatatgaaatgattgagtatgaaccacagctgtgttttcaaatatgtagtttgcctttttggttgttgtaccctgctcactctccttcacacagaacctttcatttattgtacaacatcacactcaccctaacctactggcggacagcgatcccagtttgccttgccaaataaactctgtttatgtgaatttattaaacgaccatgccata

SEQ ID NO: 263799 - DNA, 192 bp, Homo sapiens
gactgcagactagttgaccagctacaacttaaaatttttctatatacattttattatgtgttcaactcataactcacttactctatataaagagagcatttgattattgttaagctgtactgaactatcaatagctgttcagtaacagctaccttagatactgatggcagtcgcccaggctggagtgcagta

SEQ ID NO: 263800 - DNA, 647 bp, Homo sapiens
atagattttaaaaaatgattcaaggtggataaaataatgctgtggaaaaggggaagaaattattgtagatatcatctgtcagtagaggattttgaatgacttgctcctttaaaaaaaaaaaatctggcctgaagttcccaattctcacccaatctttccacccccatgaatgacttatccaatgttccgtgattcactggggaggttggaaatcaggattctcttgcctggagttcctcctccaccttctcctccttccaaacccactcgtttaaggcacatgatcccatgacaaatttcttccaacttacagttcaaagagaagtcagcattgcacctgtcaccaggaaaggggccataacctggggagttaagaacctacactgacattacccactgggtgcagggaaagtacattaaccatctgcgatgagactgtttcctagctccatctgtccatctgtctccaggaactagtctccctctctatccagtacctggtggttcagctccaagcagaatttaccaaagcaaaacagcccccatgattcacaatcccagacttgtgacactttaaaacagctcacgtttagaaagataatgagtcacaggatggcagagattaggaaactcagggccagagaggg

SEQ ID NO: 263801 - DNA, 693 bp, Homo sapiens
aagagactgactttgtttttgattattcaacctttgcctggaaaagacaaaaaaccagtctacctgtccacctgtcttcatcacctatcacacagtaggcactgaatgactgaatgtccattaagggcagaggatcatcccttgtcatgattttcccacttgggcctagcattccaaatttaaagttcccaatgacagtggtaccttacctttccaaagatcacaagacccattttctccttacttcaatttcgcaagcatcattcccaatagatatctatgtgaaaatgttgtatttctaacccctcattagaaaactagaaaaataggccaggtgcggtggctcacacctgtaatcccggcactttgggaggctgaggtgggcagatcacttgaggtcaggagtttaagaccagtctggccaacatggggaaaccccgtctctacaaaaatacaaaaattagctgggcatgatggcaagtgcctgtaaattcagctacttgggaggctgaggtgggagagtcacctgagcccaggaggtagaggtggcagtaagctaagattgtaccattacactccagcctgggcaacagagcaagactccatctcaaggaagaaaaaaaaagaaaactagaaaaataatcttagcttcttattccagaattatttcctaagataaacatttgaggaatg

SEQ ID NO: 263802 - DNA, 1329 bp, Homo sapiens
  misc_feature (283)..(283): n is a, c, g, or t
  misc_feature (338)..(339): n is a, c, g, or t
ggacctggggcccagtttgagttccttgtggcctactggaggagggagcctggtgcgcgaggaacatgtcaaaatggtgaggagtgggggtattccagtgcacctagaaaccatggagccagggctgcatactgtgtgaaggcccagacattcgtgaaggccattgggaggtacagcgccttcagccagacagaatgtgtggaggtgcaaggagaggccattcccctggtactggccctgtttgcctttgttggcttcatgctgatccttgtggtcgtgccantgttcgtctggaaaatgggccggctgctccagtactcctgttgccccgtggtggnnctcccagacaccttgaaaataaccaattcaccccagaagttaatcagctgcagaagggaggaggtggatgcctgtgccacggctgtgatgtctcctgaggaactcctcagggcctggatctcataggtttgcggaagggcccaggtgaagccgagaacctggtctgcatgacatggaaaccatgaggggacaagttgtgtttctgttttccgccacggacaagggatgagagaagtaggaagagcctgttgtctacaagtctagaagcaaccatcagaggcagggtggtttgtctaacagaacactgactgaggcttaggggatgtgacctctagactgggggctgccacttgctggctgagcaaccctgggaaaagtgacttcatcccttcggtcctaagttttctcatctgtaatgggggaattacctacacacctgctaaacacacacacacagagtctctctctatatatacacacgtacacataaatacacccagcacttgcaaggctagagggaaactggtgacactctacagtctgactgattcagtgtttctggagagcaggacataaatgtatgatgagaatgatcaaggactctacacactgggtggcttggagagcccactttcccagaataatccttgagagaaaaggaatcatgggagcaatggtgttgagttcacttcaagcccaatgccggtgcagaggggaatggcttagcgagctctacagtaggtgacctggaggaaggtcacagccacactgaaaatgggatgtgcatgaacacggaggatccatgaactactgtaaagtgttgacagtgtgtgcacactgcagacagcaggtgaaatgtatgtgtgcaatgcgacgagaatgcagaagtcagtaacatgtgcatgtttgttgtgctccttttttctgttggtaaagtacagaattcagcaaataaaaagggccaccctggccaaaagcggtctttaaaat

SEQ ID NO: 263803 - DNA, 901 bp, Homo sapiens
ccgtggtgtgtcatgcaccgtgggtgtcatgcaattcctttcaccagccaacctgaaaaaagacctttctcttactatgtcatcagaaaccagacagacccgggtccctgcaaaatctcaagtgagcattttccccacaggaaaacagaatcttccactgcagctagagaaactccgaggaagagggacttgatgctttaaacatcaaaatgagaaggggagggaggaaagaaaggggggagtctgtgaggcacaacagagaattcccccaaactgacatgaccgtgaccctctgctcagagggcactttcgacagcccacaggtgccagaccccacacaccccatacagggcaggcacctcacacagagtctctctctatatatacacacgtacacataaatacacccagcacttgcaaggctagagggaaactggtgacactctacagtctgactgattcagtgtttctggagagcaggacataaatgtatgatgagaatgatcaaggactctacacactgggtggcttggagagcccactttcccagaataatccttgagagaaaaggaatcatgggagcaatggtgttgagttcacttcaagcccaatgccggtgcagaggggaatggcttagcgagctctacagtaggtgacctggaggaaggtcacagccacactgaaaatgggatgtgcatgaacacggaggatccatgaactactgtaaagtgttgacagtgtgtgcacactgcagacagcaggtgaaatgtatgtgtgcaatgcgacgagaatgcagaagtcagtaacatgtgcatgtttgttgtgctccttttttctgttggtaaagtacagaattcagcaaataaaaagggccaccctggccaaaagcggtctttaaaat

SEQ ID NO: 263804 - DNA, 469 bp, Homo sapiens
ggcgggtgctggcagcccccaaggtctccagggccagggcagaggcaagcaggtgtttctgatgtcccaggaaggaccccagagtgtggggacacagcaatgttctggtccttaccccagcacagcccctatcaagggggacccaacccccctgcaggggctgctggtgccctcgctgatgagtgggcactgaaggagcacctcagcgagggagccaggagttggggtgcctcagcccggccccccaggcttccctgagggctgattgctgatgccctgtgctctgctgctgacctattttccagcacattctcgactgggaaacttggcccaaatcctgttccctgttgtgtgcccagggccccgtccagagcatcgaggaggcacttggcacacaccactgtatggacggatgagctaatgaagtgaatgaatgaatatcataaaactaaatggctggaaggagaga

SEQ ID NO: 263805 - DNA, 145 bp, Homo sapiens
tgaaggaaacgtttttgtttggcttaacaacaattagcccaacatttttcagaaatctcttctagcttgtaagtatgaatatcttctattcactcaaaaagatgcacattttaatatgaccacattttctgtgaccaaaataaat

SEQ ID NO: 263806 - DNA, 548 bp, Homo sapiens
gctttatatttagacccaagccccgaactgccccgacaccccctgtttcctttgtgagctgagaatcttcccacagaggccagtctgggtcatctctttcctgtgatcaggtagggtccttcctgacaaggccctgccccctcctggccttgactacccctgggcagtggcccctggggtggacctgctctcctgctctgacaagcagtcatctgtcttagagcacaggctctaattacccctgccattagcctgcttggcaggactgcagatgttattaatggcggtgaaattatccaatgcctttcaaaactccccagccactcgatgtttgtccctgtgacctctcacagcacttcatttctttattcactttgctgctgtattgaatcttaaccttgagtgtgagataaaaaacaaggaggagaatgtcactctctccaacgttcctttattcccttcctcagcccctcaccccctacttatttggggatgtaacccagcaccatcctcactgccatgctgtttgtcagcagggagctcttgac

SEQ ID NO: 263807 - DNA, 451 bp, Homo sapiens
cctagacctggggtatttttctgctaatgtgtgtgttctgccttctttccctcacttttctctcttctgccagcctagaatgtggacatgatatctgagggtacagcaaccattttgtgtgcatgagagcaaatctataagtcaaataaggctttgtggaaaggcaggactctgggcttcacaggagtccctgcctgggactgcctactcctaggcatctttttcatgagaaaatttaactctctaaagtgtttctgataacatgcagttgaatgcagttccaattgttttatctcctcatcaattccagcgatggtctctaaaacttttttgatcatgacgtctatcagtaaaaaaaaattgaacacatcatatttatatacattcatttgtattttatttatttataaactatccacatgttctaataatatcttggaaatagagaaaa

SEQ ID NO: 263808 - DNA, 462 bp, Homo sapiens
tagcatttgttttgattgagcttagtatttatggtcattaaattataagcttcagaaactctctaaggctttattcttagtaaagaaagctttattcagtagaagaaacagtaacaataacaacaactaacctccacaaaaaatattttaattttggcaacccaatcgactcaaacctattatgtacacctaagttgcatggatcctaagaaagagaaaacgggaaatatagcagttattttaatgttcacattctagtaagttttaatgagtatattcaaccctgtttgataactaggtgtgctgcattgtcatggttcacgcaagtcttagtttcttaaaagaaaaagctgtcttcaaaagctttagattcctctgatcaagaatctcttctattcaattctaataaaattatttcatatacatgattaaggtgagtaggtagatgatagtgatggggga

SEQ ID NO: 263809 - DNA, 563 bp, Homo sapiens
agaagtattgcttcatttatttacttccatttttccaaaattatttgggtcggtttcgggagtgtttataggataattcatgactgtcttttcaatcagggaaatggaaaactaggaactacattttgagtttaaaaatgatttcctccttaaaatgtccatgtaacttttttttttttgagacaagtttttactgttgctcaggatggtgctatcgtggctcactacagcttccatctccctccccaggctcagattgtcctcctgcctcggcctcccgagcggctgggaccgcaggtgtggtggcttacgcctgtggttccgattactcgagaggccgaggcatgagaattgcttgaatccaggaggtgaaggttgcagtgagccgagatcgcgccactgcactccagcccgggtgacaaagagaaactctgacccccccgcccccaaaaaagaaagcagttgctgtgtgctgctgtagtctctgctctgtgatacaacttcagcatatatattcatttagtatatatgtattgggtagagttgccttgtgatactttagc

SEQ ID NO: 263810 - DNA, 1861 bp, Homo sapiens
atctgaagaaagatttggccaggggcagctgtgctggcttatgctcttctccttctgctgctgccatcctccagcaagatgctagggtctttggggctttgggcattacttcccacagctgtggaagcacccccaaacaggcgaacctgtgtgttctttgaggcccctggagtgcggggaagcacaaagacactgggagagctgctagatacaggcacagagctccccagagctatccgctgcctctacagccgctgctgctttgggatctggaacctgacccaagaccgggcacaggtggaaatgcaaggatgccgagacagtgatgagccaggctgtgagtccctccactgtgacccaagtccccgagcccaccccagccctggctccactctcttcacctgctcctgtggcactgacttctgcaatgccaattacagccatctgcctcctccagggagccctgggactcctggctcccagggtccccaggctgccccaggtgagtccatctggatggcactggtgctgctggggctgttcctcctcctcctgctgctgctgggcagcatcatcttggccctgctacagcgaaagaactacagagtgcgaggtgagccagtgccagagccaaggccagactcaggcagggactggagtgtggagctgcaggagctgcctgagctgtgtttctcccaggtaatccgggaaggaggtcatgcagtggtttgggccgggcagctgcaaggaaaactggttgccatcaaggccttcccaccgaggtctgtggctcagttccaagctgagagagcattgtacgaacttccaggcctacagcacgaccacattgtccgatttatcactgccagccgggggggtcctggccgcctgctctctgggcccctgctggtactggaactgcatcccaagggctccctgtgccactacttgacccagtacaccagtgactggggaagttccctgcggatggcactgtccctggcccagggcctggcatttctccatgaggagcgctggcagaatggccaatataaaccaggtattgcccaccgagatctgagcagccagaatgtgctcattcgggaagatggatcgtgtgccattggagacctgggccttgccttggtgctccctggcctcactcagccccctgcctggacccctactcaaccacaaggcccagctgccatcatggaagctggcacccagaggtacatggcaccagagctcttggacaagactctggacctacaggattggggcatggccctccgacgagctgatatttactctttggctctgctcctgtgggagatactgagccgctgcccagatttgaggcctgacagcagtccaccacccttccaactggcctatgaggcagaactgggcaatacccctacctctgatgagctatgggccttggcagtgcaggagaggaggcgtccctacatcccatccacctggcgctgctttgccacagaccctgatgggctgagggagctcctagaagactgttgggatgcagacccagaagcacggctgacagctgagtgtgtacagcagcgcctggctgccttggcccatcctcaagagagccacccctttccagagagctgtccacgtggctgcccacctctctgcccagaagactgtacttcaattcctgcccctaccatcctcccctgtaggcctcagcggagtgcctgccacttcagcgttcagcaaggcccttgttccaggaatcctcagcctgcctgtaccctttctcctgtgtaaatatgcagtttatgtgtcatcaatgtacatgccaacataaatatggcgattgtatagctgt

SEQ ID NO: 263811 - DNA, 809 bp, Homo sapiens
  misc_feature (691)..(691): n is a, c, g, or t
  misc_feature (700)..(700): n is a, c, g, or t
ggtttgggtcagtgctctccagcctgcattcttgccttgatgtccagccctgctacagcgaaagaactacagagtgcgaggtgagccagtgccagagccaaggccagactcaggcagggactggagtgtggagctgcaggagctgcctgagctgtgtttctcccaggtaatccgggaaggaggtcatgcagtggtttgggccgggcagctgcaaggaaaactggttgccatcaaggccttcccaccgaggtctgtggctcagttccaagctgagagagcattgtacgaacttccaggcctacagcacgaccacattgtccgatttatcactgccagccgggggggtcctggccgcctgctctctgggcccctgctggtactggaactgcatcccaagggctccctgtgccactacttgacccagtacaccagtgactggggaagttccctgcggatggcactgtccctggcccagggcctggcatttctccatgaggagcgctggcagaatggccaatataaaccaggtattgcccaccgagatctgagcagccagaatgtgctcattcgggaagatggatcgtgtgccattggagacctgggccttgccttggtgctccctggcctcactcagccccctgcctggacccctactcaaccacaaggcccagctgccatcatggaagctggnccagagtcntggccgagtcttggagattctggctcggtgggggggccccacagggttttcctggcgccggggagagcggccatagggggggccctcttggtggggggccccctggtgg

SEQ ID NO: 263812 - DNA, 1893 bp, Homo sapiens
atctgaagaaagatttggccaggggcagctgtgctggcttatgctcttctccttctgctgctgccatcctccagcaagatgctagggtctttggggctttgggcattacttcccacagctgtggaagcacccccaaacaggcgaacctgtgtgttctttgaggcccctggagtgcggggaagcacaaagacactgggagagctgctagatacaggcacagagctccccagagctatccgctgcctctacagccgctgctgctttgggatctggaacctgacccaagaccgggcacaggtggaaatgcaaggatgccgagacagtgatgagccaggctgtgagtccctccactgtgacccaagtccccgagcccaccccagccctggctccactctcttcacctgctcctgtggcactgacttctgcaatgccaattacagccatctgcctcctccagggagccctgggactcctggctcccagggtccccaggctgccccaggtgagtccatctggatggcactggtgctgctggggctgttcctcctcctcctgctgctgctgggcagcatcatcttggccctgctacagcgaaagaactacagagtgcgaggtgagccagtgccagagccaaggccagactcaggcagggactggagtgtggagctgcaggagctgcctgagctgtgtttctcccaggtgccccagggagggagagaagggctcctctgggcactcctggaggttgtgctggggaggaatcctggccctgttatagctcagaggcccacactcagcacagtgtccccagcaggtctgtggctcagttccaagctgagagagcattgtacgaacttccaggcctacagcacgaccacattgtccgatttatcactgccagccgggggggtcctggccgcctgctctctgggcccctgctggtactggaactgcatcccaagggctccctgtgccactacttgacccagtacaccagtgactggggaagttccctgcggatggcactgtccctggcccagggcctggcatttctccatgaggagcgctggcagaatggccaatataaaccaggtattgcccaccgagatctgagcagccagaatgtgctcattcgggaagatggatcgtgtgccattggagacctgggccttgccttggtgctccctggcctcactcagccccctgcctggacccctactcaaccacaaggcccagctgccatcatggaagctggcacccagaggtacatggcaccagagctcttggacaagactctggacctacaggattggggcatggccctccgacgagctgatatttactctttggctctgctcctgtgggagatactgagccgctgcccagatttgaggcctgacagcagtccaccacccttccaactggcctatgaggcagaactgggcaatacccctacctctgatgagctatgggccttggcagtgcaggagaggaggcgtccctacatcccatccacctggcgctgctttgccacagaccctgatgggctgagggagctcctagaagactgttgggatgcagacccagaagcacggctgacagctgagtgtgtacagcagcgcctggctgccttggcccatcctcaagagagccacccctttccagagagctgtccacgtggctgcccacctctctgcccagaagactgtacttcaattcctgcccctaccatcctcccctgtaggcctcagcggagtgcctgccacttcagcgttcagcaaggcccttgttccaggaatcctcagcctgcctgtaccctttctcctgtgtaaatatgcagtttatgtgtcatcaatgtacatgccaacataaatatggcgattgtatagctgt

SEQ ID NO: 263813 - DNA, 566 bp, Homo sapiens
aaaatcaataatgtctcttatcttcagtgaggtaggaaagaaagccattccgaagtggcagagaagctgctttttcctcctgcatgctgcctgctagtgtggatcttggcataacagacactacttggcaaaagatccatccttccttttcctatactttgctcagcggcctggaagattgacctcaaaagcaaaatcacctggatttccttgccatttggctttcaaatgtgctcagccaatgacaggctggaaagaaattgacagctgggaaaagaggaagatttgtgtacaagatcccttccactcccatctcattacctgccatggtcctagcagtggctgttcttattatggccacaactactcttggacaggccaacatccacaactccatccttcaactaggcttcattaacactgtccctcacccttatctctttctgggtaggggtgataaaggtttcctgacatcagagttcctgagtgcctcatatattcttgttggtccctgaaccttgccccaacatcaataaaaagttccttcattaaataattttcagttg

SEQ ID NO: 263814 - DNA, 293 bp, Homo sapiens
tcttctctcctcaaagctcagtacatctttccacgttctcccttttcctgagaagtttactcactgagaagttcaggacttcgagaccagcctggccaacatagtgaaaccccatctctactaaaaatatatttaaaaaattagctgggcatggttgtgtgcgcctgtaatcccagctacttgggaggctgaagcaggaaaattgcttgaacccaggaggcagaggttgcagggagctgagattgcaccactgcactccagcctgggcaacagagggagactgtctcaaagga

SEQ ID NO: 263815 - DNA, 598 bp, Homo sapiens
  misc_feature (77)..(78): n is a, c, g, or t
  misc_feature (82)..(83): n is a, c, g, or t
  misc_feature (87)..(87): n is a, c, g, or t
ttagtaactggcatcaatgtgatgatgactctgacgtcacttggtatagtgcacacttataagcctcttaccccaannccannttcnagtgtaggtttactagtggagttggaatggtaaacattttgaaatatctgccacaggaacaatttccattttcttcattaatataatggtggaagaatattgagttcagaatcagatgtggctaacattagatcttttgcttattgattatttagattttgggcacattgcttaatctgagtgaatttattcatctgtgaggtgaggatgaccacaaaaattataatgagaaaagcactgttgggccgggagtggtggctctcacacctgtaatcccagcactttgggaggctgaggcaggtggatcacctgaggttgggagttcaagaccagcctgaccaacatggagaaaccctgtcactactaaaaatacaaatttagctgggtgtggtggcacatgcctgtaattccagctactcgggaggctgaggcaggcggaggttgtggtgagctgaaatcgcgccattgcactccagcctgggcaacaagagcgaaactctgtctcccattt

SEQ ID NO: 263816 - DNA, 443 bp, Homo sapiens
agtactcttaattccataataatgtatatctttggaatcttgacgattttcaactcttaatccatagctcaagtcttctgtctgatgttgaatgcagtgatcttccaagcaaatgacagtatttgaaccttcccttaaaatggtagtaataaaattccaaagtacttgttaagtgaaggcatattataaattactgatatttggaaatttctaagagtatgtcacttagaaatgaatatgtagtggttaatgtgactgtcttctattactgagaatatgtgaatcaaagcaggatgctaagatttcctttctttgttatgaatacctgtttatactaatgttccattatgacaaactctcctcactggcttggaagagtatgatatcataatctgagaaaatgttaaatgatgctttctaaattaaatgcttcattaaacctc

SEQ ID NO: 263817 - DNA, 461 bp, Homo sapiens
ccaatcaacgatggcagcatgcagcctcagaatctttctctctttctttttgagacagggtctcactctgtcacccaggctggagtgcagtggtgcaatcttggctcactgcaacctctgcctcccggactcaagtgattcttccgcctcaacttgctaagtagctgggattacaggcacatgccaccaagcctgactaatttttgtgtttatagtagagatagggtttcaccatgttggccaggctggtctcaaactcctggcctcaagtgattcacccgcctcggcctcccgaagtgctgggattacaggcgtgagccaccgcacccggccagaatctttctgaacacagtactccaagcagctgctctcaacccatcaggatacaaccaatgtgccctttctttttttttctttttctattttttttttttgagacagagttccgctcctgttgccca

SEQ ID NO: 263818 - DNA, 370 bp, Homo sapiens
catagaatattacgtgagtggcccaaagtcatgcacccactaacagtaaggttggcattggaattgaatcccaaaattttcaggctgttgatctactgtgctgcaatcatggcctggatagatggagccagtgttttctctcaccaaggactacaagtgcagacaagacatgccaacttcaccaggcctctttccttcttccccttctttcttctacctaccttcttggtccctagcgtcagtcaccctccctgacccatatgctcatccctctaagcacacccaagttgtggggctgcattgccaaaggggctgccactcatgcgaggctcatctaatatgcctggtgaccaataaatgtataaagtgc

SEQ ID NO: 263819 - DNA, 417 bp, Homo sapiens
cagcaccttcctccacctggacacccagggctgctactcagggccctgcccagaggacagctgcacgcctccctttgagttccatgcctgcggctccccctgtgctgggctctgtgccacacacctgagccatcagctctgccaggacctgccaccctgccagccgggctgctactgccccaaggggctgctggagcaggctgggggctgcattcccccagaggagtgtaactgctggcatacctcagcagcaggagccgggatgaccctggcccctggggaccgcctgcagctgggctgtaaggagtgtgaatgccggcgtggggagctgcactgcaccagccagggctgtcaaggtcttctgcctctgagtgagtggtccgagtggtcgccctgtgggccctgcctgccgcccag

SEQ ID NO: 263820 - DNA, 562 bp, Homo sapiens
cattctcacgggggttcaaagctttttcctctgaaacgcaatgaactgttctaccacttcctacacctcgagacaagtgtcaactatgtattttttagacaaaaaatttgaaagctttttatgttttatgatattttatgaacatgagcttttctatctgaagaactttaaagcacttatgaaaagtatgatgatactcatggggtcactttagagtacacaagaaaacagacgggaagaggtttgttgacatgaaatgctgacctgctgacctgctgtgagatattgaacacgttatttttcttcccccatggtcgttcttctgaccatcttgaaagatagccaagaaagctttttcttctaattatttccagttattgtaggttcattcagacctgcaattaaacaaattatccatgttttgagaatattgattttaaacattaaatgtttacatttctatatagagagaattcattctctgccccctaccaccagattttagccttaaaggcaagttatttagttttgcttattctcatacactgaacagttgtttagc

SEQ ID NO: 263821 - DNA, 530 bp, Homo sapiens
tcctcaactctttctgtgggtccttcagttcccaagcccagcatcacagagccccctgagcccttgtcctggtcaggagcacctgaaccctgggttcttttcttagcagaagaccaaccaatggaatgggaagggagatgctcccaccaacacacacacttaggttcaatcagtgacactggacacataagccacagatgtcttctttccatacaagcatgttagttcgccccaatatacatatatatatgaaatagtcatgtgccgcataacaacatttcagtcagtgatagactgcatacacaacagtggtcccataagactgtaatggagtttaaaaattcctactgcctagtgatatcatagttgccttaacatcataacacaacacatttctcacgcgtttgtggtgatgctggtacaaacaagctacagcgccgctagtcatatacaaatatagcacatacaattatgtacagtacactatacttgataatgataataaacaactatgttactggtttatgtat

SEQ ID NO: 263822 - DNA, 398 bp, Homo sapiens
cttttaggaactccatttattggacctgggcatgttcttttggaaggataggattcagataagcgagagagaggagacttcctttggcagaaccttggacaagctactgagtgttccttctgcagcgaaacaataggattctggataaaacatactttctaatgaattacttgacttcaggaaacttttttaacaactctaaagatccttcttccttgcctcagaatgaaaaaattaaaaagcatgaggtgaaactgctgttgaagagcaataaacaaacaggaaaagtgggatggacaattgaattgtatgggttgtatttatttgcaaagatactgttggaagtatagcagtcacatgctctattagactgctcctaaaccgagccttatttgaaa

SEQ ID NO: 263823 - DNA, 389 bp, Homo sapiens
aggacagcaagaatcacttgacaattggtttgtgaccataatggcatctataaacagaaccattgaaataatgaaaaaacatggagtaagcaaacaacatctcctggaggagataaacaaaaagcgtgaatccaactgcttggtggaacgaagcaatcaagtcagcttactgagagttcaaaagaggcacttcccggatgcctatcagtcctttactgataccacaaccaaagagcctgttcccaacagtggcaggagctcctggatcaagctgagtctccttgctcacatggagagaaagcactttccaccaaaaaataatgccatatttggataaagtgcatctccagagacacacggaaatacattctctttgattcttaaaaagt

SEQ ID NO: 263824 - DNA, 245 bp, Homo sapiens
aatggcctacagggacttagaagagcttattattctctaagccctcttagcgcagctggcagcgcgttagtctcataatctgaagaagagcttattattctcatgaggataaatagctcattagtgacaggatatgtgatgcctcaaacataaagtaaaagtctgtatttaccttcttcagcatatcatttaacgcacacagtacacttacaaatgaacaacattatcatgtttatgtgccagac

SEQ ID NO: 263825 - DNA, 414 bp, Homo sapiens
tcagagctgggttcatatgtcatgtctttagaaaaaccatccttggccttcccatttctgcagataaacagaaagttaggtcaggtcatcctgtacgatatattatccgctcacctgtgctttttctccattatgcttatcactgttatttaacaagtaaatatgtaagtagttgtctgcttttccccctgtaagcgcatcacctccatgaggtcctgtctgtctggtttactcaaaaagtttgagattttggagcactttggatttcagatgaggaatgttcaacctgtatatggagcccctggctaccacaaactgtaatggctaatggaaaaagccagggccatgatgtgggagagaaaaattattttgcatttcctcttcctggagagtcaagaatggcttgtgaaggag

SEQ ID NO: 263826 - DNA, 417 bp, Homo sapiens
ctaatatagtaactacctaactgggctttctctttgtcccccttcactgcactcccttgacagagattgctttttagaatgtgaagatttttcttttacttccttggttcaaaatatccagctgtggcccgggcacggtggctcacatctgtaatcccatcactttgtgaggccgaggcaggcggatcacctgaggtcaggagtccaagaccagcctcaacatggagaaaccccgtctctactaaaaatacaaaattagctgggcatggtggtgcatgcctgtaatcccagctactcgggaggctgaggcaggagaattgcttgaacctgggaggcggaggttgccgtgagccgagattgcaccattgcactctagcctgggcaacaagagagaaactccgtctcaaaaaaaaaaaa

SEQ ID NO: 263827 - DNA, 627 bp, Homo sapiens
caaatttgaggtgtctggggtggtctctttgccttgaaagatatttcctctgatctgagttaaatttttttctgactatgcaggtgatacataattccaatattttggaaaaggaaaaatgaatgcccccattctcctttctagttccttagacttcatcagctttgctgcatgtacaaggcaacacgacggctaagatttaaaaagtgcctctaaatactccctgaaggggggaaatttggatgagagggaggaggcagtgagggagggaaagtttaacactccccaaccccaaggatatcagagtgatagtttccctccagtcaccaaaactgtaccaaattatatatgtttaggatgatttaattaattactaccagcaagaatcttgtcccagatacccaaatatacaagctcccttctacctttttgttccatagatcccagtcaaggttagtcattttagcaaaaaggtgtttctttccccctttagttgagccttgggtctctcttccctctcttttggaagtggaggggttaaattttctttcttttgatgaggcatcttttgaccttctccttgggtccggtcacggatttctatttggcctctgcttgactggtggg

SEQ ID NO: 263828 - DNA, 513 bp, Homo sapiens
tagaaaagttgagggcaagaaagttgtttaggataaaggggatttaggataaagcagggatttacccacaacctctgtggttaccaagaacagggtgggaggcagccaaagggattcaggtggaggtagcaggaaccgggagggaagcctgtctcagagcagcagatgtggctttagggatgcaggagcttgaggatggggaccaaaaaaggggcgagtgctggaggagagaaactggcagagccacggaagcagaaaaggacaacttgttgagcaagaagatttgaagggaaaggacctgtgtcttgagacctgagcgggcaggcggattcccaaccgattacagacaaacccacaaaggaagcctgtggagagggggtagtggcggaagggctctaatgaaaacaattttgcaaccttacttatagcgttctccaaccttaaactaatagctattctgcactttaaatatagcattggctccagagaagactctgaaatctttatttttac

SEQ ID NO: 263829 - DNA, 691 bp, Homo sapiens
ggcatgtgggtattttagttcacactgtggtatttgaatagaaatgctttcacatttttgttttctgacgaaagagaagagaagctatctaacctcattttttccccttatttatccttattcacttattctctaggtggcatgtgtgtcattagcttaacccttatttttcccttaatattgttgacatacatggagaggtttgttaactaggaaaaccaggatgattatcctgcctcttttctgggcagtgatagtgcatttaatatttatcttagtgaataacagaatatgaacctcacttgaaaattcggtcaataactaactaggaaaaatggtggggagagggcatagagctaaaattaagaggttgaaattttggttaagtctctgccagggagaggctgtataaccatgagaaatgcaaataacctctctgcgagccagttttctcattcatagaatgagcaatgcattagattgatttaaaaatcccttttaattttcaaatttcatgattttgtaatgcttcagaagttaagaagagaaagaaattcagaaatgcaaagtattattcaggtgtaaggaatgtgagtcatttatagaataagcctctcacccaacagtgctatttttatttgtattattgacccatcgtatttttaaagttttgttcttatttatatatttt

SEQ ID NO: 263830 - DNA, 355 bp, Homo sapiens
cattcatactcacaaacctcccttcggagattatatcatcccatttcctacatgaggcttgtccaaggtcacaccgctaggaggcagcagggctgaaatttaaacccaggttgccctagagattgcgttgttcccaacaccctactcatcctcccagacttagcctgttcactcattaccttcatgagcactgtgggatctgtgaccatttattctgatatttacttagtctcttttcttaaatagagccccttttttatttaaatgaattacttttaaaaggaaactatatgacaactgtaaatgaaaaaatctcatcaatagtgtctcttgccaaaattaaaactctaaaaac

SEQ ID NO: 263831 - DNA, 527 bp, Homo sapiens
aaaatggggtactaatttacattcccaccaacaatgtaccagggtttcctttcctccataccctcatcaacatttgttatcccttgcctttttgataaaagcctgctatttatgacaaaatggatgaacccggagggtattatgctaagtgaaacaaaccagacacagaaagaaaaatactgcgtaatctcatatgtggaagctaaaaaagtcaaacacacagggggatggaggtggaagaaatgaggatgttggtcaaagctacaaagttgcagctacataagatgtataaatctagagatctcatgtacagcataagttctatagttaataatgctgtattgaatactggaaattttctaagagtagatttcaggtgctcttactgcaaaagagggtaattatgtgaggaaatgcatatttaatttgcatgactgtagcaatcatttcactatgtaatggatgtcaaaacatcatttgtacaccttaaatatatacaataaaagattttcaccaaaaaaaaaatc

SEQ ID NO: 263832 - DNA, 446 bp, Homo sapiens
ccccatgggtcccctgagctgaagctatgcaggcagggcccagcccccagccccagagacaggtctctaacagggttccccagggctccatggaaaacattctccctgtctgtgcaccctcttcacagagcagctgtaacctgggaggctgaattgcctatgactgagtggggaggctgagtgtgttggggctgggagtaaggcagatgctgattccatggtcctttcagaagcaaagggtctctggggaacacctgctccagaggctgtcagcagcacctgctggttagatcagggctggcctaggcagggcttcctccactgcagcactgccagcacctgtggagagacagttctgtttggtgggggctctcctgtgtgtgccttagcagcattcctgtcctctacccattagaggccactagtacttctccagatgcaacaat

SEQ ID NO: 263833 - DNA, 389 bp, Homo sapiens
gatctaagccaataaattcatggcattccctaggccatagggcatagttaaggaatgggcatataacccaatttggaataaagagttgtgagaggtttgtttaggaattcagagaggaggcttttttttttttttttaaatgaaagatgacaatgagcttcttttttgcctctgggtgttgggtgtgttgttgtgaaaccaggaactgttacatttcttttgcttccacgagagacgcaatcgatgtaaagatgaagacatcacacagaagagaagagaactgagggaactacagagaaatggagctagagctgctgggtgaagctgactctgaggcttctcataaactctgtgcttccagttgtgaaaataaatgcagttctcatttc

SEQ ID NO: 263834 - DNA, 578 bp, Homo sapiens
tatgatcatcatggatccagaaagggctttctataaaatttgctattcatattaacaaattagaaataagagttttcttagcttgataaagcatacttctaaaaatgttaacacttaattatgaacttttagagattaattgaccaaatttttagtaatgagtatgggtgacccagaaaagtcctgtatttttttttctagtatttatatataaaagtatatcacttttatagtcagcacaattaaatgtttaaataggacttttgggcaatttaattcgtgtctatttatgacaagactattcttgtcttttttctttgaagtcagttttttctgttaaaaggcaattctattttttttagcattctgatatttgtatgtttatgactgtttttgccttcaaaaagtgtatttctagccagacgtggcagcattcacctgtagtcccagctgcttgggaggttgaggcaggagggtcacttgagcccagaaattccaggctagtgtgcagtgatcacatctgtgaacagccactgcactccataccgggcaacatagtgagagtctgtccctttaaa

SEQ ID NO: 263835 - DNA, 382 bp, Homo sapiens
caaaccaaacacaaaattaatagaagaaaagaaataatgcagcctgggaaatgggctgatctcatctctaaaagaatatttaaaaattagcctggcatggtgacatctgcctatagtcccagctactcaagagactgaggtgacaggtatcctgttagtcctggagttcatggctgcaatgagctaggatcgtgtcacttccctccagactgggcaatacagcaagaccttgaatctaaaaaaattaagaaaacagaataaaggtcagagcaaaactaaacaaaagaggtttaaaaaatacaaactgtcaactaaaagttggttttttgaaaacattaagaaaaatcaatacactgacagccacactaatcaagaaaaaaaa

SEQ ID NO: 263836 - DNA, 242 bp, Homo sapiens
gaacctacccgggaggtggaggttgcagtgagccgagatcacacgcctgggtgacaagagggaaactccatctcaaagaaaaaaaaatacatgcatgatgaaacacactaagcagttgggtcagaggggaattatcagtagcaagaaagaagctgggctggtgactagcacccggaatttatgctctctttcttcatgggcctgtgcggcggtacgtaggctgcgggattgactttgaattc

SEQ ID NO: 263837 - DNA, 252 bp, Homo sapiens
gtggtggtgcctgtaatcccacctacccgggaggctgaggcaggagaatggcttgaacctcggaggcggaggctgcagtgagctgagattgtgccactgcactccagcctgggagacagagcaagactctgtcttgaaaaaatagaagtaaaaaaagagagagagaaaagcaaattacctgaaatccagaaagatcagagaagggaaggaatggctggagtaagtgttgatcagcggacacactcaagggtt

SEQ ID NO: 263838 - DNA, 229 bp, Homo sapiens
cctccaggcgctcctagagctgtccctgggccagtggcttccaaagggggctggaggtggaggacggcagaagcggccaccgtggcacatggggtgaggactcagatgccaggaggatgtcctcatttttggaataactttgtttttttctctttctttttcagagatggggtatccctgtgttgcccaggctgatctcaaactcctgggctcaagtgatcctcccaaa

SEQ ID NO: 263839 - DNA, 462 bp, Homo sapiens
tcattagaagtgatgttaatttggattagcatcaggtaagaaagctagtgtctgccactgttaaattactattttcttttttgtaattaataaataatctgaatcttgtaaatatcctgtttcccattaaacttaatagttgtagcatcctggcaattctcacatgtattatttttgtaattagtgggacacaactaggttcctggagatgcagttgtttggcaaaagactgtatttctgagcagccagagtggatctagtcagatcagaaagaagccagcttatctgggtgacttaaaatttacactactttttcttgtcttaggctgtgacattcttctcccatgtggcccaggttgttctgtgatagaaccagggttgcaagtcataccctcacttagtcattcaacaaatatttactgagaagctactgtaacccaggcactgtttgaagagatacaa

SEQ ID NO: 263840 - DNA, 468 bp, Homo sapiens
gtatacatataaagctgccaactgtgatccacaaatgctggacgaaatcagaactagaactttagcccaggccactccctttttgcccaccttgcaacaaaatataaagaaacaataaacctgagaggtgctttaagaactttattttgggagttgctttggaagactattcagtcccatgtgcagttttggaaatacttattaatttacctctaagactcagagggccttattttgcagataaggaaggaaaatactgtctgattttaatactaggtgacgatggaaccaagcttcaacaaagctcagtcatatcagattaaagcaatcaaagaccagctaaaaaagtcaagtttttacatttctgacttttaagtagcattaaggaaaaattgattgtaatttttaaatatcatctgtttaagcgaaatcccctcataggagccaacaattgtttgtagattttgt

SEQ ID NO: 263841 - DNA, 356 bp, Homo sapiens
ttttttttgccttttttccacagttaatagttgttcttcaggaaggatggtctgtaggtggggtacattgctataattaaaagcaagacttctccgcactttttagttccatctttatttctgtatgattttactttcttctgtttctttcctgagtataatcagtttttgttttatttcttcctgttctttgtccatttctgtttttaaaatttttgatccatagtattttttaatatctccaaatgcttgtttaaggatatttaattctgtttcattgggttagtattttcttctcccttgtagttgttttcttgggcatgggagatggtggttattgtggttgtcagctcaaa

SEQ ID NO: 263842 - DNA, 293 bp, Homo sapiens
cttcacccatacccctcccctgatccatctgtacccacccactcctgttctctgcttgctcatcttgctttatccccagcacctcctgacattttctcatgccacccatcaccccattcttggatcagatgatgccgcctcctctaggaagccttactggcttgcagctctgtggtcctagagcattttggctgcccctgccagaggcctgacacctaaatgacaggtgaggtccttggcttagttctgtgagagcagtgacagcatctccactttccagaatcaggatgcgt

SEQ ID NO: 263843 - DNA, 489 bp, Homo sapiens
cccagagactgtgagattgctctttcagcccaagttcctactctctcagaactcctgatcagtcatttgttaatagcaacaataattactaggcatctacttaaacagcatttattggagtataatacatgtgcaaacaagaacacatatcattagggtgcaggttaatgaatttttacaaaatgagcatgcccatgtaactgtttcttctgatgatctagaaacagaatattgaggcacccacaaaaccacccttgtccctacaacccttgtccctttccagtgctcctttccacccttcccctttactgcctctaccaggggaaccactctcctgacttctgacaggtcagattagttttgaacttgatatcagtggaataatacaggatgcactcttctgaatctggcttctttcactcaacatgaagcttgtgagcttcatccagaaaaaataaaaaaataagattcctgactcaaaaaagctaa

SEQ ID NO: 263844 - DNA, 546 bp, Homo sapiens
catctcatattgtttccaaaagggaacagctctgagtggtctttgtcctttataggaaatcttttgcactagctattaataaaatttacttaggaaaaactttgaatactagtcactataagagcaaaatcaatctagttgttatgtacctattgttaaacagaatgtggaaatatgttagaacttaattgctttcatttttttttaaatgaaagtgtataagtggatattataatgtgtatatttgggttaataattaaactataatggaatttcagtttattagcactaggcgcagttccatattttgttgattttagactctggatgaatatacaatttgttttaaatatgaaagtacgattttctgtattattgaacacaaagaattggtttctaggtatctggtagacttggaacccgaggctttgtggagcagggtctctgcttccttcacatccataatggaccagcacgtggctattacaggagctgagaaatatttgaactgagtggcatgcatttgtctgggctacttaaaaaaat

SEQ ID NO: 263845 - DNA, 388 bp, Homo sapiens
gagtagctaggaccacaggcacacaacaccacacctggctaatactttttgtataaatgggatcttgctatggtgctcaggctagtcttgaactcctggactcaagtgatcctcctgcctcagcctcccaaagggctgagattacaaggtgtgacccaccacacctgagtgtctgtattttaagtaaaaattttttttatttttaacttttcttaaagacaaggtcacactatattgcccaggctgaactgccacctcagcctcctaagtagctgggaccacagggacacaccaccacacctggctgtttgtctgtatttttatgtatacatgtataaacatgtctgtttgcatattgtctgcagggtaccaaattgacctacaaata

SEQ ID NO: 263846 - DNA, 489 bp, Homo sapiens
ctacattacacattatgaaaatgttcaccatttccttactttgtctttccatggcaatatttattataatacaccagtggtgccgagtggagcaccttgtataattcatcacccagacacctctgctttagcaagtaaaaataacacagatgagcaacctgaaggactgtttggagtgcagcagcaattagaatagacacttaactctgggacattggtgtttttgtaccttgagaagtaccatccgtcactttcattcttggggaatacattctggctaaagaaaactcaagaaaattagcttttaacagttaaatctcttaaggacctttttttttctccaaatacgagcttgtactcttgcttatgcaaagtggaatgctctcagatcttgattctgccctgaattttcacgttctactcttacattctatttcaaccttaagtttaaagtaaaacaaaaacaaatgttctaaagcctaactttga

SEQ ID NO: 263847 - DNA, 538 bp, Homo sapiens
gtccggtgctgatgggtacttccagtattctcagcattcacaggagaacactctgagcaggcaaagtgaggccagtccatctgcttagaggattcgttttgccagctctcatgatcccctcgctgctggtaagcattctctacatcctgagtgggatctgtgccagctgccatctctcctgaactgccacacacttcagatcggaatgcagctgccgaaagaattttcacattcaccaaaggaagagtgggatttttttttttcaataaaatcacggttggaaggggtttaacactgcaagtgttgcttatacgaactgtcggttcgttcggtggatttccctcaaaccctgccccgtcccaccctccacttctgccccgtgcccacaccagcaaatacgaacagagaccgtgcctccagagtcctttgtttatatcataggaaaaccacagacttgggaacgcagcagctgggaggccattactttttgtctgagtcttctggagttctagcaaaataaaatccatgtgatggaaat

SEQ ID NO: 263848 - DNA, 395 bp, Homo sapiens
caacctccagagtagctgggattacaggcgcacaccacaacacctgcctaatttcttcgtatttttagtagagacatgaaatagtagtttgagaccaccatgttggccaagctggtctcaaactcctgatcacaagtgacctgcccaccttggcctgccaaagtgctgggattataggcatgagccactgcgcctggcctgcactacttttataatcaggaaaaaaaaaaatgctattttgagaaataagagaaacagcaagagaaatcctttttctagacaaactctgtaattagccgcaaatttaaccatatagaaaatatgttattctatacttcactggtttgtagaggcttcaggaggaggtttggcttggtgactaagatctctggcat

SEQ ID NO: 263849 - DNA, 439 bp, Homo sapiens
tgttgcctgaacaaaataaacactgaaaaatacaccaaagaacaccataatcaaattgctgctgaaaacaagagataaaaagaaattaaaaggcagacacagacattaaaatacattaggcgcaaaggaacaaatcataattagtgctgtcttctcactcaaaaaacaacgcaatttggtggaccagggagatgttaaaaaaataataaatgaagtagggataaatatagtaaaaataataataggaataacagcaaacttaaccactataaaaactatgccaaaataattttcagataaaagcttagagcatttattggggactcgcttgcactacaaaaaaaattaaaatagattcctaaggcaaaagagaaatgacaccaaatggaattattatctatacgcacacagatatcataagtagcaaacatgtatgtta

SEQ ID NO: 263850 - DNA, 423 bp, Homo sapiens
atgtcttgcccccaaaataccagtttttaaaattaatacgtgatattgtatccttgcaaaatatttgtaacatgtatgaaagttatgaacctctctaaaccaagagaccacatcaatctaaaagacagatgttatcaggttagggcctcttcctgtgtgctcctcatcttactgtgcaagctgggattcctggacaatggcaaattgaactgctcttcacagatatctttgacttgatattgatttaaaatgaactgcttgcttctaagtttccaccattaagaattatgtacattgttgtagatttctggtagttaacttttattcagttaaagaaattcctttcaagacctagtttactaacaattttggtcaagaatggatgttgaattataaaattgctttttctatgtctattatgag

SEQ ID NO: 263851 - DNA, 533 bp, Homo sapiens
  misc_feature (395)..(396): n is a, c, g, or t
aggtttagatcttaatcccagatgcactttgtccatgaatgcaaacgcaaactattggtcattgtatacacggaggaaatggtctttactggtgcaaatttttacagctgagatgacaagatgacccttgtcccatattgcagggtcatccaagattcttgttggtaggagtttcttttcatttcacacagccttgttcattaggggatgggggtggggatgctgcggtggtcagcgagtgaaacggggtgacattgttctctgtgtgtttgagggctataagaagagctgtgtgttgtgtgttcctatcacttgcagctgccccatagttgacctttgtgtccatctgctaacatgcctctctcccgaggctaatgctgaccagtttattcccnnatgcttgatgttccgcaaagtctcttgtatatggtgatgagaaggtatgcctcaccttccagggagtcacagctctagcaacattctgaagagaggaagggagagtgggagggaggcagggaggaaaggaaggaagg

SEQ ID NO: 263852 - DNA, 762 bp, Homo sapiens
aaaaaaagaaaaaggtagaaaattggaatatatttataataaataaggagattgaatcagttaaaaaaatttccaatgaagaaagactaaggaccatagctttgatggtgaatgttttcaaatatttaaagaagaattaacaccagtccttctcaaactctttcaaaaaaattgaagaggaggcaacacttcttaacttattctgtggggctagcattagccagcccaagaccctacaaaaatgaaactacaaaacaaacaacagctacagacaagtatctttaacgagtatgtaagaatcttcaaaatgctagcaaactgaattcagcaccagattaaaaggattctacaccgtaacctactatgatttatccaaggagtacaagggtggctcaacatacaaatatcaatcaatgtaatataccacattaagagaatgaaaggaaaaaaaaaccagtcatcttaattggtgtgcaaaagcatttggtgaaataagcagcctttcttgaaaaagcaaagcaaaacaaaaacctatcaaactaggaatagagtgatgcttcctcatcataataaagaccatatgtgacaaacccacagctgacatattcagtgataaaaggtggaaaactttttccttaagatcaagaataagacaagaatgcctgcttttggcaatcctgttttacattgtgctgaaagttctaaggagcaatttggcaagaaaaagaaataaaatgcttccaaattggaaaggaagaagta

SEQ ID NO: 263853 - DNA, 704 bp, Homo sapiens
aaaaaaagaaaaaggtagaaaattggaatatatttataataaataaggagattgaatcagttaaaaaaatttccaatgaagaaagactaaggaccatagctttgatggtgaatgttttcaaatatttaaagaagaattaacaccagtccttctcaaactctttcaaaaaaattgaagaggaggcaacacttcttaacttattctgtggggctagcattagccagcccaagaccctacaaaaatgaaactacaaaacaaacaacagctacagacaagtatctttaacgagtatgtaagaatcttcaaaatgctagcaaactgaattcagcaccagattaaaaggattctacaccgtaacctactatgatttatccaaggagtacaagggtggctcaacatacaaatatcaatcaatgtaatataccacattaagagaatgaaaggatcttgaaaaagcaaagcaaaacaaaaacctatcaaactaggaatagagtgatgcttcctcatcataataaagaccatatgtgacaaacccacagctgacatattcagtgataaaaggtggaaaactttttccttaagatcaagaataagacaagaatgcctgcttttggcaatcctgttttacattgtgctgaaagttctaaggagcaatttggcaagaaaaagaaataaaatgcttccaaattggaaaggaagaagta

SEQ ID NO: 263854 - DNA, 705 bp, Homo sapiens
tacccaatgtcatgatttggagctccagcagaaaatagtttaaagaatagtagtacagaaactaaaaaaaaaaaaaaagaatagactattaactgcattgagcacttgcctaattgccctcctggacagattaacctgcaagtgaaatgactgatttaattctgcctgtcctttctcacctaagaactcaatttggatggccaagttgctaactctgtttctaaacaacaggttaagtggcttaaaagttttagcacagttgtttcgttgtagttgcatttttgtttttgtgtttataactctttgggaaatacagtccaaggaaaattgttcctatagctatactcatatgttgccagacggtgtttggccagagttctaaatttaatctgtccctgcacctgatacgtaatgactgattttttaatgttctagacaggacccactatatgaagtatttcataatattagattgagatgctgtttcaggctgtcttcagataagagtgatctaatgattcatttttactgttttctaacacctgaattttttgtggctgtgtctcagccaattaggaggtaaatttagtgctctttgcttgaagcagttgcaagattatcgccccaggcgggttgtgaacattttgtcagtatagagaccttgaaacatcgaaaggttcaacatttcatttgtttacacccttg

SEQ ID NO: 263855 - DNA, 423 bp, Homo sapiens
taatcattgaaataaataaggcagtacttgtttattacccataaatagagtaaggatctatgataaataaatgatctagaagtccttaatgtagaattctgactaatgaatgaacataaaggaaaaggtggaattagtaagttgccttttggcaattataacagttgatttaagtaagaaccataaatggatcttaaaactaagtgggtaaaaatggatgttaaaactagtatgtgaaagtttgagagtagtagatgttaatatagtctcaaagtatgttctcataagttattgttaattttacagggggaaaataacaactttacagggggaaatctgacaccaacttgcccatgtgatgaaagtcaacatctttgatgttactctacataataataatgagcagagtttgttttactttgt

SEQ ID NO: 263856 - DNA, 403 bp, Homo sapiens
tctgtggcacaggtttgcaatttctatgctttcttgatgttgaaagcatcatagagttaaaatcaggctgcagctgttgcttgttagtaccataactttgccatatgttctaaggtttgtgaaatggagaataaatcccttggagctggagattttcaaactcttggatttcagtgtaaacataaggtattctacttttgaaagaactgtgaatgtctgaagcattttgacaaaatcatctttgatctcaggaagccagcatagtgcttagcacaaagtcaatgtgtaattgatgtatgatgagtgaggtttttctaactttttcaacaactgcccagtcctggaatgggtttaagattaacctgctttcctctcgttgcactaagtcaatcctttatttaaa

SEQ ID NO: 263857 - DNA, 619 bp, Homo sapiens
ggcagaggcacgcagatcacttgaggtcaggggttcgagaccaccctggccaacatggtgaaaccccatctctactaaaaatacaaaaattagctagacttggtggtgggagcctgtaatcccagctactcaggaggctgaggcatgagaatcacttgaacccaagaggcagaggttgcagtgagctgagatggcaccactacactctagcctgggtgacagagctagacgccatctcaaaaaaagaaaacaagaaaagcctgatcctggccagggaggtggccaggggaaatgacctttccactgagcccttcaggagttatagggggaaccgggtagagagtttcaggcagagggaagaagcaaggagaatcaatcgtcctgctcttcctccagctgttctggaatctagacagccctggtggctggaggggcacagagaaaggagcaagcctagggcgaagggtgatgttggggctggcaacatctgtgagcagagaagcagctgcctgaccttctcctgccccagggaaaccatgagtcctcaagtggcaggccagctgtcctctggaggaattctcctggcatctgtgggaaaagccaagacactttcaaaatt

SEQ ID NO: 263858 - DNA, 399 bp, Homo sapiens
ccaagcactcggagaggttctccgacgagcaccacttgtttgtataaactctgtagctgggaaatgggggacagttcagaactggagtgtcaaagccaagaggaatggagagcccacttcagacactagtcgtggtagacattgtgaagccaggaaagcgaagtgttgagaacactgcaggccatgcagactgcatcttgcctgcctaagatcacatggactgggcagaacttggacttgagcccagctcttctgaaacccagttgttgaatttccaccttagctcctatttctctggtgcttcgtcgcttcccaagtacatccacccaatcatcccacctaatcatcaaagtcacaaaaaccagcccaggatatgcacccacattcctaccttggttg

SEQ ID NO: 263859 - DNA, 166 bp, Homo sapiens
gcctattgttactgtcttcatcttacagataaggaattcaggcacagagaaagtaagtaatcttctgaaagtcacaaagctggagccagaattcaaacttagacttcaggccaggcgtggtggctcatgcctgtaatcccagcactttgggaggctgaggtgggcg

SEQ ID NO: 263860 - DNA, 1173 bp, Homo sapiens
atgccagatactaatagcacaatcaatttatcactaagcactcgtgttactttagcattttttatgtccttagtagcttttgctataatgctaggaaatgctttggtcattttagcttttgtggtggacaaaaaccttagacatcgaagtagttatttttttcttaacttggccatctctgacttctttgtgggtgtgatctccattcctttgtacatccctcacacgctgttcgaatgggattttggaaaggaaatctgtgtattttggctcactactgactatctgttatgtacagcatctgtatataacattgtcctcatcagctatgatcgatacctgtcagtctcaaatgctgtaagttatagaactcaacatactggggtcttgaagattgttactctgatggtggccgtttgggtgctggccttcttagtgaatgggccaatgattctagtttcagagtcttggaaggatgaaggtagtgaatgtgaacctggatttttttcggaatggtacatccttgccatcacatcattcttggaattcgtgatcccagtcatcttagtcgcttatttcaacatgaatatttattggagcctgtggaagcgtgatcatctcagtaggtgccaaagccatcctggactgactgctgtctcttccaacatctgtggacactcattcagaggtagactatcttcaaggagatctctttctgcatcgacagaagttcctgcatcctttcattcagagagacagaggagaaagagtagtctcatgttttcctcaagaaccaagatgaatagcaatacaattgcttccaaaatgggttccttctcccaatcagattctgtagctcttcaccaaagggaacatgttgaactgctcagagccaggagattagccaagtcactggccattctcttaggggtttttgctgtttgctgggctccatattctctgttcacaattgtcctttcattttattcctcagcaacaggtcctaaatcagtttggtatagaattgcattttggcttcagtggttcaattcctttgtcaatcctcttttgtatccattgtgtcacaagcgctttcaaaaggctttcttgaaaatattttgtataaaaaagcaacctctaccatcacaacacagtcggtcagtatcttcttaa

SEQ ID NO: 263861 - DNA, 551 bp, Homo sapiens
gagggaggttgggggagagaagagggttagggcaagggcctgagacagggcaggacatgcagggcaagcagccgagagcaaggtgtgtgcagcccggtggacgtgaggtgcccaggcttccttcccttcaggctgggtgcctgcccttctgtggccagcatggagtgggcagggcccttcaggccacccatgctgggggcactgagactttttgccaaaggtgacgtggtcatccatcatgcacagacgggctcctttccacagataggtaagggtagaaaacaagagccatcatcctttaccgtcaagaagctttggcatttcttttaggcaacaagacaaagttagagaaaaaggtgaacatatgtaagtcccaatggcagaggggaaaccatgcgtgagcaaagctttgagcaaaccaaagaccaggggccacactttcagaaaagcaatgtctcgggtcaccagtgctaggacgcaagaccacatcactctccgtgagctgctcacgtcatgccaacgactgtgcctgcactgccgtggtgaggcca

SEQ ID NO: 263862 - DNA, 359 bp, Homo sapiens
ttttaaatccctcaataaattctgggctccccatattggggtgaataaaagacacacttcctccagggctcagcatccacctgtgaaaatgcccccaggactgtcgagaacccagctgggaggccacttggatgattatccaagaagtaagggcgcagtactttggggcagcttcctgaaggtggtgggatttgatctccttcttacaaagtgggatttcagcaggtggtgtagggaagtttaaattttttccctgaaggtttgataatctgagtctatgaaacaaacataaaacattaacaggaaaaaaaaccgacttaaaaatgttactacgtgcacacatgtgcacaagtcataca

SEQ ID NO: 263863 - DNA, 680 bp, Homo sapiens
acatttcccactcagtgaaaagccttcagctgctgacagtctcatttgtatcatgtttcctatccatggcccttcctctcttgtcttgccaggttataatttgatggtgtcactgcagtgtgagttcgggtctaatctcagcgtggatggtgtcgtgcagaggccgggtggctcctttgttcctgggatccccattgcatcgctcagtgcccaggcttcttggtgacatcttgctggatgacttcagcctcctgcacactctcaggtgtgcccaggttgtctgtacttgaagacttcccagggagatgtcacaatgtccccagctgaaccctcggctgaacccagcatcatagagtgttcagccaaggcgatcagtccaggccttgaggcccaaagctgccccctgggtctcttttgccttcacctattgaaacgtatgttcagaatagctctttactcctttgggttctttagagttggctgactttaaacagcatatctatcagtttaaagatttagattttgggagcaaaggcgactcaatggagactggagagtcttttcaataaatggtgctggaacaactgaatatccaaatacacacatacacaaaagaatctagacacagcatttacaccttttacgaaaattaacttgaaatggatcacagacctaaatgt

SEQ ID NO: 263864 - DNA, 382 bp, Homo sapiens
acatggattttcttcaaatgtaagtacagtagttccccctcatccacattttcactttccatggtttaagctacctgaggtcaattacagtcttaaaataggggagtatagacacataagatatgttgagagagacagagacagcacattcacatagcttttattacagtacattgtaataataattttattctagtactcataatttttgtcaatctcttactgtgcctgatttataaattaaactttatcaggggtatgcatgtgtaggaaagcgcatagtatatgtagggtttggtgctccccaaggttcagtcatcccctgggggtcttggggctgctgtattcgaaaggaaaccaagacctagcaaagatacaataa

SEQ ID NO: 263865 - DNA, 1157 bp, Homo sapiens
taatcccaacaccttgagatgccaagatgggaggatcacttgagcccaggagtttgagaccaacccaggcaacatagcaagactccatctatcttttttttaaaaagagaaccacatccatattttgtggaaccacaaaagatctcaaatagcaaataacaaagctggaagcaccacactacaagtcttcaaaatagaatataaagctataataaccaaaatagcgtggttggcataagaacagacatacaacgtgagagaccctgttctaagtgctgggaatacagcagtgaacaaaccgaccaaaatttgtgccctcatagggcttagaatctagtgatcttaatcacaacattctgtttcccctcaaaatattctgctttaaaaatgtaaagccagatgcagtggcacgctcccatagcagggggctgaagcaggaagatcactccagcccaacagttcaaggttgccgtgcactgtgatcacaactatagacagccacttactccaagcagggcaaaacagcaagaccttgcttcaaagaaaaaaaaaaatggggattgtcaggcaacataggctgttatcttaaaacccatgaaagaaacttctgtctctctcgttcaatatctaactcctagttacaatccaacccctgacaactggacacagagaatgtgacgtctcctacagtaaatgggggactaagagttgtggggagaagtttttttacctttcagagacgatctgtgagtatataaggtgaggggaagggaaaatctgggggggaaataggtacagataaatccaaaaggaggctgttccaggtaaagctgatttacttaggggtaacctcaacgccttcattttgatttaattttgactttgagccaactgaaatgtgacactgtgtactgggatttttaaaaacatcccctttataaatagaaatacctggagaagaagaaataattcttcctatattgtcttttcctatattttaatagtagatggcctgcagaaatcatatcagggcgaggtgcagtggctcatgcctgtaatcccagcactttgggaggccagagtgggtggatcatttgaggccaagaattcgagaccagcctgagcaacatggcgagaacccatctcaacacaaatta

SEQ ID NO: 263866 - DNA, 2237 bp, Homo sapiens
atgtccaatgggaaagcagctcggtgtcacgcacctcctatcccggcgggcaccgcctgcgccgcggcgagtgaggcgtcgtccgtactggaggctagctcttgtcgcggccgcggcgagttaacatcgtttttccaatctgtccgcggctgccgccacccaagacagagccagaatgttcaggatgctgaacagcagttttgaggatgaccccttcttctctgagtccattcttgcacaccgagaaaatatgcgacagatgataagaagtttttctgaaccctttggaagagacttgctcagtatctctgatggtagagggagagctcataatcgtagaggacataatgatggtgaagattctttgactcatacagatgtcagctctttccagacaatggaccaaatggtgtcaaatatgagaaactatatgcagaaattagaaagaaacttcggtcaactttcagtggatccaaatggacattcattttgttcttcctcagttatgacttattccaaaataggagatgaaccgccaaaggtttttcaggcctcaactcaaactcgtcgagctccaggaggaataaaggaaaccaggaaagcaatgagagattctgacagtggactagaaaaaatggctattggtcatcatatccatgaccgagctcatgtcattaaaaagtcaaagaacaagaagactggagatgaagaggtcaaccaggagttcatcaatatgaatgaaagcgatgctcatgcttttgatgaggagtggcaaagtgaggttttgaagtacaaaccaggacgacacaatctaggaaacactagaatgagaagtgttggccatgagaatcctggctcccgagaacttaaaagaagggagaaacctcaacaaagtccagccattgaacatggaaggagatcaaatgttttgggggacaaactccacatcaaaggctcatctgtgaaaagcaacaaaaaataaatagccatgcatttgatttgtttagttttgattgttttaacagttagtaatggtgctgggtaataagcataagaccaatctcttgctgttaaatcagttctgtccttggcaactttcttctgatatctgaatgttcatgaaggtcctagctttatattgtccctcttttaggaataaaattttgattttcaacaatgtgagtaaattgagtctatttaatataaaactctttaaaacatactaattttttaaagcttatatgcttatttcgcttccccagttgttttgtgttggctaaatattcttttatatttatcaagattgattgcagagcagttctatcacttataattagttataagaaattataatgttaaaaaagtctcagtttttactaacactgtactagggtgatattaataaaggtttaaataatttatctctaattttataatgtgtgtaaagccaactagcttaaaactttaaaaataataaagcaaaactacactagtactcttttatgagaaaatagttactattttgataaagggcaaggataatcaaatagttcattttcagagaaaaatattttaaattgctaatgtacatgattgtttggttataatttatttatagaatgtatcttttctatattacattcttaatattcaccagatattatattgaccattctctttaacttcttaatgtggcatatttctactctcctttcccacaaacagcttcatctgtctccaaggttaacattctgaagctggagagtccttggagaaactctgctcagcttttttgtgacatttagaaaaatgcatttggtattctccaaaccagaatgatacattgtctcaaaatctgttagacagctgatgggtgtttttgagcaacgtcttaataattcagttgtttctgttttaattataccattaaaaatcagctttagctttttaattctagaatttaagcatcagtctgttcttataaaagttaggtttgaagtttataagaatataaaatcttaactcacatttgttgtttaatatttctgtcaaggaaaaaagcccccaaaaattgctatcactctataatcctaagtatttttcttttcaattttgtaagtaaaattatatgactatgttcatacttctctaattttttatataatatttttgttaattttactagtttgtgttttatgcctttagtcattaaaataaaatgcaaatgtgttaattca

SEQ ID NO: 263867 - DNA, 1172 bp, Homo sapiens
atgtccaatgggaaagcagctcggtgtcacgcacctcctatcccggcgggcaccgcctgcgccgcggcgagtgaggcgtcgtccgtactggaggctagctcttgtcgcggccgcggcgagttaacatcgtttttccaatctgtccgcggctgccgccacccaagacagagccagaatgttcaggatgctgaacagcagttttgaggatgaccccttcttctctgagtccattcttgcacaccgagaaaatatgcgacagatgataagaagtttttctgaaccctttggaagagacttgctcagtatctctgatggtagagggagagctcataatcgtagaggacataatgatggtgaagattctttgactcatacagatgtcagctctttccagacaatggaccaaatggtgtcaaatatgagaaactatatgcagaaattagaaagaaacttcggtcaactttcagtggatccaaatggacattcattttgttcttcctcagttatgacttattccaaaataggagatgaaccgccaaaggtttttcaggcctcaactcaaactcgtcgagctccaggaggaataaaggaaaccaggaaagcaatgagagattctgacagtggactagaaaaaatggctattggtcatcatatccatgaccgagctcatgtcattaaaaagtcaaagaacaagaagactggagatgaagaggtcaaccaggagttcatcaatatgaatgaaagcgatgctcatgcttttgatgaggagtggcaaagtgaggttttgaagtacaaaccaggacgacacaatctaggaaacactagaatgagaagtgttggccatgagaatcctggctcccgagaacttaaaagaagggagaaacctcaacaaagtccagccattgaacatggaaggagatcaaatgttttgggggacaaactccacatcaaaggctcatctgtgaaaagcaacaaaaaataaatagccatgcatttgatttgtttagttttgattgttttaacagttagtaatggtgctgggtaataagcataagaccaatctcttgctgttaaatcagttctgtccttggcaactttcttctgatatctgaatgttcatgaaggtcctagctttatattgtccctcttttaggaataaaattttgattttc

SEQ ID NO: 263868 - DNA, 912 bp, Homo sapiens
atgtccaatgggaaagcagctcggtgtcacgcacctcctatcccggcgggcaccgcctgcgccgcggcgagtgaggcgtcgtccgtactggaggctagctcttgtcgcggccgcggcgagttaacatcgtttttccaatctgtccgcggctgccgccacccaagacagagccagaatgttcaggatgctgaacagcagttttgaggatgaccccttcttctccatacagatgtcagctctttccagacaatggaccaaatggtgtcaaatatgagaaactatatgcagaaattagaaagaaacttcggtcaactttcagtggatccaaatggacattcattttgttcttcctcagttatgacttattccaaaataggagatgaaccgccaaaggtttttcaggcctcaactcaaactcgtcgagctccaggaggaataaaggaaaccaggaaagcaatgagagattctgacagtggactagaaaaaatggctattggtcatcatatccatgaccgagctcatgtcattaaaaagtcaaagaacaagaagactggagatgaagaggtcaaccaggagttcatcaatatgaatgaaagcgatgctcatgcttttgatgaggagtggcaaagtgaggttttgaagtacaaaccaggacgacacaatctaggaaacactagaatgagaagtgttggccatgagaatcctggctcccgagaacttaaaagaagggagaaacctcaacaaagtccagccattgaacatggaaggagatcaaatgttttgggggacaaactccacatcaaaggctcatctgtgaaaagcaacaaaaaataaataatgcatggcttgattggtaagcttggtcgtctaaccgtcgtagggcgggataagtaaccatctgggggaatcgct

SEQ ID NO: 263869 - DNA, 956 bp, Homo sapiens
atgtccaatgggaaagcagctcggtgtcacgcacctcctatcccggcgggcaccgcctgcgccgcggcgagtgaggcgtcgtccgtactggaggctagctcttgtcgcggccgcggcgagttaacatcgtttttccaatctgtccgcggctgccgccacccaagacagagccagaatgttcaggatgctgaacagcagttttgaggatgaccccttcttctctgagtccattcttgcacaccgagaaaatatgcgacagatgataagaagtttttctgaaccctttggaagagacttgctcagtatctctgatggtagagggagagctcataatcgtagaggacataatgatggtgaagattctttgactgcaacgagttgttctcttgtgccttttggcgattttggtggtatgcatacagatgtcagctctttccagacaatggaccaaatggtgtcaaatatgagaaactatatgcagaaattagaaagaaacttcggtcaactttcagtggatccaaatggacattcattttgttcttcctcagttatgacttattccaaaataggagatgaaccgccaaaggtttttcaggcctcaactcaaactcgtcgagctccaggaggaataaaggaaaccaggaaagcaatgagagattctgacagtggactagaaaaaatggctattggtcatcatatccatgaccgagctcatgtcattaaaaagtcaaagaacaagaagactggagatgaagaggtcaaccaggagttcatcaatatgaatgaaagatgcccatgctttggagcaaggagtggcacagggaggtttgaagtcaaccagggcaaccattttgacacctcacatggcaagtttggcctcgaaatctggtcccaaattaagaagggaaactcagccccttcctggggtcattttgggcacccccaggctcgtagca

SEQ ID NO: 263870 - DNA, 966 bp, Homo sapiens
atgtccaatgggaaagcagctcggtgtcacgcacctcctatcccggcgggcaccgcctgcgccgcggcgagtgaggcgtcgtccgtactggaggctagctcttgtcgcggccgcggcgagttaacatcgtttttccaatctgtccgcggctgccgccacccaagacagagccagaatgttcaggatgctgaacagcagttttgaggatgaccccttcttctcgtgagttacgggagccaggagtccggggtcgcgcgggaattaagtgagtccattcttgcacaccgagaaaatatgcgacagatgataagaagtttttctgaaccctttggaagagacttgctcagtatctctgatggtagagggagagctcataatcgtagaggacataatgatggtgaagattctttgactgcaacgagttgttctcttgtgccttttggcgattttggtggtatgcatacagatgtcagctctttccagacaatggaccaaatggtgtcaaatatgagaaactatatgcagaaattagaaagaaacttcggtcaactttcagtggatccaaatggacattcattttgttcttcctcagttatgacttattccaaaataggagatgaaccgccaaaggtttttcaggcctcaactcaaactcgtcgagctccaggaggaataaaggaaaccaggaaagcaatgagagattctgacagtggactagaaaaaatggctattggtcatcatatccatgaccgagctcatgtcattaaaaagtcaaagaacaagaagactggagatgaagaggtcaccgggtctcatttatggagggagccagcttgagagggggcatggggttgggtccaccgggcactcggaaactatggaagttggcgaaaggcccgaaaaagggggccacaccccgaggggaaactgcgggccacccttgtggcattttttgaaaaaaaaagc

SEQ ID NO: 263871 - DNA, 839 bp, Homo sapiens
atgtccaatgggaaagcagctcggtgtcacgcacctcctatcccggcgggcaccgcctgcgccgcggcgagtgaggcgtcgtccgtactggaggctagctcttgtcgcggccgcggcgagttaacatcgtttttccaatctgtccgcggctgccgccacccaagacagagccagaatgttcaggatgctgaacagcagttttgaggatgaccccttcttctcacatacaggtggtcttactctgcagcagctgaaactgaagcacaagaagcccttggaactatcatcaggacattgagtccattcttgcacaccgagaaaatatgcgacagatgataagaagtttttctgaaccctttggaagagacttgctcagtatctctgatggtagagggagagctcataatcgtagaggacataatgatggtgaagattctttgactcatacagatgtcagctctttccagacaatggaccaaatggtgtcaaatatgagaaactatatgcagaaattagaaagaaacttcggtcaatcttttcagtggatccaaatggaaaagaagtaagctctttatcttcccttatgatcgcaaatcaaacatgagggtaaattggtgactctgcttaagtggtgatctagtcatcagagtccaaactcccagatcctcatgagggcttatctccgactctttcgtgggatttcaacgttaaactggggctgctgcaccagcaggagcagctatggcggcatcaagccacacaggggcaccaaccacaaaggcagatggattcagactagaaggtcttgacgttttcagcaagtgggaaggtgtaatacg

SEQ ID NO: 263872 - DNA, 2281 bp, Homo sapiens
atgtccaatgggaaagcagctcggtgtcacgcacctcctatcccggcgggcaccgcctgcgccgcggcgagtgaggcgtcgtccgtactggaggctagctcttgtcgcggccgcggcgagttaacatcgtttttccaatctgtccgcggctgccgccacccaagacagagccagaatgttcaggatgctgaacagcagttttgaggatgaccccttcttctcgtgagttacgggagccaggagtccggggtcgcgcgggaattaagtgagtccattcttgcacaccgagaaaatatgcgacagatgataagaagtttttctgaaccctttggaagagacttgctcagtatctctgatggtagagggagagctcataatcgtagaggacataatgatggtgaagattctttgactcatacagatgtcagctctttccagacaatggaccaaatggtgtcaaatatgagaaactatatgcagaaattagaaagaaacttcggtcaactttcagtggatccaaatggacattcattttgttcttcctcagttatgacttattccaaaataggagatgaaccgccaaaggtttttcaggcctcaactcaaactcgtcgagctccaggaggaataaaggaaaccaggaaagcaatgagagattctgacagtggactagaaaaaatggctattggtcatcatatccatgaccgagctcatgtcattaaaaagtcaaagaacaagaagactggagatgaagaggtcaaccaggagttcatcaatatgaatgaaagcgatgctcatgcttttgatgaggagtggcaaagtgaggttttgaagtacaaaccaggacgacacaatctaggaaacactagaatgagaagtgttggccatgagaatcctggctcccgagaacttaaaagaagggagaaacctcaacaaagtccagccattgaacatggaaggagatcaaatgttttgggggacaaactccacatcaaaggctcatctgtgaaaagcaacaaaaaataaatagccatgcatttgatttgtttagttttgattgttttaacagttagtaatggtgctgggtaataagcataagaccaatctcttgctgttaaatcagttctgtccttggcaactttcttctgatatctgaatgttcatgaaggtcctagctttatattgtccctcttttaggaataaaattttgattttcaacaatgtgagtaaattgagtctatttaatataaaactctttaaaacatactaattttttaaagcttatatgcttatttcgcttccccagttgttttgtgttggctaaatattcttttatatttatcaagattgattgcagagcagttctatcacttataattagttataagaaattataatgttaaaaaagtctcagtttttactaacactgtactagggtgatattaataaaggtttaaataatttatctctaattttataatgtgtgtaaagccaactagcttaaaactttaaaaataataaagcaaaactacactagtactcttttatgagaaaatagttactattttgataaagggcaaggataatcaaatagttcattttcagagaaaaatattttaaattgctaatgtacatgattgtttggttataatttatttatagaatgtatcttttctatattacattcttaatattcaccagatattatattgaccattctctttaacttcttaatgtggcatatttctactctcctttcccacaaacagcttcatctgtctccaaggttaacattctgaagctggagagtccttggagaaactctgctcagcttttttgtgacatttagaaaaatgcatttggtattctccaaaccagaatgatacattgtctcaaaatctgttagacagctgatgggtgtttttgagcaacgtcttaataattcagttgtttctgttttaattataccattaaaaatcagctttagctttttaattctagaatttaagcatcagtctgttcttataaaagttaggtttgaagtttataagaatataaaatcttaactcacatttgttgtttaatatttctgtcaaggaaaaaagcccccaaaaattgctatcactctataatcctaagtatttttcttttcaattttgtaagtaaaattatatgactatgttcatacttctctaattttttatataatatttttgttaattttactagtttgtgttttatgcctttagtcattaaaataaaatgcaaatgtgttaattca

SEQ ID NO: 263873 - DNA, 1135 bp, Homo sapiens
  misc_feature (1103)..(1103): n is a, c, g, or t
atgtccaatgggaaagcagctcggtgtcacgcacctcctatcccggcgggcaccgcctgcgccgcggcgagtgaggcgtcgtccgtactggaggctagctcttgtcgcggccgcggcgagttaacatcgtttttccaatctgtccgcggctgccgccacccaagacagagccagaatgttcaggatgctgaacagcagttttgaggatgaccccttcttctctgagtccattcttgcacaccgagaaaatatgcgacagatgataagaagtttttctgaaccctttggaagagacttgctcagtatctctgatggtagagggagagctcataatcgtagaggacataatgatggtgaagattctttgactcatacagatgtcagctctttccagacaatggaccaaatggtgtcaaatatgagaaactatatgcagaaattagaaagaaacttcggtcaactttcagtggatccaaatggacattcattttgttcttcctcagttatgacttattccaaaataggagatgaaccgccaaaggtttttcaggcctcaactcaaactcgtcgagctccaggaggaataaaggaaaccaggaaagcaatgagagattctgacagtggactagaaaaaatggctattggtcatcatatccatgaccgagctcatgtcattaaaaagtcaaagaacaagaagactggagatgaagaggtcaaccaggagttcatcaatatgaatgaaagcgatgctcatgcttttgatgaggagtggcaaagtgaggttttgaagtacaaaccaggacgacacaatctaggaaacactagaatgagaagtgttggccatgagaatcctggctcccgagaacttaaaagaagggagaaacctcaacaaagtccagccattgaacatggaaggagatcaaatgttttgggggacaaactccacatcaaaggctcatctgtgaaaagcaacaaaaaataaatagccatgcatttgatttgtttagttttgattgttttaacagttagtaatggtgctgggtaataagcataagaccaatctcttgctgttaaatcagttctgtccttggcaactttcttcnttaaacccttcctgaagggtgtttccactaga

SEQ ID NO: 263874 - DNA, 2310 bp, Homo sapiens
atgtccaatgggaaagcagctcggtgtcacgcacctcctatcccggcgggcaccgcctgcgccgcggcgagtgaggcgtcgtccgtactggaggctagctcttgtcgcggccgcggcgagttaacatcgtttttccaatctgtccgcggctgccgccacccaagacagagccagaatgttcaggatgctgaacagcagttttgaggatgaccccttcttctcacatacaggtggtcttactctgcagcagctgaaactgaagcacaagaagcccttggaactatcatcaggacattgagtccattcttgcacaccgagaaaatatgcgacagatgataagaagtttttctgaaccctttggaagagacttgctcagtatctctgatggtagagggagagctcataatcgtagaggacataatgatggtgaagattctttgactcatacagatgtcagctctttccagacaatggaccaaatggtgtcaaatatgagaaactatatgcagaaattagaaagaaacttcggtcaactttcagtggatccaaatggacattcattttgttcttcctcagttatgacttattccaaaataggagatgaaccgccaaaggtttttcaggcctcaactcaaactcgtcgagctccaggaggaataaaggaaaccaggaaagcaatgagagattctgacagtggactagaaaaaatggctattggtcatcatatccatgaccgagctcatgtcattaaaaagtcaaagaacaagaagactggagatgaagaggtcaaccaggagttcatcaatatgaatgaaagcgatgctcatgcttttgatgaggagtggcaaagtgaggttttgaagtacaaaccaggacgacacaatctaggaaacactagaatgagaagtgttggccatgagaatcctggctcccgagaacttaaaagaagggagaaacctcaacaaagtccagccattgaacatggaaggagatcaaatgttttgggggacaaactccacatcaaaggctcatctgtgaaaagcaacaaaaaataaatagccatgcatttgatttgtttagttttgattgttttaacagttagtaatggtgctgggtaataagcataagaccaatctcttgctgttaaatcagttctgtccttggcaactttcttctgatatctgaatgttcatgaaggtcctagctttatattgtccctcttttaggaataaaattttgattttcaacaatgtgagtaaattgagtctatttaatataaaactctttaaaacatactaattttttaaagcttatatgcttatttcgcttccccagttgttttgtgttggctaaatattcttttatatttatcaagattgattgcagagcagttctatcacttataattagttataagaaattataatgttaaaaaagtctcagtttttactaacactgtactagggtgatattaataaaggtttaaataatttatctctaattttataatgtgtgtaaagccaactagcttaaaactttaaaaataataaagcaaaactacactagtactcttttatgagaaaatagttactattttgataaagggcaaggataatcaaatagttcattttcagagaaaaatattttaaattgctaatgtacatgattgtttggttataatttatttatagaatgtatcttttctatattacattcttaatattcaccagatattatattgaccattctctttaacttcttaatgtggcatatttctactctcctttcccacaaacagcttcatctgtctccaaggttaacattctgaagctggagagtccttggagaaactctgctcagcttttttgtgacatttagaaaaatgcatttggtattctccaaaccagaatgatacattgtctcaaaatctgttagacagctgatgggtgtttttgagcaacgtcttaataattcagttgtttctgttttaattataccattaaaaatcagctttagctttttaattctagaatttaagcatcagtctgttcttataaaagttaggtttgaagtttataagaatataaaatcttaactcacatttgttgtttaatatttctgtcaaggaaaaaagcccccaaaaattgctatcactctataatcctaagtatttttcttttcaattttgtaagtaaaattatatgactatgttcatacttctctaattttttatataatatttttgttaattttactagtttgtgttttatgcctttagtcattaaaataaaatgcaaatgtgttaattca

SEQ ID NO: 263875 - DNA, 2354 bp, Homo sapiens
atgtccaatgggaaagcagctcggtgtcacgcacctcctatcccggcgggcaccgcctgcgccgcggcgagtgaggcgtcgtccgtactggaggctagctcttgtcgcggccgcggcgagttaacatcgtttttccaatctgtccgcggctgccgccacccaagacagagccagaatgttcaggatgctgaacagcagttttgaggatgaccccttcttctcgtgagttacgggagccaggagtccggggtcgcgcgggaattaagacatacaggtggtcttactctgcagcagctgaaactgaagcacaagaagcccttggaactatcatcaggacattgagtccattcttgcacaccgagaaaatatgcgacagatgataagaagtttttctgaaccctttggaagagacttgctcagtatctctgatggtagagggagagctcataatcgtagaggacataatgatggtgaagattctttgactcatacagatgtcagctctttccagacaatggaccaaatggtgtcaaatatgagaaactatatgcagaaattagaaagaaacttcggtcaactttcagtggatccaaatggacattcattttgttcttcctcagttatgacttattccaaaataggagatgaaccgccaaaggtttttcaggcctcaactcaaactcgtcgagctccaggaggaataaaggaaaccaggaaagcaatgagagattctgacagtggactagaaaaaatggctattggtcatcatatccatgaccgagctcatgtcattaaaaagtcaaagaacaagaagactggagatgaagaggtcaaccaggagttcatcaatatgaatgaaagcgatgctcatgcttttgatgaggagtggcaaagtgaggttttgaagtacaaaccaggacgacacaatctaggaaacactagaatgagaagtgttggccatgagaatcctggctcccgagaacttaaaagaagggagaaacctcaacaaagtccagccattgaacatggaaggagatcaaatgttttgggggacaaactccacatcaaaggctcatctgtgaaaagcaacaaaaaataaatagccatgcatttgatttgtttagttttgattgttttaacagttagtaatggtgctgggtaataagcataagaccaatctcttgctgttaaatcagttctgtccttggcaactttcttctgatatctgaatgttcatgaaggtcctagctttatattgtccctcttttaggaataaaattttgattttcaacaatgtgagtaaattgagtctatttaatataaaactctttaaaacatactaattttttaaagcttatatgcttatttcgcttccccagttgttttgtgttggctaaatattcttttatatttatcaagattgattgcagagcagttctatcacttataattagttataagaaattataatgttaaaaaagtctcagtttttactaacactgtactagggtgatattaataaaggtttaaataatttatctctaattttataatgtgtgtaaagccaactagcttaaaactttaaaaataataaagcaaaactacactagtactcttttatgagaaaatagttactattttgataaagggcaaggataatcaaatagttcattttcagagaaaaatattttaaattgctaatgtacatgattgtttggttataatttatttatagaatgtatcttttctatattacattcttaatattcaccagatattatattgaccattctctttaacttcttaatgtggcatatttctactctcctttcccacaaacagcttcatctgtctccaaggttaacattctgaagctggagagtccttggagaaactctgctcagcttttttgtgacatttagaaaaatgcatttggtattctccaaaccagaatgatacattgtctcaaaatctgttagacagctgatgggtgtttttgagcaacgtcttaataattcagttgtttctgttttaattataccattaaaaatcagctttagctttttaattctagaatttaagcatcagtctgttcttataaaagttaggtttgaagtttataagaatataaaatcttaactcacatttgttgtttaatatttctgtcaaggaaaaaagcccccaaaaattgctatcactctataatcctaagtatttttcttttcaattttgtaagtaaaattatatgactatgttcatacttctctaattttttatataatatttttgttaattttactagtttgtgttttatgcctttagtcattaaaataaaatgcaaatgtgttaattca

SEQ ID NO: 263876 - DNA, 2282 bp, Homo sapiens
atgtccaatgggaaagcagctcggtgtcacgcacctcctatcccggcgggcaccgcctgcgccgcggcgagtgaggcgtcgtccgtactggaggctagctcttgtcgcggccgcggcgagttaacatcgtttttccaatctgtccgcggctgccgccacccaagacagagccagaatgttcaggatgctgaacagcagttttgaggatgaccccttcttctctgagtccattcttgcacaccgagaaaatatgcgacagatgataagaagtttttctgaaccctttggaagagacttgctcagtatctctgatggtagagggagagctcataatcgtagaggacataatgatggtgaagattctttgactgcaacgagttgttctcttgtgccttttggcgattttggtggtatgcatacagatgtcagctctttccagacaatggaccaaatggtgtcaaatatgagaaactatatgcagaaattagaaagaaacttcggtcaactttcagtggatccaaatggacattcattttgttcttcctcagttatgacttattccaaaataggagatgaaccgccaaaggtttttcaggcctcaactcaaactcgtcgagctccaggaggaataaaggaaaccaggaaagcaatgagagattctgacagtggactagaaaaaatggctattggtcatcatatccatgaccgagctcatgtcattaaaaagtcaaagaacaagaagactggagatgaagaggtcaaccaggagttcatcaatatgaatgaaagcgatgctcatgcttttgatgaggagtggcaaagtgaggttttgaagtacaaaccaggacgacacaatctaggaaacactagaatgagaagtgttggccatgagaatcctggctcccgagaacttaaaagaagggagaaacctcaacaaagtccagccattgaacatggaaggagatcaaatgttttgggggacaaactccacatcaaaggctcatctgtgaaaagcaacaaaaaataaatagccatgcatttgatttgtttagttttgattgttttaacagttagtaatggtgctgggtaataagcataagaccaatctcttgctgttaaatcagttctgtccttggcaactttcttctgatatctgaatgttcatgaaggtcctagctttatattgtccctcttttaggaataaaattttgattttcaacaatgtgagtaaattgagtctatttaatataaaactctttaaaacatactaattttttaaagcttatatgcttatttcgcttccccagttgttttgtgttggctaaatattcttttatatttatcaagattgattgcagagcagttctatcacttataattagttataagaaattataatgttaaaaaagtctcagtttttactaacactgtactagggtgatattaataaaggtttaaataatttatctctaattttataatgtgtgtaaagccaactagcttaaaactttaaaaataataaagcaaaactacactagtactcttttatgagaaaatagttactattttgataaagggcaaggataatcaaatagttcattttcagagaaaaatattttaaattgctaatgtacatgattgtttggttataatttatttatagaatgtatcttttctatattacattcttaatattcaccagatattatattgaccattctctttaacttcttaatgtggcatatttctactctcctttcccacaaacagcttcatctgtctccaaggttaacattctgaagctggagagtccttggagaaactctgctcagcttttttgtgacatttagaaaaatgcatttggtattctccaaaccagaatgatacattgtctcaaaatctgttagacagctgatgggtgtttttgagcaacgtcttaataattcagttgtttctgttttaattataccattaaaaatcagctttagctttttaattctagaatttaagcatcagtctgttcttataaaagttaggtttgaagtttataagaatataaaatcttaactcacatttgttgtttaatatttctgtcaaggaaaaaagcccccaaaaattgctatcactctataatcctaagtatttttcttttcaattttgtaagtaaaattatatgactatgttcatacttctctaattttttatataatatttttgttaattttactagtttgtgttttatgcctttagtcattaaaataaaatgcaaatgtgttaattca

SEQ ID NO: 263877 - DNA, 2133 bp, Homo sapiens
atgtccaatgggaaagcagctcggtgtcacgcacctcctatcccggcgggcaccgcctgcgccgcggcgagtgaggcgtcgtccgtactggaggctagctcttgtcgcggccgcggcgagttaacatcgtttttccaatctgtccgcggctgccgccacccaagacagagccagaatgttcaggatgctgaacagcagttttgaggatgaccccttcttctcgtgagttacgggagccaggagtccggggtcgcgcgggaattaagcatacagatgtcagctctttccagacaatggaccaaatggtgtcaaatatgagaaactatatgcagaaattagaaagaaacttcggtcaactttcagtggatccaaatggacattcattttgttcttcctcagttatgacttattccaaaataggagatgaaccgccaaaggtttttcaggcctcaactcaaactcgtcgagctccaggaggaataaaggaaaccaggaaagcaatgagagattctgacagtggactagaaaaaatggctattggtcatcatatccatgaccgagctcatgtcattaaaaagtcaaagaacaagaagactggagatgaagaggtcaaccaggagttcatcaatatgaatgaaagcgatgctcatgcttttgatgaggagtggcaaagtgaggttttgaagtacaaaccaggacgacacaatctaggaaacactagaatgagaagtgttggccatgagaatcctggctcccgagaacttaaaagaagggagaaacctcaacaaagtccagccattgaacatggaaggagatcaaatgttttgggggacaaactccacatcaaaggctcatctgtgaaaagcaacaaaaaataaatagccatgcatttgatttgtttagttttgattgttttaacagttagtaatggtgctgggtaataagcataagaccaatctcttgctgttaaatcagttctgtccttggcaactttcttctgatatctgaatgttcatgaaggtcctagctttatattgtccctcttttaggaataaaattttgattttcaacaatgtgagtaaattgagtctatttaatataaaactctttaaaacatactaattttttaaagcttatatgcttatttcgcttccccagttgttttgtgttggctaaatattcttttatatttatcaagattgattgcagagcagttctatcacttataattagttataagaaattataatgttaaaaaagtctcagtttttactaacactgtactagggtgatattaataaaggtttaaataatttatctctaattttataatgtgtgtaaagccaactagcttaaaactttaaaaataataaagcaaaactacactagtactcttttatgagaaaatagttactattttgataaagggcaaggataatcaaatagttcattttcagagaaaaatattttaaattgctaatgtacatgattgtttggttataatttatttatagaatgtatcttttctatattacattcttaatattcaccagatattatattgaccattctctttaacttcttaatgtggcatatttctactctcctttcccacaaacagcttcatctgtctccaaggttaacattctgaagctggagagtccttggagaaactctgctcagcttttttgtgacatttagaaaaatgcatttggtattctccaaaccagaatgatacattgtctcaaaatctgttagacagctgatgggtgtttttgagcaacgtcttaataattcagttgtttctgttttaattataccattaaaaatcagctttagctttttaattctagaatttaagcatcagtctgttcttataaaagttaggtttgaagtttataagaatataaaatcttaactcacatttgttgtttaatatttctgtcaaggaaaaaagcccccaaaaattgctatcactctataatcctaagtatttttcttttcaattttgtaagtaaaattatatgactatgttcatacttctctaattttttatataatatttttgttaattttactagtttgtgttttatgcctttagtcattaaaataaaatgcaaatgtgttaattca

SEQ ID NO: 263878 - DNA, 2089 bp, Homo sapiens
atgtccaatgggaaagcagctcggtgtcacgcacctcctatcccggcgggcaccgcctgcgccgcggcgagtgaggcgtcgtccgtactggaggctagctcttgtcgcggccgcggcgagttaacatcgtttttccaatctgtccgcggctgccgccacccaagacagagccagaatgttcaggatgctgaacagcagttttgaggatgaccccttcttctccatacagatgtcagctctttccagacaatggaccaaatggtgtcaaatatgagaaactatatgcagaaattagaaagaaacttcggtcaactttcagtggatccaaatggacattcattttgttcttcctcagttatgacttattccaaaataggagatgaaccgccaaaggtttttcaggcctcaactcaaactcgtcgagctccaggaggaataaaggaaaccaggaaagcaatgagagattctgacagtggactagaaaaaatggctattggtcatcatatccatgaccgagctcatgtcattaaaaagtcaaagaacaagaagactggagatgaagaggtcaaccaggagttcatcaatatgaatgaaagcgatgctcatgcttttgatgaggagtggcaaagtgaggttttgaagtacaaaccaggacgacacaatctaggaaacactagaatgagaagtgttggccatgagaatcctggctcccgagaacttaaaagaagggagaaacctcaacaaagtccagccattgaacatggaaggagatcaaatgttttgggggacaaactccacatcaaaggctcatctgtgaaaagcaacaaaaaataaatagccatgcatttgatttgtttagttttgattgttttaacagttagtaatggtgctgggtaataagcataagaccaatctcttgctgttaaatcagttctgtccttggcaactttcttctgatatctgaatgttcatgaaggtcctagctttatattgtccctcttttaggaataaaattttgattttcaacaatgtgagtaaattgagtctatttaatataaaactctttaaaacatactaattttttaaagcttatatgcttatttcgcttccccagttgttttgtgttggctaaatattcttttatatttatcaagattgattgcagagcagttctatcacttataattagttataagaaattataatgttaaaaaagtctcagtttttactaacactgtactagggtgatattaataaaggtttaaataatttatctctaattttataatgtgtgtaaagccaactagcttaaaactttaaaaataataaagcaaaactacactagtactcttttatgagaaaatagttactattttgataaagggcaaggataatcaaatagttcattttcagagaaaaatattttaaattgctaatgtacatgattgtttggttataatttatttatagaatgtatcttttctatattacattcttaatattcaccagatattatattgaccattctctttaacttcttaatgtggcatatttctactctcctttcccacaaacagcttcatctgtctccaaggttaacattctgaagctggagagtccttggagaaactctgctcagcttttttgtgacatttagaaaaatgcatttggtattctccaaaccagaatgatacattgtctcaaaatctgttagacagctgatgggtgtttttgagcaacgtcttaataattcagttgtttctgttttaattataccattaaaaatcagctttagctttttaattctagaatttaagcatcagtctgttcttataaaagttaggtttgaagtttataagaatataaaatcttaactcacatttgttgtttaatatttctgtcaaggaaaaaagcccccaaaaattgctatcactctataatcctaagtatttttcttttcaattttgtaagtaaaattatatgactatgttcatacttctctaattttttatataatatttttgttaattttactagtttgtgttttatgcctttagtcattaaaataaaatgcaaatgtgttaattca

SEQ ID NO: 263879 - DNA, 2326 bp, Homo sapiens
atgtccaatgggaaagcagctcggtgtcacgcacctcctatcccggcgggcaccgcctgcgccgcggcgagtgaggcgtcgtccgtactggaggctagctcttgtcgcggccgcggcgagttaacatcgtttttccaatctgtccgcggctgccgccacccaagacagagccagaatgttcaggatgctgaacagcagttttgaggatgaccccttcttctcgtgagttacgggagccaggagtccggggtcgcgcgggaattaagtgagtccattcttgcacaccgagaaaatatgcgacagatgataagaagtttttctgaaccctttggaagagacttgctcagtatctctgatggtagagggagagctcataatcgtagaggacataatgatggtgaagattctttgactgcaacgagttgttctcttgtgccttttggcgattttggtggtatgcatacagatgtcagctctttccagacaatggaccaaatggtgtcaaatatgagaaactatatgcagaaattagaaagaaacttcggtcaactttcagtggatccaaatggacattcattttgttcttcctcagttatgacttattccaaaataggagatgaaccgccaaaggtttttcaggcctcaactcaaactcgtcgagctccaggaggaataaaggaaaccaggaaagcaatgagagattctgacagtggactagaaaaaatggctattggtcatcatatccatgaccgagctcatgtcattaaaaagtcaaagaacaagaagactggagatgaagaggtcaaccaggagttcatcaatatgaatgaaagcgatgctcatgcttttgatgaggagtggcaaagtgaggttttgaagtacaaaccaggacgacacaatctaggaaacactagaatgagaagtgttggccatgagaatcctggctcccgagaacttaaaagaagggagaaacctcaacaaagtccagccattgaacatggaaggagatcaaatgttttgggggacaaactccacatcaaaggctcatctgtgaaaagcaacaaaaaataaatagccatgcatttgatttgtttagttttgattgttttaacagttagtaatggtgctgggtaataagcataagaccaatctcttgctgttaaatcagttctgtccttggcaactttcttctgatatctgaatgttcatgaaggtcctagctttatattgtccctcttttaggaataaaattttgattttcaacaatgtgagtaaattgagtctatttaatataaaactctttaaaacatactaattttttaaagcttatatgcttatttcgcttccccagttgttttgtgttggctaaatattcttttatatttatcaagattgattgcagagcagttctatcacttataattagttataagaaattataatgttaaaaaagtctcagtttttactaacactgtactagggtgatattaataaaggtttaaataatttatctctaattttataatgtgtgtaaagccaactagcttaaaactttaaaaataataaagcaaaactacactagtactcttttatgagaaaatagttactattttgataaagggcaaggataatcaaatagttcattttcagagaaaaatattttaaattgctaatgtacatgattgtttggttataatttatttatagaatgtatcttttctatattacattcttaatattcaccagatattatattgaccattctctttaacttcttaatgtggcatatttctactctcctttcccacaaacagcttcatctgtctccaaggttaacattctgaagctggagagtccttggagaaactctgctcagcttttttgtgacatttagaaaaatgcatttggtattctccaaaccagaatgatacattgtctcaaaatctgttagacagctgatgggtgtttttgagcaacgtcttaataattcagttgtttctgttttaattataccattaaaaatcagctttagctttttaattctagaatttaagcatcagtctgttcttataaaagttaggtttgaagtttataagaatataaaatcttaactcacatttgttgtttaatatttctgtcaaggaaaaaagcccccaaaaattgctatcactctataatcctaagtatttttcttttcaattttgtaagtaaaattatatgactatgttcatacttctctaattttttatataatatttttgttaattttactagtttgtgttttatgcctttagtcattaaaataaaatgcaaatgtgttaattca

SEQ ID NO: 263880 - DNA, 2355 bp, Homo sapiens
atgtccaatgggaaagcagctcggtgtcacgcacctcctatcccggcgggcaccgcctgcgccgcggcgagtgaggcgtcgtccgtactggaggctagctcttgtcgcggccgcggcgagttaacatcgtttttccaatctgtccgcggctgccgccacccaagacagagccagaatgttcaggatgctgaacagcagttttgaggatgaccccttcttctcacatacaggtggtcttactctgcagcagctgaaactgaagcacaagaagcccttggaactatcatcaggacattgagtccattcttgcacaccgagaaaatatgcgacagatgataagaagtttttctgaaccctttggaagagacttgctcagtatctctgatggtagagggagagctcataatcgtagaggacataatgatggtgaagattctttgactgcaacgagttgttctcttgtgccttttggcgattttggtggtatgcatacagatgtcagctctttccagacaatggaccaaatggtgtcaaatatgagaaactatatgcagaaattagaaagaaacttcggtcaactttcagtggatccaaatggacattcattttgttcttcctcagttatgacttattccaaaataggagatgaaccgccaaaggtttttcaggcctcaactcaaactcgtcgagctccaggaggaataaaggaaaccaggaaagcaatgagagattctgacagtggactagaaaaaatggctattggtcatcatatccatgaccgagctcatgtcattaaaaagtcaaagaacaagaagactggagatgaagaggtcaaccaggagttcatcaatatgaatgaaagcgatgctcatgcttttgatgaggagtggcaaagtgaggttttgaagtacaaaccaggacgacacaatctaggaaacactagaatgagaagtgttggccatgagaatcctggctcccgagaacttaaaagaagggagaaacctcaacaaagtccagccattgaacatggaaggagatcaaatgttttgggggacaaactccacatcaaaggctcatctgtgaaaagcaacaaaaaataaatagccatgcatttgatttgtttagttttgattgttttaacagttagtaatggtgctgggtaataagcataagaccaatctcttgctgttaaatcagttctgtccttggcaactttcttctgatatctgaatgttcatgaaggtcctagctttatattgtccctcttttaggaataaaattttgattttcaacaatgtgagtaaattgagtctatttaatataaaactctttaaaacatactaattttttaaagcttatatgcttatttcgcttccccagttgttttgtgttggctaaatattcttttatatttatcaagattgattgcagagcagttctatcacttataattagttataagaaattataatgttaaaaaagtctcagtttttactaacactgtactagggtgatattaataaaggtttaaataatttatctctaattttataatgtgtgtaaagccaactagcttaaaactttaaaaataataaagcaaaactacactagtactcttttatgagaaaatagttactattttgataaagggcaaggataatcaaatagttcattttcagagaaaaatattttaaattgctaatgtacatgattgtttggttataatttatttatagaatgtatcttttctatattacattcttaatattcaccagatattatattgaccattctctttaacttcttaatgtggcatatttctactctcctttcccacaaacagcttcatctgtctccaaggttaacattctgaagctggagagtccttggagaaactctgctcagcttttttgtgacatttagaaaaatgcatttggtattctccaaaccagaatgatacattgtctcaaaatctgttagacagctgatgggtgtttttgagcaacgtcttaataattcagttgtttctgttttaattataccattaaaaatcagctttagctttttaattctagaatttaagcatcagtctgttcttataaaagttaggtttgaagtttataagaatataaaatcttaactcacatttgttgtttaatatttctgtcaaggaaaaaagcccccaaaaattgctatcactctataatcctaagtatttttcttttcaattttgtaagtaaaattatatgactatgttcatacttctctaattttttatataatatttttgttaattttactagtttgtgttttatgcctttagtcattaaaataaaatgcaaatgtgttaattca

SEQ ID NO: 263881 - DNA, 475 bp, Homo sapiens
  misc_feature (324)..(324): n is a, c, g, or t
ggggcccgtcactgtgcatttaggcttcttgctcttctttacaagcctgtttcctttcgctgtctccatagcacccttacctaaaggacttagtatgttttcaatcccagagcattctgcagtgtgttgagtgaatagtttgtccctaaagcaagagttcttaaaatcaaaatcgttattttcatttttaatcaaactaatatatgtacataggtttagattgtttttgttttttgttttgttttttgagatcgagtctcgctctgcactccatcctgggcaacagagccagactctgtctcaaaaaaaaaaaaaggcagtgcntcacacctataatcccagtactttgggagtctgaggtgggaggatcacttgagcctacgaagtttgaggctgcagtgaaccatgatcttaccagcctgcactctagcctgggtgacagtgagaccctgtctcaatttttaaaaaaaaaaaa

SEQ ID NO: 263882 - DNA, 704 bp, Homo sapiens
caaattcatagattttgaatcagtactttcttttattggatatatttgtacagcacaaaagaagtttgctattatgccatgaatctattcatttgaatcaattgtctttaaaacatttttattgctcatctcatctgtaaaaacttttacacaggcacattatacatttatttatttaatgatatacatgttctgtgcattactatgtatatagatttcagtagaacaaatttaagaagaatgagacaaagattaaatgaatactttaaagtttgaagtgtaatattggcatgagaaactttttgttcatgttaaaattgtaacatactatgtttagttttaaaaatcttgaattagtcctctgctctgaagatgtagctagtacagtttattttaatacttgattttaatgacggtcacagttgaaaaattatgtgtcaaagatgtgtagatccaaatagaaatggtcagctatgattacaaattcacatcactcacatttcaatccatctaccaattatgaggcatcatttgttgaaatgtagctagcaaatttctgccttccctaatgtcaattgcatgtttctgcaagttaatcagaggattttttttaacaaaggatgtcaaaaatccattcaaactcttcatttggaacatttttttaaatgggttaaaattttcttagttgtcatgtttcattagga

SEQ ID NO: 263883 - DNA, 221 bp, Homo sapiens
cccaggcacaccctaacttacccttggagcttacaggaattccaagaaaatccacatgggtagagattgagcgtctttcccaatgggcagtcaagatgatgagatggatcactaaattctaaagaatccatgtcatgctgtatacacacagcaaggagggccttaatattagcaaaacaacatcaagtgtctcacattaaataaatgttgttaactttaag

SEQ ID NO: 263884 - DNA, 122 bp, Homo sapiens
gtaagtggctttgcatattagaacccaaatattttgctctctaaatctaatgctcgctctatgtggttatgtacatattgacaaatattcatttattcaacaaataaaaagtatgtacaaaa

SEQ ID NO: 263885 - DNA, 444 bp, Homo sapiens
gatcttgatggacttaaagattcattaaatggaagactttacagaagtatacagaaactagttaaatatagaagattcttatagagatatttagaaaatgtagttagggtgtgtaaacaaagtaatggtccctggtagatttaaatcaggaataccagtttttatgcttcttgccacagctgtaatggagtataatatgatatattcttagtgtaatttgataaaattagacattttccaacatatgcgaaaatattttctgtaggaacttgaggacttatcattatgttagaattttgttttgagactagatcctagggcagttttaaagtgactaccagaatcttaaagacatgtgatggaaaaatagatgggaggacagttaatggagcagggagaattaatacggaaataataaggtaacttagagggagagaaaaggaa

SEQ ID NO: 263886 - DNA, 431 bp, Homo sapiens
gtatattcctaagtattttaatttttctttggcagctgttgtaaaagggattgcgttcttgatttgattctcggcttggtcatcattggtgtatagcagtgctactgatttgtgtacattaattttgtatcctgaaacttcactgaattcatttatcagatctaggagcttttcaaatgaatcttgagggttttctaggtataagtttgtatcatcagcaaacagcaacagtttgacttcctcctttgcagcttggtataaaattctttaaattttgctgtatctaaaagttttcaaaataaaatgttactgactaaaaatatattcttaggactgtactttcagggatcatttctatagtttgtttctagagaagtttctctgaatatgtagagcactggaaaaatcaatattttttttaaaaaagagaa

SEQ ID NO: 263887 - DNA, 367 bp, Homo sapiens
gtttaatccattgtaacatcatatgggttccttcattaattagtgagttaagtgaaatttttgacatgttcattttatattcataaaaaagtcataacttacctttaaaaaataattacagtgagctatgaccatgctactgcactccagcgttggcaacagaatgagaccctgtcttaagatactcagccaacattcacatcatatcaggattgaacgagctgaacagactgtctactccttcattatttgtgtattaacagatgccaaaaatcacctctgcaagatgggttcaagagacaacacaggcttttgatttagagatctgactcacttttatcaagagtgttcatgaaatcaaggatac

SEQ ID NO: 263888 - DNA, 1750 bp, Homo sapiens
gggggtggatttccttcaggtagtatacattctttttcaaatggaagagctggttatagccaacaacatcagcattgacatagtggacatgaaagagaagaggaaagaggagatggaggtttttctgtgtttatccagctgatgcccataattgtattgatcctcgtgtcattattaagccagttgatggtctgtaatcctccttattccttctatcccagatctggaacagggcaaactattaaaacgcagacagaaaacttgggtggtgtttattatgtcagcaaggactttaaaaatgaatataaaggaatgttattacaaaaggcagaaaagagtgtggaggaagattatgtgactaatattcgaaataactgctggaaagaaagacaacaaaaaacagatatgcagtatgcagcaaaagtataccgtggtgatcgactccgaaggaagtcagatgccttgagcatggacaactgtaaagaattagagcggcttaccggtctttataaaggaggatgaactggaatttttatttataccttttagcgtactctttattttttctgtaagtaagtttagtttcatcatgagagatgaaggggaaagatctgatactgaaaattaaactgaatagttggttcctgaaatcttggactgtttatgacctactggctcctttaataggtaactgaaaactaaaatggaatatttaagttacgcttctacaattattttcattttaaaagcttgcatgattcctaactaaaatgtcttgagaaaggattatcacacctgtagcaatttccagttttagtgattctccattttttcccttgtcatgtaaagatttatggaatgatcactttgtgtacatacaggttactgcttttttatttaaattcttttagtgttttgctccgtgagacacttcagtttaaattgatggaataaatgttatatgacacatttacgttttccttatcaaggtgtcaaatatgtggactttaaacaatgaaactttttcaaaaagaaaaaacaaaaactttaactttgtgtaaaatcttatagtattatcagcttagagggaattgatatttttaatattgccgttatattccaaaatatatattgagataaatgaactgatgtagaatatcattttgctatttagttttatgaattactatacatatacatgcatagaaatgaaatgctatactgatagattttaaagaaaatatgaggaaatggctataaatagtaaactaaaagggtcttcaacagtaaagtgcagttatgtcatttacaattccaatactttaaaggccaccaaattttgatgtgtatgtccttgaagggctgccaaaatttatgaagaggactcacattttcccccatagaaatttgcagtttcttggtgatcatttaagcaggatccaaagaagttcttctacaaataagtaataagaaaaatgaatactaaaatacagctttgtgccttttaaccttatgccaactcctaaacatgtaagtagattatagtatacttatctgatcagagcatgatctgtttggccacatgcaagtgtgagcagaaatagagcagcaggtagaatagtaacttaaagcaagtcctcctttaaaaatactgagctaaaatctattcaccattgagtaattgaattaatcctataggaataagctccttgtaagtaattccatattatgaattagaaaaaaaaaacag

SEQ ID NO: 263889 - DNA, 634 bp, Homo sapiens
agaaaaggacaaagtataggtggagtttctcttttttgccagttgttattacttaattacactatctttctggccataaaatgaacaaaaggattcattcacttgtctcgttaggtattaagcatcagttgtcgattcattcatttcacacatttcactagtgacactgaatactgcagagcctaagatgaaaggggaagcaattcacaggccgatgagaagatgcacgattgccattcaggtactgagggctgcaacagaggaagggtggtgagagcactaatgaattcttgctattttctgatcattgtctcatcctaataacagctccctggaaaaggtactattaatccctaaagaaactaaaattcagaaagattaaatgactttccctcacaattattttctatctgctacaccaagtggcatccttgagttttgcaagatgccctcagtgccaaggcatgagtccttaccagggaaactttctttctttctttcttttttttttttttgatggagtctcactctatagcccaaggtggagtgctgtggtgcaatcttggctcactgcaacctctgcctaccaggctcaagtaattctcctgcctcagcctctggagcagctggaatt

SEQ ID NO: 263890 - DNA, 495 bp, Homo sapiens
atgggtttagagtttaacgatttttcttaatctccatccagcctctggtgttgctaaataaagcttttcaaagacaggcttcctaagaaaaaaggtcctggggcacaatggaatccagtaagaaaaagttttggcttccagtgtcgcttccactacctaccttaagagtgtcagaaacttcaggaatcccactctgcttctttaagtctgaaacttcagttctcatatttatcagttaaaaagggtgttggtctagctaatatttaaggacagacccttccagttttaacactacataattctaagatgagtgatatccacaaactacataatcagacaccaggtgagagaaagttaacttaataaatatcaaattgaacattattacggctacttgaggtatgcttttctgacacactgaagttctttttcagggcaatccgatctgatagatgaaacccagaaggaaaacggtaaagaatataggtttactga

SEQ ID NO: 263891 - DNA, 344 bp, Homo sapiens
gccttcttagtagctgggattacaggcgcaagccaccgcacccagctgatatttgtaacttttttcatctactgcctatcccatgtgtcctttgccctaagccaggaccacatctagtcagggttctttccctggtaggatgtcctaagtcttcattcttgatgggtctgaatccctagtagtcctctttttttttttttggtagctacatagatatcgataaagaatcaaacaaaagaaaatagacttcagttaaagcaggaggcattggattaaacataagaaacaactatgggccagggccaccccctgcatcttggcctaaactcctctcaacccccaaa

SEQ ID NO: 263892 - DNA, 464 bp, Homo sapiens
agagttagagagagagagagagagagagagagagagagagagagagagagagagagagagagagagagagagagagagagagatcacaatatgtttattgattcactgttgatggacattaaggggtgttaccacttttggtgatcatgaataaagctgctataatgttcacatatggtctgtagtgtggatatatgtttttgcttttcttaagtaggtacctgacagtgggattgctaaattattggttagagtactttaacatttatatttaattgccaaacttttccaaagtgactatcccattttgcattcccaccagcagtttctccacattcttaccattcctaccaacctattctttccaaagtcttgtgaatgttctttttttccttccttcttacctgcctttggtccttctttctttttgttaaatttcattcattttacttggtgttcagtgg

SEQ ID NO: 263893 - DNA, 2104 bp, Homo sapiens
  misc_feature (883)..(883): n is a, c, g, or t
  misc_feature (889)..(889): n is a, c, g, or t
  misc_feature (1155)..(1155): n is a, c, g, or t
atatcataggtgtcaggtacccctgaaagtcttcataatgaacagtgagaactctcctactgggcttctggaatgttgggaccactctggtccaatgctactgtcgtttcctgtctggaaatgagagtagcttcttgaatattcttcctattcctactttggcttcttttaatctattcacaccattccatcagaaccacctgagggttttgtccaaaacacagctccgatcctgtcacgacctcttgctttaaagcccattagtagctttctgttgctcttgtgatagaaacaaaactccctgatacagcctacatggtcctgcattgtctggctcccacttccctttttcatttcttaccacactccttggcctctgcactagaggctcactggctgattgcaggcttgagaactgaccatgtttgtttctgccagaggcctttgcactgctgttttcttttcctggaatgtgcttccttccctatttagttaactcctagtcatcctttaatttattatttgagacggtcttgatctgtcacccaggctggagagcagtggcacgatcttgcctcactgcagcctcggcttcctgggctcaactgatcatcctcccacctcagcctcccaaagtgctgagattacaggcatgagccaccgtgcccggccagctcagtgaattttgtaaagcaatcatgttcatgtagctaccactcaattaaaaaagtactggccaggtgtggtgattcacatttgtaatccaagcactttgggaagctgaggcaggaggatcacttgaggccaggagtttgagaacagcctgggcaagatccttgtttccacaaaaaatttttaaaaaacccatctgagcttggtggtntggacntgtggtcacagctactcaagaggcgttcttagcccaggagttcaagattacagtgagtgatcattgtactccagcctgggggacaaaagtgagaccctgtcttaaaaaacaaaaattaagataatacctaccagcaaaaaccagagggaagaatacttttaaaattagaggccgggtgcggtggctcacccctgtaatcccagcaccttgggaggcctaggtgggcagatcacctgaggtcaggtgttcaagaccaggctggtcancatggtgaaaccctgtctctactaaaaatacacaaattagctgggtgtggtggcaggcgcctgtaatcccagctactcgggaagctgaggcagaagaatctcttgaacccgggaagcggaggttgtagtgaaccaagattatgccattgcactccagcctgggcgacagagtgagactttgtctaaaaagaatataaataatattagacagttgtcttatggagatacaatttacattttaaaaaaactcatagttttttttttttttaggcagtcttgctctgtcacccaggctggaatgcagtggcgtgatctcggctcattgcaagctccacctcccgggttcacgccattctcctgcctcaacctcccaagtagctgggactacaggcatcccccaccacgcctggctaatttttttttgtatttttagtagagatggggtttcaccatgttagccaggatggtcttgatctcctgaccttgtgatctgcccacatcggcctcccaaagtgctgggattacaggcgtgagccaccacgcccggcaaacccatacattttaagtgtatacacagacaattccactctctgatcaaggtatacaacattactcttacctcaaagttcccttgttgccagtcaactctgcccttccctccagagtcagagcactattttgatttttttgtaatttagttttcctgaatctagaacttaaggaaacatacagtagatgtgtgtgggggcatgatcttaatataaaatactagatggaagactggaaatacagatcagactattataacaaaataacttggacattatattcctttaaaaaaactttgcccccaatccctaaagaatgttggttcttaaggaagctgaggcaggaggatcacttgaggccaggagtttgagaacagcctgggcaagatccttgtttccac

SEQ ID NO: 263894 - DNA, 585 bp, Homo sapiens
atatcataggtgtcaggtacccctgaaagtcttcataatgaacagtgagaactctcctactgggcttctggaatgttgggaccactctggtccaatgctactgtcgtttcctgtctggaaatgagagtagcttcttgaatattcttcctattcctactttggcttcttttaatctattcacaccattccatcagaaccacctgagggttttgtccaaaacacagctccgatcctgtcacgacctcttgctttaaagcccattagtagctttctgttgctcttgtgatagaaacaaaactccctgatacagcctacatggtcctgcattgtctggctcccacttccctttttcatttcttaccacactccttggcctctgcactagaggctcactggctgattgcaggcttgagaactgaccatgtttgtttctgccagaggcctttgcactgctgttttcttttcctggaatgtgcttccttccctatttagttaactcctagtcatcctttaatttattatttgagacggtcttgatctgtcacccactgcatttcagtctggaggacagagtgagaccctgtg

SEQ ID NO: 263895 - DNA, 2282 bp, Homo sapiens
  misc_feature (883)..(883): n is a, c, g, or t
  misc_feature (889)..(889): n is a, c, g, or t
  misc_feature (1155)..(1155): n is a, c, g, or t
atatcataggtgtcaggtacccctgaaagtcttcataatgaacagtgagaactctcctactgggcttctggaatgttgggaccactctggtccaatgctactgtcgtttcctgtctggaaatgagagtagcttcttgaatattcttcctattcctactttggcttcttttaatctattcacaccattccatcagaaccacctgagggttttgtccaaaacacagctccgatcctgtcacgacctcttgctttaaagcccattagtagctttctgttgctcttgtgatagaaacaaaactccctgatacagcctacatggtcctgcattgtctggctcccacttccctttttcatttcttaccacactccttggcctctgcactagaggctcactggctgattgcaggcttgagaactgaccatgtttgtttctgccagaggcctttgcactgctgttttcttttcctggaatgtgcttccttccctatttagttaactcctagtcatcctttaatttattatttgagacggtcttgatctgtcacccaggctggagagcagtggcacgatcttgcctcactgcagcctcggcttcctgggctcaactgatcatcctcccacctcagcctcccaaagtgctgagattacaggcatgagccaccgtgcccggccagctcagtgaattttgtaaagcaatcatgttcatgtagctaccactcaattaaaaaagtactggccaggtgtggtgattcacatttgtaatccaagcactttgggaagctgaggcaggaggatcacttgaggccaggagtttgagaacagcctgggcaagatccttgtttccacaaaaaatttttaaaaaacccatctgagcttggtggtntggacntgtggtcacagctactcaagaggcgttcttagcccaggagttcaagattacagtgagtgatcattgtactccagcctgggggacaaaagtgagaccctgtcttaaaaaacaaaaattaagataatacctaccagcaaaaaccagagggaagaatacttttaaaattagaggccgggtgcggtggctcacccctgtaatcccagcaccttgggaggcctaggtgggcagatcacctgaggtcaggtgttcaagaccaggctggtcancatggtgaaaccctgtctctactaaaaatacacaaattagctgggtgtggtggcaggcgcctgtaatcccagctactcgggaagctgaggcagaagaatctcttgaacccgggaagcggaggttgtagtgaaccaagattatgccattgcactccagcctgggcgacagagtgagactttgtctaaaaagaatataaataatattagacagttgtcttatggagatacaatttacattttaaaaaaactcatagttttttttttttttaggcagtcttgctctgtcacccaggctggaatgcagtggcgtgatctcggctcattgcaagctccacctcccgggttcacgccattctcctgcctcaacctcccaagtagctgggactacaggcatcccccaccacgcctggctaatttttttttgtatttttagtagagatggggtttcaccatgttagccaggatggtcttgatctcctgaccttgtgatctgcccacatcggcctcccaaagtgctgggattacaggcgtgagccaccacgcccggcaaacccatacattttaagtgtatacacagacaattccactctctgatcaaggtatacaacattactcttacctcaaagttcccttgttgccagtcaactctgcccttccctccagagtcagagcactattttgatttttttgtaatttagttttcctgaatctagaacttaaggaaacatacagtagatgtgtgtgggggcatgatcttaatataaaatactagatggaagactggaaatacagatcagactattataacaaaataacttggacattatattcctttaaaaaaactttgcccccaatccctaaagaatgttggttcttaaggaagcagtgtttgttctatcagaatcctattatcactccttggacttagttggtaaagtaacagaccttatgaaaaggaacagtcgattgctctgtggatgtggccccatgtatcccactttgatttcccttaaacttttttctcaccacaggaaagtaaaacaggattcaaccccaggaggcagaggtgcagtgagctgagatcacgccaactgcactccagcctgggtgacagagggagactgtct

SEQ ID NO: 263896 - DNA, 427 bp, Homo sapiens
cccagctactcgggaggccaaggcaggattgtttgagttcaggagtttaagaccagcttgggaagcattgtaagacccctgtctctaaaaaacaaatttttcttttaaattagctgggcttgctagtgcacacctataagtcccagctactcaagagactggggcaggaggatcacttgagctcaggacaagagttggaggctgcagtgagctatgatcgcaccactgcactccatcctgggcaacagaaccagaccctgtatcaaaaataaaaaagaattctcagaaaaatgagtaacaaacatacagatttttgtttgtttgtttttgtttgtttgtttttttgagacagggtctcactttgtcacctaggctggagtgtagtagcaccatcttggctcatgctcctcctgcctcagcccctcaa

SEQ ID NO: 263897 - DNA, 430 bp, Homo sapiens
acaggtctcactgtgttgtccaggctggagtacagtgacgtgatctcaactcactgcaacctccgcctcccaggttcaagtgagtctcctgcctcagcctcccaagtagctgggattacaggtgcccgccaccacgactggctaatttttgtatttttagtagagacagggtttcaccatgttggcccaggctggtctcaaattcctgaactcaagtgatccgcccgtctcagcctctcaaaatgctgggattacaggcttgagccaccgcgttcggccataattatccttttttaaaaaagtaattttgttttgttgagcccagatctttctctatcacccaggctggagtgcagtggcatgatcacggctcactgcagcctcaatcttcccagctcgtcgacgcggccgcaatttagtaatagtaggc

SEQ ID NO: 263898 - DNA, 613 bp, Homo sapiens
cagattcagagtggggaagagtaactaaatatgaatttagagctgagcaggggccaggtcttatatggttctgtttatcatagtaagaaatttggatttttcttttccaagagtgattgaaagccataatcaaaaatatgtttttaaatgatcactgtagatgctctgtgaagaatatactaaacaggggcaagattggaagtaggaagatcagttatcaggctatttcagaagtctagattagcagtgaaggtagcttggattgggatggtagtggtgaggggtggtaagaagatgctgtattcatcttatgatttgaaagtagagctaacagacatgccatggggtatgagtcaccacgaatcctagcggccaccccgctcgtgttctaatttgccgctcttctccaggcaaaatccttggttgagggaactccgccctattacgctatatattcaaatccccctgtcctcaaattccctttctacacccacgtcgctgggtttccaactgggtgtccccccatcttcccggctgtcccccttggcctctccccccccactgcccttctaatcttttccaccccccccctcacttttccccccccttcccc

SEQ ID NO: 263899 - DNA, 857 bp, Homo sapiens
gacaattccaatacctccacacaggacactagagtaagaatccttcacagttagaacgcagtgctgtgcggaggccttaacttgagttctgttttgcacctggatttaccagcacatcaaagctgcttcgcaagccccctcatcagcagggctcatgtgggggagctgctgatggagtcctcgctgctcatgcccacagccctcccagagtgctatgcgagtggctgccgtgcagttgggggtggggcgtggtgtttagacacagataggagtccagggtatgactgatggaggccccggcccacgtgaccagcaaggtcagaggcccagccagattccatcctgaggaagcaagtgaattctcagaggaagtggtctgtgtctgcatgaactgctctcaaaccaacaaataggcttctcttggcaactgactcgtgacaaagggttcaagattgtttgaaaaaaaaaaaggggggggggggacagggaggcagtaggtcctggaaaagtaaattctttattttacaataagaaagtgattacatattttatttttttttataatggtggaaaattagaagtgattgtgaaaatgatgtctacccgccttgctgatgagtaggatgtgatttggctctttaggaaactgaatttgcagaactgaagaatattgatttataaagggcatggccattgacccagtccatcttatgcaaatctggatgccataaataatatttaaaaatgaaagtattggggtggaggttgcagtgagcggagatcgccccactacactccagcctggtcaacagaaacaaaaaaaacaaaaaaaaaaaaaaaaaaaaaaagaagaagtc

SEQ ID NO: 263900 - DNA, 425 bp, Homo sapiens
gtgcaccttacgtgtattgatttttgtctctgcctgtaatttctctccttctaaaatatgtaaaatcaagctgtaacccaaccgcctcgggcacctgttctcaggacctcctgagactgtgcctttggccatggtcactcatagttggctcagaataaatcccttcacatattttacacagtttgactcttttttattgccaagcctctgtttataggttgatacttgtcccatgcctcctgccctcacctgacaatcactgctgccctctgccctggggcctgggttcaggggcagggaagtcagagttgggatcaggtgcctggcatgttgaattgcacagcagggtcctgagttcctgtctgcatctgtcctcaccctgtaagcatccatgtccaagggagagtgacatcaaatagcaaatt

SEQ ID NO: 263901 - DNA, 445 bp, Homo sapiens
ttctgagatttctttttatgattcttaacatctcaggtttatttttgatttatatcacattatccaggtatttgagttcaaaccttgtttcaacttcttctgtaatggctttcagtacctgtttctttcctgcatgttccatattgctacaatctgttttaagcattcataaccaaatcactctaaaggtatgtaacttgacggagacaagactgaagacagggagactaggagtcttaaaaccgagcatgttgtctttagacatttgtgtctagtaccctatgtttaatcttatttacttaatcttactgctaatcagcttttgactgctagttaatttaatctcctgatattttttcccatcaaaattactaggcgttttttaattgtaaagtgactttaattagattatcccaatatatatcctaataaagagcttggcaga

SEQ ID NO: 263902 - DNA, 436 bp, Homo sapiens
tcatacctccttccttccttcctctctgccttccttccttccttccttccttccttccctccctccctcccttccttccctccctccctccctccttccctccctctcttccttcctttcttgctttcttccttccatccatcattcctttgctttctaacttcttcccttcgccctccttgctttctacttatgactttatgaatgcaaaagtatttgtagaagaactaaacatttattacaggataaataatatgcagctaactaaaatgaacccaaacatataatgacacatttaaaataatatgcaggcctaatggcaagttatatttaatagaaccaaccattatataacatgtaaatattatctatataagatccatcaatatcttgggatgagtatttcagcctattttaatatatatttttctttgta

SEQ ID NO: 263903 - DNA, 911 bp, Homo sapiens
ggaaatgtgggagtgagcaatataggtatgggaagagcattctaggtagaggattaggaagagcaaaagccctgaagcaggactgtgtctggcctctgaagaaatgcaaattgttcagggttgttggacctgaaggaagaggaggaaaggaataatgaggccagaggggccagatcatgtagggatttgtaggttgttgtaaggattttggttttcactaaatgaatggtgaaccatttcagttttgagcagaggagttccatgatctgatttgaattttaaaagatgtgtttcccaaaattcctattcctttcatacagctgctttcaatgaaggtttataaggaaagcaatcagaactacttggataaggtataagtgatccacaatcttttcaactctaccataggtatctacatatatatgttgagagatgctgctttttggccaaaatgaatcttgaattgggggtgtgcagaaaaagttatatctggcctgaggctggtatcttttagagtggcctacttgcatggttggcccttatctgaacacgtggatttaggggtattctcactgttcactaataaaggtggttcactgtacctagactgttcaaacaagatgatttatgctaaacacctgctttccttctgggagtatggaattttggtacatgccaggtaaaggatgtctatatgaccaaactcccaatgaaaaccttgcatactgagtccctaggcagaaacatccctcgtataaaaatgtgctctgtgtgaatcttcatgggagggagagatcctaaagaagcctgcacatggattcctccagattctgcttatgtctttttcctgtatgatccaactgtgtacacttactgtgtcactgtaataaactttagccatgagtacgata

SEQ ID NO: 263904 - DNA, 339 bp, Homo sapiens
gaagagctttctcatgaatatttgttcagcatcattctcaaaatgttttatatattgttcatatttacagaagtatattgatcgcccagttaaattatcttgcaaacaaccaaaaatgtcacgtaagcccagaattttttcacacattctagaatcagaaagctttttttctggcacaatcttcttgtttatcctcttattttatatgttccttccactatttaaggttgtcttataggttttctatgtatttacttgtatatattcctgtctttctgtgacttctggttgatatgtgaaggcccttaataataaattcaactttgttttttaaactgg

SEQ ID NO: 263905 - DNA, 425 bp, Homo sapiens
caagtcttttgtaagtctaaaattattttaaaataaaaagttttttaaaggtctctgtgaagtggctagctcccagtaggcacttaatgaatgagaggtattataatgataagcaaagacattgcttccaatagtgttagtaatcaaagaaatgcttcttggtggaaaagacagagccattagttggcaatgctgtgcagcagaaaccattccagccacagatattacatgaccgtgggtgaaatatgttataaaaactagttctttatccttgaaggggcttctgggaattgaaatgtgcagttgtttatgtgttcattatctgccctttgttcatgggctcgagttggacttctccctgatagcattggtttccacagctgtgccattgaataaaccttgagtttggacctgttaaaaaagaa

SEQ ID NO: 263906 - DNA, 439 bp, Homo sapiens
ctgcttcagcttaacattattttcaaaccaacaaacatgtcccgcaaacacatatatttaaatgacatgacatctgtgtgggctggagtgtttttcccgcctcagcggcagccatactactacaccagtccagatctgtttgcagagctgccgtgttgtgcagtccagaggtgctgctgctgttgtattctgcatggaggtagtcaacaagacagccctgcttaattatgaaatgtctgtagcaccctgtgtacgaaggtgtatagaagtgtatagaaagcacccaaaagagcagcagcttggctgggcctggtggctcacacctgtaatctcagcactttgggaggccaaggtgggcggatcacttgaggtggacggatcacctgaggtcaggagttcgagaccagcctggccaacatggtgaaaccccgtctctact

SEQ ID NO: 263907 - DNA, 668 bp, Homo sapiens
tgaagacccgaaaagggtgagcagacaccattcatgaccccaaacagcaagaggacagaagtctgcaggatgctcagcaggggcactccctgaacacgcctgctcccacagcatgtgcaaaggcttcacacttggattgagggttatacatttcttcatggacatccccaaacaacacagaacagagacaaggtttctggtccttttggaatgtccacaccattcccattcttcaaaatctgtcacacttccagatagttccagtgaacaatgaactctccccctatgcagtaacagttgattattcaatttaacactgaattatatattctctggaactgttctctaacaactatgaggcgttttcaacggtagttaaatggaaaaataccaaactgggagtaaaaagatctggcttccaggccaggcgcggtggctcatgcatgtaatcccagtactttgggaggctgaggcgggcggatcacctgagctcaagagttcgagactctgtcttaaaaagatagatagatagatagatgatagatagatagatagatagatagatagatagatagatagatagatactcatattattttattgtttaatgaagcagaagtcatttaagtcttgaaaaaaaacgacaacaaatgagcggccgcaagctt

SEQ ID NO: 263908 - DNA, 400 bp, Homo sapiens
cttgatctgggagctggttatacggtgcggtcaatttgtggatatttatctggtttatctacttttttttgcatgtatatttcaataaaatatttttaaaaaacattcctctcctgatgacttagtggagaaaatctcagcttgggtttgacttaacttgaatgcttcttctaaattgtctcatctttcttaacttgggaagagtgtgccagcttcagaagcttcagcaggcaacagtatccagctcgaatcaaataacattgtcttgttttcattgtgttttatggttaccatctatagatggccatcaatactacatttccatttatggtagtgatatacaatttcttttaaaaatgatcgtaagcaaaaaaaaaaaagagtgaattgccttacttta

SEQ ID NO: 263909 - DNA, 397 bp, Homo sapiens
tcaaagtgaaaagaaactcccagtgagttatatagtgcacagtgcctgtaagatgaaaaccagcaatagctccagagtccaagtcctcttacaactaagactgaaagcacgtctccccaagcattgcatcaggacagacccagtaccgtggaaggagcactgcccatggaacagggcgggggctggccacactgttccttctccttctctgcagcacatgcctcacactcactccaaacccaggtctaggcagagcaggcatggggcaagagtggccagggcaatggccaatggcccagggcaccagccagagctgggttcagtttcacgtcttcaaagcaaatatagccatgagtgtttgttgagcaaaatggttctattatgaaggctgctgacc

SEQ ID NO: 263910 - DNA, 311 bp, Homo sapiens
cttgccagggagaagtcataccgatgggcgatacccatactgactgctgctatacccagcagtccctggtcgcccccagaactcccatcctctgaccctgtgctgccttgcagcccctcagccccccatgcatgccccccatgcatgcccccaccatccctgcagtgagaccccgcagcctcctgagatgccaggtaagccatgcacagccaggtgctgtgcctcagaacttgctgcaaagctacttatgcaaggcgggggaagccgtcctgggaggctgtgcaggtgagcagccaataaacaagtgaaaa

SEQ ID NO: 263911 - DNA, 595 bp, Homo sapiens
atattttacatgagtaattcaaatattacatgagtaattaaagaagtacaacttattgcaaccctgagggccattgctaataaatcgagacaagtttttttaaatggtagaatccagttctataaagggagtgtttttatatgttttgattagttattttacttggtaaaactcttttagaaagtaattaggcgatgtatgatgactctttaaaatatactaatatgccctagtattaatacttctcacaatgtatcctaatgagataatctcagatatggaaaaaatattttatgcacgagcatgttcatctcaatatatttgtaatacttaaaatttaaaacagcatgaattcaggtaagatgttaaagcaaattatgataacatatttgtacttgatggcctattactgaaatgatgcttgccaagaatttaagataacacatggaaacgtttttgttatgatgcatgtaaacaaggcagtctatgaaatgaatgcatgtacaatataaaattatgtagagcctccctttgtatctgtctgagctaaaaaaattatgcagagcaaaatcatgagataaaaaaatcagaaaag

SEQ ID NO: 263912 - DNA, 444 bp, Homo sapiens
atttaatgctacttttcgcatataaagtcattcttctcctaaataaaagtttctatgattttgttcaggaatcatatttaaccagttttcaattttcctatgaaaccagaattaaactgcacctaatttctgatcattttctttcttaatttgtgtaatttagaaataggtatgacgggccaggtgcggtggctcacgcctgtaatcccagcactttgggaggccgaggcaggcggatcacgaggtcaggagatcgagaccatcctggccaacatggtgaaaccctatctctactgaaaatgcaaaaattagctgggcgtggtggcacacacctgtagtcccaggctgaggcaggagaatcacttgaacccgggaggtggagtttgcaataagccgagatggcgccactgcactccagcctggcaacagagcaagactccgtct

SEQ ID NO: 263913 - DNA, 478 bp, Homo sapiens
actccctatgtggtttgctttgtgtttctattggacaaagttggtctagacagtacaaggtgtgaagacaccgccctctgctggagaagatgctggatttttatttcacctacaggaagagacgtctaagtagcaattagatgctaaactaatgctgcctcaggaaagaatcaaaagagaaagagtgaaaccaggccgggcgcggtggctcacgcctataatctcagcactttgggaggccaaggcgaggggatcacgaggtcaggagatcgagaccttcctggctaaccccgtctctattaaaactacaaaaaattagccgggcatggtggcacgtgcctgtaattccagctagtcgggaggctgaggcaggagaatagcttaaacccaggtggcggagggtgcagtgagctgagatgtgccacagcactccagcctgggcaacagagccagactctatctcaaaataaggaaaaat

SEQ ID NO: 263914 - DNA, 289 bp, Homo sapiens
ctctggttacccttgctgctcattatatgctaattataacacactagcaggcaaaaaggcactcccaccagtgccatgagggtttacaaatgccatggcaacctggcaccccaatccccacccccaataaattacccggaaaactcatgaataatccacactttgtttagcgtatgatcaagaaataaatcataaaaatagccaaccagcagccctcaaggctgccttgcctatggagtaggcacgtttttattgcattactttcttaataaatgtgtattcactttac

SEQ ID NO: 263915 - DNA, 418 bp, Homo sapiens
ttagtagccctaggatttctgaagaagccatgtgaatcttgttgtaagtaaaaagcatttaatttaataaagactccaataggctctgttggaaatgacatgtctgagacatataatggaaactttgtctcaattcattgctgtacattgctgttttttttgtaatgtgttggtggatgattagggaggcattagaatgtgaaacaacatgagtaagtatcttaaatacttctcactgttcttctttaagaatgaaaataggtctttcttagccaggtgtggtggcaggcacctgtaatcccgctactcggatggctaaggcaggagaatcgcttgaagccgggaggtggaggttgcagtgagccgaaattgcgccactgcactccagcctgggcgacagagcgagactccatctcaa

SEQ ID NO: 263916 - DNA, 506 bp, Homo sapiens
gcatgtaatcatgtacatgtatgtctttgttttcatcctaactcagtttaattgtttagagatcagtaactatatctcacatatctgtgttttctccagggtctagcacagctttatgtacattaaattttcagtaattgctcattggttgagctcaaagtgatttttggcctcaagcaaggattgataacaagctccatccatttttcctccaacatgtcgagtctacatatctgttccaatgttcctacaaagcatataaacatatactctaaaacatacgatggtacgtttctgtttattctacacttgtttctgtaactttttaatacaaccatacatgcagaaccaactaattcttctggtaactacataaaattctatggtatggctccatcacaatttaatcataggcatacctcatttggttgtgttttgctttattgtgctttattgtacagataatgcattttttaaaataaattgaatgtttgttgcaaaaatgt

SEQ ID NO: 263917 - DNA, 469 bp, Homo sapiens
ttggtcatagttgataaatctttttctatattgctgaattctgtctgttaatattttattaaggattttctcatctatattcatgagggttattggtctatagtgtttttgttctgtctttgtctggttttggtatcagggtaataatcaactttataaaatgaattggtaaatattccctcctcttctattttctggaagaggatgtgtagaattggtgttaatttttctttaaacgttttgtagaccctcctgtgaaaccatctggccctgaaatgtctttctggggagcgtttaaattgcaagttcaattcccttccttggcatagggctgttgaattatctgtttcatgctgggcatgttgtagttcgtgttttcaagaagtggttcattttgtctaagttgtcaaatttatgtataacttcaataatacgttttaaataaagaatccattatttttccttaatt

SEQ ID NO: 263918 - DNA, 411 bp, Homo sapiens
ttttttagaatacaagaatatcaagtacatgtcctgttagctatcattgtgatgaaattatcacatatcatataacctcttgaaaggtacactgtacacttgtgaaagagtgagaatgagaaaggtaaataacgtcttgtgaaaatagtttcaactttacaaagctcctgaaaggatttcggatggcccggggctccctggatcataggttaagaattgctaagttaatacactgacaaaaatggaatgtaccagtaacacttatctattgtaaacctgtatcaaataatatattaaaatattttgtcatagaaatctgttcaaaccctagtttttagccatcacatatattttcttcttttacatgagtctagtctttagatgtattaaaagattctgattaatacattt

SEQ ID NO: 263919 - DNA, 641 bp, Homo sapiens
catgttgctgccagagtaatcctcttgggtgtgagcatggccctttcatgctcgcactactggacatattaccatccattcaccccggtcttgtttattctactttagccacactgaatcttctgatgtttcttgtgcactagttacacgagaggttacataagattagaataacattgttgtgcctttgctgaacgctgttcccttcacctttctctcctctcttcacagaccccaaacctatttgccttttaaggcctggtttgaatgttgacttatccatgaagtctcctctgattgcccagctggagggaatcttctctttcctgagctcctgggaaactttatgagcaatgtttttggtggggatttgggagagcaccatctaccacagatgactgtcagctcccctggcccccgactgtggcctcttagcataacctgtacctgtcacaatttttatatgcatttgaatgatgacttgttgaaacgtattctggaaacttttgaattcaggtgtttacctgagcaagatactgatttggggttcatgacttgcttgccccgtgtcctctgtgttgtgctggtaatttccttccttcctttggctaagtcacttcttgtgtccatcactctcacac

SEQ ID NO: 263920 - DNA, 389 bp, Homo sapiens
gtatctaaaataaaaaaaaaaaaataccgaatgtgcttaacctcaagaaagatcacagaggaaagagccagtacactttaagatacatcagtagaaatcatctagtctgaaaaacaaaagcggggagaaagattgaaaataaaacggccgctttaggatgctaaatgttagggtaatttgttatgtagccgttgatagctggaataattcctgtgagacatggcgcagaaccaaacgctagacaacttgcacttttagtatatgggcgcaccattttggcaatcctcatcttcaggagagtgagactactgattccccccttgggaaattactggactgatttttgcaaaagaaagttgatagcgaataaagcactttacctttttaat

SEQ ID NO: 263921 - DNA, 243 bp, Homo sapiens
gaggatgaggcacgagaatcgtttgaacctgggaggtggaggttgcagtgagctgagatcacgccattgcacttcagtctgggcaacagagtgaaactctgtctcagaaaaaaaaaaaaacgattaaaaatacctcccacacttagctactggtgaacatgctccaccaaaataaatagtaatgaatatatggcatacaggatatctgaccaagagagagtagagcacatttcccatgtggga

SEQ ID NO: 263922 - DNA, 556 bp, Homo sapiens
tcaccgactctaacacaggcaggggcccaagaggactgcatctccctgcaggtagccagggagggcttccctggaaagcagacccttgagagtggacaagggccggtcacaggtgggagaagaggatggcaccgtaggcacgctgaccatggaagcatcctggagggagcaggaggcagaacccatgggatttggaagtcaaatgagtggggagagagacgggtggactaaggcatgtggtccggtattgatcacagtgagcccgagacaccctggaacacccaggagggctcctgcacgtgccgtctccagattctggagctgtggagggtgttggagcagccgaaggaccaggaggactcacggaggacgcgctgccccacccgctcccactgcccacttctcttaagcccttcaactgatacagatgctggccctttaacacgctttgcaaaaccttcacccagcccatttgtgccattattttaggtgtgagagttgtctttggcccaaaggttgaaatgtttatatagttaaatgaatcttttcttcatta

SEQ ID NO: 263923 - DNA, 231 bp, Homo sapiens
cagaaggtggggactgatcagctaccctatgcagacgggaactgaaatgaaagcactggaagacaggcctgaggagatgctgccctggacccagagacatggttcccaggccctgggctctcctggtctggtcacctgcgcccgcctggcactgacttccaacacagagcacatgccccacgcacgtttcctggacaagacactggaagggggaatcagggccccttgtag

SEQ ID NO: 263924 - DNA, 476 bp, Homo sapiens
cattattttgcatctatgttcataagtaaaataggagtttttttctttatgtgactaggtatcaacattatattggccttataaattatgttgaacactttgcctattttttctgtttttccagggcaacttgtattgtaggaatcatcaggcaataagatgcagggaaaactctggatactgcatacccaaagttgaatacatttttcttctttttgaaacttttaatacacataaagacaagtgcacgtattataagtatatagttcagtttatttcgacaacctgaataaacccatgtaatcagcacccagatcaggaaacagaatctggaagcttccttgtgtccccttccaaccactatttcccctcaaagttaatcctgacttctaactgcatagatttgtcttgtctatttttgtactttatataactagaataatagaatagatactcttttgtatctgtctctctgg

SEQ ID NO: 263925 - DNA, 222 bp, Homo sapiens
actagttagtgacagtgtcagttgaaatacagggcccctaacccccagtaaagtactgtttacatttatcctctactgaaaattattcctaaagctggtggccagatgctaaggttgaatcttggtaatatgatgaggcatatgtccttcttaatctcctcttaagggaaagacctttggaaatggaccatgtagggtaaaataaacatatatattcttgac

SEQ ID NO: 263926 - DNA, 557 bp, Homo sapiens
cttctccatgtggccatcagcctttagagcagttaagtaatccatatgttgctttactcttttgtttgttcatccactcaacatttattaatttattaatgttgaggggatgaacacacagtgcctgtctctgtgctgactgtgctgagggctgagcacacaaaggcaaattagccacacagcctgctctcaaatagcttactgcctttcaaggaagagcagacataaaaaagaaatcatgcttgcatttaggattaaatggttggatgatcccttaggctggggtccccaaaccccagggtgcagagtgttacctgtctgggctgcacagcaggaggtgagctgggggcaagcgagcagtaccacctgaactccgcctcctgtgagatcagtggcagcattagattcttataggagcgtgaaccctattgtgaactgtgcatgcaatctagggatctaggttgccccctccttatgagaatctaatgcttgatgatctgaggtggtacgctttcatcctgaaaccattctcaccacatcccagcccatccattaaa

SEQ ID NO: 263927 - DNA, 500 bp, Homo sapiens
acaggcgtacacccagaaaaacagcttgagagaagagccagagccacagccagatgctcagtcaggaagtatccacaccactccaaacactgccagagacactgtcagacacacagtcagacacactgccagagacaccgttataaagactgccagagaaacagccagacacacagccagaaaaactgacagagacgcagtgccagatacaccccgagaaagtgccagagactcagctccagacagtgcagacatagcataacagagacaaatgtgggtatcagcctgaagcagctgcggagaggctggagagcaatggacttcctggggcttcctgtgggagagggctcctgcctgccttttgctacccttgaccctctccaggaaagtcccctcctctgagcctgcttttcctttcctccctgtcacagccacaggtgccctgactgcccctccctggcacagtaaatctctctgtgtcctaagtggccccagctacc

SEQ ID NO: 263928 - DNA, 693 bp, Homo sapiens
gtggatttctatttgctgtggcttgctggggattgaagggattatggttgatgagaggtttgaaattcaaccagtttattattagtgggggcacatgaagtttgaaaatcttggttgtcttgatctgtcttttttccttttcttcctttaatctttccctccttaccccttccctcccctcccctacccttcccttccctttaaatgtaaggggaaaagggcacactggtcagaaatgcaatgagctagttgttggtttttgtcacaattattcatatgtccacttctattttttcccacttgatagttaaaccaaacatctagtttttactgccttctcaaagtacataattcatttaggttcagtgtacttattgagtgacttatgtgcaaagcattgtactaggtgttctagtactagtgtaaagagtaattcacattaaaatggaaagatgatgactgagtgaacaaaatttgggatgtcttgcctcttgtgtttttcacgtagatgttgcttacttcaaatgacatgaacaaaggtcctcatgtaaagctggaggaaaaacaaagtcaattgctttaagctatggttggtagttggtaattcgtaacactaattacagctgatacgaagactacaatagatttgttataagtacctataattcccctttatcaggcttgaattatatt

SEQ ID NO: 263929 - DNA, 1488 bp, Homo sapiens
aatttttatcctcaggagtgaataaaatcatgtagggaaagagtgttcatagaaaagcaaagaggaccaggtatatctctggagttttccagcatgtttatgggtctagtcaaggaagaggagccagccaaagacatgaagaagaagctgccagtgaatgtgagataggagaccagcctggaggaggaaatgtttcaaggaaagcatggctgtgctagttgctgctgaggaagggatcaaggaaaatgagacagagatttagccttagcaaaccattgctcattggcagcctccataagatctgtttgactggagtgatcagatgaaagcctgatgggaatgagttgtagagcaaataggaggtcaagaaagtggagacaatgcaaggcatataataactcttctgaggactttccattgaaaagagaaacaaggtggtagctggagaaaaaataagtattatttttagatgggtaataactgagatatgtttatatctcagagtgattctgtttctgcagttgatatcagtgaccattttaagtctcttaaaatactttcatccgtaatttctgttacacaacacttaattgcttctcttcctacctgggctggtttattctgtccttttgctcagtcacctactctccaagagatgactaccatgtatagttgtgcaggttgtaaatggtaggaacataagcggcacagtttacaccaactaccttgtaaattgtgtctccagagtcataccgtgcacacttagtctaactctatgagctgacccttattaccagccccagaacacaatttttatttgaagcacatggaaacaaattctatgttggtgttgtgggcctacagtaagtagtggaagcgtggttaaccaatcctgaagctacaccacagtagcaataatactatacctacagaagaaaaatgaatcagatgcagtagaaaatgttggattcctaaaaaatgtccacccccaactaaaatcattgtcaaaaataataaaacaacaagagcttttctccctccatttaggcttcattttcaaagcaacaaactgaagtataggtagtaaatttctacattgagagtcagtttgcaagttggagagaaagcactgcaaatccaccctgcctgttcaaaacataagaagcaccagttaaaatctacctatattagggaaaaaaagaaaaaaaaacttcaattaacaacttgactaaatgaaacaattgaaaaaaatagaatgttccttacacattacaacatggatgaatctcaaaacagctatcctgagtgaaaagtcagacaacaatataatttatactatatgattacattatataaattttagaaaatgcaaagtatagtaacacaaagcagatcagtggttgcctgtggggaggagaggggcagcagaaagggattaccaaggggcacaaggaaacttttagggtgatggacatgttcattatcttg

SEQ ID NO: 263930 - DNA, 739 bp, Homo sapiens
tgtttgcttggggatctgatcctgtagtgatgaccattgagaatgttgctgtgcgttcagccatgcaccgccatgggtgttcactgggctttctgacctctcgtggccttctttcgtccttttgatggtatgggcttcctgtttccagaaacctcatctctctcaagaagatccttgatgtgctttgagatttcacagggtggctgctagagagacggcccaagctctgaaaacactggcccaggccgcccgtggagtggctgcatcgacaaccgaccccgcggccgcccatgccatgttagattctgctcgagacgtgatggagggctccgccatgctcattcaagaggccaagcaggccctgattgcacctggagatgcagagcgtcaacaaagactggctcaggtggctaaagccgtctcacactccttgaataactgcgtaaattgcctccctgggcagaaggatgtggacgtggccttgaagagcatcggggagtccagcaagaagctgcttgtggattcgctacctccaagcacgaagcctttccaggaagcccagagtgaactgaaccaggcagcagctgatctgaaccagtctgctggggaagtggtccatgccacccggggccagagtggagagttggctgcagcctctggaaagttcagtgatgattttgatgaattcctcgatgctggcattgagatggctggccaagctcaggtgggtgtggaggtg

SEQ ID NO: 263931 - DNA, 893 bp, Homo sapiens
tgtttgcttggggatctgatcctgtagtgatgaccattgagaatgttgctgtgcgttcagccatgcaccgccatgggtgttcactgggctttctgacctctcgtggccttctttcgtccttttgatggtatgggcttcctgtttccagaaacctcatctctctcaagaagatccttgatgtgctttgagatttcacagggtggctgctagagagacggcccaagctctgaaaacactggcccaggccgcccgtggagtggctgcatcgacaaccgaccccgcggccgcccatgccatgttagattctgctcgagacgtgatggagggctccgccatgctcattcaagaggccaagcaggccctgattgcacctggagatgcagagcgtcaacaaagactggctcaggtgaggctaggaatgagaaattgtggttgtcatggtcatcattaacgtggacatgtggtcgggctgtctcctgggcacttttccctgatatgaacactgacacagcagatgttttcagaaacttccaaaggtcataacgatgctggccatacatgatactcacttttgtaagtcttgcctagtattctccacagtaatgtgtgatctgcttaattcacagtcagcagagggcatgggggcctttgaattctgtccttgggagtttcagagccaggacataacatgcttgttttgggcctatgtgtgctgagctatattgctgttccttgccagggaatgaggtagatccgctagggctggccactcagaagttttcaaccctggcgctctattacttctttaaatgattcttcgactgcctgatggaaccagttggctaaggagcatccaggcagagtcctggacgtggggctgggaaggagatggc

SEQ ID NO: 263932 - DNA, 556 bp, Homo sapiens
gaataattgaagattgcctgttatttataaagatgtaaaatgtgattattttaaacatgttgaaaatgtattatttttctgtaagctttgatgattatagacttacatctttataaagatttaaaattcatatttataaaaatgaagcccaccaacttcattctttgtgtacctaatcagttttccccagaatttttctaccatttattgatcctcagtaaggttccaaaaaacctcacatagcactatagacaatctcagaattaattctggggctagaaaggaaccttcattgatcatgcagtcaaacagcattccaaagaaataatttgtccaaaaaaagcctccacagaggatttatatagtgaagctataaggcaggaataccaaaccatgaacatctctgcaaagtgagtacattgcagaaattgaagagtttttgttttttgttcatttgtttgttccattgttttcatacaatggtgacataaaaaaacagattggtatgacagtgcatgaagtaggaacaagattgtaggagggtacaccatggttt

SEQ ID NO: 263933 - DNA, 186 bp, Homo sapiens
gctagcaaatagaagtcctggtacatggaagacactcaggaatgccacatctttcctctgagactttgctttctgttagcatcccagtggcaacaactagagttgaagggactcattttcccaacagagagattctcagagtaatggttttcaagcttttatagctacagccctaggcaaaaaaaa

SEQ ID NO: 263934 - DNA, 821 bp, Homo sapiens
cagggacatttcttcctcttctaaactaaatgatcccgaagacacctgagattcaatgagagagaagggtgagcccggggtagaatggtaagactcaaaacctggcaggtttcttttacagtgatttattgctttgatttttaaaaattgcacaaataaaatagaccattcagaattaaacgtggaagtcctccttttaatgtccccattcacctgcctcgcatgtgtgtcatggatcttcctagatctacttctacgcacgtgagtgttgtgtgtgtgtgtgtgagtgtgtctgtgtgagtgtgtgtgtatgtgtgtgtaatatgggtttgttggttaaattctttacacaaatcccatcagaatatgtatgtagataatttctagaaatttcttttttcatctaatagattttgaggaggatcactctgtgacataggcaatattaatttcatttactcttcacaatgaccctatgaggtaggggctagtgttatcgtccgttatacagatggagaaactgtgacacagaaaggctaagtgagttgcacaagatcacacagcaagtaagtggcaaagctgggattgaaacctaggctatctggctttggagcacgaatgcttaatcactcttctgcaatacttggctttaaccactgcatcacagtctagcctagagatggaccatagtatatttataaccactgcccttttgatccatatgcaggctgtgtccagggttccactagtataaaaaaggatgcagagaagagctttgtgcagcagccagaggggttcttgcagggtagtggcccagctgt

SEQ ID NO: 263935 - DNA, 458 bp, Homo sapiens
acatttctatgccaattattttattaaattctcacaatatcccttggagagtttacctttggttttcactttatagatgaggaaacttagtataagagaactggagttacatggattgtaaatagcaaaacctagatcttaacctatgagaatgattctaaaagaatgttcaaccacaatgctccatttctcaattaaaagctacagtatactgcaaagtgccagggaattgttcatctcttctgtttgggagaaattgtatttggagagtaggtaagagacaaagttagaaagaaaggtggaagctgcataaatataattttataagcaatattaaaatttctacatctttattctccttagttggcttagtctgggatatgacatgaagttaaaacgtgcatttctagagggggttgtgcacatatgtatacatccaggtctgtaggtgaagaaga

SEQ ID NO: 263936 - DNA, 591 bp, Homo sapiens
gtaccaagtctcccttagactggagaaataaagttaagtgatctattgcactgcatgatggccacacctgataataacatgttgcatatttcaaaatcactaaaagaatagatttttaacattctcaacacacacacacaatgttaagttggtgagatgatgaatgtgttaattagcttgattaaatctttctacaatgtatatatatgtaggtcaaaacatcacattttaacccataaatatacacaatgtgctaatttaaataaaagcaaggggaagaattgaaagataagccacagaccagaaaatatttgcaaaatacaaatttgcttaattacttgtacccaaaatatatatttaataaacaactcttaaaactcaacaataagaaaacaactccaatataaaatcaacaaaatatctgaacagacatctcaccaaagcagatacacagatggtaaataaacataagaagatttgctgaacatcattggtgactagggattttcaaattaaaacggcaatgaggcggggcctggtggttcacgcctgtaatcccagcactttgagaggccaaggcagatggatcac

SEQ ID NO: 263937 - DNA, 349 bp, Homo sapiens
tgtgttcattcctctgtctctaagaagggcactaccctcactcaggacctttccttttcaaaacatttttccaaggaagtaagttccactggttcccgtgctggggtgctaacaatcttgccaatccggaagtttggcctcatggctcctgctgaacaacttcaaatagagtgtggacacaaagtgctctcctagaaacttgataaacgttcacgagaggaaagcaatggagctgctacataattatttcaggtctcaaagcttccaagaagtggactttaaaatgcaacatctcctagagattatatcaatctctttgcttgtaaatacaactcctttcctgatccca

SEQ ID NO: 263938 - DNA, 447 bp, Homo sapiens
aaagatctttattagcttacaggtcctcccaccccgaattgagtcagatgccaagaaatcctgagctcagagactggagcatgcagtgagtcaatgaggcagatgagggtggaaataatgctttcctggatgaaatactggtggctgtgggctgtggatcaagaggagccctaagcctacgacagtgcactgaagctagagatctaggattcaaatttaagataatgaatgggatgatcactggcctcttccctgagcctagttatattgtaggcaggagtctctgaaaggagtttattttaggacaagtaaaaataaatcctggccaggtgtggtggctctcacttgtaatcccagctatttggaaggctgaggcaggaggactgcttgaggccaggagttcaagaccaagctgggcaacatagtgagactctcaactcttaaaaa

SEQ ID NO: 263939 - DNA, 299 bp, Homo sapiens
cccatatgaaaagtttctccttctatttccaagcttgcttttcagaaagtaccgtgtgaatgaagagtagtagaatgaagaatatgtgattacttaaaataatgatttgccttctgcagactacgtctaagaacaataggacatttttataaataactttcagatagcacttttcatttagtgaatgtgcttttctatttggtatctaatttgtaattctctaacaaaatttgaaattataggctgtgaaatttgatttaaacatatttaagatcaagacagaaaatccctgagttttt

SEQ ID NO: 263940 - DNA, 264 bp, Homo sapiens
aggcagttgtgtctaataaatgctggttttcatctgagtcaggtagtgctggcagctataaagtctggcttccaaacgcagttctgtgctgcgtggcctgggacaggtaacctctctgggccataatcttgcctattgtgccagccccagcctggagtcgctctggttaggaaggtgcacgcggcgtggggccaggaagcctgtcctccagggtccctactggaaaattaaaacacagggcattcattttcttctaagatgaaa

SEQ ID NO: 263941 - DNA, 412 bp, Homo sapiens
gcagaacgcctctggaatgaggcatgaccttggagacatatttttatacagtccaattattccccaaaggtaatgacacaactaagattgatcaactagcactgccagcagatggaagacttaaggtattgattgttcaagggggatttggccagcacatcacagcatccacattgaaaatcaacttaggtagcaattctatagaacatacaatgtcagtgacatcaaccttgaagctacaaaaataagaggttcttttagggtcaccatagaagttctctagtttccagaccaagacttaagctgacaattttaaaatttgagtttattattattttattctttataagaatttcagtgtaatcaagaaaagcatctcactctatgatccttatggtcattgtcattgctg

SEQ ID NO: 263942 - DNA, 1006 bp, Homo sapiens
gactgactgcttctaatgtgtcaccaaagccgaccagcaggtaaatatttatttgagccaatatcattatatatgcatatgctaggctctgtggtataaacagggttgaatgctgttcagtcactcacagatgcttaagagtgatccaagaaatgtgattctctctttcaagaaaaggctataaaaatgactaaggtgataggatttcaaaggaagcaatctctgtttaaggagagcagaaaaggagctggtgttgggataattaatagggaaaattaataaggcagctccaagacctggggtctccctatcttctcctgcatcatcatcagcactattgcaagtgaagacaggcaaagcaatattcccaatcacaaatcctgtttctctgccaaaaagtccctggccttttgtctcccacatgatagaggccagtctttcgtaggtcaaccaggcctgtcccccacctctttcctatttagtttctaatttttgagtcaattagatgataaataaccctttccatgcctgttcatcaaataagaaacaaggaagaccaaattacacccttctctttctgtactgattcattttggtgagtaagatgattcctggtttaaatagcagtgtcagcttcagggtctcctattacaggaaccaattctccttgcttgcattcagtattcctcaagatagcaattccacatcctgctagagcccttcccactttgatagtaccaactcaccctgcttgcgttctttgggaaatttattatttaaggcccttgcctttgaagctgggaaaaatccctgatgactttctaagtgtaataagctatagtaaataagatgtaaaaacacaagtaactttttataacactttaagtagaattataagtgataatacatgatggcagaaggttcacaaatagtgtttctttcacttccaggaccagaccctttcatatgtttcccccaagtctacacaaatgattataaagaatag

SEQ ID NO: 263943 - DNA, 558 bp, Homo sapiens
gaagtaaaaggtttttttaaataaaaaatgtaaagcctattcaaaagtacagttagcagaagataaagaacaagccatgaaaccacctctcctctgagtcttgtcttatttttctattttgaccgatttccttctgtgtttgttagcattaggtttggcagcatcgcaaaggtccctgtattccctcttcccccacaaaaaggtgctttaaacaagatagaggttttttcctctcaggatatggcagctatgtggtcagcaaagacccagctcctatctttctgtgttgcagtctttagcttatgactttccttctcagggttatctcctggttgcaaagaaggtccttgcagctccatccgttgtgtttgtttttcaggcagcagaatcgaggggtgagggcaaaatggcccttctctctgtgaagttggtccctttaaaaatctttcccatattcccacccactgatttctgatattggccaacctaatcttcaaggcaggccagaagatgtaaattgccacttttagtaatacagcagtttgatttgtaaaaaaa

SEQ ID NO: 263944 - DNA, 486 bp, Homo sapiens
ctagctgtttaaaaataattaagcttctttctgtgttctttgctgtgggtcaggaactttacttcctttgccatgcaacacagaagttaatcacaaatgggtcctctgaaccaaataattaaaaatagagcaaagtttctgaaccaggcggttggcagaaacgtctgtacttccatctgtgcatggttaggaaaatatttcacgatatttaaatagcatcagctttgctctcttttgtgtgagagtgtgtctgtgtgtctatgcgtaattcattgctttgaaggtttgtttgactgttagataatcatataaaaaaagttactggcaaggaaacaggaaagcaaatccaggtgttttgtgcatacattctttatttaccagtctctgtgaaggagcaatgatcttgcttttgcttttctctctgactgaaagtttttgccttgttatgtgctgcagaaaactaaataacattgcattttgactttg

SEQ ID NO: 263945 - DNA, 472 bp, Homo sapiens
caaatatagttttaccactcatttagtcactcttatgcctttcactgatttctcttatctaattgcactggctaatatctctaacagcagcagagataatagatatttatctcttgcttctgatgttagtagaaacatccctaatgcttttccattaaataagataatgactttaggactatgaaccccccaaatttgagacaagtctcagttaatttagaaagtttattttgccaagattgaggatgtgcacctgtgacacagcctcaggaagtcctgatgacatgtacacgaggtggttggggcacagcttggttttctgcattttagggagacatgtgacatcaatcaatcaatatatgtaagaagtacattggttctgtccagtgaagggatggcctgcccctccacacctgtgggtgtttctcatcaggtaggatgagagactgagaagagaaagagacacagagac

SEQ ID NO: 263946 - DNA, 245 bp, Homo sapiens
gacaaaggggaattaaggttacagatggaattaagattactaatcatctgaccttatagggagagtaccctgggctagccaagtgggtccaaaataatcacaagtctttaaaagtggaaaaggctgggccaggcatggtggctcacccagcgctatgggaggctgaggcgagcggatcacctaaggtcaggagtttgagaccagcatggccaacatggtgaaaccccatctctactaaaaatgca

SEQ ID NO: 263947 - DNA, 618 bp, Homo sapiens
aagagaacattaaaaataaaaatattatatgaaatgcttacagagggctgggcacggtgactcacacctataatcccagcactttgggatgccaagagggggcagataacttgaggtcaggagttcaagaccagcctggccaacatggtgaaaccctgtctgtagtaaaagtacaaaaattatctgggtgtggtggtagacacctgtcatctcagctactcaggacactgaggcaagagaatcacttgaacccaagaggcagaggttgcagtaagctgagatcgtaccactgtactccagcttgggcaacagagcatgactccatttcaaaaaaaaaaaaaaaagtgcttacagagaatgcattccagcatccctcatgaaatagagatgatttttttttttttttgccaagatccccttcagtcactgatctctattcctccagtctgcatgtagtgattcccaaccaactcacaggcaatatctgtttcacaaaatctggatggtagagctgacagagggtggcgctctaatatgcaccatcacactagacacactgacatttgcccacaagtcccaagagaattgccagattcccattgccttcagattttcctt

SEQ ID NO: 263948 - DNA, 379 bp, Homo sapiens
atgttttattcactgagaaacctgctttgtctagactagtaagttgcatctgaagagacagaaagggagacaccaaaactttaatggcagttattcctaggtggaattttaatacaccatgtgcttttctgagttttctgatttttaacatctttgttgttaaaaattggacaacagaaaagatgtttaaaagacagaagataaagaaagggtgtggacgtgttccacattaaagaaggctaagagacatgacaactaaagagcagtatctaccctgctgtgattacaaaggagaatatccctattttaggaaatacatactgaagcatttttgaaataaacagccaggatacatgtaacttactgacagataattaag

SEQ ID NO: 263949 - DNA, 652 bp, Homo sapiens
atgccggctgtctgtgaaaaagtagaggatgttgacttagtattagtctgacagctctgtaacaatataaattttagaggagcgaataaaacccccatattattttattctgtggctggcataaatagaactcttaacttgcactattgggtatgaattatgtatgtgtgtatatttatatatttgtagataaatacatttgtgcatgtgtccatcagatgactaatttggcccaatctgaaggaatgaaaaaacttacactgttggaactaatactgcagttgattagtgtgtcacactaatcagaggctgtgtctttgtaaggagagttttaaatagcttaaacttcaagaattaaaacttctggccaggcacggtggcttacccctgtaatcccagcaccttgggaggctgaggcgggcggattacttgaggccaggagttcgagactagcctggccaacatggtgaaaccccatctctactaaaaatagaaaaattagtggggtgtggtggcacacgactgtaatcccagctacttgggaggctgagtcatgagaacctcttgaacccaggaagtggaggttgcaatgagccgagattgcgccactgcactctagcatgggcaacagagtatgactatgtctttaaaa

SEQ ID NO: 263950 - DNA, 258 bp, Homo sapiens
gataattactgagagagagcatacagtgattgagagcacagactttggtgtctgacagcctgatctccaagcttggctttgctacttgcccaaggtcagctaactgatacattatttctaagagttgcctcattggtgaaatgagatgccaacctctaagcattcagcacagtgcttgacacatagtatatgcctgataaatgttagttatcaccattatcaaatatttcctgtgtgtggcacctaaagattatcacc

SEQ ID NO: 263951 - DNA, 620 bp, Homo sapiens
caagtttctctaataaatcctcttcatctacctacctacctacctacctacctatctcctattagttctgtctctctggagaaccctgactaatatagttagtaaagactaggtatagtttccaaatcagagacttatttgacctagataaatggaaacagaactaggagattcgaggtaagatcagaaattacaaatagtattgcacattctgagaactccaaatcacaattatcaaaaattactaaaaaaacaagcttaaataatgggctcaaaaattatgaaggtttattgagtagaaattgttgagatttagttcaaaaactaaaagctttggacaggaaaggaatcatgaaaagaaaaagttttatatggcataagacatatatcaataatatttgtggatgcatttaactagagtccaaatccagtggccgattaactccaaccgtttttttgatttctcagggtagtaaccagctgagctgttaagccagtcaaggtcataatagctttgtttactgcatagtacagcatgttctaattatcacccctgcctcactaaccacacagcttatgttcccacactcatctgttatttttatgcctcctacagaaat

SEQ ID NO: 263952 - DNA, 581 bp, Homo sapiens
ccaagatctttgagcatcaccttggatttaatacaggctttcaagtaaatatttgattttaggaaaacctatgtgttgaggctttccttccaagtagaatggagtagctggtagccaattagtacttctgcttagagcaatgagaaaatcaagataaaatatacatgtaaccattctgtatcagagttgaccttggggatgtatttcaagtctcagttgtatctgtagtaaagcttattcttcctctgttttgtcctaattatattggtaatcacattcaatataaattgactaattattaaaattgaatcactaagcttgtcaggctggataaaacaagtaaaccccaattatatgctgcattcaagagccacatcttaaattaaatgggaggatgaagctaaaaggatgaatagatacactgtcctaacactgaaaggccaactggtgtagctactatatcccataaggtagactataagataaagactaaatataggtggtccataacgtatgatggttcaacttacattgttagacgtaacggtatgctcaaagatctttggaatcctcggaacaca

SEQ ID NO: 263953 - DNA, 1017 bp, Homo sapiens
ccaagatctttgagcatcaccttggatttaatacaggctttcaagtaaatatttgattttaggaaaacctatgtgttgaggctttccttccaagtagaatggagtagctggtagccaattagtacttctgcttagagcaatgagaaaatcaagataaaatatacatgtaaccattctgtatcagagttgaccttggggatgtatttcaagtctcagttgtatctgtagtaaagcttattcttcctctgttttgtcctaattatattggtaatcacattcaatataaattgactaattattaaaattgaatcactaagcttgtcaggctggataaaacaagtaaaccccaattatatgctgcattcaagagccacatcttaaattaaatgggaggatgaagctaaaaggatgaatagatacactgtcctaacactgaaaggccaactggtgtagctactatatcccataaggtagactataagataaagactaaatataggtggtccataacgtatgatggttcaacttacattgttagacgtaacggtggtgcaaaaatgatacacattcagtagaagctatgctttgaattttgatctttctctaggctagtgatatgtaatagaatactctattgcagtgttgggcagtagcagcaagctgcagtttccactcagccaagcagtcatgagggtaaataaccaacactctatagtatatgaaatgtatttttgacttaacaatatttttcacttacagtgggtttctcaggatatagcctcattataaagttaggagaatttgtataaaagatggatgttttataataataaaagggtaattgtatcaggaagttttcactatcctaaatctgcatgcacatagtgagatagtatatataaagcaaaaattgatagaagcaaaagaactggacaaatccccaaatatactgggagaatttatgatgctgtcagtagtaccaaccatcaatagctgatagaacaagtagatgacaaa

SEQ ID NO: 263954 - DNA, 357 bp, Homo sapiens
gactagcctcctacactggccctagcagagcagatcaaaccagagcagagtcacctgtgctaactgccaagtcatcaaaccggactttgaaatgaggcagttttccaaaaacgcaggagcttccagtcaccctgaatcagcacaataaaaagtgccctctgctttaaccctataaggaaagcaactttgaaatgaccaatctgctttttgttccctgtttctgctttcttcagccctcttttatccataaagccaaacttctctgcccacttcactggaatactcattctatttcgtagaatgaggtgttgcctgattctagaatcacaaataaaagccaatttgatcattacaaat

SEQ ID NO: 263955 - DNA, 681 bp, Homo sapiens
tttttttttaactatgcaagtctcattacatttaaaacccttttttaaacttggtcccttttctgtgccaactttatgtttgtttttgttcttgtttttgtttgagatggagtctcgctctgttgcccaggctggagtgcggtggcgcgatctcagctcaccccaacctctgcctcctgggctcaagtgattctcctgcctcagcctcctgagcagctgggactacaggcgtgcaccaccacgcctggataattttttttttgtaattttagtagagatggggtttcaccatattggtctgaaactcctgacctcgtgatctgcccgccttggctggagtgcagtggcacaatcagaaatactcttctgatgtaactcttcagtaaatggaatacctcgtggtattttataaaatgctgtgtttatgtttccatagccatttacaaggaattttagcataatatgatcacacttagcttctccaactaccctgtgtcagaggtactcctattattagcatttttggaatatgaagagcaaggatcagaaaggtcaagatacctgcccaagatcacacagctaatgaggtggtagagccaagactccaacaaaggagtcttgttccaaattctatgctctcttcaccaccctagggtcttatttatctctgagttcctaagg

SEQ ID NO: 263956 - DNA, 369 bp, Homo sapiens
aatctcagtctgtcgcccaggctggagtgcagtggcacaatcagaaatactcttctgatgtaactcttcagtaaatggaatacctcgtggtattttataaaatgctgtgtttatgtttccatagccatttacaaggaattttagcataatatgatcacacttagcttctccaactaccctgtgtcagaggtactcctattattagcatttttggaatatgaagagcaaggatcagaaaggtcaagatacctgcccaagatcacacagctaatgaggtggtagagccaagactccaacaaaggagtcttgttccaaattctatgctctcttcaccaccctagggtcttatttatctctgagttcctaagg

SEQ ID NO: 263957 - DNA, 352 bp, Homo sapiens
gttgcggtcacacaaaagcggccaagccccacttttccagtaggccctttggacaaatcgaaggaactcagctgaacttccaaatggccctaaacgccagatcggtgggagcagctaaaacagagagggaagagcaggcctcccgcgcccatctaccaaaacctctggcaatatccaagtattcatccaggagcgggagctgagaccattcctaagggaagaaggaaaaggaaaacccacttttactatcaaggcccaaaggggatattaaatattcacattgttgtagggtttctccccttaatcagggtagaaacataatgcggaaaagtctggatccaccaaaaagaaa

SEQ ID NO: 263958 - DNA, 445 bp, Homo sapiens
atgttttccagctgaaataagtgaaggaatgaaggggaaactattcttagaagctagccttcacaagccgaggcaattccaaagcccaaggcaacaacaggagccactgtggcaaagaactgggaagtgagcacacaggagagtgtggaaactatgccatcattatttagagcacaaactccctggatcaggggatgttgaagagagagggctcaaaaggaaaatacagaatggggaaaaaaagggtcaaaacagaccgcgcaactgggcttgccatcattgcctatttctcaacttggcaagaatgcaaatgtctcatatgtcaccctgagagaaatatctgtggattcttcctcgaggaatgataaaacatgttaacgtcttcaggaggattccccccaatcaggtttaagttcagagatcaaggagatcaggtaacacacag

SEQ ID NO: 263959 - DNA, 502 bp, Homo sapiens
ccacagaccgccctgtagaatctgccagggattctcaggacatgactggggaaaggcatcaggactctgtgtgaagaaggacaagtgacttcagcaaacattttcttgttaagtactgatgaatacatcaatgtcactgacaataagatgctgaaaataaacaatcatttttaaactttattcatgctcacacatctgagggcataaggccaactgaaggtataggactgagctgccagatgtttcctcaaagcatcacataattttataagaaactgcacttttactctggtcttcagcaagctcacctttacagatacctcagttacggaccatgtgcttttggaagcaatataactacttgccctcaatctatttgcacttctagcacaaaattagcctgctttcttccccatctcctacaacttttaataggcttaaaatattttcttagtttgttagaacacttgacatttacaataaattctataacctttaccaa

SEQ ID NO: 263960 - DNA, 505 bp, Homo sapiens
gtcaattgctaaataacaaagaagtcaaaaaataataataatttatcatttatttgcttatcaggtagacaaacatcgcaaagattaacagaacctaacattgatgagtttgtgaaaacactgactcacttacacagtattgctgagaatgtaaattataaaacctgcctggaagtcagttttctcaaaatatataaaagtgtaatttatgcatactgtgaatatccccattttggaattatcttaatgtgatgttcaaacaagaaaggtaagacaaaaagacattaatcacagttttgtttataagagctaaatattggaaacaacattagtgtccatttataagaattgcttaaatcaattatgaaacatctgtacaatagaatattactcagtcaactaaaataatggtgttgatctatatttactggcacaatgatatctatgaaaaattgtctcatcaaaaaagcaattacagaaacatataaaaatataaatatttatc

SEQ ID NO: 263961 - DNA, 711 bp, Homo sapiens
cacggaattatttaatctttgcaccagcctcatcaggtgatgctctggttcccattttatagattgtggaaacagagactacttaagaggtgccaggctgttgacacatattttatcctttgatcctcataacaaatctgtaatgttagtaatattttaattttcaagtaagggtcctgaggcttggcagtcagcagtttcctgtcccaggttttactgccgaagggaaagaaccgaggtttatacaaagatctgtctgaccctcaagtctccaagtctctgccattaactgctctgcttgcagttcttacccaagatcccacaactgatgcttggttaagtcaactcaagcgcttagacactgtgggtgcttcatggagcttactgaaaacaaagtgagtcatggataggagtttgacattgtaacacttgagccatacatccatttttgagaacagggtggccttcctggcgccctgcacccatccaggcaagctgtgggtggtaggtgtgtttcactctggagcagtcagttggaagttttgtgtcgactttaccttctgctgtaatgcatcttgtcactagacttagtgacttaatttgatctgtaagcaccctcacagccacgtggtgttactgtatcacatttaatgtcggttaaaaaacactctaaaaaaccacccctccaccactgccccccagcgacaaaac

SEQ ID NO: 263962 - DNA, 769 bp, Homo sapiens
catttattatttccgcagtttgaggccatgagtcttgttttaaacttttttgttctccccgtaatattttgcacataataggccttaattcattttttatttatttggtagagaacatttactttcagataaaagtgtaagactttattttcatttgtacggatattatagccaaggattttactgcttttgtttaaaaggatggaagaagtgtttttaatagttcttggtagttagcattctacaaaatataattgaaaaattctctggttttattttattactatgtaaatgggtttcacttgtttaaaatgttaaaaaacattgattagagtacaaaactagaaatgttatcaatatttcttcattgttttagtgttttcaatttctaaggaaataaaatattttataaaaaataattttgtggcagattgttaaatggaaatacaatgtacttctgttgtcttagtttctaagccattgaaaactatgtcaaactaaagtcattttaggttttaaagttttaggaatatatttgatttcaggtacataaagcaaaaggaattataggaaagtatatgtaagtgtatagataattgaatatatacactttaaaattcttttgcaagttagcatgaataaaaatggtactttagagagcagcttaaatacctctcaggtgaataaagcatgggcttcatgcttgtagttggggatatatgtatcatctgctgtagatgtattacaaaggtgatgtcaaggtgaaagc

SEQ ID NO: 263963 - DNA, 1541 bp, Homo sapiens
agtttctccctaagtgcttctttggatctcaggctctaggtgcaatgtgaaggggagtcactgggcagactgatccctggctcagacagttcagtgggagaatcccaaaggccttttccctccttcctgagcctccgggcaaggagggagggatcttggttccagggtctcagtaccccctgtgccatttgagctgcttgcgctcatcatctctattaataaccaacttccctcccccactgccagtgctgcccccacgcctgcccagctcgtgttctccggtcacagcagctcagtcctccaaagctgctggaccccagggagagctgaccactgcccgagcagccggctgaatccacctccacaatgccgctctcaggaaccccggcccctaataagaagaggaaatccagcaagctgatcatggaactcactggaggtggacaggagagctcaggcttgaacctgggcaaaaagatcagtgtcccaagggatgtgatgttggaggaactgtcgctgcttaccaaccggggctccaagatgttcaaactgcggcagatgagggtggagaagtttatttatgagaaccaccctgatgttttctctgacagctcaatggatcacttccagaagttccttccaacagtggggggacagctgggcacagctggtcagggattctcatacagcaagagcaacggcagaggcggcagccaggcagggggcagtggctctgccggacagtatggctctgatcagcagcaccatctgggctctgggtctggagctgggggtacaggtggtcccgcgggccaggctggcagaggaggagctgctggcacagcaggggttggtgagacaggatcaggagaccaggcaggcggagaaggaaaacatatcactgtgttcaagacctatatttccccatgggagcgagccatgggggttgacccccagcaaaaaatggaacttggcattgacctgctggcctatggggccaaagctgaacttcccaaatataagtccttcaacaggacggcaatgccctatggtggatatgagaaggcctccaaacgcatgaccttccagatgcccaagtttgacctggggcccttgctgagtgaacccctggtcctctacaaccaaaacctctccaacaggccttctttcaatcgaacccctattccctggctgagctctggggagcctgtagactacaacgtggatattggcatccccttggatggagaaacagaggagctgtgaggtgtttcctcctctgatttgcatcatttcccctctctggctccaatttggagagggaatgctgagcagatagcccccattgttaatccagtatccttatgggaatggagggaaaaaggagagatctacctttccatcctttactccaagtccccactccacgcatccttcctcaccaactcagagctccccttctacttgctccatatggaacctgctcgtttatggaatttgctctgccaccagtaacagtcaataaacttcaaggaaaatga

SEQ ID NO: 263964 - DNA, 1584 bp, Homo sapiens
agtttctccctaagtgcttctttggatctcaggctctaggtgcaatgtgaaggggagtcactgggcagactgatccctggctcagacagttcagtgggagaatcccaaaggccttttccctccttcctgagcctccgggcaaggagggagggatcttggttccagggtctcagtaccccctgtgccatttgagctgcttgcgctcatcatctctattaataaccaacttccctcccccactgccagtgctgcccccacgcctgcccagctcgtgttctccggtcacagcagctcagtcctccaaagctgctggaccccagggagagctgaccactgcccgagcagccggctgaatccacctccacaatgccgctctcaggaaccccggcccctaataagaagaggaaatccagcaagctgatcatggaactcactggaggtggacaggagagctcaggcttgaacctgggcaaaaagatcagtgtcccaagggatgtgatgttggaggaactgtcgctgcttaccaaccggggctccaagatgttcaaactgcggcagatgagggtggagaagtttatttatgagaaccaccctgatgttttctctgacagctcaatggatcacttccagaagttccttccaacagtggggggacagctgggcacagctggtcagggattctcatacagcaagagcaacggcagaggcggcagccaggcagggggcagtggctctgccggacagtatggctctgatcagcagcaccatctgggctctgggtctggagctgggggtacaggtggtcccgcgggccaggctggcagaggaggagctgctggcacagcaggggttggtgagacaggatcaggagaccaggcaggcggagaaggaaaacatatcactgtgttcaagacctatatttccccatgggagcgagccatgggggttgacccccagcaaaaaatggaacttggcattgacctgctggcctatggggccaaagctgaacttcccaaatataagtccttcaacaggacggcaatgccctatggtggatatgagaaggcctccaaacgcatgaccttccagatgcccaagtttgacctggggcccttgctgagtgaacccctggtcctctacaaccaaaacctctccaacaggccttctttcaatcgaacccctattccctggctgagctctggggagcctgtagactacaacgtggatattggcatccccttggatggagaaacagaggagctgtgaggtgtttcctcctctgatttgcatcatttcccctctctggctccaatttggagagggaatgctgagcagatagcccccattgttaatccagtatccttatgggaatggagggaaaaaggagagatctacctttccatcctttactccaagtccccactccacgcatccttcctcaccaactcagagctccccttctacttgctccatatggaacctgctcgtttatggaatttgctctgccaccagtaacagtcaataaacttcaaggaaaatgaactcattcttcctttgatatttgagagcagatgaaagccgagg

SEQ ID NO: 263965 - DNA, 1415 bp, Homo sapiens
agtttctccctaagtgcttctttggatctcaggctctaggtgcaatgtgaaggggagtcactgggcagactgatccctggctcagacagttcagtgggagaatcccaaaggccttttccctccttcctgagcctccgggcaaggagggagggatcttggttccagggtctcagtaccccctgtgccatttgagctgcttgcgctcatcatctctattaataaccaacttccctcccccactgccagtgctgcccccacgcctgcccagctcgtgttctccggtcacagcagctcagtcctccaaagctgctggaccccagggagagctgaccactgcccgagcagccggctgaatccacctccacaatgccgctctcaggaaccccggcccctaataagaagaggaaatccaagatgttcaaactgcggcagatgagggtggagaagtttatttatgagaaccaccctgatgttttctctgacagctcaatggatcacttccagaagttccttccaacagtggggggacagctgggcacagctggtcagggattctcatacagcaagagcaacggcagaggcggcagccaggcagggggcagtggctctgccggacagtatggctctgatcagcagcaccatctgggctctgggtctggagctgggggtacaggtggtcccgcgggccaggctggcagaggaggagctgctggcacagcaggggttggtgagacaggatcaggagaccaggcaggcggagaaggaaaacatatcactgtgttcaagacctatatttccccatgggagcgagccatgggggttgacccccagcaaaaaatggaacttggcattgacctgctggcctatggggccaaagctgaacttcccaaatataagtccttcaacaggacggcaatgccctatggtggatatgagaaggcctccaaacgcatgaccttccagatgcccaagtttgacctggggcccttgctgagtgaacccctggtcctctacaaccaaaacctctccaacaggccttctttcaatcgaacccctattccctggctgagctctggggagcctgtagactacaacgtggatattggcatccccttggatggagaaacagaggagctgtgaggtgtttcctcctctgatttgcatcatttcccctctctggctccaatttggagagggaatgctgagcagatagcccccattgttaatccagtatccttatgggaatggagggaaaaaggagagatctacctttccatcctttactccaagtccccactccacgcatccttcctcaccaactcagagctccccttctacttgctccatatggaacctgctcgtttatggaatttgctctgccaccagtaacagtcaataaacttcaaggaaaatga

SEQ ID NO: 263966 - DNA, 729 bp, Homo sapiens
cgacagggcagtgtaaggaggagctgtggaaggggaaatagatgagacaggatcaggagaccaggcaggcggagaaggaaaacatatcactgtgttcaagacctatatttccccatgggagcgagccatgggggttgacccccagcaaaaaatggaacttggcattgacctgctggcctatggggccaaagctgaacttcccaaatataagtccttcaacaggacggcaatgccctatggtggatatgagaaggcctccaaacgcatgaccttccagatgcccaagtttgacctggggcccttgctgagtgaacccctggtcctctacaaccaaaacctctccaacaggccttctttcaatcgaacccctattccctggctgagctctggggagcctgtagactacaacgtggatattggcatccccttggatggagaaacagaggagctgtgaggtgtttcctcctctgatttgcatcatttcccctctctggctccaatttggagagggaatgctgagcagatagcccccattgttaatccagtatccttatgggaatggagggaaaaaggagagatctacctttccatcctttactccaagtccccactccacgcatccttcctcaccaactcagagctccccttctacttgctccatatggaacctgctcgtttatggaatttgctctgccaccagtaacagtcaataaacttcaaggaaaatga

SEQ ID NO: 263967 - DNA, 1525 bp, Homo sapiens
agtttctccctaagtgcttctttggatctcaggctctaggtgcaatgtgaaggggagtcactgggcagactgatccctggctcagacagttcagtgggagaatcccaaaggccttttccctccttcctgagcctccgggcaaggagggagggatcttggttccagggtctcagtaccccctgtgccatttgagctgcttgcgctcatcatctctattaataaccaacttccctcccccactgccagtgctgcccccacgcctgcccagctcgtgttctccggtcacagcagctcagtcctccaaagctgctggaccccagggagagctgaccactgcccgagcagccggctgaatccacctccacaatgccgctctcaggaaccccggcccctaataagaagaggaaatccagcaagctgatcatggaactcactggaggtggacaggagagctcaggcttgaacctgggcaaaaagatcagtgtcccaagggatgtgatgttggaggaactgtcgctgcttaccaaccggggctccaagatgttcaaactgcggcagatgagggtggagaagtttatttatgagaaccaccctgatgttttctctgacagctcaatggatcacttccagaagttccttccaacagtggggggacagctgggcacagctggtcagggattctcatacagcaagagcaacggcagaggcggcagccaggcagggggcagtggctctgccggacagtatggctctgatcagcagcaccatctgggctctgggtctggagctgggggtacaggtggtcccgcgggccaggctggcagaggaggagctgctggcacagcaggggttggtgagacaggatcaggagaccaggcaggcggagaaggaaaacatatcactgtgttcaagacctatatttccccatgggagcgagccatgggggttgacccccagcaaaaaatggaacttggcattgacctgctggcctatggggccaaagctgaacttcccaaatataagtccttcaacaggacggcaatgccctatggtggatatgagaaggcctccaaacgcatgaccttccagatgcccaagtttgacctggggcccttgctgagtgaacccctggtcctctacaaccaaaacctctccaacaggccttctttcaatcgaacccctattccctggctgagctctggggagcctgtagactacaacgtggatattggcatcccctcttccagagccttcgggttctcaccaaagggacctgggtctagggcctcctggaaggccatgccatccttctccagcagctcaatgatccaactgagctcatcagaagagctggaagctgacaaggaaggaaggaagggtcacactcccctaatccctccctcaagggctctctctggctgtgcagctggcccagagcttgcagggcacagcctacggccacactgaactcgactcagctcaacatgtggagactgctccccttttccagactgggtatactcag

SEQ ID NO: 263968 - DNA, 1215 bp, Homo sapiens
agtttctccctaagtgcttctttggatctcaggctctaggtgcaatgtgaaggggagtcactgggcagactgatccctggctcagacagttcagtgggagaatcccaaaggccttttccctccttcctgagcctccgggcaaggagggagggatcttggttccagggtctcagtaccccctgtgccatttgagctgcttgcgctcatcatctctattaataaccaacttccctcccccactgccagtgctgcccccacgcctgcccagctcgtgttctccggtcacagcagctcagtcctccaaagctgctggaccccagggagagctgaccactgcccgagcagccggctgaatccacctccacaatgccgctctcaggaaccccggcccctaataagaagaggaaatccagcaagctgatcatggaactcactggaggtggacaggagagctcaggcttgaacctgggcaaaaagatcagtgtcccaagggatgtgatgttggaggaactgtcgctgcttaccaaccggggctccaagatgttcaaactgcggcagatgagggtggagaagtttatttatgagaaccaccctgatgttttctctgacagctcaatggatcacttccagaagttccttccaacagtggggggacagctgggcacagctggtcagggattctcatacagcaagagcaacggcagaggcggcagccaggcagggggcagtggctctgccggacagtatggctctgatcagcagcaccatctgggctctgggtctggagctgggggtacaggtggtcccgcgggccaggctggcagaggaggagctgctggcacagcaggggttggtgagacaggatcaggagaccaggcaggcggagaaggaaaacatatcactgtgttcaagacctatatttccccatgggagcgagccatgggggttgacagggaaaacagcaagtgcacacagtgggacaggccacaggacaggctgggagtgaataaagagttcacactgcttccctgctttccccagtgactgaaggctctaggccacctcctcctcagcctcctcctcgaactcgccctcctcctcggctgtggcatcctggtactgctggtactcgacaccaggtcattcatgttgctctcggcctcggtgaacttaacctccgtgctgcccgcacatccgtacgaaccggggccgacc

SEQ ID NO: 263969 - DNA, 1134 bp, Homo sapiens
attttattttaattagacaacagttttgctcttgttgcccagcctagagtacaaaggcggaggttgcagtgagctcaggtcgtgccattgcactccagcctgggcaacaagagtgaaactccgtctccaaaaaaaaagaaaaaaaaaggggttaatccttactttgtaaatgttttaaaaattgaggggaaaagattagaaatcctatagaaaagtgggcaaaagtcatgcacagactctttaccaaaagatgtataaacatatgaaaagatgttcgttcaacttcactcatggtaagagaaacgtaaattacaactacactgagataccatttctcacccatcagattgtcaaaaacttaaaagcttaaccgtactctctacggataagactgtggagaaacaggcattttcatacattgttggtgggaatgcaaaatgttttaagtcctatagagggaagttggcagtatttaattaaattatatatacacatacctgttgacacagcaagcaagcgcagggataaataagaatttatcccttaagagtcacctccaggccgcatgcagtggcccacgtctgtaatcctagcactttggcaggcccagatgggcggattgcctgagctcaggagttcgagaccagcttgggcaacatagtgaaaccctgtctcaactaaaatacaaaaaatgagccaggtgtggtggcagttgcctgtattcccagctactcaggaggctgaggtatgagaattgcttgaacctgggaggcagaggttgcagtgagctgagatcatgtcactacattccagcctgggcaaaagggattataggcgtgagcacagccccgctaaaatcatattcaagaagcaattcagtttctttctaagcttgtagtcaggggtcaatgattttctagcctgaattaaccagtttaagtttgaggaaagtcctcttcagtgggttcaaatgacatgggaagcaaaaagagaattaaaaaaaagacaaagaaaagggggaaaataccggaggcagaagacacattggaaggccatgagattaaagaggggaaaaagaaacgttgagctgggtgtaaaaagaaaatatggtggtgataataaaaataaaagaac

SEQ ID NO: 263970 - DNA, 261 bp, Homo sapiens
gggtaagaaattgagattgagcatgaaatatgtccagtacatccatcagcctgtctttgtgctctggctatttctgagccagccatctgtgtacaagtgtagcctgacagcaccctgtttcagatccattggatatctctaaaatttgctctgggacttaccctggcactactatcaggatgcccacacaaacctgattgggcagcccatcagcagttgtgaacatgacatggtgaataaacactctcttccttgtcacag

SEQ ID NO: 263971 - DNA, 678 bp, Homo sapiens
tttttttccctctctcaacattatgtttggaagattaatccgtgttgatacatgtagctgtttcattaattttaattgctgcatggtgtccactctgtaaatgtaccacaatctatctatcgatctgctgttcatggagatgtagatgctaattttttttggctattacaaatcatcctgcagcagatactctcacggcggactttcacaaacaggagttttctaggatataagcctctgtgggcagtgactgagtcgaagggcatggctcaaactctttcccccgatctctgtctgcccgctctgctctccccactttaagtaccttctttcccggtggttctagcatatctccggattgtgtcttagtgtccccacttgggtcatgggccgagctcggaggtcagggaaaggtcaggatgctacggctaggggtgccacaactgctgagcactgctgggcaccgtgaggtgctgcttcgggtagatgggctccagctgttaggaggaagtagttcttttgcttcttgccctgagctgtcttagaaagcgcccagtcttggctgggcgtggtggttcacgcctgtaaccgcagcactttgggaggtcgaagtgggtggttcacctgaggtcaggagttccagacctgcctggccagctaaccccatttctactaaaa

SEQ ID NO: 263972 - DNA, 265 bp, Homo sapiens
cgattgcggtttgcacactttgagggtgaacagttgtcatgcagcccttttgagtgctaaaaagtgaccacttaagattttcctcgtggttaggaagatgagtattttaaaatcattctggaggagattagtggtaaagaaaaccttcctcagcaactaaatcattgtggaaaaataagccaattagtcactaaaacaaaaaccttttgaagacttgtgaacagaggaaagaacatgtgaattacaggttttctgttttgtggca

SEQ ID NO: 263973 - DNA, 230 bp, Homo sapiens
atatttttgagttcatagtatatgataggttattgcaaaatataactgtcattaactgagtttgttttatttcttgataatcatttttatgtcttggtttatttaatatatatgctattgatattaaaagttccattatttagtctttccatttattcataggagctgctgtcaccttcagtagcctgttgctgagtacttactaagaattaaatgagaattaagtactg

SEQ ID NO: 263974 - DNA, 373 bp, Homo sapiens
tgagaccagacaagaatatcaaggaggcatgcagaagttacaatgggaaatcaaaaagaagacaaaggagggacacctaattcagaacgatgggtttgttggataggagagaaaaggagacgaatgggcaggtatcatcaaagattcctaagaagaagttcctaacttctgtttttgtgccattgactctttggcagtgtggagaaacccagggacccattttcagaacagtgtttttaaatgcataaaatattttggattaaaaggaaactctgagtattgaaatacctaacaaaatattttaaaagcaaatttgtaatacagtaatgtatatgcttctttattaactaattaaagaacaagatatagcaat

SEQ ID NO: 263975 - DNA, 407 bp, Homo sapiens
ggattatttatatatttatgtaaatatatcatttgtacattcttttttgaatactattaatgaaattttctttacttacaagaaatgtattttagtgtatgtataaaggccactatttttattgtaaaccctatagatcagataacagcatatattagtaagggttccctagagaaatagaaccaagagaagatttatatatcagataggatatataatatcttataaatatatataatattatacatataatataatgatttagctcatgtggtcatggaggcaggcaagttcaatctgtaacgtgggctggcttgctggaggccctggaagaactgacgttccagtttgaggaaagtcaggcagaaagagccattttataaatgaagtctggaagcaatctgctg

SEQ ID NO: 263976 - DNA, 331 bp, Homo sapiens
ttcagtccaaaaactattaggtgaggtcaagcatgagaggcatcctctatagaaagacaagttgtggtggcccagagcaggctgctgggctcaggcagggtgggaaggggcagctcagcatgggctcagatcctgagcagggtgaggaggggatccatgcagcggagcgtgggatggaagaaggcagccctacatgggatgctggagtctgagcagggtgaagaggctgtccagatggggcaggagaagcagtgtggcagctctgtccgctaagagtgcccagaacagctacaccccaacaccaggagcacacctatagcccccagttatg

SEQ ID NO: 263977 - DNA, 341 bp, Homo sapiens
  misc_feature (32)..(32): n is a, c, g, or t
  misc_feature (110)..(110): n is a, c, g, or t
  misc_feature (121)..(121): n is a, c, g, or t
tattcccggaaacctttcctgaaaactctgcnggaaaaagaacttattaaagatcaaatttttggctctcatctgcacaaagtgtgtgaacgtgaaaattccacagttcngtggtttgtanagcaatgcattgaagctgttgagaaaagaggtctagatgttgatggaatatatcgagttagtggcaatctggcaacaatacagaagttaagatttattgtcaaccaagctcctgcaccaccctcactcacctgactgctcatcgtttaagatcattattatgtgacacctcatctggaaagccttctgactacacccagatgaagcttgatgctaatctt

SEQ ID NO: 263978 - DNA, 931 bp, Homo sapiens
aaaaaattaaaacagtaaaataatgacaattgcagagacaaatataaggtaggagagacacaattctctctgccaagtctggtgtgagttccctaaatgaagaatcgagaattggccattttgcatggcctctgcagggtggtctgagggcaggcatcacagctagcgcacacacgtacctgtgcagtgttttccagaaggtaaattctacttcctttaaatgttattactttaatttctggtactttaacaagttaaatttagtattttaaatctgataggctgggtgcagtggctcacgcctataatcccaacactttgggaggccgaggcgggtggatcacctgaggtcaggagttcaagaccagcctgaccaacatagtgaaatctcgtctctactaaaaaaaaattacaaaattagccgggcgtggtggtgcatgcctgtaatcccagctacttgagaggctgaggcaggagaatcgcttgaacccaggagacaaaggttgcagtgagctgagattgtgccactgcactccagcctgggtgacaagagcaaaactccatctcaaaaaaataaaaataaaacaaacaaataaataaaataaatctgatattttaaaaccacacaccatggctggtcagaagtctttatgaccatgaattaacaagtgtttgaattattcttaaaaatgttagcaaagaaatagtctgtgcaaaatctcaaggggaataattttgtttcacctttagtctacattacggtgagcatctgtattcagtcctaaagtttttaaaactaattttttaaattaacaaacaataattgtatatatttattgtatacatgatgttttgaaatatgtatatgttgtggaatggctaaattgagctaattaacatatgcattacctctaatacattcttatttgtg

SEQ ID NO: 263979 - DNA, 602 bp, Homo sapiens
tgttggcgggatagatggatcacaatgtcaggcacgggaagcactcaataaatagttgttgaattgtaccgagttgtagtggctaaatatttcatggttctctattcttcctactttatgccacttaccatgggctagaaaataagatgaagctgtgtttgcattgaatagtggtaagtggttgctggttgtctgaagagtcatagagcttttagtggttttacagctctgattctttttttttgacagcaatgtttactatttctggccattatgtacactaatataaaaatttaattagactctttcttttcaattaattattacagccctgtttgtttgctctctcgacagagcctgctttatgggaacaggagagatcaattttctatcacaaaattcattacttttgactaaagtccagtgcgcctgtgagtgtgtgcaccactcttgatgacttcccgggcagccagaggattgtggattctgccgagtattaaagtagccttggtgaagggatgcttttgattcaagaagagtttgatttgatcattgtccttctcaaagcagcacatgaagcaaaattaaaattctgtacagtt

SEQ ID NO: 263980 - DNA, 1266 bp, Homo sapiens
cagttgctgattatccttgcatataggaaggcagaattgtcttctcaagagtatattgtcacagagccttgaacattgtccttctaagatctcttttcaaaatttcgtagttcaaacagaagctctctcttgagttccctacatttctaaattgcagaacaggcactgtcatggctaaagtgtctgctaattgccagaggtgctaaaagttcctctccatcttcaaaaagcccatgttctcaatagcatccaagatgaagagaatagaaggaacaacaggctagaagggaaacatcaggactctttaactgcaaatggttaatcaagtctccatccactcaggtctatagaaagacccataataggaatcttccagaggctaagatacactcacagtccagggcactgtacctttcccaatgggactctaagtgattcatcctccaggaaggttcagaagcagtcaggacagggccaccaggtgttctggtggaagggaccatgtaatatgttgagtttttacaatttgaactctggacatccagagaactacaaacctattggggtcaaacaggacatcacagccttggtgaaaagaattgctggcatttccattttcaaattaagcaagcctcagccctgagctatcttgaaatactgcaatctcaaaatggtatgaggagttgaatgttgcaggaaagaaagccaacttcaaattgatttgttccaagtctagaaaagcttgtggcctggttttacgatcaagtggttgttttaaaattgcacagggcttactgaaggatgtgtttcctttacaatgagctcataagactacagattggggtgaaggataagaagagtgtgaaaaatataagattaccatttcgatgtagctttcttcgtcttctctggaaacaggattagcaaaaaatcttgcagaattaataccatttctttctggagagagaaagctggttcgactgctaagaataaaaatatagatgaggtcaaagcaatgtcttacagctgctctgaaagctggccaggaactaacatggccctcatggggtttcagccctcctcttccagacacaacttccttccggccaaagcaattcctgaagaggcacaaaatgcccaacagtttctgctccactttggggcaaatggctcccaattcacaaaggctgctttttctcaggccctctatgtgacacagctcatgagctttctaaacggacgagggcatcatatcatttagcaaaa

SEQ ID NO: 263981 - DNA, 371 bp, Homo sapiens
gggaagtcattagtatgttttaattctgaagaatgctttttggaaggtggaagtggagatatagggacgctctgtttatccccttcacacaagcatcctttcttcatggccttaatgtgtcctagttaacagtgaccacttcctaggaagtaaacttgagtttagcagatgtcactggatgaggtctgctctaacaccatctctgggtactcttttcccaggttcaggtcaagtctcagttgggctaatcatgtccaagtgccttctgcttagaggtgtaatgatctcagcagtgatgatctttagttaacatgttgcacaacaatatcttctcttcaatcctcctacggataagcgagaaaaacgttgaa

SEQ ID NO: 263982 - DNA, 172 bp, Homo sapiens
tgcttctcaggcttaagtcaaatgcttcaataagtcattgccatctataagtgaaatctaacggggaaataggccacagacaggatatggggcatggttgctacaaggacgccatggtacactggtttgcaattgatttgtgttctagatccaaaccccagtacctattaaa

SEQ ID NO: 263983 - DNA, 422 bp, Homo sapiens
gggacatgctgccccacttccatccctgggccttggtgcacaggccagaaagtccgagacagaccatctgtcctccctacaggggaccaacttgcacaaacaaatgggcatcagcacccactgggagcagccgtgacccctgggtcctcggtaccagccacaaagccagttctgagtttgttcagaatcctgcttagaatgaaggatgctcctacaccaaagatctcttaatacgaccaccaaacaccacgggattttcaaaggtagctgccacagccgccgcacacaagctctgttcctggcttgcttctgccatctgctggccagttgataaaaggcaccgggggttattttccagtctctctgaggctcttgttttgtgggaggaactcatcaccacctttatcgactcaggtggtgtg

SEQ ID NO: 263984 - DNA, 370 bp, Homo sapiens
gcctcaatccctgctcatgtcacaaattccaaatcaagaaggtttcttcagattctggcaataaagcaaacatgactccaaagggccctctcattacaaattaactagatctttaataaaatataactctcattaacagtgataccatatagcaattgtaggaaacaaggaaaatatcccagctgcctcagtaactgcccccaacccaaaataatgactaaatcataaaatggacaaacaccaaagacttaaaaaacgaattgcagattaggtaaaaactccccagaatatttcgaagtaaaaaatgtaattattgaaaattaaaactcaatggttgaataaaacagcagattaaacacagctcattagt

SEQ ID NO: 263985 - DNA, 404 bp, Homo sapiens
ttcgcggcggctcccttgggtgctgcgcccttaacgggctcaggagccggactgcgcgggtgcaccgccagccggcctccgggaggagcagtgcgctggctgatccgccgggaagtttaaccagcttcctgtggttgctgtgtcgcttttcgcctcctagaacttcccagtgtatcttctgaccatgaccagggtttgcaggaaaccccaaagccggcctttgggcattaacaacagcagcattttattatggaaatcttcaaactgtggagaaattgaacgaaggatataaggaattcactgtactcattacccagtttcagtaattatcaatacgtgggcagtcttgctcccctaatccgggttattttgcgtttttgagacagggtctctgtcacccaggc

SEQ ID NO: 263986 - DNA, 705 bp, Homo sapiens
gtctcatccctaaaggcttgcagggtagaagttgggcacccaacttctaaagctgccctcacagctttgctggatacaacccctgccacagctctcacaggttggagttgcgtgcctgtggctttccagtgctggaatcacacactgatgcctctactgttctggggtctcagggtgacctttccaccttggtactactaggcattgccctaccagcggccctctatagttttctgcctgggtggcacacccatgacttcaggtggctccattcttagaaatctaggtgaaggtaggcttgcccccacagctcatgcactctgagcaccacgcagacacagccaaagtctgctgcctgtgctttctggatgggcagccaagcagcaaaaccctggaatgcagtggagtggagcctgtgatatgagggatgctacacaaagcctgcaggggtccagcaggcacctgcagcccgtcctatgaagttgttctgatgatctctggagcaccttgctatggaaggggttcattcttccatcgtcttgaacaatagcccctggcttctgttcagatggctgacaaaactccatgtaagatgtggccattgggccacacccttaaagttctttaggaacagaccttttcattctttacaatatggaaaggctgagaagtttccaaatctttaagtttggctttctttctgat

SEQ ID NO: 263987 - DNA, 572 bp, Homo sapiens
gggattacaggcgtgagccaccatgcccagctgagtttttgcaaatggatctatataatctctgcatctttataaggacaagttttttaaattttatttttaacatttttaaagagacagtctagctctgttgcccagtctggagtgcagtggctcaatcaaagcacactgcagccttgatctcctgagctcaaaaaatcctcccacatcagcttcacaagtagctgggattacagctatgcaccaccatgcccagctaattaaatttttttttttttttggtagcgatgaggtcttgctatgttgatcaggctggcactttggtaggctgaggtaggaggattatttgaggccaggagcttgaaaccagcctgggcaacatagtgggatcctgtctctaaaaaagtaaataaataaaacaaaaaattagccaggtgtggtgggatgtgcctgttgtcctaactactctggaggctgaggaaggaggatagcttgagcacaggaggtcaaggctgcagtgagctgtcgtcacaccattgcactccagcctgggtgacagaggcgacagagtg

SEQ ID NO: 263988 - DNA, 684 bp, Homo sapiens
ctgataggacccacctgcagtcaaaatttttcacaaaggcatcaggcatcaaccagtcagaatcatgggcagtgcaagaaggtcctggagacattccagccctgcccaggcatggtaggaccataggaaggaggattccagggacactcaggaaatctcacatagtactgcagtggtgtatggtactggctaaatattggcctacatgctacctactttttaatccacactcccaccccttgcaaataaaactgtattattactgtttttacagtcctttattatttatatttatagaagtgtttcaaattcttgaatcttattacttctttatagatttaatttcctttcttaccaaaataaggttattctttagtaattttttcaagtaggactggcaaattcttcatttttgcttaaaagtgacatttcatttttactcttgaatgacagttgggctgagtagagaagtctagatttactatgatttccaataggtagtttcaaatatgatataaataccatatttcatccaatttaagaggccatcaattaattttgccatgagaaaaagagccaccaattaggctatgacaaaccaacaattttaggatgtatttcaattccagagaaaagtttacaagtaataaaagtaaatatgagagtaatgtattttactacgtg

SEQ ID NO: 263989 - DNA, 145 bp, Homo sapiens
tctcagaggaacagctgttggtgtttgcagccatacatgtttgagataagttatcttttgacatcatgaccaagcttttttgttatgtcagatgagataaaagtaagtatttgctgctaaagtttcccctgataagcagtattcc

SEQ ID NO: 263990 - DNA, 280 bp, Homo sapiens
aactgtcacagaatggaggagactaaggacacataacaattaaatgtaatgtatgatcctggaccagaaaaaggacatcaatgggaaaacttggaaattcaagtaagatctatagaatagtctgttttattggctcaatgttaatttcctcctttcaattattatactatgtttttgtaagatgttaacagtaagggacactgggttaaaggaatgctctatttttgcaacatatttgtttacttaaaattatttcaaaacaagaatgaaaaaaaataac

SEQ ID NO: 263991 - DNA, 425 bp, Homo sapiens
cagggatgctgtaccaatcaggcaacactgacctcttgtttccacagcttgaatgcattttctcacaaagttgaaccctgcttcattcaaatacactgaaaataagagagaaatcgcattaggtgtttacgctgaactcacattcccccttcagttggctctgttcactgggcctttatgactcaacagtagagaggttttttctgagtcttccaaatattttggttagaggctgactttttattttggggtagaagtagaggagggaacttcaccctcacagctattgtatcaacctgctaagatccttcacagaaagtatattacaatgatctcatccacttttcctaaaaatagcattactcctttactacgtgttttctttcagatgataggagcaaatgcagtaagaataaatccttatt

SEQ ID NO: 263992 - DNA, 506 bp, Homo sapiens
cagaggggatgacgtgttcattttctgtctctcctgactccactagaaatttaagctccatgagggcaaagactttgctttgtttactacccctatactcagaaccatttctggcatatgctaggcactcaacaaatattttttgaatgaatgaataggagactccagcatccagagaacaggtaggaaatgtctatggatggatatttccctggaccatttgcacagctcccctggactcttttcagggcccagggattccactgtgtcccatccagagattccaggattccagtctcctatccagaagcgtgatttggcacagaggtcagaggatactggtaggacttggccatgacttaactgccccctgccccagatatccaggaaagaaaaagacaggctgaacagctcactgttgttttgttgttgcgaaagctaattccctagtatgaataaacttcagaccttgctctcctttgcctcatgtagtcatcactttccta

SEQ ID NO: 263993 - DNA, 451 bp, Homo sapiens
atgctagaaatagggctatatgtttctttattcctcttatgaaataaaatatagtcctagtgtcactattagtaaaggaagcattttaatatttaataatgtgcttctgtacaattcaggatttattgttaaatttggttttctacaaatattttttatctttgacattattgagaaatgagactttcttaaagcgtattttatttcactttttaaataattactaaaatattactttatatttggctctatattaaatggtaataattgtaccagtaatcctaaggagtaccctgaagtctttggctgagtgctgatctgcacatgtgtggagcaaaacttcgtaagaaaaggaccatcagagagtagaagacacaacaacaggatggcaaaaattcgcatttctgatagccagaatgataaaccttctgtcagaagacaaaattataat

SEQ ID NO: 263994 - DNA, 523 bp, Homo sapiens
gcccaagtggaacaaccagacagggtgacgaaaaccatctgcagtaaaacacgaaggaagaaaaagattcacatctatatctaaaattaaagtgtttctacatctgataaagaagttaaaatttcaaattgaatgagagaaaaaaataactaaaaaaggaaattaaaatatttcatactgatggcttttttcccctttgaaataggaaacaaggttttctactgagaataaatggggagaaaagtcagagatttaagaaaaaccaaacctgaaatagtcattgcaaaggaggaaaaagagtggactacagaaatgtaccatgaatcctatgtagtgctgaggacctgtgacctcgaatttagagaggtatcagcctgtctgatgcccgactcttctccagcacaaaaaagattatgctaactggaagaaaacagaagagtcaatggaccagaaactccaataaggtcaaggaagaattgaactgagagtaacggagacagaccacagaccactagagaaaaaa

SEQ ID NO: 263995 - DNA, 415 bp, Homo sapiens
tcagatccggactggaacctataccatcagctgtttggctccagacattcaaactacactgcgggactttcctgggtctccagtttgcaaacagataatgggactgttcacactacataatcatttaaatatgcagactgttcaatgccatcctccagacctactgattcagaatctgagatctgaagtgcaggaatcagcattgttgaacaaatccttcaagaactaaggttaaaccatgaccactcctcgaggccttccctggagattcgggctcatagattccttctttctctgaattctaaagtacttatggaagattcagcagataatttttaatgaattaaattttaatacatcaaattacttaataataaaatttaataaaattttcagtattctcaaagttgttaca

SEQ ID NO: 263996 - DNA, 927 bp, Homo sapiens
tgcctcgccctgcttcggctcgcgcacggtgcacgcacccactgacctgcgcccactgtgtggcactccctagtgagatgaacccggtacctcagatggaaatgcagaaatcacccgtcttctgcgtggctcacgctgggagctgtagaccggagctgttcctattcggccatcttggctcctggatctctgtgtcaaccttcttttatttttaaaagatattcactgtctcttactaaagcttcctgttcaaagtctggctgagaatttttgctgcttctttccctacctcctcatttccgaaggctggagtgcagtggcatgatctgggctcactgcaaccttcgcgtcctgggttcaagcgattctctcgcctcagcctcctgagtagcgggaactacagaatcagctaccctgctgatctggaggcctttggggacatgaactcttgtagcaggaatcaaagaactggtgtaagaaaacgaatagcagagccatagtgttttatcccctctctgcactccccaaattagactgcttgtttattgaaattggtcaaacagtttaattagcattccatgtttgttatttctttaatcgaggtttcaaacagaacaaggcaacaagccaggccagtaatgagtctcctccacctactcttaagttaaatacttgctgagattcccattggtttcccagagacatctcatcactgatgtactttcacttatcaacagggttattgagcactgttcataaatgcgtactaattggcagtaggcgatgtatatatttatgtaaatttacagttatatataggtacccataaaacctgtgtttttttaagtgagagaaattaagtatttttctgatggaatttgagaaattatgagggccctctatgaggaaaaatgattcacaagatat

SEQ ID NO: 263997 - DNA, 497 bp, Homo sapiens
tgcctcgccctgcttcggctcgcgcacggtgcacgcacccactgacctgcgcccactgtgtggcactccctagtgagatgaacccggtacctcagatggaaatgcagaaatcacccgtcttctgcgtggctcacgctgggagctgtagaccggagctgttcctattcggccatcttggctcctggatctctgtgtcaaccttcttttatttttaaaagatattcactgtctcttactaaagcttcctgttcaaagtctggctgagaatttttgctgcttctttccctacctcctcatttccgaagaactaaggttaaaccatgaccactcctcgaggccttccctggagattcgggctcatagattccttctttctctgaattctaaagtacttatggaagattcagcagataatttttaatgaattaaattttaatacatcaaattacttaataataaaatttaataaaattttcagtattctcaaagttgttaca

SEQ ID NO: 263998 - DNA, 492 bp, Homo sapiens
catcttcctatttttgtttgggtccaaaaaccttccctctaatacccttgtagagaagccgttttgattcctgtttttaatgtacgtaggggtccctgccacccgtggggcttctgcggtgtttacattgtcagtactgaagccccagaggggcgtgccttccaaccaacacgctgactgctggggaggcccctcatgttaccaacagtgcctcatcccctgcattgctgccaattggcatctgtcacattgggagttgcctgtgtgggaatctacaagtaggttccaagacattcacctctggcaacaaaagagtgggtggagaagtttcatttcaagtctgactcgctgttcctcctgccactcccttttttgaaaggcgagcgggtgggtggcccatggagaccttctggcagaagttcccttaaattcctgggactttgcttgccacctggtaggataaagttcaagcctgaatgttttgcctgggag

SEQ ID NO: 263999 - DNA, 2258 bp, Homo sapiens
acccgcaatattggctggaggagagaaggaaatgaaatcaagtactacaagaacaacacggatgatgggcagcagcccttctactgtctcacgtggaccattcagtttccatatgaccaggacacttgcttctttgcacacttctacccatatacatacactgatttgcaatgctacctcctgtcagtggcaaacaaccctatccagtctcagttctgcaagctccaaactttatgcaggagcctagcaggaaataccgtttacttgctcaccatcaccaacccatcccagacccctcaagaggcagctgcaaagaaagctgtggtcttgagtgccagagttcaccctggagaaagtaatggctcctgggttatgaaaggctttttggacttcatccttagcaactccccagatgcccagctcctcagagatatttttgtcttcaaggtgcttcccatgttaaatccagatggtgtgattgtggggaattatcggtgttccttggccggaagggatttgaacaggcattataaaaccattctgaaggagtctttcccttgtatttggtacaccaggaacatgatcaaaagacttcttgaagaaagagaggttctgttgtattgtgatttccatggccacagtcgtaagaataatatcttcctgtatggctgtaataacaacaatcgcaaatactggcttcatgaacgagtctttcctttaatgttatgcaaaaatgcaccagataagttctcttttcacagttgtaattttaaggtccaaaaatgcaaagaaggaacaggacgagttgttatgtggcggatgggaatcctaaacagctacaccatggagtctacctttggcgggtccaccctgggtaataaaagagacacccactttaccatcgaagatctgaagtccttaggttatcatgtctgtgacacccttctggacttttgtgatcctgaccaaattaagttcactcagtgtctagcagagcttaaggagcttttacgacaggaaatccacaagaaattccatgaacttggacaagatgtagatttagaaggaagttggagtgacatctctttgtctgacattgaatccagcaccagtggctctgacagttctctctcagatggtcttcctgttcacctagcaaacatagcagatgagctgactcagaaaaagaagatgtttaagaagaaaaaaaagaagtcacttcagactaggaaacagcgaaatgagcagtatcagaaaaaaaatttgatgcagaagttaaagttaacagaagatacctcagaaaaggcaggatttgcttctactctgcaaaagcagccaacctttttcaaaaactcagagaattccagttttttaccaatgaaaaatgaaaacccaaggttaaatgagacaaatttaaatagaagagacaaagacacccccctggacccatcaatggccaccctgattctgcctaagaataaagggagaatgcagaataagaagccaggctttacagtatcatgctctccaaagagaaccataaactccagccaagagccagctccaggtatgaagccaaactggcctaggagcagatatcctgccacaaagagaggctgtgctgccatggcggcatacccatccttgcacatatacacatacccgtaggtgagcctgggctgtgccacacaagcacttcatcgggggttttgagattagacacattttataatgggggagatgtatgactgggaactgcatttacttgtggtatactgtgttgtgcactcatgcactgaccttacactttgtacttacactgtgggcatgtggtcaagatgcatacctcatgaattcaactattttttcataaaatgaaattttattatgatgtgtaaaaatgctttatcagaaactgaagtgtgttctcatggcacacttcatggcagcacagatatacctcattttaaccaatagatattctctctaaaattatgtgcaaatcaatttttaaaaatcaaaatctatgttaaacacattttggcagtgtgctataataaaaaaaagtgttgtgtcaaagctttctagtgacggtcagtcctactgctgtatgtcaggtttgctcacaatgaggtattcccacatagaaataacaatgcatgtattacccagaatttaatgttgcgtaccttatgttcaatgaggttttgtaatttttttaggctgatgattaaaattctttctctctaaaaagttgt

SEQ ID NO: 264000 - DNA, 2101 bp, Homo sapiens
acccgcaatattggctggaggagagaaggaaatgaaatcaagtactacaagaacaacacggatgatgggcagcagcccttctactgtctcacgtggaccattcagtttccatatgaccaggacacttgcttctttgcacacttctacccatatacatacactgatttgcaatgctacctcctgtcagtggcaaacaaccctatccagtctcagttctgcaagctccaaactttatgcaggagcctagcaggaaataccgtttacttgctcaccatcaccaacccatcccagacccctcaagaggcagctgcaaagaaagctgtggtcttgagtgccagagttcaccctggagaaagtaatggctcctgggttatgaaaggctttttggacttcatccttagcaactccccagatgcccagctcctcagagatatttttgtcttcaaggtgcttcccatgttaaatccagatggtgtgattgtggggaattatcggtgttccttggccggaagggatttgaacaggcattataaaaccattctgaaggagtctttcccttgtatttggtacaccaggaacatgatcaaaagttctcttttcacagttgtaattttaaggtccaaaaatgcaaagaaggaacaggacgagttgttatgtggcggatgggaatcctaaacagctacaccatggagtctacctttggcgggtccaccctgggtaataaaagagacacccactttaccatcgaagatctgaagtccttaggttatcatgtctgtgacacccttctggacttttgtgatcctgaccaaattaagttcactcagtgtctagcagagcttaaggagcttttacgacaggaaatccacaagaaattccatgaacttggacaagatgtagatttagaaggaagttggagtgacatctctttgtctgacattgaatccagcaccagtggctctgacagttctctctcagatggtcttcctgttcacctagcaaacatagcagatgagctgactcagaaaaagaagatgtttaagaagaaaaaaaagaagtcacttcagactaggaaacagcgaaatgagcagtatcagaaaaaaaatttgatgcagaagttaaagttaacagaagatacctcagaaaaggcaggatttgcttctactctgcaaaagcagccaacctttttcaaaaactcagagaattccagttttttaccaatgaaaaatgaaaacccaaggttaaatgagacaaatttaaatagaagagacaaagacacccccctggacccatcaatggccaccctgattctgcctaagaataaagggagaatgcagaataagaagccaggctttacagtatcatgctctccaaagagaaccataaactccagccaagagccagctccaggtatgaagccaaactggcctaggagcagatatcctgccacaaagagaggctgtgctgccatggcggcatacccatccttgcacatatacacatacccgtaggtgagcctgggctgtgccacacaagcacttcatcgggggttttgagattagacacattttataatgggggagatgtatgactgggaactgcatttacttgtggtatactgtgttgtgcactcatgcactgaccttacactttgtacttacactgtgggcatgtggtcaagatgcatacctcatgaattcaactattttttcataaaatgaaattttattatgatgtgtaaaaatgctttatcagaaactgaagtgtgttctcatggcacacttcatggcagcacagatatacctcattttaaccaatagatattctctctaaaattatgtgcaaatcaatttttaaaaatcaaaatctatgttaaacacattttggcagtgtgctataataaaaaaaagtgttgtgtcaaagctttctagtgacggtcagtcctactgctgtatgtcaggtttgctcacaatgaggtattcccacatagaaataacaatgcatgtattacccagaatttaatgttgcgtaccttatgttcaatgaggttttgtaatttttttaggctgatgattaaaattctttctctctaaaaagttgt

SEQ ID NO: 264001 - DNA, 1751 bp, Homo sapiens
acccgcaatattggctggaggagagaaggaaatgaaatcaagtactacaagaacaacacggatgatgggcagcagcccttctactgtctcacgtggaccattcagtttccatatgaccaggacacttgcttctttgcacacttctacccatatacatacactgatttgcaatgctacctcctgtcagtggcaaacaaccctatccagtctcagttctgcaagctccaaactttatgcaggagcctagcaggaaataccgtttacttgctcaccatcaccaacccatcccagacccctcaagaggcagctgcaaagaaagctgtggtcttgagtgccagagttcaccctggagaaagtaatggctcctgggttatgaaaggctttttggacttcatccttagcaactccccagatgcccagctcctcagagatatttttgtcttcaaggtgcttcccatgttaaatccagatggtgtgattgtggggaattatcggtgttccttggccggaagggatttgaacaggcattataaaaccattctgaaggagtctttcccttgtatttggtacaccaggaacatgatcaaaagacttcttgaagaaagagaggttctgttgtattgtgatttccatggccacagtcgtaagaataatatcttcctgtatggctgtaataacaacaatcgcaaatactggcttcatgaacgagtctttcctttaatgttatgcaaaaatgcaccagataagttctcttttcacagttgtaattttaaggtccaaaaatgcaaagaaggaacaggacgagttgttatgtggcggatgggaatcctaaacagctacaccatggagtctacctttggcgggtccaccctgggtaataaaagagacacccactttaccatcgaagatctgaagtccttaggttatcatgtctgtgacacccttctggacttttgtgatcctgaccaaattaagttcactcagtgtctagcagagcttaaggagcttttacgacaggaaatccacaagaaattccatgaacttggacaagatgtagatttagaaggaagttggagtgacatctctttgtctgacattgaatccagcaccagtggctctgacagttctctctcagatggtcttcctgttcacctagcaaacatagcagatgagctgactcagaaaaagaagatgtttaagaagaaaaaaaagaagtcacttcagactaggaaacagcgaaatgagcagtatcagaaaaaaaatttgatgcagaagttaaagttaacagaagatacctcagaaaaggcaggatttgcttctactctgcaaaagcagccaacctttttcaaaaactcagagaattccagttttttaccaatgaaaaatgaaaacccaaggttaaatgaggtagtatttttgtttttgactctttgtcacacagattctctaacctctcgaattagcacctctctcccacaatgtgacaaatgtaatagccatttacgttaccctaacctgacagtgccactgggagcaagaaaacattaaaactgggggagacattgacactgctttggattagacatgactgaagtctggaatcaaatattggtgatttgtgattttacaccaagaacataagaacaggctgccttacttaccatccattcatccctctactcacccatctactcaatcagcaaatgttattttaaaataaatcaatgaattttattgggcacctactacat

SEQ ID NO: 264002 - DNA, 343 bp, Homo sapiens
ctgtacagaagctggtctgatggccttaagagaacgtagaatgaaagtaaccaatgcgcttcttcaaaaaatctaaagaaaatgttctttataagaaacaggaaggcacccctgaggggctgtatctctaatgaaccatggctgtcatcaggaaaatggttgggagatttctcaatccctgaaagggatgaggttgggggagttgcccagaggaatccctgttcccactgatttttattagcaaaacatcctgtgtcttttggagtacgatgtgtaagtgcccattgggtggcctgttggtcactgtgcagcagtctgctccccaataaagcgtgctctttca

SEQ ID NO: 264003 - DNA, 245 bp, Homo sapiens
ttaagaaacaattctcttgaatcgatctctattatgcccattctctgtccctttttcatgtctaattgtaatcaatttaaatataaacctgaaagttgtctaggtagtctccaaatcaaatgagaatgtgtattcacattagtaactctgccgcttaatatagtatttacttctgtaggagcttagtgtgtgtattaagatgtgacagataccgcctgggcaacacagtcagaccctgtctctac

SEQ ID NO: 264004 - DNA, 410 bp, Homo sapiens
ctctaggattaacgaagggtgcagtcaagcatgtgtgtgaatgtgataaatagaggtaataatagaaacatcctgaatagtgcttacagtgtatggcatcccaggcactggtccacatgctttatatgcgctcactcgtttcatctgcccaacagcctcataaggcaggtgccagtattaccattttacttgaggctaggggctgagaaaggcttagcaactgcccaagtggcagtaggtgggggtaggtgggggcaggcagtgtggccgcagatctgccctgttgtgtttgctgctgtggagccggttcagcccgggaagctggaatgcacacttgagaaccaagtgtgtttcccttcatgatcgcgcctttggggctgggtgtgctggctcgggaccagtacaggcag

SEQ ID NO: 264005 - DNA, 286 bp, Homo sapiens
ccttcctcattctgtctcgggagctccttaatgcagtcaaccgcctttcccgagattcaaaaagaagttttgtgtttccccgggggcagccgcctaatgcttcccttgttttccggaacaaagcagacattcagtgaggagggggcaggcgctgactccctcccctccccgcagcaccccgcactcctgcagattcagaacgctggctccggggcccgggtggcctgggggtggggtggggacccccttcccctaggcttggccacaaaagcctcgcccggtagcc

SEQ ID NO: 264006 - DNA, 480 bp, Homo sapiens
tcatcctttttaagccagcaattattcttcatacttgagaatgacttgtatctaatggatgagcttagagggagaagaaaaatagatgtagtaagtcatgctctttcagagtttctattttacccaaaggagggactgtgctgagtctgatttgtgtgtcatctgatcgcctgggcgaggaacacagagaagacaatctgttaacgccgagcaccgaccatctctgtgtcaggctccgcaggtggctctgtccttggcaatgtcactcgctttcagcctgttctattgccaggtgtgtttggcgacgtggaaaatactctctcactgtgggaagcttgggatgcagggaggaaactcggatgaactgggtggtaaaaggctaattagaacggaaccacttaaccacttagcggtagaaccatttaaatgtcaaaatactgagagaaaaatcttgcattaaaaaaaaagttgttttagatt

SEQ ID NO: 264007 - DNA, 356 bp, Homo sapiens
tatattcccacctggtagcaatgcactgagttacctgacctgaaatttgttggacttagtctccatggaggaggatttaccatcttcgttgtctcagaagtcctggtagtgcctcatgccagcaatttagcaggagcaaaagctttgagacagtgttctggatctgctgagctggtctaaaggaacctcttttgcttgaagtaactgtgataggaactttgttactgcttctgttagctcaggtgttggaatgagaatcagcagctgatgaggtgaacagctaggagtactggaattatggagtagtggaggtagattttataaacagagggtcccagttttttggaaatgggaaa

SEQ ID NO: 264008 - DNA, 675 bp, Homo sapiens
atggacttaaagaagggaacagacacaggggcctacttgagggagaaaggtggactccaggcttccagcttttgccccatcatgattcagggtcctaactggagagaaatgttccatgggacagccctggtgatcattttggatctgctgaccactgtgcccacctacaagtcccaagtacagccctaaacctcattctgtcctcctgtgtgtgatcctgagttgctcgtctgcacgaaaataagggattagaagtcatagggagcagcaggtgacctaaggcctccctgcaatggtgcagaggtggggccaggggttccttggcaagaggggaggaaatgagaggaggaaaagccatagaagaacacagaagaacagaataacatggctgttatggaggtaaagcgaaggtgtcccactgaggtgagtggaattggctggttagagcacgttaccttggcaaaatggtaaatatcagggcaatctaacatgatcacacagctgcaccataatgtctcattttacctaattctgttttaaaaaacattgactaaacattgtcattgggctgacaacagtggctcacacctgtaatttcagcaggcaggtggatagcttgagcccaagagcttgagaccagcctgggaaatatggtgaaactccatgtctacaaaa

SEQ ID NO: 264009 - DNA, 462 bp, Homo sapiens
tcatctacagttattccattttctttcaaatgaggaaaccaaggccagaaacattgacttttctacagttgacagagctgaaactctttcaaccctattccagttacttagaggtggtaataaaaggaaatttatggttttgtggccagtattacatgttcagagtgtatccaaaattttaaaccagcagagcaagcttctgtggactcagataccctcctcccccatcctgacactagtcatattggcacaggacacagacataaatgaaaggagccacagtgtctagtctgcttatcctaagtgtaaccttatgagcttgcaaagaaacagacttacaaatcgaaggtgattgatagctggaggaatttaccttaggctaaaggaattattctaatttctgagtaaggcttttgacttaaacagtaatatattagcaggtcagctcagctttcattgagt

SEQ ID NO: 264010 - DNA, 713 bp, Homo sapiens
caaggtggtctagaggtccatttcatttcaatgagtgtgacagccgctcttcttggggcctatgggggaaaggcattggtccgtggtgggagtgaagctgctcccacaagatgcattcccaactggatcaggaagaccttcagatttaggggaggtctttgtggaagtctttagtggagtcttcccctgcccgctagatgtccggtcggttttagcccgcgttggctactggatggtccgctgtgcgggcttcttgggctcctgcttctcttccctgggcttggagcttcgcctcttgtccttccctgacctcggcgtggtgtcttccttcacggcctgtcctcgcccctcgtctgccgctgtcgctcccgcttcctccttggctctggcacacggcggctccttggctctcggccttgccctcctggtcctcctcgccctggcattggccttggctttcgccctcgcgttccgtctccacacttctctggccttcctggccgccttgcgaaggggctggcggcgcctccgggagctccggggcgcggctggggtcctccagggagcgcgcgtgccctcctcttgcctcgcgcgtcccggctttctcctgggcttgggaaccttccagaccctgaagtagccggcggcgtcgctgccgctgacccggaggagcgtggccttggcctgccccctgggcgcttcgtggcggccgc

SEQ ID NO: 264011 - DNA, 226 bp, Homo sapiens
gccaaatttcacagacacaccagaaccccttccggtctccttgccctctgactgcatcctctggtgatactgagctctggaaggaactcgtagaaagaatttgtctggtggaacagaagacttcccaaggcatctaagcgtcagccctcccctgcacactctctcccacctcctccccttcctctcctgatttctaagcacatactcaggtaaagcaaaagcaaaa

SEQ ID NO: 264012 - DNA, 404 bp, Homo sapiens
cgcttgtctgattccaactctacttcatgacatcatctcataatattgcttttaaatagttattttttacatttctattttgcttttatcacacttgctaattgattaatctgtttctcattttctgaactcagcagagcaatctgattagcctagtgtaattttttgagctgtgaatggaccaacttggatcaagaggccatggagtttaatcatccatttacatactgggaatgttcgtgagttccaagattatgtgggtctggcaggcaattatggcttatttctcagatcatcaaccagtatccatgctcagagtgttgattcaaatagcagctgataagcataggagcatttataaaattggaaaaattttaaataaagatagttctgttagaccaaaa

SEQ ID NO: 264013 - DNA, 1097 bp, Homo sapiens
tagtgattagaaaccagtggtatataacaaggttattaatacctcatgaccaagtgtggttaatccctggcaggctttttcaacatttgaaaagcagtcagtgtaattccctgtatctcggccaacttcatggctaggtgacctgtgcagtcacacgttgctacactcttgtaagaagggatcctgtacttcacttaatgccctgctgttgccatcttgaagttcttcacagttttatctttgaactcgtgatttgtatgtgaagtctgatggacactggactatgtgtgcaagtagacaggatacttgagaggcagtgccctactaagctgttggtctgtgtagtatggcctgggagtgttctggaattgtgtgtgggtggccaaggccatgacctttgtctgcattggttgcagcagcagcaaactcatgaacatttgcaacccagagaggacccacagcgtgaggctggtttgtctctcccctaagtctgtccctctgccattcttaggaaatactaattttctgggctgagtactgggacagtaacctccagctttcaggcagtcatcatggtcagtaaagtattagaaaataaaagcatacttgtggacattgtgttaaggcacactaggcagttactagaattctttggagtgtagattctctggtgttaagaactgctgcaacattgcaaagcaaatatccacaggcttagaaataggaatttcatttgatgggagagaacattattttcatttaaaattttggatgaatcaagtattaacaaagaagtcaactttaaaaatagggttttttttgcatttgaaaatacagcaatatactgcataaacaggtgtttccaattatatgcaaatcatgaagccatttttggtttcttgtacaagatgtaggaaatgtcagaggaaacattaaaatgccattgtataaatttatatgtaaaattgaattcagttttgtacaaaactaacattcatgaagaattaattgcagagaagtgctactccagtctttgtctatatataccaaaacttgtatttttttaacttttattgtgcagtaatatatcagaaatc

SEQ ID NO: 264014 - DNA, 451 bp, Homo sapiens
ctgatagtattttaataacagttaaaatgattactcctcacctcaatgtgaaaaagtttttaagtttaatgtatggttatatgcaatttttaaaatgtatttatatatatgctaaaatattccccaaagggacatcatttagaaaaaaacaagtaaatccatttaggaacatgtgtttttcaaagtgatgtctacataataacctatcaattagcaagctactttattttaatattattactcattgcaggcagttcttaggtgcaaagcaaatttggagaaacggtttctaagcaccatcaccaacaatgtcagcaataagtagattttgaagtttgttcacttccacaaagtccaaagttctgtaagttaaacagtgggtttccaagggtgcttatcagtgtggtttaacaaggtatggtgatactgacatgggcagtgcttttggaaa

SEQ ID NO: 264015 - DNA, 802 bp, Homo sapiens
actcggggggggcggccggtgagtgaggcttacagggccccgggaccaaggttcataggtggaagaaattcatctccagatgagactttggacttggacttgggacttttgagttaatgctagaatgaggaaccccagcatgttaattgaacttgatcacccagttgaaggaagaataatagtagatgttggatcttcaggaagctgaagagggcagtgcccagaaatacctgtcttgatagggggatttgagctgaaccaaagcatcaacaccaatcagactgtttccgaagaactagagttttctgggtcagcaatggaaagcctcagagggaatactgctcagggtcctacaaatgaagaagactataaaaacgaaggccaattatcaaggcaaacaaaatgtcctgcacagaagaaatcctcttttgagaacacagtggtcagaaaagtgtcagtgacactcaaagaaattttcacaggggaggaaggccctgaatccagtgaatttagtctaagcccaaaccttgacgcacaacagaaaattccaaagggacatggatccccaatatctaggaaaaactccaaagataattcagacttaattaaacaccaaagacttttctcacaaagaaaaccttgtaaatgcaatgaatgtgaaaaagcctttagttaccaatcagaccttcttgtacacagtagaattcatggtggagaaaagccttttgaatgcaacaaatgtgggaaatctttcagccgaagtacacaccttattgaacatcaaagaactcacactggagag

SEQ ID NO: 264016 - DNA, 1412 bp, Homo sapiens
ccagaacacactcgctcttgagctggtctatttcttatctctcttcaggcaaagtcgtatcctccaccttacctgctccagccgctgtgacatcacgcaggttccgttccctgcactaccgctggttatgtttccttagtgaccctaggcctcttgcaggagagtccctggtcccagccagcgggagcggcttctccagtttgtggctctcggagagttcgcctcgtccctccctctcagataaccacctatttctgacctctggaggccgggctgagcccggaattttatgaccagcgcccgctggccgtcgtcaccctctaatttctcgcaaaactcccggggacccttcttaatgtcagtagccacagtcgccgccgctcctgcgcctagaagccttccacgaccctcaaccccacagagccccgagcaggctcgggttcccgcaggatacactgcccgcccagtggcctggagggcgcgtcccgggctcccctacgccttttggaatcagcgacagacgcaggtataaaagagagcctccactcccacctctccagggctccccacccgctccttctggccgctttctcctgaaagagcaaggcacccctagaagcttcaggctcctccacaggcgagtgcctacccacctatcaggttcataggtggaagaaattcatctccagatgagactttggacttggacttgggacttttgagttaatgctagaatgaggaaccccagcatgttaattgaacttgatcacccagttgaaggaagaataatagtagatgttggatcttcaggaagctgaagagggcagtgcccagaaatacctgtcttgatagggggatttgagctgaaccaaagcatcaacaccaatcagactgtttccgaagaactagagttttctgggtcagcaatggaaagcctcagagggaatactgctcagggtcctacaaatgaagaagactataaaaacgaaggccaattatcaaggcaaacaaaatgtcctgcacagaagaaatcctcttttgagaacacagtggtcagaaaagtgtcagtgacactcaaagaaattttcacaggggaggaaggccctgaatccagtgaatttagtctaagcccaaaccttgacgcacaacagaaaattccaaagggacatggatccccaatatctaggaaaaactccaaagataattcagacttaattaaacaccaaagacttttctcacaaagaaaaccttgtaaatgcaatgaatgtgaaaaagcctttagttaccaatcagaccttcttgtacacagtagaattcatggtggagaaaagccttttgaatgcaacaaatgtgggaaatctttcagccgaagtacacaccttattgaacatcaaagaactcacactggagag

SEQ ID NO: 264017 - DNA, 743 bp, Homo sapiens
ccagaacacactcgctcttgagctggtctatttcttatctctcttcaggcaaagtcgtatcctccaccttacctgctccagccgctgtgacatcacgcaggttccgttccctgcactaccgctggttatgtttccttagtgaccctaggcctcttgcaggagagtccctggtcccagccagcgggagcggcttctccagtttgtggctctcggagagttcgcctcgtccctccctctcagataaccacctatttctgacctctggaggccgggctgagcccggaattttatgaccagcgcccgctggccgtcgtcaccctctaatttctcgcaaaactcccggggacccttcttaatgtcagtagccacagtcgccgccgctcctgcgcctagaagccttccacgaccctcaaccccacagagccccgagcaggctcgggttcccgcaggatacactgcccgcccagtggcctggagggcgcgtcccgggctcccctacgccttttggaatcagcgacagacgcaggtataaaagagagcctccactcccacctctccagggctccccacccgctccttctggccgctttctcctgaaagagcaaggcacccctagaagcttcaggctcctccacaggcgagtgcctacccacctatcaggtaagacgtgcaactgacactcagcgcgcggaggagcccgctgagaaagggtttacctgtccgaagagaactgcgcttccgct

SEQ ID NO: 264018 - DNA, 337 bp, Homo sapiens
agattttgtatggtcatatgcaatagttctgaactcttgtcttcttatgcacaatgttagggttgtgcatgggttggttttcttgcacagctctcattagatttatttcagttacctattcacagccctaatggtagtgacatccctgtttatttacttcttggattcttaccaagttacaacatgatctctttatccttgggctgctgattctattaagtttactatttcttttatttatttacttatttttttgagacagagtctagctctgttgcccggagttgcagtgagccaagattctccagcctgggtgacagagcgaaactccatcttt

SEQ ID NO: 264019 - DNA, 730 bp, Homo sapiens
agacccgtgatcccgtcagccacccagtctgagatgctgacgttatcttcgactattcttccctgtcctgccttgctaattcttcccactagcactaatctcgactctttgtcacttggactatttcagcaacagtctcatctcccagattacctctgtgcacactgacacgtggtcccgtccatcctgaacatgcacagtgattttcctctcccgttgcacacaaacctttaaaagttccccggcccgtgaacaaatgtacaattctctattctgacattacagaccaccggataaggccccattcttcctttacaccctcccctggtcagcctaggagagttgtttttcctggaaagggtgcctgcgttttactgtctctgtgcctttggtcttgctatccccatcccctggaatgctcccttttcttcccttcaaagcccatgcggaaaccacgtccttcatgaagccctccctgatgtaccaaccactgggatctctccctctgctgaaccaccgtagcactttatttgtacctttctcatggcacttaccatattctgccttgtattatagttatttgtgcacttgtcctttgactgttcttagactgtaagcttgccaagggcagggactgtgttttattcatctgtatccatcacagcactaggcgtggtgcatagcacacagcagttgctcaataaatgtttgttggattaaatccttaaaa

SEQ ID NO: 264020 - DNA, 376 bp, Homo sapiens
gatgctactggcccaaggagaatgtagaaacctgtggtgtcaacttgaacccaactttactacgtagtgaagcccagctccttccagtcaagtccgaggagccatagttggtcacccatgagtaagaaaatgagcggcagctgccataagccaagaaaaatatggttggtgtaagacactgagagctttgaagttgattaatcaaaattaactaatactctacacatttatgatacatacaccatgagaaaattcatcaaaacaaattttatgctaatgaaaaataataataacaaaaaaggaatcagtgggaaagttaggattccacacactggaacttcacctgctcaaataaagtagtcatatatctatctgt

SEQ ID NO: 264021 - DNA, 397 bp, Homo sapiens
cattcaagaaaatgtggatgtagcctctttgaagcccattagtgacagtggaattaatttcactgatgccatttggtcaccaacttgtgaaaggcgaacatgtgaatgtcacgagtccatcgaaaagaataaagacaaaacagatctcccacagagtgtggtctatcaaaatgaagagggtaggtgggtcacagaccttgcctattacacatcttttaatagcaaacaaaatttaaatgtgtctctaagtgatgagatgaatgaagacttcagatctggttctgaagcatttgatttgattgcacaagatgaagaagaatttaataaagagcatcaatttatacaggaagaaaacatagatgctcataatacttcggttgcactgggcgatacgtcc

SEQ ID NO: 264022 - DNA, 531 bp, Homo sapiens
cattcaagaaaatgtggatgtagcctctttgaagcccattagtgacagtggaattaatttcactgatgccatttggtcaccaacttgtgaaaggcgaacatgtgaatgtcacgagtccatcgaaaagaataaagacaaaacagatctcccacagagtgtggtctatcaaaatgaagagggtaggtgggtcacagaccttgcctattacacatcttttaatagcaaacaaaatttaaatgtgtctctaagtgatgagatgaatgaagacttcagatctggttgtaagtatatggataaacatttattataacattttcactgtttctgatctttctaagattactgtgtatatgttggtcagccacatcagatcccttctggactatcactgtattctggaagcacttcacttgtttttataggacccaaggttttagttagccagtcttaatcattgtagaatgagccaagccatttccttaagcaaagccaatgagtgagaatagcatttgtatactaccgtgtagaccc

SEQ ID NO: 264023 - DNA, 529 bp, Homo sapiens
ccaacagccagttagctatatgatcttagaaattcagtttatttctctggcctaaatctcctcatttacaaagtgagaagatcagaccagataatttctaatgtttctcattacaattctaattcaaaactcattgaggaagagaagccaacttccttgatatttctttacacatcaatcaatgttaggatcacaggaataagtgacattaaaagggtcacctacctgaatattttaaagaatgctacaaagaaaaatatgtcatttgcttgtaaaactgtgctatctagagaataatgataaaaaaaaaaaagaaataacaacgaacaggctcagggcaattacaacatctctactatccagcactgagtctggcataccctacaggtcataaatttgtctcttggctgggcacagtggttcatgcctataatcccagcactttgagaggccaaggaaggaggattgcttgaagccaggaattcaagaccagcgtggacaacaaagcaagaccctctacaaaaacaaa

SEQ ID NO: 264024 - DNA, 845 bp, Homo sapiens
tgtagagatgagtctcactatgttgaccaggctggtcttgaactcctggcctcctaaagcactgggattacaagcatgagccaccatgcctgatccataaattgttctactgataccatttggttttgttagaatttgggggggctatagaaaacaaggttacagtcttcattagtatttctttttagcaataacaacaaaataggcaattagaccagtgttcatttggtacagtctttaaatcggtcatccaattaacctttaaaaagtaggttatgctcttaaattgtattggttctttaatatgtgttataccagagtatgcctcaaattttatgtagttgaatttgtagaacaaatttggggatattcattttatttttccttttatatgaaattgtataagtacattagcttgacttaaattataaaaaaaaatatatatgaagaagaatgtagaccctataatgttttttgtctttgactttttggcttttatgtacctcattttttctgattgagaaaaagttttgaaaaagtgattcacttgttggttttcattgtggcaaaactttaaattttaagtcatcacactatgagaattgtttgtacacatttataatttttttaaagtatgtaaagtaaggattttttctccattcttcactcacaaaggatagcatttttatggaacctagatttacaaaggaacttgtgattcttttcaatgcttttgtgtcgttttacagctgattaagaaaaaatgtttacatttaattcagctgtatttcctagtagctgtataatcttacacattattcttatataattttgacctattttat

SEQ ID NO: 264025 - DNA, 392 bp, Homo sapiens
atgtacatttttgtgttctatttcaaccagcatgcatccattttccaatgttataaaagttcctcaaaaaccttttagaggctgtgtacttccttgtataaatatagcacagtatatttaatatttaattgtttttgaatagtttatcccctgcttttttgcctgtctccagttctacagtgaaaatttttgtacataaatttttatctagttacagcttcatttttcagcctgggttcctagaagtgagattactgaatcaagacaatgataattttattatttttggtgtataataccaagtggcttttccagtaggttatctgccagtttacaaagagcacaggttttcagaaactgtagtgctcaacagagaagccgtctcttggtgt

SEQ ID NO: 264026 - DNA, 677 bp, Homo sapiens
ggaataaggcctgatctaatctggagatgttacatattacatgtgcataggtacacacacacacacacacacacacacacacatatatacacacacacatacacacacagatatatacacacatatatacacatacacacacatatatacatacacacatatacaaacatgcacacacacatatacacacagacacacacatatatacacatatatacacacagagacacacatatacacacatatgcaaacataaacatacacatgcatgcacatgtacacatacatatatacacacatgcacatacatatatgcacacagagagacatacagagacacacacacatacacacacgcatatatacagacaaacgtataagcatgagtaggagtcaggagggaccagctaaaataatacattcaaccaaacgcaaagctgttaactgccccctcctcatcaatgctacacttttatataaatatgaaccaatataaaagtttgatttactaaaacctaatggattaacattaaccaagagaaaagtgtaaatggagtaatgcaaattagcatgtttgaatgggactccttcattttggggcttttttgaggttgggacacattcattcatcccatagagtgtgtaatatatacaagcctctaagttaggccttgggg

SEQ ID NO: 264027 - DNA, 419 bp, Homo sapiens
ttaaaaaattgaatgaattgccatatttaaaagccgggaaatgtggactctctggcttcttttaaaaaaccagaatatctacccacttaaggccacacccttatacacaacaagaggttggagctgaggggcagatgcctgctgtatttgtatacagccttgagttcaccgcattccccactactcactgatgtcttacccccagcccgcttcataccatctgtgttgccagcctgattttgagtctgtgtcccatgtttatgtcccacagaccttgcttgtttgtttgaacattatgagctgtgtcaacttggcaagtcacttaaactttattccttgatcgctctacctcccaattcttatctccagccattgttcattaggttttgctatttccaaatttcgttgacttcaggcag

SEQ ID NO: 264028 - DNA, 528 bp, Homo sapiens
cagtgaagtggatcattcttcatttgtgcttaagcctcgtggtcctaaaagtacagagacatcagacatggtattcatttaaggatagatttttatctacttcttgtctaaaagagcacagcatttaaatatatcactataaaactagtgatcactagtttttaataaatgaaggcagagtaaaaagtaaggacattaagcctcatatcaattacagccttggaaggtaaaaagtcaggactgctagctcgctggtcaaattattatggagaggtgcatctctgcatctgtgaacggttcaccactcacaagttagatgcttgttcaaagagtgttttgatggcaattctgtaaatcaagggcctttaaaaatgcagatagcaggtgaggtgcagtggctcacacctgtaatcccagtgcttttggtaggtcaaggcttgaggccaggcgttcaaggatacagtgagctataatcacacatctgcactccagcctggctgatagagtgagacccttgtctcaaaaaaa

SEQ ID NO: 264029 - DNA, 955 bp, Homo sapiens
tggagaatagacgtaaggactctgtatttcacagttttctataccatgaatattagaataactgacagatgtcttgccattgatagttgtaaagacttttcatatgtacaatgatccattatttcctgactacaaaacccaggggtatataggtcagattatctccattattcaaatgaggaattgaagctcagaaaggtcaagtgactagcgcaaggtcacacagccagtgagggcaagtgcaaacccagccagcctaactcctaatcttctcttttaattccattacataatgacacctctcatttgcttcagaaatccctgttgtaaagatagatgcaactagcatgatccgtgttgttaggaaaggcatgtgattaattttaaatagatatagtatttaacaccaccagatgagtctccctctgaaaaagcacacaaaaacaaaacaaaacgctgacatagtttccgcaagtcacgaggcaattatgctaattagcaacaagcctccatccctaagcagaatagttcttgtgtgaaacatatcatttaatctttataaccctgatgtgacctagatgatttggtctaaaccccacaatcctattgtgtggcttagttatatctataaatatagaacctgttttacttcatttttgtgtcaggtggtttgaaggggggaaacatacaatgctctgctaagtaattagagctacttacgcaggcattggggaatctgaaacttagcttctaattgtctccacataaaaacagaagttaacttctagggacatcttcagggactcctcaaggcaaatattcatgaaatggggcctattggcttttcttttcatcttggttctgggcatgttgccatgttcctgatctctgaactctgatgctgacctgctacagactccaggagcaatattaaggataaaataataactcacat

SEQ ID NO: 264030 - DNA, 438 bp, Homo sapiens
tgcagctgttctcttagttacattggcagattgtgtgttgtcaatgttgactattgcttagggaaccacagtatatcagtgcatggcctctgcctggccctttcgcacaattgtaactgtagcagtctgcaaagatatgaaaggaacatctgtgagatagatactgaagactgcaaatctgcgtcctgcaaaaatggaacaactagtacacatttaaggggatatttcttccgcaagtgtgtcccaggatttaaagaatttgtcagtgtggccatctcgtcttgtgttttctttttggggaggttttgactacgaattcaatcactttacctatggatcaacaggtacccagagtatgctcttctcatgacaaatggcaaaatcccaatgagtgaaaatatttgatgtctaataaagcctcagcttacaactggtaaa

SEQ ID NO: 264031 - DNA, 486 bp, Homo sapiens
ctgtaaagcagaagtaaattgatagttggttattttactggcaactgtgttttgtttgatcttgacatctgatactcatgaaatttgtagcgtgctgtgaaagactctgacactattaaaaatttgaagctccaaataaacatactggatgcaccattttctgaaagtcatttgtgagattatgtactaaagcaagggtcttaatttcaagtcttaactattcaaactctactaacgtaagttctgaaagaggaattagggtcatagtattaaatcagctggatttggctacaattttacagaatcaattcttaactcagaaaattgtcaaaattcatttatcttatacctcatgtgaaagtagtatggcagttcatagaagtaaaataaaaaatcgtcaaatctgaaatttatctttcaaataaatgtagatacttttttgtgttttatcttaaaaagagttttgtgttttatattaaaaaaaga

SEQ ID NO: 264032 - DNA, 449 bp, Homo sapiens
agaaataacttaagggcacataaatgtttggcatatgatttatttcctatttaaatataaatagactcaacatgctaattttgtgacaaaagtgactgccccaaaaaaataaataaaaggcagtcccttttcatcttttctatgtattctatgtattactcctctcagaatttaatggaaaaatttgcagtatgtcttaacacaacctttaagagaaatgtaacctggtttctcattgctacttttgcttgccttctttcgagaattatttatctaatatgaattatttttgaaatcatttagtacctattaagtacaacgtgtcatctgtgacattaacatttcctttatctttcatggttttcatccaggatagtattatttttctgtctttttctttataagcttttggaaaaataaatatgaatttaatatctaagaaagtttca

SEQ ID NO: 264033 - DNA, 465 bp, Homo sapiens
aatatctcaggatttgcagagactttgcttttacctcttctttcattgtagcttggtcattctcaaatttgagtttctaaggacttttaaagtgttacgtatgctaatccatgtatacattatttttatgattgattaaggacttttttgggaagagttgtggctatacatgatttttacctaatctaatcattttagattcaaactccttgcataaaatgtagctctgcttagcactgctgccattagcttatttctgctggcttagagtgacgtctcggctagttcctgtgttaagataatttaactggtttacattttcttttttatgatgtgtgagttctttctgtctttctcatctttacctttgacatgtcagagacactgttgcttagttattaagaacagactgtcagccgggcgcagtggctcatgcttgtaatcccagcactttgggagcccgag

SEQ ID NO: 264034 - DNA, 351 bp, Homo sapiens
tttgaattaaaaattacccattaaatgccacatggcccagaatcaactgatggagaacattcaaggaatttatttattgagaaaatgttgtgaatacttttaggttacatggtttcccattctagtgtccaaataaaaattagattctcaagtcttcacagtagaaatctgggtacttcagatcagacatcttaagcataaagacatcttgctttacttatcttaaaatgctgcactacagtcccttcttagagaacttaaacatgaagtcacagcaatataatactgctcaagcatttacaatggctttatttgaagaactaatggatatattagcaatctagtctagat

SEQ ID NO: 264035 - DNA, 396 bp, Homo sapiens
gtttagtaaaccacggatttctagccaagctggctctttttgataccactgtctttggatgtttttatgccacaatgacagaattgagaggttgtgacagagacagtgtggcatgcagagtttaaaatgtttactacttggccccttacggaaagtgtaccaacccctgctctagaatgagctgtggattttttttttaaatctagttaaaaggcaggcataaaactgggaaagttttacaaatcaaagcacttcttttgtagtggcagggggattttaaggcatgaaaaatggagtcatctttctggttctaggaggtgtttttcatgacatgctttttttcctttgattcaagtattttcagatgaatcagttagtaaaactagaacagccagt

SEQ ID NO: 264036 - DNA, 353 bp, Homo sapiens
acacagcactccaccctacctacctacccgctccttacagggaagacagtgcaagtgcctgagaaacactgtgccatccaaacataaatgctatttatggcatcagttccagaaactcaaccccaaaggattagactggttctgcccatgaggagtgcagggggctgtagtggggtctgaaaagcaacaaaggatccccttgactaggctcagagtctccagacactagaatcactcttcagaatggaaataccagttacaaggcaagtgctgcccaacaggaagcaggagacgttagctcctggcaacaggggaacatggagaaggacagacacatctttctttatagtaaa

SEQ ID NO: 264037 - DNA, 1036 bp, Homo sapiens
gccagataattctttggtttgtggggctatcctgtgcattttagcagcatccttggcttctatctgctagctgccaggagcatcccttcatcgtgacgagcaaaaatatctccagacattgccaaatgtcccccaagaagacaaaatcactcctagttgagaaccagtggtctagaaagaaacattcatattttttctctgcaaggtgggactggcaggatgggggcctgggggaggtagatttaaaaaatggatatctcagtctgtcttctaagtttatataagccttacaattctgcgggtgttaatgtagttccattaattgtaataactaatatttaattggttcttgccccctctcattcagacaagacctccaccctctgcaaaacatcttcccaggattatgggaagtgcccaagatgtggtcacgggtgtaccacagccagttggcttctgtggtactctgccgctgcgcctgcctccacttctgtggttcatccccaactcccatggaagttggagcactttcacggaaccctgcggttctttccaacatgcagcagccaccagccacagtcacctgcaaccacaaatcagcaaagccccacagccccgaatctccactgaggtttgtaatgaagtgggacttcaagtttaagtctttctccgaggctattacggcctgccagtaggggctctccatgtgcactgctcaaaccattatgctctataactgttttcagtgtaaggctctttacgctttgttagtaatctcttgctctccggagcccagagagtgacagattcgtaacagacccctgttcactcctcgttgcctctcccctgtgctgagagggcttctcattggctcaggtgcatcccctgtgctgcttctcccctcaggatgccctcttcatctagaggtttctccagggaacctgcctggctcactcacctaacaagctaagaaatgtctgaaccgtctttaaattcaagccaggagcctagaagtagtcctagggaaaacgaaaca

SEQ ID NO: 264038 - DNA, 586 bp, Homo sapiens
cctaaggcagcaatggctgctgtaatgaactgatgtgaagaaatgagaaataaaatggtaaaatggggtgagcagaaattatattgtgaatgacattggaaactgaagatcccaaatatggtagattcttatgccaagtgcttaaggataatcctcaagtcagaataccaagcagctattatatgttaaatcataagaatatgctgctgagctagaaaggcatggtccttgtcttaattgagctttaacagcagaaaagcaataaatgtataaatgaatatagaactctaagggattttccagatgttttagtcaaaataaatggattatcacctgaggcttggaaatcttacatggtaatatttatttagtgagactttgcctttactgcagagtagaagcaatcttccctttagaaataaattctgaaagtttacctgtaattttgatatttgaaatttaggttatgttttatagaaactatgtgataaattgattaggtggccaggttagtccacatgtgccaatgtaatcaactgtataccggaagtataatactaatgtaagtaagtaccaaaccctgggt

SEQ ID NO: 264039 - DNA, 126 bp, Homo sapiens
tgttttcaatgaaaaattgccaagccctttggaggccctgatggctcaaccaggttggtggctgctaacgagagtgaagatctatattcagtccatctggcacatgtgcagaagacccttctccaa

SEQ ID NO: 264040 - DNA, 4279 bp, Homo sapiens
gtctgaaggacctgaggcattttgtgacgaggatcgtctcaggtcagcggagggaggagacttatagacctatccagtcttcaaggtgctccagaaagcaggagttgaagacctgggtgtgagggacacatacatcctaaaagcaccacagcagaggaggcccaggcagtgccaggagtcaaggttcccagaagacaaaccccctaggaagacaggcgacctgtgaggccctagagcaccaccttaagagaagaagagctgtaagccggcctttgtcagagccatcatgggggacaaggatatgcctactgctgggatgccgagtcttctccagagttcctctgagagtcctcagagttgtcctgagggggaggactcccagtctcctctccagattccccagagttctcctgagagcgacgacaccctgtatcctctccagagtcctcagagtcgttctgagggggaggactcctcggatcctctccagagacctcctgaggggaaggactcccagtctcctctccagattccccagagttctcctgagggcgacgacacccagtctcctctccagaattctcagagttctcctgaggggaaggactccctgtctcctctagagatttctcagagccctcctgagggtgaggatgtccagtctcctctgcagaatcctgcgagttccttcttctcctctgctttattgagtattttccagagttcccctgagagtattcaaagtccttttgagggttttccccagtctgttctccagattcctgtgagcgccgcctcctcctccactttagtgagtattttccagagttcccctgagagtactcaaagtccttttgagggttttccccagtctccactccagattcctgtgagccgctccttctcctccactttattgagtattttccagagttcccctgagagaagtcagagaacttctgagggttttgcacagtctcctctccagattcctgtgagctcctcctcgtcctccactttactgagtcttttccagagttcccctgagagaactcagagtacttttgagggttttccccagtctccactccagattcctgtgagccgctccttctcctccactttattgagtattttccagagttcccctgagagaactcagagtacttttgagggttttgcccagtctcctctccagattcctgtgagctcctcctcctcctccactttattgagtcttttccagagttcccctgagagaactcagagtacttttgagggttttccccagtctcttctccagattcctatgacctcctccttctcctctactttattgagtattttccagagttctcctgagagtgctcaaagtacttttgagggttttccccagtctcctctccagattcctgggagcccctccttctcctccactttactgagtcttttccagagttcccctgagagaactcacagtacttttgagggttttccccagtctcctctccagattcctatgacctcctccttctcctctactttattgagtattttacagagttctcctgagagtgctcaaagtgcttttgagggttttccccagtctcctctccagattcctgtgagctcctctttctcctacactttattgagtcttttccagagttcccctgagagaactcacagtacttttgagggttttccccagtctcctctccagattcctgtgagctcctcctcctcctcctccactttattgagtcttttccagagttcccctgagtgtactcaaagtacttttgagggttttccccagtctcctctccagattcctcagagtcctcctgaaggggagaatacccattctcctctccagattgttccaagtcttcctgagtgggaggactccctgtctcctcactactttcctcagagccctcctcagggggaggactccctatctcctcactactttcctcagagccctcctcagggggaggactccctgtctcctcactactttcctcagagccctcagggggaggactccctgtctcctcactactttcctcagagccctcctcagggggaggactccatgtctcctctctactttcctcagagtcctcttcagggggaggaattccagtcttctctccagagccctgtgagcatctgctcctcctccactccatccagtcttccccagagtttccctgagagttctcagagtcctcctgaggggcctgtccagtctcctctccatagtcctcagagccctcctgaggggatgcactcccaatctcctctccagagtcctgagagtgctcctgagggggaggattccctgtctcctctccaaattcctcagagtcctcttgagggagaggactccctgtcttctctccattttcctcagagtcctcctgagtgggaggactccctctctcctctccactttcctcagtttcctcctcagggggaggacttccagtcttctctccagagtcctgtgagtatctgctcctcctccacttctttgagtcttccccagagtttccctgagagtcctcagagtcctcctgaggggcctgctcagtctcctctccagagacctgtcagctccttcttctcctacactttagcgagtcttctccaaagttcccatgagagtcctcagagtcctcctgaggggcctgcccagtctcctctccagagtcctgtgagctccttcccctcctccacttcatcgagtctttcccagagttctcctgtgagctccttcccctcctccacttcatcgagtctttccaagagttcccctgagagtcctctccagagtcctgtgatctccttctcctcctccacttcattgagcccattcagtgaagagtccagcagcccagtagatgaatatacaagttcctcagacaccttgctagagagtgattccttgacagacagcgagtccttgatagagagcgagcccttgttcacttatacactggatgaaaaggtggacgagttggcgcggtttcttctcctcaaatatcaagtgaagcagcctatcacaaaggcagagatgctgacgaatgtcatcagcaggtacacgggctactttcctgtgatcttcaggaaagcccgtgagttcatagagatactttttggcatttccctgagagaagtggaccctgatgactcctatgtctttgtaaacacattagacctcacctctgaggggtgtctgagtgatgagcagggcatgtcccagaaccgcctcctgattcttattctgagtatcatcttcataaagggcacctatgcctctgaggaggtcatctgggatgtgctgagtggaataggggtgcgtgctgggagggagcactttgcctttggggagcccagggagctcctcactaaagtttgggtgcaggaacattacctagagtaccgggaggtgcccaactcttctcctcctcgttacgaattcctgtggggtccaagagctcattcagaagtcattaagaggaaagtagtagagtttttggccatgctaaagaataccgtccctattacctttccatcctcttacaaggatgctttgaaagatgtggaagagagagcccaggccataattgacaccacagatgattcgactgccacagaaagtgcaagctccagtgtcatgtcccccagcttctcttctgagtgaagtctagggcagattcttccctctgagtttgaagggggcagtcgagtttctacgtggtggagggcctggttgaggctggagagaacacagtgctatttgcatttctgttccatatgggtagttatggggtttacctgttttacttttgggtatttttcaaatgcttttcctattaataacaggtttaaatagcttcagaatcctagtttatgcacatgagtcgcacatgtattgctgtttttctggtttaagagtaacagtttgatattttgtaaaaacaaaaacacacccaaacacaccacattgggaaaaccttctgcctcattttgtgatgtgtcacaggttaatgtggtgttactgtaggaattttcttgaaactgtgaaggaactctgcagttaaatagtggaataaagtaaaggattgttaatgtttgcatttcctcaggtcctttagtctgttgttcttgaaaactaaagatacatacctggtttgcttggcttacgtaagaaagtagaagaaagtaaactgtaataaataaaagtgtcagtgactcatttatttga

SEQ ID NO: 264041 - DNA, 4100 bp, Homo sapiens
gtctgaaggacctgaggcattttgtgacgaggatcgtctcaggtcagcggagggaggagacttatagacctatccagtcttcaaggtgctccagaaagcaggagttgaagacctgggtgtgagggacacatacatcctaaaagcaccacagcagaggaggcccaggcagtgccaggagtcaaggttcccagaagacaaaccccctaggaagacaggcgacctgtgaggccctagagcaccaccttaagagaagaagagctgtaagccggcctttgtcagagccatcatgggggacaaggatatgcctactgctgggatgccgagtcttctccagagttcctctgagagtcctcagagttgtcctgagggggaggactcccagtctcctctccagattccccagagttctcctgagagcgacgacaccctgtatcctctccagagtcctcagagtcgttctgagggggaggactcctcggatcctctccagagacctcctgaggggaaggactcccagtctcctctccagattccccagagttctcctgagggcgacgacacccagtctcctctccagaattctcagagttctcctgaggggaaggactccctgtctcctctagagatttctcagagccctcctgagggtgaggatgtccagtctcctctgcagaatcctgcgagttccttcttctcctctgctttattgagtattttccagagttcccctgagagtattcaaagtccttttgagggttttccccagtctgttctccagattcctgtgagcgccgcctcctcctccactttagtgagtattttccagagttcccctgagagtactcaaagtccttttgagggttttccccagtctccactccagattcctgtgagccgctccttctcctccactttattgagtattttccagagttcccctgagagaagtcagagaacttctgagggttttgcacagtctcctctccagattcctgtgagctcctcctcgtcctccactttactgagtcttttccagagttcccctgagagaactcagagtacttttgagggttttccccagtctccactccagattcctgtgagccgctccttctcctccactttattgagtattttccagagttcccctgagagaactcagagtacttttgagggttttgcccagtctcctctccagattcctgtgagctcctcctcctcctccactttattgagtcttttccagagttcccctgagagaactcagagtacttttgagggttttccccagtctcttctccagattcctatgacctcctccttctcctctactttattgagtattttccagagttctcctgagagtgctcaaagtacttttgagggttttccccagtctcctctccagattcctgggagcccctccttctcctccactttactgagtcttttccagagttcccctgagagaactcacagtacttttgagggttttccccagtctcctctccagattcctatgacctcctccttctcctctactttattgagtattttacagagttctcctgagagtgctcaaagtgcttttgagggttttccccagtctcctctccagattcctgtgagctcctctttctcctacactttattgagtcttttccagagttcccctgagagaactcacagtacttttgagggttttccccagtctcctctccagattcctgtgagctcctcctcctcctcctccactttattgagtcttttccagagttcccctgagtgtactcaaagtacttttgagggttttccccagtctcctctccagattcctcagagtcctcctgaaggggagaatacccattctcctctccagattgttccaagtcttcctgagtgggaggactccctgtctcctcactactttcctcagagccctcctcagggggaggactccctatctcctcactactttcctcagagccctcctcagggggaggactccctgtctcctcactactttcctcagaagtttccctgagagttctcagagtcctcctgaggggcctgtccagtctcctctccatagtcctcagagccctcctgaggggatgcactcccaatctcctctccagagtcctgagagtgctcctgagggggaggattccctgtctcctctccaaattcctcagagtcctcttgagggagaggactccctgtcttctctccattttcctcagagtcctcctgagtgggaggactccctctctcctctccactttcctcagtttcctcctcagggggaggacttccagtcttctctccagagtcctgtgagtatctgctcctcctccacttctttgagtcttccccagagtttccctgagagtcctcagagtcctcctgaggggcctgctcagtctcctctccagagacctgtcagctccttcttctcctacactttagcgagtcttctccaaagttcccatgagagtcctcagagtcctcctgaggggcctgcccagtctcctctccagagtcctgtgagctccttcccctcctccacttcatcgagtctttcccagagttctcctgtgagctccttcccctcctccacttcatcgagtctttccaagagttcccctgagagtcctctccagagtcctgtgatctccttctcctcctccacttcattgagcccattcagtgaagagtccagcagcccagtagatgaatatacaagttcctcagacaccttgctagagagtgattccttgacagacagcgagtccttgatagagagcgagcccttgttcacttatacactggatgaaaaggtggacgagttggcgcggtttcttctcctcaaatatcaagtgaagcagcctatcacaaaggcagagatgctgacgaatgtcatcagcaggtacacgggctactttcctgtgatcttcaggaaagcccgtgagttcatagagatactttttggcatttccctgagagaagtggaccctgatgactcctatgtctttgtaaacacattagacctcacctctgaggggtgtctgagtgatgagcagggcatgtcccagaaccgcctcctgattcttattctgagtatcatcttcataaagggcacctatgcctctgaggaggtcatctgggatgtgctgagtggaataggggtgcgtgctgggagggagcactttgcctttggggagcccagggagctcctcactaaagtttgggtgcaggaacattacctagagtaccgggaggtgcccaactcttctcctcctcgttacgaattcctgtggggtccaagagctcattcagaagtcattaagaggaaagtagtagagtttttggccatgctaaagaataccgtccctattacctttccatcctcttacaaggatgctttgaaagatgtggaagagagagcccaggccataattgacaccacagatgattcgactgccacagaaagtgcaagctccagtgtcatgtcccccagcttctcttctgagtgaagtctagggcagattcttccctctgagtttgaagggggcagtcgagtttctacgtggtggagggcctggttgaggctggagagaacacagtgctatttgcatttctgttccatatgggtagttatggggtttacctgttttacttttgggtatttttcaaatgcttttcctattaataacaggtttaaatagcttcagaatcctagtttatgcacatgagtcgcacatgtattgctgtttttctggtttaagagtaacagtttgatattttgtaaaaacaaaaacacacccaaacacaccacattgggaaaaccttctgcctcattttgtgatgtgtcacaggttaatgtggtgttactgtaggaattttcttgaaactgtgaaggaactctgcagttaaatagtggaataaagtaaaggattgttaatgtttgcatttcctcaggtcctttagtctgttgttcttgaaaactaaagatacatacctggtttgcttggcttacgtaagaaagtagaagaaagtaaactgtaataaataaaagtgtcagtgactcatttatttga

SEQ ID NO: 264042 - DNA, 3311 bp, Homo sapiens
gtctgaaggacctgaggcattttgtgacgaggatcgtctcaggtcagcggagggaggagacttatagacctatccagtcttcaaggtgctccagaaagcaggagttgaagacctgggtgtgagggacacatacatcctaaaagcaccacagcagaggaggcccaggcagtgccaggagtcaaggttcccagaagacaaaccccctaggaagacaggcgacctgtgaggccctagagcaccaccttaagagaagaagagctgtaagccggcctttgtcagagccatcatgggggacaaggatatgcctactgctgggatgccgagtcttctccagagttcctctgagagtcctcagagttgtcctgagggggaggactcccagtctcctctccagattccccagagttctcctgagagcgacgacaccctgtatcctctccagagtcctcagagtcgttctgagggggaggactcctcggatcctctccagagacctcctgaggggaaggactcccagtctcctctccagattccccagagttctcctgagggcgacgacacccagtctcctctccagaattctcagagttctcctgaggggaaggactccctgtctcctctagagatttctcagagccctcctgagggtgaggatgtccagtctcctctgcagaatcctgcgagttccttcttctcctctgctttattgagtattttccagagttcccctgagagtattcaaagtccttttgagggttttccccagtctgttctccagattcctgtgagcgccgcctcctcctccactttagtgagtattttccagagttcccctgagagtactcaaagtccttttgagggttttccccagtctccactccagattcctgtgagccgctccttctcctccactttattgagtattttccagagttcccctgagagaagtcagagaacttctgagggttttgcacagtctcctctccagattcctgtgagctcctcctcgtcctccactttactgagtcttttccagagttcccctgagagaactcagagtacttttgagggttttccccagtctccactccagattcctgtgagccgctccttctcctccactttattgagtattttccagagttcccctgagagaactcagagtacttttgagggttttgcccagtctcctctccagattcctgtgagctcctcctcctcctccactttattgagtcttttccagagttcccctgagagaactcagagtacttttgagggttttccccagtctcttctccagattcctatgacctcctccttctcctctactttattgagtattttccagagttctcctgagagtgctcaaagtacttttgagggttttccccagtctcctctccagattcctgggagcccctccttctcctccactttactgagtcttttccagagttcccctgagagaactcacagtacttttgagggttttccccagtctcctctccagattcctatgacctcctccttctcctctactttattgagtattttacagagttctcctgagagtgctcaaagtgcttttgagggttttccccagtctcctctccagattcctgtgagctcctctttctcctacactttattgagtcttttccagagttcccctgagagaactcacagtacttttgagggttttccccagtctcctctccagattcctgtgagctcctcctcctcctcctccactttattgagtcttttccagagttcccctgagtgtactcaaagtacttttgagggttttccccagtctcctctccagattcctcagagtcctcctgaaggggagaatacccattctcctctccagattgttccaagtcttcctgagtgggaggactccctgtctcctcactactttcctcagagccctcctcagggggaggactccctatctcctcactactttcctcagagccctcctcagggggaggactccctgtctcctcactactttcctcagaagtttccctgagagttctcagagtcctcctgaggggcctgtccagtctcctctccatagtcctcagagccctcctgaggggatgcactcccaatctcctctccagagtcctgagagtgctcctgagggggaggattccctgtctcctctccaaattcctcagagtcctcttgagggagaggactccctgtcttctctccattttcctcagagtcctcctgagtgggaggactccctctctcctctccactttcctcagtttcctcctcagggggaggacttccagtcttctctccagagtcctgtgagtatctgctcctcctccacttctttgagtcttccccagagtttccctgagagtcctcagagtcctcctgaggggcctgctcagtctcctctccagagacctgtcagctccttcttctcctacactttagcgagtcttctccaaagttcccatgagagtcctcagagtcctcctgaggggcctgcccagtctcctctccagagtcctgtgagctccttcccctcctccacttcatcgagtctttcccagagttctcctgtgagaactcagagtactttgagggttttccccagtctcttctccagattcctatgacctcctccttctcctctactttattgagtattttccagagttctcctgagagtgctcaaagtactttgagggttttccccagtctcctctccagattcctgggagcccctccgtttctcctccagctttactgagtcttttccagagttcccctgagagaactcacagtactttgagggttttccccagtctcctctccagattcctatgacctcctccttctcctctactttattgagtatttcacagagttctcctgagagtgctcaaagtgcttttgagggttttcccccagtctcctctccagattcctgtgagctcctctttctcctacacttattgaagtcttttccagagctgccctgaaagaactcaccagcaatttagaagggttgcccaagtctctcttccagattctggtagttctcgtccgtctacgacaattatcgggctttcaagaagtccctgagtgtctccaaggaatttgggggttcccaggttccttcaaagtctaagcctgaggcacatgccagctcctcacagccagaattccgcggggccggccacaatttgagcctcgggggccatcatcatatcagccacggagacgtatccatccgcaggggccgctcacaccagtcaggcatcacacgagat

SEQ ID NO: 264043 - DNA, 408 bp, Homo sapiens
gtggagaacgaagccactgggaccgtccggggagtggagtaagctcctccgaagtctttctggagagactcggcctgggcgggggaactccgcccacccaacccttggcaacccttggatattggcagttataccaataaccaaggtcctggtctacacctgtcccccccaacccccttccccgcgtccaagaccactgatacctgcaaggaaagccggaaattgtatgtgaatcacctaaatgaactccagttgccagctgatttgagccgctaaattcccaggctcttccatatctctccagagaacccatctacaagtaggaaaagctatcgttttcataccctaaaaatgaaacactgtggtaattctgacagaaaataaagacctctgaaggtgaactttgta

SEQ ID NO: 264044 - DNA, 627 bp, Homo sapiens
gtcatcaaattagctgaatgaacctggacctgtttgagctacctagaataacgtgaactaatcccagatatattattcttgattcacaaatttcttctgtgatagaaaaaagagtgagaggtggccttcagaattagcagtagtggaatgattcaggggcagggccccaggattttttaatgatcaatcaactactcattgtggcaagaaccattaagtccctgagggagataaatgcctagaagtgaggcaaaaggaaattctaactagctgagggttttggccccaaacatctaggtggtctcttgagaactggactaggccacaataagtcacaaagctcttgcttaaaagtaatgtaactgctaatttgcctctcttggaggttagtatttcttaatagtactcagatgtattggctgtggagaagggaatgtgccatgtaaaatacatttttcaggacttgaatctcagaaaaaccaattcagaagatgtgagatgggtttcaagaattatttagcagtgcctcagggttctctgaggtagatggttagtgcattagactatagcctccgagattttggtgctgcagtgatatagaaaaaaaaacaaaagaaagagcacaat

SEQ ID NO: 264045 - DNA, 208 bp, Homo sapiens
gttttatgtgtaataggagaaggatttctgcttataatagttgtaaaattagggatgggtatacttttttcagtgaaataaatgccttacttatttcttttactccaaatgtgtttttatgcctctttcatttgtatgcctatgaatgtatgagtctgtgaaatgattccattaaaatagaaatatttagttatttgaactaatatat

SEQ ID NO: 264046 - DNA, 448 bp, Homo sapiens
ttagatttggataccagctaacattgagttcttactacattgcaggctctgttctagtgcttcacaagtattaactcgtttgttcctcccaacaactatgaagtaggtactattactgttcccactttacaggtgatttgaccaaggtggaggcaggatttgaacacaggtggtctaagattttagccactcttctctgctgcatccctggacgtagtaatgatggagcaaaggaatgtccaggacacagaaaactcaggaggccacgtagaatccagcatgtctaaagtggtgtatgctcactgcagaaagtgtgtgtaggtgggataggacaggcaggaggtgttaaaggaatgataaatggaaagaataaaggatatgttgtgggtgagtttgctcaataaaaatctctacaggtcctaggtttgggttattactactccttcgg

SEQ ID NO: 264047 - DNA, 202 bp, Homo sapiens
gttgagtcaggaattgacagcagagaactcaaggttaaacctgacactccgtttgtgactcggtctgggttagattgttttccccccttaatggtaagggggtaaaagcagcttgtttttctgagaccaactacatgcatgtagtttatattatgtgcggaataaacagaattcaatacgatattttcttacaattcttatt

SEQ ID NO: 264048 - DNA, 340 bp, Homo sapiens
gtttcatgacttgccccccagagtggaacttgggtagagttagagtcagggccctggtccctggtgctctttcctggtcgcttctcatagccaggacgttgcttacattagttctcaaccccactgggaccaatcatttttattgccaatctattttggggctctgttctagtggcaataaatcattctttcagagctccctatttaaccttgtgagagcgtgtgtgtgtggtggaggtgcttacataaatgcagtatttttaacctgcctggcacgctttaggttggcgttaaatgaatatctggagaataaaggtttgtagttattctgaagcaaaaa

SEQ ID NO: 264049 - DNA, 217 bp, Homo sapiens
tgggcatggtggcgcatgactgtaatcccagctaatcgggaaactgaggcacaagaatcacttgaaccgggaggtggaggttgtggcaagctgagatcatgccacttgcactccagcctgggcgacagagggagactctaaataaataaataagtaacttacgtagtgctgttatttttatttcaaaacgtctctacctccattttgaaacaacatg

SEQ ID NO: 264050 - DNA, 623 bp, Homo sapiens
ctggatcattttacattcccaccaacaatgtatgattgatccattttctctgtatccttgccagcatttggtattgtccccatttttaattttagttgctctggtacatgtgttcagatatatcatcatggtcgtaatttacattttcctaatggttacttacgttgaacatctgctcatgtgagtatttgccattcatatatctcttcatgttgttagacattttttaattggattatgtttttaatgtcgatttctgagagtttttttatacagtatagattagacttttgttaaatatgaaatttacaaatattactttgtcttttcattttaacagggtcttttgcagagcaaaagtttgaaatattgttgtagtccactgtgtcaatatttttctgttataaattatgtttttagtgttatatcttagaactattcaccaagacccaggtcccaaagatgttatctactgtcttctaagcttaggtctaggttcagcttttgccaatagatagccaatcgctctagcaccgattgttagaaagactagccttccttcatataaatgcgtttatgcctttgttattagttggtcataattgcatagagctatttgtagg

SEQ ID NO: 264051 - DNA, 488 bp, Homo sapiens
cagtgtgaaaatatgcgactgaggaaaaactctacaggtgtagcatagacatgcctgttttctttttggcggggaggagggtggctggagtgcattggcgcgatcttggctcactgcagcctccaccttctgggttcaagcgattctcctgcctctgcctcctgagtagcagaatacagccacacaccaccacgcttggctaatttttgtatttttagtggagacagggttttgccatgttggccaggctggtctcaaactcctgaccgcaaatgatccacctacctcaacctccaacgtgctagggttagaggcatgagccactgtgtccagtcgatatgcctgttttcggaacccaggaaatcaaccttaacacacttctccatccctacctacccaagctgtccttttttctccccctacctctaccccacaacccctcaatgcagaacctccagggctccccaggactcgggatgctggaggct

SEQ ID NO: 264052 - DNA, 313 bp, Homo sapiens
cttcagtttgtaaacgtcccgacaacgcaggaacagagttaaaagagtgtgtgtcgtccttagctgctcccaccccatcgtctcctccctagccaacccagccgccagtctggcgtgcgccttcaaggtttcttcctagacactggcaaacatagatcactattttctgccacatggtatcttttaaacacacacgattgttttgtgcagaaactttctatttttacctctcataagtgtcctgtggattctttccatgtcactgtggtgtgtgtgcgtgtgtgagattcaagttcagcttgctaatcttgta

SEQ ID NO: 264053 - DNA, 584 bp, Homo sapiens
gccagcccagcttatgttctatggctgccagagttctaatttttccctgtgttggagtgcccagggggcagcacaggctacaaccctggctgttcgggcacctcagatgatccagcctgtgagccttagacagctccccgaaattggaggttgaacccaacacagcacagctgctctaccaaaactgctcgactgcttctttaaggaagtccctgatcccattccccctgactgggtgagatctcctaattggggtctccagccacctcctacaggcatgttcaggctggcaacaggtcagtacctccctggaacaaagcttccagaggaaggggcaggctgccatctttgctgttcacagcttgtactagtgatagctccaggtactggagatgactagggtccaaaacagacaccccagccaatcacagcagcactacagaaaagtggccagactgctaaaagagaaacaaacacattgtccgcgtccaccaccaaaccccttctgggttagcaccctccaagaacaaagggggatcataccaagatggccaagaatcatggcaacatgctggaacctccct

SEQ ID NO: 264054 - DNA, 2408 bp, Homo sapiens
gcgctcagcctggcggttctacctccgagggttcgcccgcccttggttttccttacaccttagcctttggctcctttgaccactcgaagccccacagcgtgttccagcggacttcaccagcagacccagaagtggtgggtgaaacactgcctctgttcctccttgagcctgtcgggagctgctgcctgccaccaccatgtctgctgcaaatcctgagactccaaactcaaccatctccagagaggccagcacccagtcttcatcagctgcagctagccaaggctgggtgttaccagaaggcaaaatcgtgccaaacactgtttttgttggtggaattgatgctaggatggatgaaactgagattggaagctgctttggtagatacggttcagtgaaagaagtgaagataatcacgaatcgaactggtgtgtccaaaggctatggatttgtttcgtttgttaatgacgtggatgtccagaagatagtaggatcacagatacatttccatggtaaaaagctgaagctgggccctgcaatcaggaaacaaaagttatgtgctcgtcatgtgcagccacgtcctttggtagttaatcctcctcctccaccacagtttcagaacgtctggcggaatccaaacactgaaacctacctgcagccccaaatcacgccgaatcctgtaactcagcacgttcaggcttattctgcttatccacattcaccaggtcaggtcatcactggatgtcagttgcttgtatataattatcaggaatatcctacttatcccgattcagcatttcaggtcaccactggatatcagttgcctgtatataattatcagccatttcctgcttatccaagatcaccatttcaggtcactgctggatatcagttgcctgtatataattatcaggcatttcctgcttatccaaattcaccatttcaagtcgccactggatatcagttccctgtatacaattatcagccatttcctgcttatccaagttcaccatttcaggtcactgctggatatcagttgcctgtatataattatcaggcatttcctgcttatccaaattcaccatttcaagtcgccactggatatcagttccctgtatacaattatcaggcatttcctgcttatccaaattcaccagttcaggtcaccactggatatcagttgcctgtatacaattatcaggcatttcctgcttatccaagttcaccatttcaggtcaccactggatatcagttgcctgtatataattatcaggcatttcctgcttatccaagttcaccatttcaggtcaccactggatatcagttgcctgtatataattatcaggcatttcctgcttatccaagttcaccatttcaggtcaccactggatatcagttgcctgtatataattatcaggcatttcctgcttatccaagttcaccatttcaggtcaccactggatatcagttgcctgtatataattatcaggcatttcctgcttatccaagttcaccatttcaggtcaccactggatatcagttgcctgtatataattatcaggcatttcctgcttatccaagttcaccatttcaggtcaccactggatatcagttgcctgtatataattatcaggcatttcctgcttatccaagttcaccatttcaggtcaccactggatatcagttgcctgtatataattatcaggcatttcctgcttatccaaattcagcagttcaggtcaccactggatatcagttccatgtatacaattaccagatgccaccgcagtgccctgttggggagcaaaggagaaatctgtggaccgaagcatacaaatggtggtatcttgtctgtttaatccagagaagagactgataaattccgttgttactcaagatgactgcttcaagggtaaaagagtgcatcgctttagaagaagtttggcagtatttaaatctgttggatcctctcagctatctagtttcatgggaagttgctggttttgaatattaagctaaaagttttccactattacagaaattctgaattttggtaaatcacactgaaactttctgtataacttgtattattagactctctagttttatcttaacactgaaactgttcttcattagatgtttatttagaacctggttctgtgtttaatatatagtttaaagtaacaaataatcgagactgaaagaatgttaagatttatctgcaaggatttttaaaaaattgaaacttgcattttaagtgtttaaaagcaaatactgactttcaaaaaagtttttaaaacctgatttgaaagctaacaattttgatagtctgaacacaagcatttcacttctccaagaagtacctgtgaacagtacaatatttcagtattgagctttgcatttatgattta

SEQ ID NO: 264055 - DNA, 489 bp, Homo sapiens
cagccacaaagctggctgtctgaaatgtggttaaggcaaaacactcgggggatctctttgtagtagtgggcttggctcgctttggaaaggccggatttgactcgtgctgggcatttaaccaggagtgcggtccccagggtgtttcctcccggcttctgcccaacgagcctggagttaatgcgttaatgggctaccctggtagcgcacaggccgttttcggcactgtttctccttctctgatgactcgagttcaacctcctgggctgagttgctttgcctccgtcacagtgcaaggagggaagttgacaggaggaggagacgccgcgctgtagcagggagctttgggatccaggggactggaagagagccgcgcgccagcagctggggccgctggtgtccgggattccgagttatggggacaggagttaaatagctgaactttcagcgatttcgcctcgagcgaagcggtaataaaaggcaagcttctga

SEQ ID NO: 264056 - DNA, 318 bp, Homo sapiens
gttcataccaatgttccctgaagtgtttttcatgaaaagctagcccttagatagtgtctggaaagagaagattatttggttataattatatttatactgtgctgtttaccgtaccctctatttcccaaaatctccaacaaatccagagatgtaatgtacaacataagcattagagataataaaattgtattgtgtcagggaattttgttaaataagtggattttggctgctcttgtcacagaaaagtaactgtgagataatagatatgttgatttgcttcactataacctatgtgtaccctgtaatatgttgtaaatc

SEQ ID NO: 264057 - DNA, 601 bp, Homo sapiens
gttcaccaaatgtcccttcagctaagaaaccacctaagattctttggattcacaggctttcttttaataaaaaaataaaatttaaaaggccttctgaaaaagtttttaaatgggccaaggacagcagaaattgcaactccagaaatagagagtaaagctctggactccaaatgaaagcaaccataactacctaagaataacttgcctaaaggtatatttttacgagttataataataaattattaacgactaaaatgatgagattttaaagaatatttttttatccagcaattcctaagcacatactgtagcaactacccagatatctgaaaaggacagtgacctctgagtattcccctgaactgacacctcaccactactcttgcggactctgagagtcatgttaatctgttctacagaaaggcagctgtggtgtcctagaaagtctggactggtaatcaaaaccttcggctctaattttagctctcacttagaagctgtgtgatgtgtggcacaacactaaacctctatgcaactggactttgctcatctgcaaaaatagaagccattgggataattcaacaaaacgttcaggagaaaa

SEQ ID NO: 264058 - DNA, 311 bp, Homo sapiens
agatattctttatgttaatgaattgtcttctgtagaaatgcaaagatcttttggaagggctgtacacaggtctaagattgtagctaagatattgctacccagagagattttggaagacaagtgttgaaaaagctgccatcagcctgagtccaggatgactgtgcacagaagggttgcccatcaacttagaacattcacttcaaattgtcacgtgcgtgagacatacactttttattctgcaagctgtctggaaacgtcatttgttacagtgactcagtatatccttcactaataaaacatctcatgcagaa

SEQ ID NO: 264059 - DNA, 457 bp, Homo sapiens
acatttctaaatgtcatgttggtgggtctctagagatgtgttgcctcagttatatgaagcttatttgaccccataattagtgcccaccctgtcctgctgaacttcctgtttcccatatatttatttatatgacattcacgagggtgaaatttgctttgcctcctgagatgactgtaggtctgggtgaccccaacacctgagttcaggactgatggcaagagctgcactgtctaatatggtagctactagccacatgtggctgttgggcatttgaattgtgcctactctgcactgagatgctttaagtataaaatacgcaaagtgctgggattacagacatgagccactatgcctggccgaaattctattctttcatagtaaaaatgtagtaataggagcatctattgagtaatttccctgaaacatgagaccaagccagaaatagaaaaaaaaaaaa

SEQ ID NO: 264060 - DNA, 374 bp, Homo sapiens
ctcaccatcctccaatcccagttgccttcccaaaggtaacatggttgtcaggctggcctgaatgggctcagaacattttgtgtgggcagctgcatgcctgtagggggaatggcgtttgtgtgtgtgtgggggtgtgtgtgttaatactttgcacttcattctgttaacttgctttttttactcaacattacgctttcgaaatctaccatactaatacgtagagctctagttccttttaagctgctgtatagttttctttttctttttttttcgcggggtggagcagagttttgcttttgtggccccaggctgcagtgagctgagatcaccccactgcgctccaacctgggtgacaaagcgaaactctgtctcaa

SEQ ID NO: 264061 - DNA, 355 bp, Homo sapiens
gattgcgtcactgcactccagcctgagtgcagcgggagagactccatctcaaaaaaaaaaaaaaaagaaaagaaaaagtgacaacctgcttacagagtactggcgagtttgtgggtgggtggctccctagccctgctgattcttgcttctcacactcatgtctgcccctgccccagtgcacatcttgtcactgtcggccccaccgatggggttcctactgagtcttctggtccctgatcccgtctgtggtcattttcctgccaggtagcttggccaggcctcccctggtgcagatttcatccttggtttctcagcctggccttgaatgaccctctacagcagggtccccacctct

SEQ ID NO: 264062 - DNA, 406 bp, Homo sapiens
aggtaaaataagggttacttgaacataagcactgtgataacacaacagtcagtctgataaccgagatggctaatattaatagctgactaatgagtgggttctgtggatatgctggacaaagggatgattcatgtcctgggtgggatggagaaaacaatgagagatttcatcacactactcaagatgatgtgcaattaaaaacttatgaattatttatttctggaattttatatttattattttcagatcattgttgaccatgagtaactgaaactgcaaaaagcgaaaccacagataagggggggatactgtatttactcccttgaaaagctttcttctttcacatttagtaccagaagtgatttgttctcttctgacaattgttaaatataacttatttttttaa

SEQ ID NO: 264063 - DNA, 455 bp, Homo sapiens
tggttagcatcaaagtgcattactggacttaaatagaagaatactttgtataatagtgcacaaataaggagaaaaatgagtctggctttagactctaaaataaccttcaatacaaaaaactataacaatcataattaaatgaagaaagtgggagccaaactatcctttaagtaaaaaggatgctgtcaaatattttttagccatacagcaaattatttctgtgactaaatcttgaggaaattgtggggaataaagtccaaccaactaggaatgactggagaaactattgctaaggaccgctggtgagcactgaataaatttaaccataaaactaagactaaaataaatgttcatattactgtgacagaccagaatttactttttatatatgctaataatgtacaaatgacacaaccgtaatgaattgggaggggactgagaaaagaaggaaagta

SEQ ID NO: 264064 - DNA, 273 bp, Homo sapiens
tattaacaggcccaagcataaaaagacacttgattttggacagtggtaacaccatgggacaggggaaagtatggttctttaaaaaaaagtaccaagtaaattgaatataaatagagaaaaaataaaaatggtcactctgtttcacaggatacagagaaattaagtcttcatagattataggtctaaatgtgaaaaacaaattaacaacatttcaaaaaataacatatggtcttatgataaggcaatatttctcaaacaagataaacataatgg

SEQ ID NO: 264065 - DNA, 401 bp, Homo sapiens
  misc_feature (358)..(358): n is a, c, g, or t
aagtgttgggattacaggcctgagccaccgcacctggccatctcactgtttttaattggcaactctttttatacattttccggccatttggatttcctctttgaggaagtaacttgtctaggacttttgtccatttttctattaggttatatgtctttaaaaaaaaatagagatgggaccagcctgggcaacccagggagaccccccctcgtctctacagaaacttaaaaagttagccgggcatggtggcgcactcctgtagtcgcagctgcttgggaggctgaggcaggaggatcactggagcccggaaagcggaagttgcagtgagctgaaatcgtgccactgcactccatcctgnacagcagatcaagactctgtctcaaaaaaaaaaagtaaattaa

SEQ ID NO: 264066 - DNA, 280 bp, Homo sapiens
tctacattgctcctatgagctaacaccttttacatttcagtcctttattccaaactgtcaagatcttgatgccgtcactcactgtatcaccagcgcctcccagtgcacctcaccaccagcatatatctgatatgcatacctcgtccatcccaattcaagcagtgacaaaggactaaaacatggcggatggtggcatgtcacacagccctgcctctgaccaatgaatcatttctaagaatgcattcctttattagtcaccacagtgctcacatcatcctat

SEQ ID NO: 264067 - DNA, 246 bp, Homo sapiens
tacatgaaaaaataatgatgacaatgctttaatttcatttctctgagctttaattctgtattaaggactgtgctgtgttttaaattgatgatttgatcccctcaacagtcctgaggttagtcctatagtgacatgcctccaggttccacatcccacaaccagcatttgatagagtaagaatcccagtgctgtggaggaggtcctactcttcttgatcttttaatgccccacctgtcagtctcctgc

SEQ ID NO: 264068 - DNA, 197 bp, Homo sapiens
gcggccgcctactactactaaattcgaggccgcgtcgacagaaatgtaaatggtgttttgtttccataatgaaacaatttcacacattttcaaatacaaagtgatttcagcatggaaacaaaacaccatttacatttctgttaacagtctaggaaacttccccataagagaaagaaacctcaagggccatgctaact

SEQ ID NO: 264069 - DNA, 729 bp, Homo sapiens
ggaaagaggggccagctgacttgctggcgctgggagaaattaacccccatcatcaaaaagactttctattgcatattgtaaaatttaaaaactctcggggaatactgtgaccctgtctttaaaacatgcatctaaacaacccaaatgtcaattgatatgaatgaataaacaaaatatggtatatacatacaatgaaatattatttaaccttaaaaaggaatgaaacgtagatagatgctataacatgatggagtttgcagacattacgctgagtgaaacaggccatatgcaaaaggacaaatactccacgtatgtgagatactgacaatggtcaaattcatggagacagaacgtagaatggtggttagcagggtggaggagagaggaatggggagttattgtttaataataatatgaggtatgaggtttcagctgggggtgatgaaagggtcccggagtagatagaggcaatgattgctccaagtgcctcataggagtggaatcgtacactatttgtctttttgtgattggcttatttcacttagcatgatgtcctcaaaggtttatctgtattgtagcatgctttaggatttgcttcctttttaaggctgtctaatattcttgtatgtatacttcacattttattttttctattcatccatctgtgggcacctgggttgcttccacattttggttactgtaaataaagttgcgatgagcttcacgtcc

SEQ ID NO: 264070 - DNA, 292 bp, Homo sapiens
caccttttgatcagtcactgcctgctgaccatgccttgccacgcgtggcatggaccacaatgatgtactgctgttcccagttcacagacaaggggactgtgatgggtgagggctggtgatgtggagcctagataagcactgggcccctctaactccaagtctaagcttctacccattacccagaggcttctaacgttattctgaatctgtcaggacacctagcactgcacacagtgctcattaaatacttaaaagaggccaggtacggtggctcatgcctgtaatcccagta

SEQ ID NO: 264071 - DNA, 500 bp, Homo sapiens
cacttggaaaaacacactgtttgcatatcctgcctgacagaaaaactctggcatagcacaacgtgcccacgctgctctgaggaggtgttctgatcccagtgatacaaggcattaagatgggaaggctgcctgaaaacaagattgtttggggatttctttatactgtgattgttcaccctggtgattgtgaatggaattcaaatcattttaagcaagcagaagagttgctgaatcaccaccttgactgcaggcttccaaacttgtggcaacaaccaggaagggggagaggttaaaaattcagttgaaatgtgtacttagaaaaaattaaaaactgaattaaaaattatctaatcataatgaattataaatataaaaactattacttgatgttcttgtaccttgtaacagatcacaggcaaatttataaagatcttttaacagtactaatattttttaagagaggttcccccttttagattttgcttatgtgatgttatcat

SEQ ID NO: 264072 - DNA, 411 bp, Homo sapiens
gtggccacacggtgctgcggtgaagtctaaggggctgttcaacgtagcacctacatttggggaattacagatgccacagcctgcagggaggcacccacaactgtctcccccaaggtaaagacgactgtccttcacttacgacacaccgggttcctgcacagcgatggcctggagcatccagagaagggtccctgctctcagagccggccaggcgggctgtgtacacggccacggaaagcacccttgggggagggtgttgctgtgatttctgcacccccacttcctcacgtcctgcaacctagctagaatctgcaatcaaaagctacccagctttggaaggctgagtgggatcacttaaggccaggagtttgagtccagcctgggcaacacagcaagttcccgtctctgaaa

SEQ ID NO: 264073 - DNA, 390 bp, Homo sapiens
agacaggatcaggctcttttgtccaagctggagtgcagtggcacaatctcagcttactgtaacctaagcctccccagtccccagctcaaggtatcctctcatctcagcttccctagtagttggaactctaggtgcacaacaccacaccagttattattattattttttaattttttatagagacaggttttcaccatgttgcccaggctggtctcaaactcctgagtttaagcgatcctcccaccttggcctcccaaagtgctgaggtgggaggatcacttgagaccaggaatttgtggccagcctggccaacacaacaagaccccatctatacaaaaaataaaagaaactagccagatgtggtggtgcaggcatgtagtctcagctact

SEQ ID NO: 264074 - DNA, 1163 bp, Homo sapiens
gagcttctaatgtgaggttagagtccagtgcgcccacagcagcatgcccttctcaccccttgcagtgttgcaggctcaggcccctgggctccttcagcaagcaggctagtcaatgaggcatgaggatccggcacagggcatcccctggggcttcaagggcaatacccccgtgcttagggtttgccctgtgccctctgggtggggtggcctccccgcactcggcagcatggccaggctggccaggcgtgggcaggtggtgtcctgtggcacctccatcctcctgcccagccggctgtgtcacactcatctttttaaggtcaggttggttcctggcaaaaatgtacctccaggggcctccaagcataggatttggaagacaggaacggcacaggcgtccaggaaagcagctgcactcagacaatgccttctccattacttgaagcttctttctgttcagccattaaagaaacttgacaaaataggaacaggagatatttctcaattgtaaacctttgtgcagggacagttggcttccagaggctttcagctttcagttatttgagaagtcgtttagatccttaactaatatttatgaattctctcaccctgtgtaagtagcctggtgttcgtttgtccaagtgtacttacccttgagaacaagtcttgcagttgccaggtgtgtgcagacgcctctcctgtgagcggcatcgcgggcccagtcagctgccccggctctcatcctcgtcctcactgccttggctgagcactgttgacgtgaacagccactgcaacaggcagcccatcccactgtcccctctgccctggactccgcatggcctccaaaagccagcttgccctccgggtgctgcaggggctttgcaggtggggaaggctctggtgggtgcctttggtggcttccgtgacatcagccgtgctctgatgcaggcttgctccctcgtcattctccctcgtcattctccctcatcgttctgtgtgcatttttctctatgtcctgacctttcttcttgcacctaaaagtggtgtctgggtgcaaatgtaagcagtggtggatccagaaatatgagctttgtgtaataagcttcttaaaaaaggcctttcttaaaacctggccagggccagaccctcggtcttggcctttttca

SEQ ID NO: 264075 - DNA, 92 bp, Homo sapiens
gaagcaatcctgtcagttccttgattttagcactaatgtcagacttctgacctccagaattgtaagataataaatttgtgttcctcaccaca

SEQ ID NO: 264076 - DNA, 193 bp, Homo sapiens
tttttttgaaactgacatgtaggctgaaaatgcttaaggactttcttctttttcagaaataatctattctgaaaatatatcttctttctgaagtatatgattatctccattgactttttaactgttaatacacagaaccaaacaaaaatgttgtctttagacagcaaatatgttattaaagctattgtattac

SEQ ID NO: 264077 - DNA, 390 bp, Homo sapiens
agcacacaacatgctaaactctagtcgtaggcaaagcttacattgttttgtaacagtacatgagattttatttggcgtccttcttttttttcccccctaagacaaggtctcactttgttgcccaggctgtagtgagctgtgattgagccactacactccaccctgggtgacaagcaagatcctatcttaaaaaaaataaaacacaatttcatttataatagcataaaacttgtgtagaaatcaagttaatgggccaggcgcagtagctcatgccaataatcccagaactctgtcaggctgagatgggcagatcacttgaggtcaggagtttgagaccagcctggccaacatggtgaaaccctgtctctactaaaaaatacaaaaaataaa

SEQ ID NO: 264078 - DNA, 430 bp, Homo sapiens
cttactttctaggggggaacatgaaactgtccagaaagcatatgctactttccagaatcacatacacagctctctaaagggaagtcagggcaactttctagaaaatctgagttaggtctctttgaagtggttcacgtgttctttccctgatgaatatctgggaatgtcccccatgtggacctggtgttcttgtgggttgagggaaagttcttggcttagagcagtggaatatggagaaggttccacacctcaggaacaaccccatgaagccattttcttttatagctttaaaaataatgaatttgtatccgttaattatatttctgtgcaattttgttgattttgatgaaaatacaaattcaactggaagagttttagataatataaaacacaactataaacatcaatgaacagttttttagaaatcctt

SEQ ID NO: 264079 - DNA, 186 bp, Homo sapiens
caagtgtgttctttctttgtagtgtgttgtttatattggtcattaaacagttcctaaaactgactttcaacttatatataagttgtttctctaaggtgtcaacattgaaaagaacagtatagagcaggggtgtccaatcttttggcttccctgggacacactggaagaagaagaattgtcttgggc

SEQ ID NO: 264080 - DNA, 523 bp, Homo sapiens
atgggcaggtggcagcatgtgacttcatcatggcgctgaggaactgagaggaggcaaaggccaggacagggcccgcttttctagtgcactgaattccagagtgtggactgaggtagcaccaccacttatcagccgtccctctctcagcctgtttgcacagggtctggcgaccttccaggaagcccaacagtttgaaacacagacctcttccatttccaaaaaagggtgtgttggtggccactccaagtcaatcgtgacccagtaggacagctctgtggcctaaggtaagctattcctaatcaatttggctcatacagaggtgcactcaatgaatgaaatgccggaacctcagaaggaagagggagaaagcctacttcctcaacactgggatctgtaaagggtcatctcacccagcaataaataaagggcaacagaagggaaaaagcagtttggctcaggagaaataaagtcccattcaagcccaaagacaccaccacaattacctagacctgtgcgcctttgg

SEQ ID NO: 264081 - DNA, 389 bp, Homo sapiens
caaccttttatatttttgtttagtttttatttgacacatattaaactccttctaccatacagggaaataagttttatttttataggaatgtttaatagccattaggtgtttagttctttttatcagaggatattatactattctcagttgtctttacagttttcatgctagcaaaggagttggttactctgctcattttgttggcaactgttttatagtcacatcatcgaagtccaaaggaaaatgttttcagcattgtgtgaaatatgattttcaaccacgtaaggtaggtaaaagtaaatatttttataactcacttgttatgacagaattcttaactatccttttatgacctctgtagcattctctttcactggatttcctatgct

SEQ ID NO: 264082 - DNA, 384 bp, Homo sapiens
aacccaatatgtatacagtagataaattactctgcataaagctttctacttttaacagaagctgggactgaaagtgcttcactgggtagtagaggtagctagatgatagatctctctattgcacccacctccggcttttaccttctcctacttcagaacagtgtcctggcagacaataatctcgacatttaagtactatccctagaaacaaaacccaggaaggactctctagaagtcattaactttctgccagactggatcgaagataaagatagcaaatagtagttgtatgcccactcaatgcatgggagtggctgcctaggacaatatagtgagaagaattatgaggccacatatgggcactatagggattgattattgatg

SEQ ID NO: 264083 - DNA, 500 bp, Homo sapiens
ttttgatagggtaatggaaattgacagggtgggttattgatggaaatgatgtcataactagtctgaagactatgttatgttaactaagtatgttattacttagtctgtttaaattccccttgatgaatgagggaagattgttaaataccttgtatggtgatagtctgccctttatttttttaagtttaaccagtaaagactataataaaaggtaagatttttaaaaattgctgatagaaaagaatcacaagcaatagaaacggaaacaacagatttttattttgtattttagaacacttggcttgtaatttgcatctaatgtttgcttgcatattgtcataaaattaacagttttaaggtagtacgtttgacatgtgtgtatttttataacagcctattaaaatgatgtggaagattatacttttaaatatgcccactttgtttttttaaactcattgtagtcttagtctttcctccaataaaattgttgtgtctttata

SEQ ID NO: 264084 - DNA, 359 bp, Homo sapiens
ggacagttctccagatggccttagtaccaactctgtttactccttttctcatttgtagttctcaagaataaccatagaacatgtggaagtagttggaacagcccaggttctgttctagtctctcccgagaacaggttgtcctacagtgttttaggctagcgtgtcatattacgctcagggtgcaaaacccaggaagggttgttttccatgatccctcatctgtggcgcaaatggggcccgtacagatgactccatctgacctgagtagatttcccaaggcttggggcaccaggtctcaatgaatcctggacttttcttgtccattgctatctataagtaataaacctactttacataaa

SEQ ID NO: 264085 - DNA, 547 bp, Homo sapiens
ttccaaggtctttaggtaacaaaatggactaatgttaacctgagctaatcaataatcattggatacctagataatttctaagtaagttagaatactgtgactttgattataaagtataatattaagtttatatatgtttgcttcttatttttctatgctatagtgaggctatacctttgagttgtgtcaatacaggagttcattttttgccactttaagggaatgtaaaagtgccttatgtcactatggaaatttcagtaatgtgtgttcatgagttttgctagtctgctaaaatgattatatgggacgatttccaattgtccatatcctccctcctcctaattttctctatgaaatataaattagtttctctggttaattattataatttaaatgggtggttgagattatgccaggagcattaatgaaaaagaaatacagtggtttttgtttttcaaatcaaaacagggtagctttgtatcaaagcagtggttcttgaactttttggtctcacaatccctttatactcttacaacttatttgacga

SEQ ID NO: 264086 - DNA, 442 bp, Homo sapiens
agtttatccagcaaagtccagcaacctgggaatacaacctgcaaaacagaaggtagagtgattcactgttgaagattggcaagttgacactatgcaaggttaaatatgcaagggtttttaaaggtggtaatgagtacatcactggaaagtggggccatgttggcagaggggcaggtgaagctagaaggtgactcatagactaagagtttgaaaatgtctggctgcctccctgccattatcaaagctcaaagtatcagattttcattttctcagactcttgattccagaacataggtgcattggagatttctaaagctggttctgcaagatttagagaaattctcagagcttgctactatcctttcaacagattccgcttcatcttaagttaatgagaagagttcccccctttttcttactaatacaatgtttgatcaatttt

SEQ ID NO: 264087 - DNA, 1768 bp, Homo sapiens
  misc_feature (130)..(130): n is a, c, g, or t
gtttaagttgtcttatagtttattagcacaaaccaaaggcagcccatgttatttctggcaaagatgcactttatcgttatctgctcatggctttgtcgcaacgctcaggaatcagacactgcacacttcnatagttgggattccaaaagctaattctaaaatttaatgaaggcctgatttaaactgattcatctgcattttatctttatgaggccataagaatctaaattgatgaggaatatctttcattccgtgtatttagatatagttttctgaatttcctgaagcgatgtgatctgcttttaataaaaattcacttttaggtgtacaacaaatggaaatgaaatgttctttttaaatctggattctcaagttcttctaaaggagctactcctctgaggaaacctcaactcagtggacttgattcatctgttactttccagcattcttacaaagctggtttcatctacaatgttgtgccctaagaacaggactggggtgaaaagcgggtactcagttgttcatatatttgaggtcctaattcttggtattttttccctttgataatcccttaaagtggcttaatgtagtcttgcatatgagttaatctatcaactttcccacatagaactgatataattccttctatcaataatattgatgggcataacatttcaaaaaatgggacaaaggttcagctatctagaaagatttgctatttataggaagataatggacatgccctgctgtgatgtgagggttatttatttctgaccctgtacacagcctaggggaagaatttagtccagcaaagaggggaccttgcttagagagacccattctgactctcctccagctttctcccagatatcaggaacctagagtttcctactcagataaccgccccccacacgcacacttttaggccaaatgtaggccccctctgggggtttaaactcctggaggcaagcaacatcctgagtgcatatacctgggcacagggagtggcaaagggtgcatctgtgtggatggattaggccctggggcctggagtgttcactgtggaatttacacacaagcaaggagaagccacttgccatgaaaacaagagtccagggctgaaaaataaagggatgaggggtaggaaggagatagacaagggctaccacgaggctgggggccagtacagaacactgaacagtctaagaattctaaatctatacctgggcttccaagggttatgaaagcatcatgtgtcaaagtggcaggatggaagataatttaacagtttgttagctttatgtatgacttttaaatacttagacatgtggcatggggtcctccattggtacttttgcacaagatcctgcagacatttggggtcgatctgcctgaggtgcccttgagtcagatccctaagttggcacaaactgctaaccacataacacaaagaaaggtccaggttggaagaaggcgtctgctccacagttcagctggccctgtagttaatgctcccctcaccttctcttggacctgtggtctgactggagtataagaaattttggatgcactgggggaacaactgtgaggaaatcttgacatcgaatattttgttccatctccttcaccctctaccatcaataatccagtatgattgggatgtaaagacccagcattctgaaatgggatgctctgtactatatgggaaatgggttgttgtactttaccggttgttaaacactaaataaaatacctgtttaacagaaaa

SEQ ID NO: 264088 - DNA, 405 bp, Homo sapiens
ttaatttttttcaaaacacaattttttttaaaaaaagagctctaatccataagaagggtgccaccgtatgtagaaaagtgactgtgggactcctgaatttgccaagggttagctaactaaacacaacaagctactggctaggtggtcttctttgcccacaatacaacattggaacatgatcggagaacattttttggccctaatacacctctgactttaggaatgagattgcatcttatgtaaatacaaaaaaacccaataaattaacttttctccatttttaactttaactgatcaagtatattctcaaaatcaagtatattctcaaaagtcaaacttcctcatctttctgttaacaaaactaacaaatattttaataaatgggatgtattatggtcaattcag

SEQ ID NO: 264089 - DNA, 230 bp, Homo sapiens
acaggctatcaggttgttctgatctgggatctgtcctgttcccatgctcagatatagctcctcacacccaccctctccctctctagggcagctgcttggccttcccactcacaaccaaccagcacttactatccagattacaacaggccccttaccaagctggatccaccacccacctctcaaccatgcacaatttgtgaaatctgagaaaacctactgggctgctacta

SEQ ID NO: 264090 - DNA, 499 bp, Homo sapiens
catcacaaacccctcagacccaaaataaaattaaaaaaacaatatgtatcattaggcattgatagaaaaagactagaccctagcataaacagcctaataagaaaggaggttcaaagacgctctccagaaccagtatttcagactttctaggatgaactaaatgtgccagtacctaagattccaggaaagactaaaaatttgttttttgcaattagctgggcatgtaacccagtctctaaatatcacttcatgttatgtttgtagaaaaactgtaataagagatcaatggccataagaagcccgagaattagtgcctacagacccagttcctgatggattctcagcccaaaagaatcaccctgatcatttctaagttctaaaagtctcaattattgcatagctaaacaacaacaacaacaacaacaaaaacaggaaaagaattcactcattctgtaagatgacttagttgtctaaagcaaaaactgtataacgataccgc

SEQ ID NO: 264091 - DNA, 433 bp, Homo sapiens
caagctgggcctgagaaacaagggacccgaacctggagaggccggtgttcctggactgctctgcagtcacagattgtcacggagcccctggttgtctgaggaccccaggcctgaaccttccttgaggaagactgatttctttcagactactttgctcagtttgattttaaacagaaggctaataattatccagaagagacaggatgaggcttggacaaaggaggtggagggtatcaaaagatatttagaagataaaggaagtctggacttggtgctgtgggtataccctccctcatggcacacaccaggttattttgaagcaaatcctagacgtcatcaaacagttcaaattgcccaagtgtctcctacacacttcttttttcttttacagtttgtttgaatctgggtccaaataaagtccacacattgcaac

SEQ ID NO: 264092 - DNA, 416 bp, Homo sapiens
tctctcttcctctgttctcagtatccccctcatgtaagtctgtctacccaacacggtgcagccgatttatttatttttccctcagcatttttaggtggattgactgggatgctttattcaactcagggacgcaccacgaatatgttttttggggcaacccgtttggcatgttccccctcagctgtgaggacaaagactggtttgtcttcttgtgacctggcagaggaggcagaagtacctgctgagcttatgcagcatgtaccccaaccggtgccccacctcttcaagtggtgaatcagcctgatgatacactgatttttagaacacgctagggtggagacctggaagtctgtacactggtcggggagggagggatggtttgcatgtcaaaccatttcaacaatgcagcttacagg

SEQ ID NO: 264093 - DNA, 397 bp, Homo sapiens
ggagagtgagcgggtaagcaagagaaggaaccgaagcgtcacagaaatccgaggccataagttactagtcagatggtaaatgtatcagggaagtgaaagtcatctatgggttattgtggaatcatggaaagagaccatttgctttaaaggataagtatatggggtatcatttatgccagtcttaaaaaacaattttgacattggatcattccttaatgagatgaacagtggccgggtaaataaggttgctgagatttagaatagaaataccggccaggcgcggtggctgacgcttgtaatcccagcactttgggaggccaaggcgggcagatcgcgaagtcaggagattgagaccatcctggctaacatggtgaaaccccatctctactaaaaatac

SEQ ID NO: 264094 - DNA, 479 bp, Homo sapiens
cttcagtgtcactctctcacagactctcctgccccttgtgatctggacagaccctggcaggcctcgagttccctggaggttgcgccttagcgacagatgacccgtctctgaccaccaagcacctagaaggcactttcgcaggagcaaggcaggggtctggggcgcggagggggtgggcgcaagccgccctcgtccagcggttcccgccgagcatggtgataatgagggtggggccagcgttggcggtagagcgcctggtggccccggggcccctcctcgtcctccgcgcctccctgcggcgcgcagcacagagagcccagccgcttccgcagctgtcgccggagccggcagtcgcccgcctggaagaagaggtagacgaagggattgagagcgctgttggccatcgccaccacgcgcagcgccgccgacaggccctctccctcccagtctcccgcgggcccggacgaccacgcggccgc

SEQ ID NO: 264095 - DNA, 602 bp, Homo sapiens
tatttaaaatgttattgtaataacatacaatattgtaaagatagccttaaattgcaggtctaaagaaaatgtcccacagtggaacctcatatcattccattcatactattccaacaaaggtacttgatttctgattttaactgctgaaagtctttttttctttcccttttctttctttaaattttgtttttaataagcgtgttggagggcaagtagagaaaggggagggatgcatgcagaccagagtaatgagatttttatgttgaccgcaatgcgtgaccttttctgcaaccagtgagtgctgggagggatggacaaagtgaggttgggcatcctgccattaacgtcagcacatcactgcttctcaggacgtgtcaagtgaagtgggggaataaatcataggggccgccgcgcacccggggagggcgggcgcacctccccatcgtcagggatgagcccaaagctcgcgcgcccctcgcgtggaggcgccgcgacccgccttaggggctcggaggtcacgcaacgcccggagctagcgcacggcgatatagggtccgtggcgcggggctcctccccgcccccgccctgcaagatggcggccg

SEQ ID NO: 264096 - DNA, 436 bp, Homo sapiens
cagcagttgtttagggttaccgtaacacatcattcacatctcattaagttgttacgaccccgcattttctgctgcgtagagtgacctccgagtcccagctgtggcttgttctggccttgaccttttatctgatgatgttgctcccaggctgtcactccagaggccgctgatgtgggtgggctgagttaagccctcattcgctgcagtccggcccagctgttctcggcctcccgccgccgccgccgcgcacccggggagggcgggcgcacctccccatcgtcagggatgagcccaaagctcgcgcgcccctcgcgtggaggcgccgcgacccgccttaggggctcggaggtcacgcaacgcccggagctagcgcacggcgatatagggtccgtggcgcggggctcctccccgcccccgccctgcaagatggcggccg

SEQ ID NO: 264097 - DNA, 183 bp, Homo sapiens
ttatctaaaaagttgaaaagaaattaagctttactaatattttataaatgaattgacattggtacccagacctgaaccataaatcaaatgctccccatgtcacaaacaaatgcaaagtatcttgagatactttgaaagaagtattaaaattgagagaagagttaaaattccatgttacagaag

SEQ ID NO: 264098 - DNA, 272 bp, Homo sapiens
acggggtttcactgtgttagccaggatggtctcgatctcctgacctcgtgatctgcccgccttggcctcccaaagtgctgggattacaggcgtgagccaccgcgcctggcctaaatgtattgtttaaggaacagtattttattctaagaatgtataccattccttcctaccttttttcatattagaatgtgctttcttttatgaaacagcggtggtactacatgatagttgtgttttttctaatgtccttatttagccgaactaaaagctag

SEQ ID NO: 264099 - DNA, 132 bp, Homo sapiens
gctggatggggcatgtaaaccccatgtctctaactcaggtcccacctgaggacattgggatgggtggacaaagaagcaaatcagcaaatgcagcgagatgaggggcttgggagagcagctcgtcgtggggaa

SEQ ID NO: 264100 - DNA, 463 bp, Homo sapiens
cggtacagaaaaaggggggtctgaacagagaaaaagccccgtgtgtggcagaacagtactcggttatattgggaggctggaggaggtggtgtctgatttgcacagggcccagggcattggtttgaccaggcaggtcattcatgtagcccgagaaaaacgtggccctcccaccctagccttttaatatgcaaatgtaggtcaccatgttgtcctgcacacatggggtcatctggaggtgtcaccttgaggtggtgactagaagaagagggtgggaatctccatgttgaatggacacagtttctaagcgctggcatttgcatatcaaagcttggcagcctgtagtcccagctactcaggaggctgaggcaggagattcacttgaacctgggaggcagaggctgcagtgagctgagatcacaccactgcactccagcctgggtgacagagcgagattccgtctcca

SEQ ID NO: 264101 - DNA, 221 bp, Homo sapiens
caatcaactcttgctttactctgtccattgaaagagcagcagcagcaaggatcccatagaatctgagatgactctaaagttgattctggttgactcaggaaagtacatttcatacagagatatttggctctacactgaatttactatataaaatggaaagaaagcacgagaaaagacagaacaatggaaacaatggaagggaagcaatattgtggagtacc

SEQ ID NO: 264102 - DNA, 589 bp, Homo sapiens
tgacatctccaggctgatgcaagtgagaccccttctgcctaatgtgagcggttggcgtcctccacttggcctctgctgggcgcctcagtcgctcaatgatgtgctctgtgccggggcttccaagcacccttcctgctaacagagggcggcccagtggagcctccgctgggcagaactgatgggcaaggcgtaatggctggtagctttcagaatgtgagggaaaggaagaattccgcttcatggggactagagttagtgtggggcctttaagtctgggaagttacattctgcttctttctcagttgctacacaaatgtgcagccagccttttttcttaggcccactgagatccctgctcagtgcgtctcaattgtatctccagtctaagaggagggtggggggcacccggggcctcctccactccttaggtggcccccgagcacatctgccaggtagagtaccatggggaggcctctgccctgagcatcatcacaggggcgcctccagacctggctgagaatagcctctgcttgggcctaggaagaagggcagaagtccaaaggaaaccttggtgagtgagtgtgtgtgt

SEQ ID NO: 264103 - DNA, 309 bp, Homo sapiens
aataaaatccaacctgaaacagttgacaaaagtaaaatgatgactctgtcatgtaatgatataggaagactaatgcacagacatctgtggagctccaggatttcaggaatgggtcaagccatagacgccaccaagctctcattttaaggccatggaatctaaagtccggggaggttgtgacatttccccaaaacacataaagctaagttcattcatgtatttaatatttgttgaaggtctgttatgaccaggtacccttttgcatatttggcatgcaacagtgaataaaacagacaaaaatccaggttc

SEQ ID NO: 264104 - DNA, 850 bp, Homo sapiens
ggtttggttctgagtcctgacgttgatactgctttattccagggtacctatttgaaaacaagggagttttcagttatatttgagacatagtgatattattgttttttgcttgaagccaagatgtaggtagcgattgcttccactttatttttactgtacttttatatagtaatttggacaggtgtcttcataaaggagatctttgacaagggaaaatagacccagacacccattaagacgtgttttctcccattttctccttccttgcaatataggtgggtttgatagaatagtattaggaaataccaaagaatctaccaaatgggtaaatgctacttaagtgtctgtacaggtcatttagatgagaggatttgagactatgcttgttataatttgagaattatacatgggtcaggaatgacatgagggctgaggttgaagcaatttgaaacggagagataatcatgaaactctacttggatattaataatttttcccttgaatcacacacagtggcctgcgaggcctcattttggctcatcagtttttatatgggctgaaggcatttgtttggaagatgtaaatacccttgtgtttttaatagggaaaggttggatcaagtttgctcttaattctgatcaactgacagtctttgactcaacatgaagcacactgagataaagcggatcctggtttgctgatacagatctctcagaagaggagcttgagaagcgggccttgctgggatttcctctaatcgctgcattggattgattgataggattcaggttttgttatgaacttgggagagaagtgggaagacatccaataacacccaacatttcattta

SEQ ID NO: 264105 - DNA, 369 bp, Homo sapiens
acacagcttgtctctgatgattaaagactgccacctggtttatatccatctggaaatgaaaccagggagcctaattttatgaaggcatctgcaaccatcatctctagcctaaaaagaatagcgccatcgagctttttaagaatgttgtaggctgggtgcagtggctcatgcctgtaatcccaggactttgggaggccgaggcaggtggatcacttgaggttaggagttggagaccagcctggacaacatggtgaaaccctgtctctaataaaaatacaaaaattagctgggtgcggtggcatgtggctgtaatcccagcctcttgggaggctgtcgcttgaacccaggaggcagaggttgcagttagtt

SEQ ID NO: 264106 - DNA, 425 bp, Homo sapiens
ctgaatgaagtagtttaatcagaataagtctagaagttaacttggtagaacttcgcaaccactaacaaaatagtgacaaaccaatgatcaccaatggccactaaaatcatcagctggaaaggtagtgagaagttttacaatgaatggatcaggctgacaggacatgaacccacttatctatcttatgttaatatcacagaaagggagacagccagaaatcacagtcacctgatacgatgcaatgagaagtatgtaacgtcacccatgacatgttcttgccctaaaattatttaagcatctagatattaatatcagtttatggggaatacaggagacagaggaacatgtcagttgatactgtactgatacattcattagaaccaggctaaaattctacagagcaaatgaaattatttcaaatagga

SEQ ID NO: 264107 - DNA, 336 bp, Homo sapiens
aagataatggggccggcttggtggcgcgaacctgtagcctcacctactgtcaagactgagacaggaggatctcttgagcccaggaggtcgaggctgcagtgagtcatgatcgcaccactgcactccagcttgggagacagaatataccctgtctaaaaaataataataaaaaaaaaggtaatggatgaggccgatagtcaggaatgaaatgactttaaacaattgggtatgcatgggattgggtatgtgtgtatgtgggggcagagggtgggcataaccgaagtcccatactcatgtccctctaggcctaatacattttgcagacctcacagagct

SEQ ID NO: 264108 - DNA, 169 bp, Homo sapiens
ttgtggactggtactctcctccttcagagcatgaccctaccaattcctaactgcttgtcactagattccaaaacttctggggacaaaaactttgtcttttcatctctatgtttcctgcccctgacactgtacctgacacagtaggtaaagagccaatagctgggtagac

SEQ ID NO: 264109 - DNA, 683 bp, Homo sapiens
gagagagagagagagagagagagagagagagagagagagatagagagagcgagagagagagagactgacacagagtagaacatagtaacatgcagaccattgctatgaaagttcagagggtgaagcgcgtgcttctggttgggaagagcagaatatccttcaaaaggaaggtgttgatgaaccagtcttgaaggacaacagaagtaaaacgaacggaggtgcatgtgaagtgaccattcagatgccagcaccagcataaatgaaggcccagggaaggggatgcagggaagcaccacaggacacagaaagagcagcaagccaccagtcaccatgcaaggcccagctcagccacttagggcggtatgaccctggatggacctagactttggtatctataatagaagatagttagatctggcccgccaccacgcaaggggacatgaggactcaatgagagggtaaatatatgcaaatgaaacagcatattcatgtgtgtaggataatatcaaacacagcagagatggataggagatggtctcttatggacagcagaaacactgctccacaacttccacctcctaaaatgagaaggtccttctttctgtcctctctgcccttccatgccccggcctttccctctcttgctccattttctcatcaccctcgatggttgtttattttct

SEQ ID NO: 264110 - DNA, 477 bp, Homo sapiens
tgcccaagatcacaaaatggaattaggatatgaactcagcagttggctccagagctcatactctcaaccaggaaaataaatctaatagcattgcaaagaattaattggaaaatggagactggagacagaaaccagttatgtgactgctggcataattcaaggaaaagaaaataatgtaaaatagaaacagttattctggtcacggtggctcacacttgtaatcccagcactttgggaggccgaggcaggcagatcacctgaggtcaggagttcaagaccagcctggccaaggtggcaaaaaccctgtctctactaaaaatacaaaaattagccaggtgtggtggcgcatgcctgtagtcccaggtacttgggaggctgatgtgggagaattgcttgaactggggaggtggaggttgcagtgagctgagatcgcaccactgcactccagcctgggcagcagagcgaggctccatctca

SEQ ID NO: 264111 - DNA, 573 bp, Homo sapiens
tggcttccaggaggagggattccctgactttgacacacatggccaccttggcacaaaagccttgtggtatagaaaaacaaatttgtttttatgtcctcttctccctttccatctttcagcatagacttaactcccttaagcccagacatctgttgagacctgacccctagtcattggttaccagtgtgtcaggcaatctggactttccagtgatgccactgagatggcacctgtcaaaagagcagtggttccatttctagattgtggatcttcagataaattctgccattttcatttaacttcctgaaagtcagggtcggcttgtgaaaagttgttaaacaacatgctaaatgtgaaatgtcaaccctcactctaaactttccctgttcagagcatcagatgaagacttcattgggttttatagtggctttctgatttttggtagtccattgaagaagggagtttgaaagttgttgtatactgttaacgattgtctgcccatgtcctgcctgaaataccatgattgtttatggaaagtatctttaataaagctggatacagtttggcttggga

SEQ ID NO: 264112 - DNA, 286 bp, Homo sapiens
tttcacaccatttgagtctcctttgaaattgaaggaacttattttaaaactgtgtaactcttacaataaagagtagccagattcctttttatatccattaccctagagtgtcaattccattgtgttataataactggtttgattttaatatataaaagggagctccatcattgaaatatagtataaggatcctagtttttaaaaagaaaactgtagcttggtagggatggagtattcatcagaaggaacttgatgagtatttgctctaagtatacatcttaatagg

SEQ ID NO: 264113 - DNA, 616 bp, Homo sapiens
ctctgggagaagggttgtggggcccagagtccctcacctagttcatctgaaggctccagtgatgaagcactctcacaacagcacagctgagaaaaacgggggaaaaaaaaaacaccaaagagaagatcatcatttgagttaaagacaaggagggacagagaagtcatcatacactctgcctgccagagaccagatgaaaaatgataaggatgcacgaagctgcaataaacacaccaaggtggaattagagtccagataggggctgaagccctaaccaagttgtcctgtgtccaggacagcagctgcagaccacagcttcctgcgaacacagcaggacctagagaagggagtgaaaggaaggagagtcaggattctgagcccagtactttggcagtggcagggtaagaggagaagagcaaggatagggacacatttcagttgatttgaaagcatagccacacaaattctccaaccccagggaccataggccagaccaggcttcagcctgctcagatcctcagattttaaaacaaagtgtggtatttaaaatgcaatgggatggaacttgtgattttgtaatttctgtaaataaaatatctggggcagaatttcctta

SEQ ID NO: 264114 - DNA, 695 bp, Homo sapiens
ccccggccgtcgccccccgacgtgttcgcgggcttcgcgccccaccccgcggccctggggcccccgacgctgctggccgaccagatgagcgtgatcggcagccgcaagaaaagcgtcaacatgaccgagtgcgtcccggtgcccagctccgagcacgtcgccgagatcgtgggtcgccagggctgcaagatcaaggccctgcgggccaagacaaacacctacatcaagaccccagtgcggggcgaggagccggtcttcatcgtgaccggccggaaggaggacgtggagatggccaagcgtgagatcctgtcggcggccgaacacttctccatcatccgcgccacgcgcagcaaggccgggggtctgcccggcgccgcccagggcccgcccaaccttcccggacagaccaccatccaggtgcgcgtgccctaccgggtggtggggctggtggtggggcccaagggcgccaccatcaagcgcatccagcagcggacgcacacctacatcgtgacgcccgggcgcgacaaggagccggtgttcgcggtcactgggatgcccgagaacgtggaccgcgcgcgcgaggagatcgaggcgcacatcacgctgcgcactggcgccttcaccgacgcgggccccgacagcgacttccacgccaacggcaccgacgtctgcctggacctgctcggggcggccgc

SEQ ID NO: 264115 - DNA, 414 bp, Homo sapiens
tctcaggaactagaaagtggcttgtgggaaattttagaatttcagagatgtggatacatgtctttctggctctagatattttcattttagagatctagaaactgctcctggctgtaaagagcgttcccaggccttccctgaagcagtcactgctgtgaccccagggcagtgtgatgcagtgagggcctcctgaacaacagctcattcttttcctgagatacagtgaggaatgactctcccagaagtcccaggacagaagtgtcatcttcaggtgtgccttctggatagggaaactgaggctcccagaatcaaacagctgctaagtgttagagccgcaatctagatcctggatttatctaaggcagacagcaggatgtgaaagggaccagaaaaacaaaaccaaacaaaagctct

SEQ ID NO: 264116 - DNA, 516 bp, Homo sapiens
cccagtctgcatcttggatgcaagattagctaagattggccaaactccaactgaaccactgacctgtgagtgagaaaaaataagtaaatgagattataaactacagagatgttgaggttgtttgttatgtgaaaataagaaattcaaaatcaaagtggttggaactttaaattattttgaaccttaaagaaatgtggttatgaggcccaagtcatacaacaggcagctgtaacctaggcagctgtaacctttgttcctctaattatggattagctttttctttacctacattgttttataaaatgttgtaaaagactaaaggatgccagagaagaccctttctctcttaactgttgatcttcattatagattagcttccttctttcttctcttacacaatgacctcacaactatcacattgtctaaaataaaatgttaaatattctcttatactcctttaaattgggaaagaaaacaagctataactaataaagttgcagtaactcataaactaaa

SEQ ID NO: 264117 - DNA, 693 bp, Homo sapiens
ctcgattgacctgtgctgtttcaggagctgtgagacaggagccatggggaagctgacggaccagtgccaccaacaagaagaaacagcccttcctccagacaaaggctgcaagctggcctgtctgcaccgctcaggatctggagcgggaaggcctccgctgatgttctgactctgctgtggcctctagatgccttctctagcagggatgctgggtggggatccggtgtgcctggtgtaaactctggtgggcctgccctcttttcagcaccaacaccacatagacagtgatcttggcaggccaataaccaatctgggtctcctttttcttgtctgtatacaataagtagaacaatattcagctgaatttgataatgtgagtgatagggtagtatcctcatacattgtcccgttcacctattcatttcatttgttcctgcatgcatctattaactggcaggccacactatgctgggttacacactgaggattcaactaggaacaagatagatgattgctcgctgttttgaagtttacattctgggggacgcaatgataaacagatacatgagacggggaggactctgcgtgtgggtggagagccactgtgttgtgttggagaaacccgtgcttgccaatcatgccatcaagctggacactgctgcctcccatgcccagtgcatagggcctggggtt

SEQ ID NO: 264118 - DNA, 341 bp, Homo sapiens
aaccagagaagcctcaagtagaaatcctttcatctgaaggtgctggagagcctcattcttccccagagcttgctgccactccagggggccctgtgaaagctgagactgaggaagcagcccattcagtttcacaagagatgagtgtgaattctcccacagcccaggagagccagaggaatgcagaaaccccagcggagactcctactacagctgaagcttgttccccctcccctgctgtgcaaacctttagtgaggcaaagaagacaagcacagaaccaggatgtgaaaggaaacactaccagctgaattttcttctagaaaatgaaggtgtcttctcagat

SEQ ID NO: 264119 - DNA, 515 bp, Homo sapiens
aataatcttctatgattgttcaatctgttaaagaaaggcaatgaagtgaatactttagggaatgtctacattgaataggaaagaaagaacagccagggaagggacaattacagaaataggaagagaacatggagaaaatgggttttcaagggaaacactcctaactgtagatgttacatgactgaaaaaggccaaagcatctaatatgcagcatcctagtgaccttcaagggtggttcagcttctctttgagacttagaggttataaggaattaaggaaataaagaggattctgtcagtgagattcaggctaagaaacagacgagaaaaaagatggtaataaagttagttttaaggataggtagactttagcataattttaatctcagagacaaataaagaagagtttgaatttgtaagccattgaaaacattgaacaattttttgaaagatgtgggaagcatgcgatggagtaggcaggggaaaggctagtattgaacagaaaatagtgttcta

SEQ ID NO: 264120 - DNA, 238 bp, Homo sapiens
cactgatggatcagggagaacgtgactccaggatgcagcagttgcggaaggaagagaaacagtcatggggaagatcttaggaaattcaactttggctggaaccatcaactttgctacatcggccaatccaaccagctgggaattctagtaattttgctcactgcccccagacgactctatccccttatgaaggagacatatttgtaacccactgaacagaaaactggcctttaaaata

SEQ ID NO: 264121 - DNA, 678 bp, Homo sapiens
ttaaagtaaggacatgttcacagagttcctaggcctgtggtgatgctagaagatacggctttccaccattgcagggaacaaaagcgaggttgcaaaatctaatgaaagttttaaaatagaaaaactgtaagcaattttggcagataactaaagatgtagtatcttcattttcttagtaaaccaaaagaaatgatatccctaaaaattattttactaaagttatattcaattactgttataactgatatgaaatattttccttcttatagtttttaaagacctaatatactctaggcttgcaatttttgctaattttatttgtgcataataactctagcccttaaattcagcttcaagttaaaaatgaacacattaaaaatcccatcagcccaggtatataagttttacctgcacatttctacctctttggaaatagaaggcatgtaagcacagttatgacctgaaccctactgcagaatgatttgtaaagaactaggaaataaagtttagaaattaggaggtacctagcttacaatttcaatgaattattatttttttcactgaggacatcttgagccagatcaacaattaatttttaatgtaaaagaagaattacagaaagatgtgataaaccataccattacactttcccactcttcaattttaaaacacaaagta

SEQ ID NO: 264122 - DNA, 365 bp, Homo sapiens
tttgagatggagtctcgctctgtcgcccaggctggagggcagtggtgtgatcttggctcactgcaatctctgcctcccaggttcatgccattctcctgcctcagcctcctgagtagctgggactacaggcgcctgccaccatgcccagctaattttttgtatttttagtagagacggggtttcactgtgttagccaggatggtctcgatctcctgacctcgtgatccgcccgcctcagccacccaaagtgctgggattacaggcgtgagccactgcgcccggctgatttcttttcttttttaagacccagtttaaaactaccaccactttctcactcttaaataaaatgctatatgacagcatag

SEQ ID NO: 264123 - DNA, 938 bp, Homo sapiens
gaaggcagagaaaggggtagtcagaggggctggcgtaaccagaggaggctaggatcctggaaaccagaggaaaccagggtgcctctctttccttctaactccccttttgggcatcatcctcagatgcaggatatctaacatatattagcttttgatgtgccaagaagcatagatgatggcatagatgaagcatagatgagggcatgggtgaagcatagatgaaggtgttttatataaatgtttattgaggagccactatgtgcaaggcattattctagacactggtaatagagcaatgaactagacataaagtgaccctgccctcatggagcttacagtctagcaggaaacaatgacattgaggagttatatacataattaaataattaccatcatggtagatactacaaaatacaaggtacggggttttctaagaccatatgataggagtgtctgagggataaatagaagtttgttaggtaaaggaagagagaaatggtctaaacagaaggaactgtatgtgggcaggctcagaagtatgcaggaatttggcatctttcctgggacatatggttaaatgaataattctgaatgtactcaagagataattttctggaaagtaacttggcttctgtagttctgttttacatctgaattgtggcaaatgagttttaaaaacaagaccttgaaagtgaattatttgcaacgtgaaggaccgttcactagtttctgtttcataaaactgagcttagaaaaatgtggcctaaatactctgtaagttccttttagtcctaaagatctatgactttcttacatgcagaatccaagtatatatagtgtgtacaattagatcattatgcagggggaaaatcaaggaaaggataaaacatctgaaccaaaaagtgtatttagtgttagttttaaaaacatatgatagc

SEQ ID NO: 264124 - DNA, 347 bp, Homo sapiens
cccactggtgtaagtcttggagtctgaaaacctgtggaccaaaagctctgatgtccaaaagcaaaagaagatggatcccccagctccaaaagagagagtgaatttgcctttcttctacctgtttgttttattgggccctccacagatgggataaggcctatccacattaataagggtgatctccttcactctatccactgattcaaatgtaacctcacagacacacccagaaataatgttctactagttatctggatattccttaaagtggtcaagttgacacattaaactacaccctcattttctgggtccacactggaaggtgggggttggagtgacttttctag

SEQ ID NO: 264125 - DNA, 458 bp, Homo sapiens
tttagaatttttttgtctccaaggctcagtctttgggttaatatcgcagatgcacaattcataaatttgttcctcttggttcattgtttcaaaatgaaacttttaataggttctaaagccttaataagagtgctgcctggttacataatgaagttactatggttgacagatagtaatttattattatcattgtccttgataagagttatgccttgcaaagtgggtgcgtaataaatattagctataacaacataagcaacagaagaaagtttgtccctttgtgtcttatcataatgcatattcttctattatcaccgtgcctgttttctgttaattttatcaatgatatgtagaggggaactatagctgtgtgacgttattattgttagtttaaatgtcctaatttatcctgccactgtgtttcgtttagcataacaaagtcacaatatttttctgtc

SEQ ID NO: 264126 - DNA, 275 bp, Homo sapiens
cacatgcctatagtcccagctacttgagaggctggggtggatcacttaagcccaggaggttgaagctgcagtaaactgtgatcacaccactgtactcctgcctgggtgacagagcaagaccctgtttcaaaaacaaacaaaaaaccgaaaaagcattattgtgcacttaattttgtgccaggcactatttaatgcatgtcctgagaatattaagatgaaaagacagcatctccttactcttgaaaaaatcagcctaatgagaaaggtgctcttgt

SEQ ID NO: 264127 - DNA, 420 bp, Homo sapiens
acagaaatattctagaggaagaaacattttatgcaagattttaaaggaaataataactgggttagtgattaattagataaagcagatgaaaactaatgaatgagtcatagattatgccaaagttttaggcctctattgtcaggagaatgtaatgcagtgacaaagagaaagcttgctggtggttgggcaaataagtttgggacacaacaaatttgagacaaaaatggataatccaagtgtaaacataatcagcagttggtgataaagaattggatgttgggtgaacgtttgtaaatggaaatgtggatgtagatttagtcaatcagtaaacatatatggaatcactacttaaagagctctgtgtggagtagggaaaggaaatgtatactaaaatgcaaaccaaggcatatgtctatataa

SEQ ID NO: 264128 - DNA, 289 bp, Homo sapiens
gttcctgtggaagctgagagctggggtgtgagttcctgtggaagctgagagctggggtgtgagttcctgtggaagctgagagctggggtgtgagttcctgtggaagctgagagctggggtgtgagttcctatagtcacacgaggacagccatgtggccttggggtggatggagatggggactccacatgaagcccaggaccttgaggacctgcctccctcaagattgaagcccaggaacagaccacctaccagctggggaagtggggagggggctgaaccccagatctg

SEQ ID NO: 264129 - DNA, 221 bp, Homo sapiens
gagatgtaagctttaacgtgtttctcactagtgatgtgtctaagtcatagagggagacagtagaggacaagagtgcagtcaggcagctgatgctgtaatccaggtgaaggaggatggcagcctggaccaaggtagtagaggtaaggatggatagaagcttaggagcttattaggatgcagataataggagttctggatgtgggagatgagggtgagggagg

SEQ ID NO: 264130 - DNA, 294 bp, Homo sapiens
tcctgaaaattttcacaaggatatggagccactggaactctctcatgctgctggtgggagtacaaaatggcccagcccttcaaacattcatttggcagtttctttcttctttttagagtcagggtcttgctccatcacctagtctggagtgcagtgatgcaatcacagctcatggaagccttgaacgcctgggctcaagcaatccccctgcctcagtctcctgagtagctggaactacaggcacacaataccatgtccagctaaattttttgagacagtctctcaccctgtcac

SEQ ID NO: 264131 - DNA, 243 bp, Homo sapiens
gaaaattcatttccgatatctatactgtttatgtgactaatggtgcaaactattaaaatagtctaaatgtctcttaatagaatattgaataaatgaatgctgatgtattcatactgtggaatgctgtgttgatatggaaagttctttaagacgcattttttaaaagaaaagttgcagaacagtaaggtataaaaccacttgaacattgcctttatatttgtacttatatattcaaatgcctaa

SEQ ID NO: 264132 - DNA, 413 bp, Homo sapiens
catctggagtccagagaacaggaacgggaagaaaatgtccttttctactgtgaacatttcctaccattggcatgatgaccatctctcggagaacaagcctcagataagcatggggaccgcgcttttgcaaagatactatgtgtatccccatcctgccaagagaccatcaggagagaaaccagaatgcccacagtctttctctgtgtgctgggcacgtagtgaacttttttcttggatttttctgtgttgtaaatcagaactatacattgattattctttcattcagaaaaaaaatgcaatattaaaaaaagaaatgcatgtccttctcttccctctcctgtctcaaggtgggctggatttaaaaacctccgcataatccttagctcttttcctcttcacctatgcatcacccg

SEQ ID NO: 264133 - DNA, 475 bp, Homo sapiens
tattaaaaaatgcaggagcagaggctctgagaggggactgtaacttacccaagatcatgtggtagattgcaaaactggttccaaatccctacccttccctgtacgcacaccttttgccattcatctgcaatgtccttttctgattctgggctcagcaatataacttgctctggccaacaggataacaacagcaaatgtgatgtaagcaaaagcttgagaaatacttgtgcaactaatcatgtttgccttctctcttgtacctgtgccattgccatgagaacatgcctgggctaggattagagacacttggagcagagctgagtcatcccagctgtcccagttgaggccagcctaggtcagtcgatggcaaccaagccctaagcatgttagtgagcccagccatgatcagcacaaccacctagccaaccatcccagacctgtgatcaataaagccttactattccataccacctag

SEQ ID NO: 264134 - DNA, 505 bp, Homo sapiens
aatgaatgtttgttgagtgaccaaacgactgaattgatgagtggagatggttgatctctgaatctcctctgaattatgagtttcttgagggcagggtatgagtctaattaatcctcatgtctacagtgcctcccatgtttgccacatggggtctgcaagcttgttctgtccggctgcatttcctcttatatactacagaggccaataagattccgtggaacacacatggcaaataccaacattttcagtgagttgaaccaccagatagactgaagactgcaggtctcaccataaccatgaacactctggaccacaagggggcaggaaccaacctgtcaagtcccggggcttacatagcaggagtgttctcaggaggaaaggagcaaggcaggtcattaaggataaccagccaggcacagcctcacctgcccttaaatgtcagccagtaggaagaggaaaccggcatgggtccttcttttaaaaatgcacattcaacctgaaaaaa

SEQ ID NO: 264135 - DNA, 394 bp, Homo sapiens
aatgaatgtttgttgagtgaccaaacgactgaattgatgagtggagatggttgatctctgaatctcctctgaattatgagtttcttgagggcagggtatgagtctaattaatcctcatgtctacagtgcctcccatgtttgccacatgggaagctgatggagtcagtgacatggagcatgagaatcccaagatggttcctgggacacgtgtgcaatgaatgcaggagccacctctatcaagtactttcacgaatgaaatgcaactccagaaggcaggcaggaatgatagagaggctgagatggcagtgagggtgtgatggtcctggagtgagcttgcgcgtggctgttcagatggtgggctttgctgtcattcattcaatgaataaaaccacta

SEQ ID NO: 264136 - DNA, 739 bp, Homo sapiens
tggaaaatataatttattttacgcttgaggggattttatatcaaaagagatgaattcttatatatactagtttatcatacaggtggaaaaaggaaaaacatgtaattacagctgattttctcgtttctaattttatacacacacacaccacccccccaacacaaacaggaaaacaatgggatttgctatgccttctttcatgtggagcccctggacccttactttggctcccacctctccatgtgacggtgccactaaagctccagcagccacatgttgtctcacacgtctcagcttcagccaacactgctccacacacttggaatcctgcctcaggggccaactctgccctgaaactctcactgttcatgagtcagaagaaacccctccttctgcctttccacagcatcaggctttagtacacacttctgacactgcccaggttccatgaatcctgcattaggagggttatgcgttcaacttctctactagaccgtgcttccagaggaaagattcttatgtcctacgtgtgtctgacaccccattgccaaggtacagcatcatgcacataacaatcaattagcaaggtctgatgatgccaaaagctatcacctttaattcacaacaaatgtttatagagtagtttcaatctccatgcaaaacatgcatagacaggttataaagctctgtgttaagttcaacaaaagagtattaatctatgtacctctcccctcttctc

SEQ ID NO: 264137 - DNA, 297 bp, Homo sapiens
gcctgggtgacagaacaagactctgtgtcaaaaaaaaaaaaaaaaagaaaacaaaagaaaaaaaaaggaatgttttaggggaggcctgttctgctcccatctgagccctgggtcaactttagcgtcctaggctggacatgatgtggctcccattgggagcagtagtagtaggttggtgagggcctggaaggagacgtatctctctgagttaaggagggcacctcagaggatcaggcacatgaacagagacctgaaggagaaaaagcggaggatacacatagagatctgggggaagaa

SEQ ID NO: 264138 - DNA, 497 bp, Homo sapiens
gaccttgacaagaacaatatttgcatggggtcaaaccattgaaatttggaggtcatttcttataacaattagcctatctgaccaatacaacccctttgcccaactttcctcttggtcacaagtagaaagaaagactagagtaaatttctggagtctcagtgcatggcttcagaggatctagacaaaagaaggcatcagcagccaagctcaacatcaaggaattttgcaggattctggagtgaattttaaagccttagaaattcccacagagctgaagccatgtatctccttatctcactgtctcctctggacatttttatattcttgggagaacagtgaataaccatctccaaactagttctcgtgtgaaacccaacccagcctatgtgatttatttaatatgtttggagtctagtcaataccacacttaaacctgtcttgtttttgtcttttgttaaacatggtaattaaaaagaagaaaaaaaactggtaagaaa

SEQ ID NO: 264139 - DNA, 248 bp, Homo sapiens
ctgaaactgacttggagatccctttcttcggtctgcagcctggcttgctgaagacctaaggcaatgaccagcagtcagccagtccacaaatgccaaagagccagcatacaccagacgctgccacggcactcacaaagttttgtggtaacaaagcagagaaggcatacatacagtcgagtgctactcaaatctttagtgtgcccacacattacccggggatcttgttaaaaacgcaaattctgtttcta

SEQ ID NO: 264140 - DNA, 534 bp, Homo sapiens
acctcctaccccacgtggttttgttttctctttttgggcttttcacccccttctctacctcagaagagggtttcagttttccagtgactcataccttagctagggcagaaaagtatttagaagggctttctatttgggtcctctctgattatcagtgcaaaatcagttacctcacatcttttctctttcattacatcaagccctactttttcttctgacctctcatttttctcagaaaagaatattctcctttgcatcaaagctgttgcataggtgggagacatgctgattcttcaaagactgaatgacatacataccttctatgcatctcttgcttttcgtacgacattataaattacaagtaacatcaacttttttgtctttgttttttgagatgtagtctggctctgtcacccagggcagagtgcagtggcgctaccatggctcactgcagccttgagcctggagattgaagctgcaatgagctgtgatcgtgctcattgtggtgtgggagacagcacaagcctgtcttta

SEQ ID NO: 264141 - DNA, 425 bp, Homo sapiens
ggatatgtctctatgaacaccctaagatacagcttatttttaaagttaatctgatcatctttgccttttaactagaatgtataatttattaatatttaatataattacttttattttgaaatgtattactaccactatattgtgtactttctataggttctgctttttctttttctttttttcttcccacttgtcctcttttgaattaattgagttgcctttttttttttcaattttcccctattttagttggaaatatatgttttatttcaggattattccaaagtttgttgttctcaacttaacaatattgaaaataacttaatatctttatctcctccaaaaaaagaaaagaccttagaatgctttaagccaatttgtccttctgacatatattgtgtattagccagagctctccagagaag

SEQ ID NO: 264142 - DNA, 664 bp, Homo sapiens
tatctatactgacccactagcatatgatttttgtagtttttttaatgttaagtttgtaatgtagtgcacaaacttaattatacattggctgaggttatttgttttaaaggcagtacttgctctatggcccaggctggagtgcagtgcgtgatcatggctcactgtaacctcaaattcttggcctcaagcgatcctcctgcctcaccctcctgaaaggactgggattacaggcgtgagccaccatgcccagcctccttttgctgagttttaacaaatacagtagtgtaaccgaagatgccatcaagacaaatagaacacgtccctcaccccagaaaattctcttatgcccctttccattctatgtccactgctaccatgccacctgtgctgatttctccactatgcttccgcctgttctaagagttcatactaatggatcattgggtacatgtccttgtgtaaggcgtctttcccttagcgtcatgtttctggagattcttctgtgttgtttcatgtctcaggagtttgttcttttgattgccaagcagtccagtgtaaacacaccggtgtgtttatctgctgtattcatggacacttggagctgtgtctggctattggcgatcacgaataaagttgctgttgactttctttttgaaatctttgt

SEQ ID NO: 264143 - DNA, 584 bp, Homo sapiens
atgattaacgtcaaacatctggcaaggtcggaatgattttgcgatgagcaccgctggagtgcagtgcgtgatcatggctcactgtaacctcaaattcttggcctcaagcgatcctcctgcctcaccctcctgaaaggactgggattacaggcgtgagccaccatgcccagcctccttttgctgagttttaacaaatacagtagtgtaaccgaagatgccatcaagacaaatagaacacgtccctcaccccagaaaattctcttatgcccctttccattctatgtccactgctaccatgccacctgtgctgatttctccactatgcttccgcctgttctaagagttcatactaatggatcattgggtacatgtccttgtgtaaggcgtctttcccttagcgtcatgtttctggagattcttctgtgttgtttcatgtctcaggagtttgttcttttgattgccaagcagtccagtgtaaacacaccggtgtgtttatctgctgtattcatggacacttggagctgtgtctggctattggcgatcacgaataaagttgctgttgactttctttttgaaatctttgt

SEQ ID NO: 264144 - DNA, 307 bp, Homo sapiens
aggctcctacaagggaggtgacagatgatggtggctggaagaggggctagcagatagggcggtgaggcttagagaggtcagtgacttgtctaaagttaaaggacaggtgagtggtggaggcagagactgctctgaccatactccccatgccgggcccaggctgggcacatggtggggctcaatggttagtatatcaaatgggtccattttctccaagcatattcctactcaccaaagctaattaaagtgaaatatgggaatgcaggcacttagcagggcaaagaaagtctttcgagactccgtctca

SEQ ID NO: 264145 - DNA, 603 bp, Homo sapiens
tgaattctccctgggagggagttctggagttcctgccccagttgggaggtcccgcccagcgaggaggaatggattggggatccacttaaaaagaggcagtctggccacattttggtagagcagctgtgctgcgtgggggatcccttctgccctcagttggtttgggttctcaaaagcccaacaggctggaatggctaagttacccaaacaacaaagatggtggcctgccctgtcccctaggaagtcagtctcaggtaggtaaaacactgttgctggtggctggctggagttgtttccttgattatgtgagtaatgcgagtacctggttgtttcagttgaaggtgctgtattgacttgcccttttcattcctctccatgagagccgtgcaccctagcttcttctagtcagtcatcttggccacacacccccataatcgtattttttaactaaatcattctttaaaactctaacaaaatatttaaacatttaaaaagtgtgagctttagaaatgcctaattacatcttaggtttgagacacgtagcagttatgtacattgtcaattccagattttgcatcttacaaggaaaggacttagatctta

SEQ ID NO: 264146 - DNA, 405 bp, Homo sapiens
cccaccccaatggaagtgacaaaacttcagatgcaaaaagatctccagggacaccatctcctgaccatgggaagcagtggtgtccagactaagccagaaaggaggcgctgggcagaaacccttcaagggccaagttatgtaactgccaaagaaccttttaaaactctagttgctacagggacagggaacgggtagggggaatcgggggatccactgccacagactcttggggggcacactctgcagaggctgagatgcacccatctagttggagcccaggtattatcatgcaggagacctgggttcaagtaggtgtttgacccttggagagctttctggaatatttataccacacacagggatacttggcttgggaaaactaaataaacgtgaagtctttccttc

SEQ ID NO: 264147 - DNA, 595 bp, Homo sapiens
tttctgtttagccttgcatcacctgtcaaagtccaaacttgatccatcgtttagtgccttctgtgctctggatccaacttactcccatgtgtcatctgtactttagacacatcaagaatctgtattccctttatttctgcaaatattccctctctttcatatgtccatatgcttatgctagttcttttgtttacctaaagacccctaattactttaggagttactccaccttaatcctaaccatattttaatgttcaccttaacttctccagaaatttttctgacttccgcatttgcataatgcatatcattttctgaaccccaaaggaattggcttgtatctcttatgacactgtaacattctgcctttttaatagtctctctgatgtttttctaaaagataataaggcccttgaggttgtaaactgtcattttaaaaagtcagtacagtagcttatacctagtagaagatagtgacagagagtatattggaatttggtgcccaactacgtagaaaatgtcttcaaagctagacaaagattcccaatctggaatagtaggaaataagaaaatatactgacggtttttactggta

SEQ ID NO: 264148 - DNA, 356 bp, Homo sapiens
ttttaagacctttattaacaggtgcttgcagtttgttgacttttttgaaaaaatcaagttgtaaacttttattacaaattaaaaaggaagttcttaaaaatctcaacttgaccagatatgaaacaatttaaaaacctttaaaggcgtattcagaaaaaccaggcttttttaaaaaacacgtttgttattaccaaaaagagacgtctttaggtaaaaataataaaaaccccatgctgcatagataatgcagatctatttatctggtcaacgggcaaaatgcaagcatttaaggtcttcagctccaatcttttgttcatttcttattgctggaatttcattatttcttcttgttggat

SEQ ID NO: 264149 - DNA, 621 bp, Homo sapiens
ttccctgtagaagctacggatttgctctgactggtagaacacagagatgtttcgcgttctagagattagcattgatatatatttagtgttcaataagtccccagtgtcttagtgtttccctttcccagatgcacagtcaacctggtaaggctcctgggctcgtcttcaataagggatcagtgcccctatgagctagcaaagtcctgggaattgaaagagaaataattgccttttgtgtttactaaggcagcttctgctgatcagcctagaatttctctgcctctataaatgaagtaatgctttaggaaggtgccagtttgttccatttcaaaggtgactgtggctgggcgttgtggctcatgcttgtaatccgaggacttcgggaggctgaggcgggtggatcatgaggtcaagagttcgagaccagcctggccaacacagtgaaaccccgtctctactaaaagtacaaaaattagctggccgtggtggtgggcacctgtaatcccaactgcttgggaggctgaggcaggagaatcacttgaacctgggaggcagagtttggagtgagccgagttcgcggcaccctactccagcctgggtgacagaactagatttcgtctc

SEQ ID NO: 264150 - DNA, 388 bp, Homo sapiens
ttcaattatgttgtctcagtggacacaggtgtttgccaggaagcttaaagtcaatggcaatatggctggccagactaagaaagacaagagggctggtcacctgggcagatgcggaagtatgagtccaagtctggggaatatactaggagctgctgaccactggcccttcgttgagtcagggaggctgagagaggccacgaaaggcctgaggttcaggcagccctggctggccacttaacggtcattgtcaagaactgcaggctggccctggctccaggccttatgctcctctgttgctgggcaaatcactcaaatcctccttttatttttctgcttgtatcaataatatatgcttagtattaaagaatttaagaaatatatacaatta

SEQ ID NO: 264151 - DNA, 355 bp, Homo sapiens
gcacttcgtgttgagaaagagcatggagtgtctgaaaaaccaagagcactggagatggctaaagcaaggagagggagaggaggagcagtggcatcaaatgtggctgaagaaatagctagtagctggttctaagttctaagccatggttaggattctggatctggttgtgaaggcaatgagagaccattgaagggtttaggcagggaggtgatgttatcagaatttgttttcttacaatttttttttttttttgcaatcattgtggttgctttgtggagagtagatcagactgagccgagagaggacacaaagatttcaattaagatgttatcgagtctgggcatggtgtctcatt

SEQ ID NO: 264152 - DNA, 418 bp, Homo sapiens
aacctgctccacctatagacccaggcttcactctcacctgaaaaccctcccaggcacaacataaaaaggctcctttcggtctcacaccacatcactcatggtcattttgttgacattctttaggccacaccgtcctgctttcgattttgcagatccctaccctattgattagtctgaatgttctatcctcactttgtacttcagattgagcagtgccttcccaactctcagctgactggagagtttttgggtgaagactcacctgctttgaggaaaccgacggaaccatgaactctttagaaaagagctaccttcagcgtgttcccctctcatcacagctcactctcactccctggagagaaatggacacagtgataatttacctgttctacctcactgttcttgcccctttaggagg

SEQ ID NO: 264153 - DNA, 451 bp, Homo sapiens
agtttctttattctccttcccagtgctctttgtggtggtggtggttgtgttttgtaactagaaataaatttctatcttaatacaaagctttctttaatccctcagtgccatattactctccttgtttctaccatttgattcttctagtctatctcattaactctactaaaaaagagtatttgagcctcaaatagtttatttcctaagaacaaacagttaagtaatatgcagactgaagacttctggataagactcaaatctttacctaatatattaagctgtatttataaaaaggaaattactctttaaaaacaatacacatgctataaattgtttctttggaataatggcacacattcttcctatttatcaaatagatacatttcccagaaggaagtgggtaatgatatattatagtaaaagaaagaaagaaaagaagagaaaagaaaga

SEQ ID NO: 264154 - DNA, 572 bp, Homo sapiens
tcttgtaacaatgttttacttttcccagaatatttgatcaaaaaaacctttacttgattgtcccacttaatttgtacaggtgttatgtattttaaattatacagctaactaaataactattaattttcagttattttcaacttgtggacattaatttttttactgaatctcatcatttatggtgaaggcaagtattttttataagttgatatatagatatacagagatgagatgatagagagagagataaagagacagcaggaaaaacagagaaaatgagagaggaagaggagagggagaggtcctgttctctgttctctattatatcacctgtgggtgactatatgtttgtaattttgttgaattttttaactctgacatctctttctattccaccctctcatcatttacctatttttattgctcttccattctctttatactatatttttagatgtggagctctattctttatattcctcatctatactatagcttttttcccttcgtgttatctctctttctattacttcttatagattttcttacattgatcactttacttccttcgg

SEQ ID NO: 264155 - DNA, 405 bp, Homo sapiens
caacagagtgagactctgtctcaacaaaaaaataataataatactgaccctctcttctattaattcacagagtgatcaaagtatgagttagtgaaggagatgaaatggcgatcatccgaatctttggtgtttaaatgcttcttcctagaactgaaacatcctagagctgctaagaactcttaactgcatttctacattggtagtaaatttattctcagaacattaggatatttttttcaatcactttccttaaatacattgcatatttgaggtctcaggctgtgaaatttcaaaaatgttatccctgctgagtttctctctggataaccacttagtccttcccattttcaagacggcaattgtttttcagtaagattggctgaactgaaatgacttcagtttgct

SEQ ID NO: 264156 - DNA, 438 bp, Homo sapiens
tccagtggctccacgatgactacattccccaaattgttctcttaggaaccctttctgtgttcaaggaacccttactttacttaattatggccccaaagcacaagatagggatgccggcatactgttataattgttctattttattattagttattgttgttcatctctacctgtgactaatttatgaattcaactttatcataggtatgtaggtataggaaaaaaacatggtatgtataaggttcagtactatctgcagtttcagacatcccctgggggtcttggaacatatcccccgtggataaggggaaactactgtaaaagtttgtgttttatagagtagttgtgagaactacattaatccataatgtgtggctcatgatactcattgatagatggtagtagcaacaataaaaaataatattatcaagtaactga

SEQ ID NO: 264157 - DNA, 875 bp, Homo sapiens
  misc_feature (1)..(1): n is a, c, g, or t
  misc_feature (5)..(6): n is a, c, g, or t
  misc_feature (8)..(8): n is a, c, g, or t
  misc_feature (15)..(15): n is a, c, g, or t
  misc_feature (139)..(139): n is a, c, g, or t
  misc_feature (653)..(653): n is a, c, g, or t
  misc_feature (668)..(668): n is a, c, g, or t
  misc_feature (758)..(758): n is a, c, g, or t
  misc_feature (856)..(856): n is a, c, g, or t
  misc_feature (860)..(860): n is a, c, g, or t
  misc_feature (868)..(870): n is a, c, g, or t
  misc_feature (872)..(873): n is a, c, g, or t
naggnngnggaagangaagaggaagaagaggaggaagaggaagaagaagaggaagaagaaaagaagaaggaggaggagggaaagtagggagaggaggaggaggagaaaaaagagaaaaagaaagaaaaaaagaaatagnaaaaaagaggaagaaaaataaaagcagaaaagaaatgtctccatttacctgttcacagccacaagaaaaacattcttctatactgcaactgggtgaaacttacctgattagtacagccaagattgtcttatccaggttaggcaaaactgaacaagtagaactcctcctttgcgaaatgttttgctactgaagaccttgcttgggccaggtgtgatggctcatgcctgtaatcccaccacagtgggaggccgaggcaggtggatcacttgagcccaggagttcgagaccagcctgggcaacatggcaaaaccccatctctactaaaaatacaacaagtagctgggcatggtgaccagcacttgtagtcccagctactagggagcctgaagtgggaagatcacttgagcacgggaggtgcaggttgcagtgagccaagagcagattgcgccactgcactccagcctggatgacagagtgaggccctgtctcaaaaaaaaaaaaagaaagaaagaangaaaaggaaaagaanaagacttagctatgaactcataagccagcaggagagtttgctctctccggtgagactcagtgaaagccatcagcaaaactacagtaatgnggcactatcaccaccaaaagtgaaagaattaaagctttcgctttaaaaatgtagtggtagtcttgatatgatgtaatgagattggcactttttacctntgtngtcttccnnncnnaa

SEQ ID NO: 264158 - DNA, 522 bp, Homo sapiens
cacgagggttacttaacctctcttgggcctcagtttccctatctgtaaaatacctactgcatagcgttattgtgaagactaaatatgcaagtatatgtggagtacttaggacagtccctgaaacacaatagctcgtcagtgagtgataggtagcattattaactataatgaagtaccaagcatttggcagggctctggagtaataccgatgaataaaacatgaattttgctgtgcatatattcacattctagtcgatttgaagaaaatcaagctagtcacttaaatatagctttttgtttgtttctttcctattatctcattttctctaaatccccttcctagataatcccatccagtttcctagctgacaaagtcctaacattaactatagatcagacctcttttgggctccagagtccatgtgagtaactaactcacaggtagaacaaaaacaagatgttataacctcagcggactcatctggtttaacttttaagtgtcatagttgtgagctgtttttc

SEQ ID NO: 264159 - DNA, 385 bp, Homo sapiens
atattcctttggttatatacccagtattgggattgctgggttgaatggttgttctgttttaagttctttgagaaatctccagactgctttccacagtagctgaactaatttacattctcactagccctttataagtgttcctttttccccacaacctccccagcatctgttatttcttgactctttaatagccattctgattggtatgagatggtatctcattgtggttttgatttgcatttctctaatgattagtgatactgagctttttaaatatgcttgttggctgcatgtatgtcttcttttgcttattgacttaagttcctcatagattgtagatattaggcctttgatggtggcatagtttgcaaatattttctcccat

SEQ ID NO: 264160 - DNA, 399 bp, Homo sapiens
taaacatttttattcccacagtagtgagcagttttgttcttgttttgataatgttcatttctgcctaatcttaggcttcaaatacacctttaagaaagcccaagatgtattgagtagtagaacttcttatttgtatacctgtttataactgcactgccctggatgttatggttatttctaaggactgacctggtaaagctacttgaactggtagactgcagggtagaggcagacctagattcaatgtctaactaagctgcttagggcttacattaatttccacaggtctgttatccatatcatgagtttataagtgttcctcccaaagaaaaaatttaaaagtgatggatgaaatataatagtagatgctcaataaattccattgtatttaaagattat

SEQ ID NO: 264161 - DNA, 449 bp, Homo sapiens
cacactcctgggctcaagcaatccttgtgccactacacctggctctcttgctttgtttttgagcttactccaataacccttcatgctctttgctataaatagaaacttcttcctatgtttgatgcctttgatcttttgttttgataggcaagaagccatctttcagatttctagatagccttaaggaagttttatctagatagtttgcctacaagaggagcattaatactacccatttatggaggttttacttgccaaatttgggcagtttttatcatttaaaatctagcaaaacattatgtcagtgccctcccaggcctttaaagtcttcatgtaacagcaggctaggggttttgtcagctgtaaagttacatcttctgttcctccaaacagaaacatactttttaatctaaacaagtggatacttttcttgggagcatgttaaaaaa

SEQ ID NO: 264162 - DNA, 176 bp, Homo sapiens
cataccccacagcagcactaacatttatatactttgcaaggatgagttttctttcccttgaatctcctaggctacatccaagatatcccattttccaaaccatggagacctgtgttagctgacctatctgacattgtttccactttgttgtgaagtaaaaacctcagtgcactaca

SEQ ID NO: 264163 - DNA, 415 bp, Homo sapiens
gaccacacgcttcatagtattcagagcactggacttgggaccagaagttccagctcatcactgctgtataactgtaaagaaatcatttagcctctcgagcctcattctttgtgtgagatggagataatcctactcatctcatagggcagttgtgaggactgaatgagtttaaatgcaaaatgctcttaagacactgtgatatatctgcatccacccacttatctccctgcttacctatctctgtaaaatagggataataatagttactacttcacagagttgtaagagttgagtgaaaaggtgaatgatggaggctgaggtgggcggaccatctgaggtcaggagttggagaccagcctggccaacatggtgaaaccccgtctctactaaaaatacaaaaattagctgaatgtgg

SEQ ID NO: 264164 - DNA, 805 bp, Homo sapiens
gcattttatctcacataaatttaggatgaaattttaaaacattcttttgactaagactttaattcttatatgcatctaaaataaatgttttgagttagactcagtttatatagcttcctcgttagagtacacattttttttctcatcctccgaatctcaagagtacatatttctgacaagcttttcaatggtacgatggattttatttttctatcatcaactttctatatttaactaaagcattagtatttctagatttagtgaaatagcaaatatgaattaaaatatttatttctaaacattagatctaattgtattttgatttgttttgatatatttatgtctcagaagatatgtttaatgaattcatttcatcctctcaaccctcagttttgataggtatccacatttttaccatataaaactagactggattaaggattttgcctaaacctataccaatactctgaataaatgcagggttggagatagaattcaggtcttttaacttctaacacacttttttctccattgcactacagaagccgtaaggtcataatgatgatctttgtagagtaaataaaatattttcctagaaatatatataacaaccctacttgatagtttatagcccaaatgaatatatttttccaatcatggtttgcaaaatcatgtttgcaaacttactttgaagactatttcctgattgccacggcagataattcgtggcaaatcagaaataatatttagtgagattaattattttgcacaatatatgttgttatagcaatatcaaaatcattta

SEQ ID NO: 264165 - DNA, 391 bp, Homo sapiens
gtagaattgagggtatacacattctatctgtatgtctatgtatctgtaattcagaaagtcctttatttctcattgtgagtatggaatgttttcctgtctccagatggtattaataaattagatggtaaaggctctttaaaaataaagcctcattatgggttcattttccctctcaaactctgtagaacataaccagtttgaaaagcctctagatttgggggtgtaaaaattccatgcagcttgagagccatcagtcattaagccgctagttccaccccaagtcttgctgtccagaagctcagacagtccactgggcagcaaagaggcgctttagtaagttgaattaaagccacaaacatggctgctccctaagggagataatactgtgtta

SEQ ID NO: 264166 - DNA, 349 bp, Homo sapiens
tagaattttctccatcccttttcctggatctctagccaccaactatacaacctgctcattctgccactcctgtaaatattaacaactgggggccttctatgcttttctacaggctcatataatcatgaacatattagaaattgtgcttcctacctttcttctcttctcccttccttccttcttccttccttcctcccttcctctccctaaaccaaataggcttaaaaagttgtttacacttctaggcatttcttgcttttcttattaacagaagattggggaaatatttctagcctgctggaatacatttcactcttttttttttgagatagggggtctcactctgtca

SEQ ID NO: 264167 - DNA, 427 bp, Homo sapiens
tctgtaaaggaccagacatgcagctctcagtcacaaccaccatgccatgtagcatgaaagcaaccacagccaatgtgtaacaaattagcatggtatgtgtggccaggggcagggctcacgcctataatcccagcactttgagaggccaaggcgagaagattgcttgaggtcaggagttcgagaccagcctaggcaataaagttggaccccatcgctacaaaaagtaaaaagaaaaaaactagcagggcgccgtggtgcctgcctgtggtcccaggtactggggaggctgaggcaggaggactgcttgagcccaggagcttgaagctgcagtgagctatgatctcaccactgcactgcagcctagacaacagagccgagatcatgccactgcactccagcctgggcgacagaacgagatgctatctca

SEQ ID NO: 264168 - DNA, 376 bp, Homo sapiens
gagtgatgctcctgcctcagcctcccaagtagctaggagtacaggaaagggccaccatcatatctagctagttaaaaaacatttttttgtttgtatggagatggggtctcactatgttgcccaggctggtctcgaaccactggcttcaagagatccttctgcctcagcctcccaaagtgctgggattacaggtatgacgcaccacactcagccctatttcttattgttaaattattatagagtatgggtcaggcacggtggctcatgcttataaccccagcacgttgggaggccaaggtggaaggattgcttgaagccagaggtttgagaccaacctgtgcaacacaggggaccgtatctctacaaaaaaaatgtt

SEQ ID NO: 264169 - DNA, 420 bp, Homo sapiens
ctaattctttattttttgtagagaggaggtctttctatgttgcccaggctggtcttgaactcctgtcctcaagcgaccctcccacctcagcctcccaatgtgttggaattacaggcaggagccgctacacccagccttcactcctatcactcacacctgcaacccacttcaatgcccttgcactgctggaactatgacccagaacaaagaaagcaagaagtgccttggagttgatgtgcctgccctccctggtgcagggtatgaaagcctcactccctggccttgaggtggagcgaactcttggtgcaattcacattccagaactgcccacagtatcacctgttactcccttgcttgctgctgctgcttctctcccctgcctgctctactgccttttctttctctccggagtcctgcctt

SEQ ID NO: 264170 - DNA, 475 bp, Homo sapiens
atagatgtatactatccataagccactctgttggctcttttagaacatgtattgttatcacaaagcagatattcttgctaaaggtaaatgtgaatttgtgttcttatctctatatctaaaatcagaaagttttaaaataatattttctttatgtgaaatcgcaaatcaacccagattatgagggaggaggaaggggcattttttctttaattaatatgaagagagggccaccaagagcatacagtgaattacaaaaagataagacaaatgacaagaaggcaccttttccttcagcctggatccaggatccagggtttggcaagcaggtttctgcctggatttcatctgctacttggggcttagtgcttctgtacagtatacaaactgcacaagtacacagcaaccctgcataaagactttcagctaagaaatccccctagatagagcagcctaaaaaggtaagcccagcaactac

SEQ ID NO: 264171 - DNA, 250 bp, Homo sapiens
caaaaccagaggctctgagggacaaagaggaaggagggcagagcatgaggcagagcaacccaacagccatggaggctgaagagacgatgcaacacctacaggagttccgtgaacgtcataacaagatcctcgaccaactgaatgaacagtgagggcaggaccgctttactgacatcaccctgattgtggacggacaccatctgaaggctcacaaggccgttttggctgcttgcagtaagttccacaattc

SEQ ID NO: 264172 - DNA, 517 bp, Homo sapiens
tagtagagacgaggtttcaccattttggccaggttggtcttgaactcctgaccttacatgatccatctgcctcagcctgccaagtgctgggattacaggcatgagccactgagcccgggccagaaacaactttaaaaagtcatggtttaacaaaattagaagctctcatatatgcaaatgaaaattccaaattttggcctcttgtgaaaaatacagaagacaggagatactgggtctgtgtcctggaggcagcacctgaggggacatctgtcatggcctcagatccaggcgcaccaccatccccctaccctcacacctgtgtcatggcctcagatccaggtgcatcaccatccccctaccctcatacctgtgtcatggcctgggctccaggtgcactgccatccccctacccctcacacctgctccccaggactccatcttcctgaaacatatgccactcctgcctctctcctgggttgggtaaaccaagagactcaagagacagctgccatttgga

SEQ ID NO: 264173 - DNA, 261 bp, Homo sapiens
tatgcttaagaaaattttactaagaaaatataagaacacacatctcattacaacatatcacaacagagaaaaaataattcacataattctgaagtttttagactgattcttggaaccatttttaacaagtcaatctggtataatatgttctatacaaggcattcctcttaaactagcattcccataagcaattactacaagactacccattccgtcatcttatcaacactcagatgtgaaaggctaagcaatgacttgcaa

SEQ ID NO: 264174 - DNA, 354 bp, Homo sapiens
aggcaggctgaagcaccggccatatgctgttttacacatggaagtgcttctggaaatagtcctttcgattacatctcaaacaccccaaggaagctgatttttccaggcttgcagtggcttctggtttaaaatgacatctggcaaaaagcttctcaccaagagtttggacggcactaagcaggaagaaaattcatgctaccaccaagaactggatttgattatcaacattttctagaatctgggggcaagtttctctacttccaaagctaatgataatgggttggaaaaaatagtaaatatagtaaatcaactttgcagggtcactaaaaattaataaacaagtcttattatttg

SEQ ID NO: 264175 - DNA, 276 bp, Homo sapiens
gtgttgttttcatcttacttggttataggccagtggtgatctgggagccactggtggaccacactggcttagttagtcttccttctttcctccaccaaaagacatgcagagcgttactgccttcccacccaataaagaggatggtaggtgagaaaataaagagctatactgtaagcagagcaactgggtttccaaggagggagtgtaaaacaaaggatctcagtgtgggagtgtctaaggttgaagctgtcccaaggcaataccttctacccctac

SEQ ID NO: 264176 - DNA, 135 bp, Homo sapiens
taggttaattgtgttcatctgcagatgagttttgtaatcattttgttttgttttgttttgttttgttttgttttgttttgtgttttctgtcctttccttccctgtcccttaccacttcccttctgtcgtcttctc

SEQ ID NO: 264177 - DNA, 442 bp, Homo sapiens
tcttctcttccacagaccaaacaaccttcagctcctatgcggcacctggcatgaatgcttctgaggctctgcagctgctggaggcggacattggcctaaaggagcccatgagtccatgatgccaagactgggcagggacacccaagagctgtttctactctaggaaatggggtgagtggaggacaggggtgtcagagcctcatggggcagcagggcctgtctccctcattgccttgattgtgccctatgactgtgtccccatactgccatggagatgggacaggaccctagcccaacctctgtgtctctgtggcctttctacccagtgccaaaccagatgatgtgtttaaatatgtagatgaccagcataatggagacatgtcctgagttatatacgtaaaaccctgcaacataatgagaaatacatgttcgtcattgtaac

SEQ ID NO: 264178 - DNA, 547 bp, Homo sapiens
ccctatgaccacttctaccactctggggaattgagttcaaggaaagcttaagaagacaaaaagcaagttatgcaaatatgttatctgctgtggtgtggtaaagtttaatcccccagctgtggtgcacacctggcaaagaatggaggcgctgacacttattgatcattacttgcagttgagccgagattgcagtctgggcgacagggcaagactccatctaaaaaaaaaaaaaggcatgaatgaatctgggggaatagcaaatgcaaaggtcctgaggtgggcatccacttggacagttcacaaaagaggcatctgaggggcattgggatacaccaccccaaaatatgcctcttcgcatgtggattattttgaattaaaggccattaagaaccagcagaccacaggaaaggctctaaaaaccattttcattttgtaaaaaaaattcacatttattataaaggaaatttccacgtctccctcttccatgcaaggaagaggatatcttgtaacaactcttatcagtggaagaaagtactgacttaagtct

SEQ ID NO: 264179 - DNA, 300 bp, Homo sapiens
ttttgtatttttagtagagatggggtttcaccatgttggccaggctggtctcgaactcctgacctcaggtaatccatctgcctcagcctcccaaagtgctgggattacaggcatgagacaccacaccagcaagatatcattcttctatcaaatcagcaagcttttaaaaaaaattaatattcaatagcaagaatacaatgcatgaacactcaagctcccaggtgaaataaacttatttttgtttttgtttggatttttttgagacagagtctcgctctgtcacccaggctggagtgcaga

SEQ ID NO: 264180 - DNA, 630 bp, Homo sapiens
cagcatggtgtatcttttggacatgtccattttggaagaaacttttgtgttaaaataaactaatatattatgggctagaacataaaattcaccaagaatttcaagataaaaatactaatgttttgcttgtttgggttatttcaaacaatagctttgaaatctataattgtttcaccaccaaccctttctttacctccttgcatgctcattctcctgtgtggctagatgcatttcagaaaagtgttttgaatattattccagagcaaggatcattccagaaaataagtttaaagtttgaaatgtttattttttgtaagccatgaatcttcagcttaagtatcttctgacataaaagcattttcataattataaaagttctgatattactctccacagtattatatctgatcctgcaaagtagttcagataccagagaatactcttaaacattttgacttatgcatttaattatttttaaaatttatggaacaagacattaaatgagaaagaatggaatgaaaaatgggttaaaagaatgcaaaattgcaaaaagaatgctttgaatttaaatatttccaaaaatttgattttctgagaaaatatattaaaaatcatatctaattaccttca

SEQ ID NO: 264181 - DNA, 498 bp, Homo sapiens
ttcatctccctgggcctcagtttcccccacctggaacatggaggtggtggtagttcctgtctcggggttgctacggcggctaagtgaggtgacgcctataagatgcttagaacaaggccaggcagcttccacaggctcagagtggtcagcactgtcactgccacctactgtgccactgctcctcctggaggcagggaccacagctcgctccctgagagcctgtcacccacccaggaccacccattggtccccttcagagtccccaggctgaacagaccaaaagcattgcacacacttatgcagctggtatgatttctctacccagcctctggtttttcagctttttttggaagcataaatcctttgactccaacaaaatgttaaatgctcccctaagatgtcaagcaggttaatgcatagctctctggttgaaggtgaggatggaagcacagagcacgttgcctgcccctcccccgctaccaccagtgctgtctgagc

SEQ ID NO: 264182 - DNA, 256 bp, Homo sapiens
gtcccaatgagatgaaccatgtacctcagttggaaatgcagaaatcacccgtcttctgcatcgatcacactgggagctgcagactggagctgttcctatttggccatcttggaatggaccctcccacgattaatcttttaaagttcacaaatgatttgaacatgcagtcaagactgaaaaccactgatgtaaatatagccattttcctagtatttcttctattttcctttcctttctttttttttttttttttctg

SEQ ID NO: 264183 - DNA, 421 bp, Homo sapiens
atactttaagttctagggtacatgtgcacaacatgcaggtttgttacatatgtatacatgtgccatgttggtgtgctgcacccattaactcatcatttacattaggtttatctcctaatgctatccctcccccctccccccaccccatggcaggccccggggtgtgatgttccctgccctgtgtccaagcgttctcattgttcaatttccacctatgagtgagaacatgcagtgtttggctgggaataaactattttttaagccctttggtgtgtggtcatttcttacagcagcccccacggaggcaaacaggtgtcacatatgcccccgaatttgggagatgacagaggcctgaggagggcccagagagatgaccttggggttgaggcagagttagagcttaacagacacactaactcta

SEQ ID NO: 264184 - DNA, 439 bp, Homo sapiens
ccccagactcctaaaagtcaagtccattgcttcacttttctgtacctccgtttcctcctctataaaagagagaataaccccaatattaccaggtgggtgcgctaatcagatgaagtcgccctggacggaaagtatccacagcaataaatgatttggcttgaaactgtcccattctcatccctctaaatgccttttccttggccctccattctcctgctcgctccctgtgctccaccagggaagccacagaagttcacaaccagaagaaagcccattttacagatagggaaactgaggcttggaaagggcaacaatttactgaaggtctgacagccccgttggaacccggggattccccaacccggggcattctccccgccacgccccgtcccggctgggacagagtgtccagcctcctcgccctgccccggcctccaga

SEQ ID NO: 264185 - DNA, 226 bp, Homo sapiens
ctgaaggtctaggaaattttgtattaaataatagtaatgtacaaatcattccaaagcagttacaatcatatgaactgaaaaataaaattctaaacagctttattgaggtattagttatatactataaaattcacccattgaaagtgattcagtgatttttagtaaatggaaagagttgtacagccatcgccagaatctggtcttaaaatattttcatcaccctacg

SEQ ID NO: 264186 - DNA, 475 bp, Homo sapiens
atggaaaatggaagtacaggtagatccctcaagtcacatcattccttcttatactacagatagtagggatggaagtggctttcatttcacatacacggaaaaggaagatgggatggaaaaggaaagtcacagaaattttcagtgattattgggtttagttattacttgtcattatttatttattattatttaacttgtattattatgacagttatatacagatgaagaagatataagggacattatgttaaagcattaggagtgttagttagctagtgcctagttggaatatgtaactaatgtttagaattgtcagttggtgcttactggaatactaaatttgagtaaaaattttcaagtaccaaaatacaaataacagcaaaacaaaacttaaggaaaaaaactgctttggggtccaattaggaaagtatataggttagactcagagcttaagtgttagcaagtaggttaaaat

SEQ ID NO: 264187 - DNA, 353 bp, Homo sapiens
atgcaccatgcactgggctaggcagtttatgtcaactttttccattctatcttctcagtaaccctatgaggtctggttatcttcattgtgcaaatgaaggcagattcatagaattaatagcttgcccacagtcagatcaggatttaaaatcaaaagttcttctgtcttgcattaaacaaacaaacaaacaaaaaaccttttccattactccaccctgtttctttttgctaggaaataaaaccacaaatacaaaaacaagcaatcatacaagcaagctaaactaatgtggtttaaaaagcacctttttatgttttcttccaacattttattaacttttccaacgtacacatagt

SEQ ID NO: 264188 - DNA, 432 bp, Homo sapiens
agtgaccatttacatagtgtcctaaactacatgctttcctgtgacactgattagaatctgtcccttagagaatgtcagcatcatctttgatttagcagcatcttaatgttgtatagaagtgtaacaacttataactgcaggataaaatatgtttttcagattaaggtgatcaataacctctaattccaaacacattattgctaaattacgatgcatgtgaaatctggatacaagttaactactgattaattcattgtgactcgcttggcttagggatacagtttaaacatggaaagataagagaagaaaataattttgttcatttggactaaaactgtagttttggtttcttcagaacaactcaagaatttatattattactggagaattagttttgcttcattttctcatagattagtgatacataaaggg

SEQ ID NO: 264189 - DNA, 287 bp, Homo sapiens
tgataaatggcagggtcatttcattccttatctgttgctacataacaaattaccccaaatcttagtggcttgaaacaacaacaaacttttattatctctcacagttcctatgggttaggaatttaggtgtggctgaacttggcagttcaaggcattggctggggctgcaatccattggaaggcttgcctggggcgaaaggatctgttttcaaagccccgctctgccggttgagggtgggatgcctcagttcctctccatatgggcctctccatggggctgcttgggt

SEQ ID NO: 264190 - DNA, 765 bp, Homo sapiens
tgggttttgatacataaccccgttccaccatatcttattttccggtaatataaaattttataatgttataatgtaaaaaatattaacctatatcattttatatttctcagtgataaggttatagtggtttcttcctgcatccttatgcttttatttccaagttttttgtggtcagaatatatcacttttaacaattagaaaaaaaaaaaaaaaagtttttgaaaaatttttgtgatatcctccaccacagaagataagcaaaaaaagtccttgcattcaaagggttggaaaccactggattaaagtatctactcaccttctatatttcttaaatgcactgtatcattaacaagcataaatgtgctatgtcattaaccagcatagaacattactaagtgtatattaagctctcaattgttctcttatttgttaatagctattataattttgtcttagtaggaagtctgttgagattctgtcattgagatgtatctctctgtagctatataaaaatgtgtgtctcacacacacacctatataacttatttaagtgtgtagtaaattctcacttaacattgttgataggttcttggaaactgagggaagcaacatattaagaaaactaattttaccagagtttaattgataaccagagtttaaaagataacgagttatgtttgaatggcttgaacccgggaggcggaggttgcagtgagccaagattctgggactacactccagccttggcaacaaagcaagactgtc

SEQ ID NO: 264191 - DNA, 439 bp, Homo sapiens
tggtaatttgacatactaggtggttagtaactactgactgtctccaggttacaacacagttattacccacttgggtgaaaagagaagacaggaaatacattttggagttggctggcaacctgtttacaaagcaatttacaacagttccttattcttaaggggctattctaatacaagacctcagagaaacagtgcagtgtgacaaaggaggaatttatcaaaggagacagaaaaagcatcaaggcaagctgtgaaatggtgcggtaggaaccaaatagagagccaaaggatctttctgtcactgcaggcccttaggggtaagcaaatccttccctgatccctggtctccttatctgtaaatgagaataccagcacccacctcactgtgctgtaaacatgatgagttctaacaataatttataaattgtaaaatcacaca

SEQ ID NO: 264192 - DNA, 356 bp, Homo sapiens
ttctagagtttctacacaggactaggcatcagaaaacatatgttccaaaagtgtgtcaagggtcaccatggaaaccacagggcacaacatttgtgtcccaggcttctggaacactaaggaccgaaagaacgtgagtgagagcaggggaatttaggaatccattgaggatgcctgaatggggttgttggccctgatcacactctagagacaggcatatcatcacaggcaatcagaaatgaagaaggacattaacttgtaccctgtggaattgtcttcagttgataaaaaggacttctctgtgagtgtatattttaattatgctgttagctaggagtcaattaaattacaatacctag

SEQ ID NO: 264193 - DNA, 2059 bp, Homo sapiens
  misc_feature (3)..(3): n is a, c, g, or t
  misc_feature (5)..(5): n is a, c, g, or t
  misc_feature (1709)..(1709): n is a, c, g, or t
  misc_feature (1948)..(1948): n is a, c, g, or t
ggncnagcctgtctccgcgtggtgcgagcgctgcaccagcccctggctggtggttactgtccgaacggcgtggtgtggtcgctgactctctgggcgtgcagctccgcagccctgccggctcggttcggttcgtgagcggccgggattgacttacgcaggattctcagcccttgcctgggagaacagttcaggagacagatggcccccaagagcccagatccagggaccgctgacatttggggatgtggctgtggcctttacccggattgagtggagacacctggatgctgctcagcgggccctgtacagggatgtgatgctggagaactatgggaatctggtgtctgtggggcttctctcttccaaaccaaaactaattactcagttggagcaaggggcagagccctggactgaggtgcgagaggctccatcaggcacacatgcagtcgaggattactggtttgaaacaaagatgtcagccctaaagcaaagcacttctgaagcatctgttctgggagagcgaacgaaaagtgtcatgatggaaaaaggcctggactgggagggcagaagctccacagagaagaactataagtgcaaggaatgtgggaaagtcttcaaatacaattcgtcctttattagccaccagagaaatcacaccagtgagaaaccacataaatgtaaagaatgtgggatcgcctttatgaacagttcatcccttttaaatcaccataaggttcatgcaggcaaacagccttatagatgtattgaatgtgggaagttcctgaagaagcactcaacgtttatcaaccatcagagaattcattctagggagaaaccccacaaatgcattgaatgtggaaaaactttcagaaagaactcaatccttttaagtcatcagagaattcatactggccagaaaccctacaaatgtaatgactgtgggaaagccttcgctcagaatgcagctcttactcgtcatgaaagaatacatagtggagagaagccttttaaatgtaacaagtgtgggagagctttcagggataattcaactgtgttggaacatcagaaaatccatactggtgagaagccatatcagtgtaatgaatgtggaaaagcctttaggaagagctcaactcttattagtcaccaaagaatgcatactggggagaaaccctatcactgcagtaaatgtggaaaatctttcaggtatagctcatcctttgctggtcatcagaaaactcacagtggaaataaaccgtatcagtgtcgtgactgtgggaaggcctttacaaagagctcaacccttactggacatcagagaattcatactggagaaaaaccctatcactgtaagaaatgtgggaaagcctttcggcacagctcaggccttgttgaacatcagagactccatactggggaaaaaccttataaatgtaatgaatgtgggaaagcttttccccgaagttcagcccttaagcaacataagaaaattcataataaagaaagagccatgaaatgtagttagtgtggcaaattgtgcagagtagtttattccttctgaccatcatagaggagacattaaataaattatgcatttaacagaaatactctgtacttctgagagaacacatcacttgtgaggatattcattgtgaggttctactagtgaaatatttgaagaaactaaatgtatgtcagtatggaagtanttatagcatactgtgtgctaattgaaaagaatgaggtggagctgtaaatactgtacaaagccaggcatggtggcatatgcctgtagtcccagttacttgggaggctgagacaggattgcttaagcccaggagtttgagtctgtaatgcactatgattgtgcatgtgaatagccactgcactccagcctgggcaacatagcaagactccatctctaagtaaaaaaatacaacagtagaantatacccatgataatatacccaatatacccttgttaaagaagcaagtttcaggaaatctatattatatgcattcaaaaagacctggacaaataaagaccaatcttaacagc

SEQ ID NO: 264194 - DNA, 186 bp, Homo sapiens
gctgggcctgtacatgccctcgggaagcaggaggctgggcctggagaggccgacttgagaaagttttgctcctggagaggccactcagaggcaagagctgggtgtgaagaggctgacttgaggtcgattttggcctgtagaagccactggtagctaggagttggccctggagaggctgacctgagg

SEQ ID NO: 264195 - DNA, 300 bp, Homo sapiens
  misc_feature (242)..(242): n is a, c, g, or t
  misc_feature (251)..(251): n is a, c, g, or t
  misc_feature (276)..(276): n is a, c, g, or t
gcggccgcgccgagcccgcgagctagagaagcgccggagccagcgcgcgggccgccagcgaggaccctcccccgtctcctccccgaggccgccgcagccccctgctctccttaagggtctttcccagatgtgaaggtccctcccaggctctactgaggtcagaccaattcccagtggcttgggtaccctcgttcactccagcaccagcccctgccctccttcttcccgggccaagcaggggnctgtccatngaagaacgctccttggagttgcagnctggaggggcgagccccggcagcc

SEQ ID NO: 264196 - DNA, 289 bp, Homo sapiens
gaccttttctctgtaagctatttgtggctctagtgggtttttgtttgcttgcttgtttttgttttatctttgccctgaacgtccatcctggcctcggctgcctccctccccgagttcttcactacacctcctgtctcagcctcccagagagggtggcgagggtgctgatgcccagagacaccatccggcgaatggacctctcctgtcatgcggggcagggcagggctgccggcagagccatgtcctgaaccctccctcctccccacagagagagcgtcgggtacggagc

SEQ ID NO: 264197 - DNA, 464 bp, Homo sapiens
  misc_feature (406)..(406): n is a, c, g, or t
  misc_feature (415)..(415): n is a, c, g, or t
  misc_feature (440)..(440): n is a, c, g, or t
gaccttttctctgtaagctatttgtggctctagtgggtttttgtttgcttgcttgtttttgttttatctttgccctgaacgtccatcctggcctcggctgcctccctccccgagttcttcactacacctcctgtctcagcctcccagagagggtggcgagggtgctgatgcccagagacaccatccggcgaatggacctctcctgtcatgcggggcagggcagggctgccggcagagccatgtcctgaaccctccctcctcccccctgctctccttaagggtctttcccagatgtgaaggtccctcccaggctctactgaggtcagaccaattcccagtggcttgggtaccctcgttcactccagcaccagcccctgccctccttcttcccgggccaagcaggggnctgtccatngaagaacgctccttggagttgcagnctggaggggcgagccccggcagcc

SEQ ID NO: 264198 - DNA, 188 bp, Homo sapiens
gtgtttattgaactttttacctggcatattcaaatcttatttccaaatacatacgacagaaaaatttagattcttaaagtagccacattcaaattacccaggagtaattggccacctaagcagctggataaagcaatttctttgaaatacatttcaaggccaagcacagtggctcatgcctgtaatcc

SEQ ID NO: 264199 - DNA, 485 bp, Homo sapiens
tattatatataataatgagatgatttaataaattccatgtgtttctatggagggggtttgagagtcaaaagaaatttggagacgctgaggtagacaaagtgcggcgtataaggttcctgagaagagaggtgggttgggataccaagcactgagcagaaaatgatagtgaactgggcgaagggtcacctcctccgttgccatcgcagcagctgtagcagaagagattatatgagctgataaatgcaggcttatggatacggtgctggaaaggtaacctgatgccagacttagtttattctgtgtttattgggcatctgttttgtaccagtcactgtgctaggcctggagacacaaagatgtaaaagatatactctgccttggagaactgcgtgaactcggagggcggaggttgcagtgagccgagatcgcgccactgcactccagcctgggcaacagagtgcaactccgtctcaaaagaaaaaaaa

SEQ ID NO: 264200 - DNA, 187 bp, Homo sapiens
cttgacagatttaaaagactgaaaatcacacaaaatatgttctcagaccacaatggtactaagctagaattcaatagcagaaagttagctgaaagatccccaaatgtttggaaattaaacaacacactcctaaataacatatgggtcaaataagtctcaagagaaattttaaaatactttgaactaa

SEQ ID NO: 264201 - DNA, 452 bp, Homo sapiens
ctaaaaaattcctattgtctagtgacatcatagctgttgtaatgttgcagcacagtgcaatacacatgtgatgctcgtgtaaacctactgatataaaagtatagcacaattatgtacagtatataatatttgataataagcagctctgttactggtttatatatttactgtactatactttttatcttttcataccttttagatactctaacaataaagagtataatatagtaaatatataaaccagtaaggacaaccttgggcaggaccttaggacaaattccagaagaaggtgttgctgtcatagctccatgtgtattattgtccccgaaaaccttccagtgggacagaatgtggaggtggaagacagtgatatagatgatcctgaccccatgcaggcctaggctaatatgtctgtgttttagttcttaacaaaaaagttttaaaagtta

SEQ ID NO: 264202 - DNA, 399 bp, Homo sapiens
aaagatgaagaaggtgagaaagagcttgaccaattaggatagaaatttgatctagataaacggtaagcgtccgtaaagagctgtgtggaagaaagcactattcaattaaattatgtccctggataatgagtcctgttggtgaatgtttagtaggaaagattagtatttcaaaaggtaaatatggattcgccctggttacctgagactgttgaatgcgtttttctataagttgtaattcagaatctgcctcaggggtcaaagaccttttgttgcataaatcaggattgccccataatgttgcaaacagattagacatagcatatgtaagaatgcctaaggaggggcaaatccaattaatatctccaagcattttttggaaatcatttagcgtttttagag

SEQ ID NO: 264203 - DNA, 395 bp, Homo sapiens
catacaacaccaccctgtggtagatactgttatctttccctttttacagatgggaaaactgaggctcagagatatcaagtaatttgcccaagtttacaagctggaggcaatgaactggattcatactcaggtctgtctgagctggagcctatgttgttaaccagtgtgctctccaggcacttttgtaaggtttggtcataaatattccaaacttatttgactactgacacccatctacactgcacagtgtcatcgacaagatcaccaaaagtcttctctcaaaatgtactcgtctgtgctcctctaattctagagggttacagcatccatctccatccctctattgttctttcaggtctttgaggggatacaaagctccttatctacctgtaaag

SEQ ID NO: 264204 - DNA, 504 bp, Homo sapiens
atagtgacacttgtttctctccctctttgatttttctccaaactgcttggggttccagaggacagctcttctagaaatgtccctgtcttatctcacaaggcctgcaggaagtgtatagtctacaatcccagccatgacataaacaccagtctttctgaaccacatgcagcattgcccagctctggcatatcggaaatgagaaatggctatatgttctggggtatgactgcagcactgtgtgcagggtgcttaccaagcattagggccgaaaggggttgaagactccttcaaactcttgttttctgaatcaatttttacctgtttttcttctgacccgtcctgataaattttcagatagcaaaccttttggtatagtgacagtcaaagtcatttgcaaagcatagaataagtggtttagatgcttaggtatatttttcactttgaatgttcattctgagccagttttgtttatgtattaaaataataaaataaaggattaaagcc

SEQ ID NO: 264205 - DNA, 444 bp, Homo sapiens
ctcgcctttatcttcttgggaagccgagattggacataaagtagaatgatgtgatcagacatgttaagacagaaagagcacttggcatcagtgtggggtgtggttgcttcctctcctgaatgccttccttgttgtcttcatctgactagcactactcatatttaaagattcagctcaagcgtcacttcctttagggagccctccatgatcttcacggcctggccacctacccgtcccatgggcctccgttgaagctgacataaacctggatcacagagcctgacacatcttagggcacatttgtttcccggccagcctgagggtctgttgaggattgggctcctgtctgcacttccctatggttggcagctggcacagaatccagcattttataatgactcactaaaaatatttattgttaaataaataagaataagcatcctc

SEQ ID NO: 264206 - DNA, 391 bp, Homo sapiens
ctcccttgaaccccaggagctttggccaccaggatcacaaacagattggaccaggggttatgacatctgccctgtcctcctgtccagcccctgtgcaatcataagctgggttaccttctgagcctgtttcctcaactgtaaaatgagggttctgattataactataccccaggagtgtcaggataaatgaattggatctttctaagttcttaacccactgtctggctcattgtaggcatttgaaaaatgttaattattaccataattgttaatatcattattgtgcatgcattgtgctaagtgagtgggcacgttacataaacctttagcctcagtttcctcaagaaaatggagtcaattatgaacataatacagctcatatgcattcctt

SEQ ID NO: 264207 - DNA, 401 bp, Homo sapiens
aggaagacaggcagtgagccaatatatgagcatacagtgtgctgtgtggtgatcagagcatggaacaacagagagttgggtaaaggcgtggtggtcagagggtttgctattttggatgaggtgtggagagaaagcctcacctataaggacacatttgaaaagggacttgaaacaatgaaggaggtttccaggcagagaaagcagcaagtgcagaggccctgaagaattctaacattgctggagctagtggcctagaaagtgaatgaaaggagatgaaatcagagctgagtggggcaacagatcatgtggggctctgtaggcccttagaaagggtttggggtttttcttcaagtaaattaaaataagagagcaaatgaataatcaggaaaaaatgttttaag

SEQ ID NO: 264208 - DNA, 228 bp, Homo sapiens
gcctcgggcccctcctccacggcatgtgggcacattgtgcagagacgctccgaaagcaatgcatggaactgagtgggggctggcttaaaggccaaaacccaagcctattggattgggtgaggagagcgctggtcccctgaccctcaggcacacactccacagttgcaggctggacaggctggggggtttccgtccttcagaggaggctcaggggcaggaacccccttg

SEQ ID NO: 264209 - DNA, 259 bp, Homo sapiens
gcgggtgcgagcgctcgtcgggctgcaggtgcgtcctcccgcgctccgtgggcaacggacgccgatttcgatgtcgcgggcctggccgcctgccagggtcgccttccccggagcctccgctgggccttcttggacgcggtcgggccacggcgggcgggaggcgggcgcccagcatggtctgaggtcccagcatcctgaactccacactgggaccttaatttggttttaacacaaataaatattctcactaaagataaaa

SEQ ID NO: 264210 - DNA, 441 bp, Homo sapiens
aaaggggtagaaaacttagtagtttgaggagtactgtgtatgctactacctgtaacatttttctctatctagtgtattcttagttcctgtaaatgaaagcaataatttattgttggattttaccagataactctttagcaaaaaacaatacaaattattgtatccctttcttaaatatttatatatgcatataaatgtataaaaatttttgtgcatatttgaaatgtatctaaatttatgcatttcattgatcaacttcctccattcattcaatgttgtttttgaaacccatccaggatgataaatatagatgtttaattctatgtatgctctgcatagcttcctgtcatatgactacatgtattttatctgtccattcagtcactggtgtcatttgatatgttcaacacttttgctaataaaagcagtacctcaatgaca

SEQ ID NO: 264211 - DNA, 271 bp, Homo sapiens
aagcgcgagacggtttgactcttgtcattaagacaagaagaggtttggaaaaaatgcaaaaccaccgttctcttggctgcatcgggagacgggcggctgcccatcgcctcgcacacgcgggtgcgctcggagcccgtccgcgtagacacgcctgtgcgcggggcgggggtccccggcgcggcccggagcgggtccatctgcccggcgagggcttccgtcccgccagccgctgacctccaatctgtcactctctcggctgaaaggcggccgc

SEQ ID NO: 264212 - DNA, 922 bp, Homo sapiens
cgaaggctccgcggccctggagagccggctttagggcagccactggccgggcggtctcccaagtcaatggcctctgtgggaaaggcagtgatgtcacctcgaatgtattttcggggctttgccctgctttctcctgatctctccctctcaggctgtttccctgttttatttttctcctctttctttctctccttccagcttctttgagggcattatgacttttttccaagtttagagctcaaatccactgaaggcccgcacgcagccccatgactgccatggcaacgccgggcctggtacactttttttttttttttgcataaaaagtagagaaagattgaaaagagggacaagaatgaaagggggaacggagccagtttggcctgcgcggggctggtgtctgctgggcaaggacagaagcacacggggaacgggactcgtgaggccggaggagccagcggaggggcctttgagaaacaaatttgtgatccttcacggtcaaagcttccgaaaaagctctgcgcttctgacggatgacaagagagggagggcaacaaagttctcacaagaaataaggtctcgcttttgaacatgtacccaattgcatagtttagaggaagctttcaaaaatctgtctagcctctcaaaaagaaagacaaaaagaagaagaagaagaaaggagcgaaaagtctcaaaaggacttttgacctgtgtagaaagagagcagaaaacacgctgacacatttcctggaatacccaaggtccttgagctccctattgttaaacggcctcagtggaaactcgaaggtgtcagctgtgtcaaatcaactcaaaataatcgatgacaaacagaaagagacattcattactgtaccttcttcccctagagaatataacattaccttgaactcctgaaagaaaa

SEQ ID NO: 264213 - DNA, 459 bp, Homo sapiens
cacgaggaaaaaaactgctctgggcttctctggtctaagatattcaccactttcagggatctccacttagggactggctgtccctcattatcaccattccttctctggcaagtggcagccctttctctgaagcgggcagcagggatgtcattcacagtcacatcctacatcacaactgtgactggttggttggtgctatctgagtcttgcccagtggccagtaagagccatgaagacaggctcctgttccccaccacggcctctgctcagtgcctgtcccccagacttaagaaactgatcatctttacaatttggtcataaccacatcatactcacataattatttacccaatgtttttctttagaccaactttttatgatatttaaacaaatttatttatcatgataccacttttcacctcattcgacctataaaatcatggacttttgggggtcttt

SEQ ID NO: 264214 - DNA, 572 bp, Homo sapiens
ttgagacggagtttcgctctgtcgcccaggctggagcgcagtggcgcgatctcgactcactgcaagctccgcctcccgggttcatgccattctcctgcctcagcctcccgagtagctgggactacaggcgcgcgccaccatgcccagctaatttttgtatttttagtagagacggggtttcaccgtgtcagccaggatggtctcgatctcctgacctcatgatccgcccgtctcggcctcccaaagtgctgggattacaggcgtgagccaccgcgcccggccggatctttgatttatgaagactcattgtttatcatcaaagttaccagtagtcactaaaaaaaaaaaaaaaacttttgctatttgcagtgtcaggcattttgtgccacaagctgaaggcaactggttccctttttcacccacaggattaaaaaattccaggaatgagagaaaactaagttaggctattatgagacctatggcaataatcccctagatgtgaagctagtcttgttttgttttttttttttaaaaacacaaaaacaaaaaaacaagattatactttttcttta

SEQ ID NO: 264215 - DNA, 320 bp, Homo sapiens
gaagtagatgctcaataaacacattttgtctgatgggtataccttgaaacagcaaaagtaaagtctgtttcatcataatttgatccgttcacatttatgggccagatcctgtggtagacctgggatacaaagatgaactaaacagagactctgctctcaagagtttatataatctgcatttgcaggttataataaactctgatctgcatctttgggcaaaagcattcttttctaggtatcttaaccacgatctcaagtatgtgctctgtgtgtttactgacatatcatcaaacacagtctgtagggaaagtaaatgaaat

SEQ ID NO: 264216 - DNA, 925 bp, Homo sapiens
tattcctattaagtaccaggcattatttgtaaaaggtgacatcctttccttatcctgggctatttctggtggttcctcaacaggtctaccattttctgtcttcttagaggctttgcattgtcttccactagactataaaaagtgaggtaatgaaacagacttgtgaagaaacggagatgagaacctaatgagactttccagttctagtcctaggtggcctgactacactgcatttcctgtccttggatgtccataaaatcaaataacctccttggaatgtgtttctatcctttaccaccatacatagcttggctgcttatctttctccttatatgattagccgcttgagtgtaggtaccatatgatctttatttcatgagttacttttttaactgttagaaatgcattaactgaacttacatgagttactatcatatatgcccttccacacgccaggcattcctactctccactgtccaactcaggagcatggactgctaaaggcatgttccttcacaaatctactcagttccatatttggctcccagagctgactagtcctgaaacaagtgtccaaatctgccactcacacaccaaaaaagccatctcagacagaagattttactgttaaggaaaaccaacctcctgctggaatccaagatttagagggtaaaaggaaacaggagggctggaatcttgatttacagttgtgagcagaaacaaatcaatagataacatcacatgatggctaacggtagctgggaacaaaacaaaaacccaccaaaaactgacttgatgagtcctgatatgtcaagtacctaacacaatgctagatacctatgaagcagataatacatatttgttcagtaaatgaataattgaagagttaaataaatggttgaagtgtgatatacagaaaagaata

SEQ ID NO: 264217 - DNA, 358 bp, Homo sapiens
tataagtaatagtttttaaataaagcattaatgagcccctgctatgtgtcaaggtctgtaggatgctaatgacttcctggggatacagagacagcaagtcacaatccttgcccttaaaggacttatagggtttaggcaaagcagatatttaaagaggtgaataatattatagtagggttatgtattattatagcaatatttacagtatgcattgggagccctgaagaaggtagcacaaagggagtgatagttgatgaatacaagttttccaagcagagaatgggatagtaggggggtgggagcatttcaggcagaagtaacagcatgaataaagtgtgaaaaagatcatggaatgttc

SEQ ID NO: 264218 - DNA, 419 bp, Homo sapiens
tgatctattctgacagtccctgttgcaaggtttctttccatgtgaacatcattgatttagtaaaatggggagaggaacaggaagtgtttaatttatgctaagggttggctctaggattccctatctgatgtatgtatctgattttccccattaatgataaaaattgatacatgtcgttacgcatttgtccaaactggtagaatgtacaagcccaagagtgaaccctaatgtaaactatggacttcgagtgacactgtaggctctcagttgtaacaaatggcccactccaggggggtgttgatgactggggagactgcacgtgaggggcaggggctctctgggtaagctctattccttctgcttggttttactgtgaacctaaaactgctctaaaaatatgacatcttttttaaaaatct

SEQ ID NO: 264219 - DNA, 101 bp, Homo sapiens
tccgccgcggcacctggacctctactttccgaggtgagcatttgggggtcgagggcgtagagcgatcgcaccctgaatggagcccagggcagccagcgacc

SEQ ID NO: 264220 - DNA, 441 bp, Homo sapiens
aaaaatgccattctctggatgtgctcataggacagattaaatactactattccaattgctgaacagaggaactagaaacaaagaacctctaaaatgagaaaaacagataagctttgtataggagatccccagagccaaccaaagattgggtaaaaggagatactacctggctctgccaggtattcaatattgaatacctcagtttctcccaattgaagtgtgtaagaatgaactggggcctaccttgcctccattggccttgaaccttcagggccctggtttcttctgcatgtagatcatttcctaggaactgctctgcctcctgagccccagatacaatatttcttgggatgatcaacgttcttacagatcagcactgctcctgccaccaaaattctccataggcgcccttaaataaatacaattcttacacttgaaaaa

SEQ ID NO: 264221 - DNA, 1599 bp, Homo sapiens
cgtatgctgacttaaattgagggttggtcaaagttcaaaagcctgggggaaggaagcttaatattttctctagatcagtaagtacaagcaattcagctaagaatttgcttcatttatgaagcaaagaatggtaattttcaggacagtctgtgtctgattttgttataagtaaatgggggaagggagataaacatctgtgagtcttatctaagtcacccggggaaggatggttctttataataagccatttcctggaacacgcaggcgatgggcaggggggttactacaaccttatagaaataaaatttctttaactctgcctatatttcagggtatagtcctcaggtaaagcttcacattgtcaagaagaacttgaaaataccttttttccataaaaacacaatgaaactaatactatgtaacggaatattccaaagcactagttcttataaataactattggccaaaatacaaataactgacccaattcaaaattctctaagatttcattaagatccttttgtagttcataagcctgatgcatgggtgttcacgcgcatgtgtgagatgtgcctccctcaaaccttgttatggcgccagcccattaccggtctgtcatgaaaaaaaaaatatttcagtaaaagaggatacttctagtatcctttttaaaatttgaatgggaagcaaatagtatttcatcccagcatgttaaaattgcaagggtcacctaccccagcttaccatttgctaaacacgcatcagtcaccagtggaacacacatttccaatgctaaaggtcttgactgcttggtgaaaaccactttgcaacactggtgttggaaattactttcttatattaagctgaaatctacctcattggaacctctgctcataagtcctgagtctcatgtagttcagaccttgtctcttctgccccatctggctacttatctccagtttctcctgccagtcttccggtggcatagccccaaaccctttcatttcatagtttgtcactgccctttttaagaggactggggtgctcagaacttattggctgaccctagctcttcctttggcctggtcactatatttgaaaagtgctacctgaaatcataagagcttttttgttttgtttttaacagccattttctattgttgattcattttagttttggttacaactgaaatatctgtctttcacatgaaatatagcttctcatttgcctttcttcacaaagtctgttctaactacacatttccttggcttcagcctcatgcttgatgcagaagtgaggagagtgcaataaaaatttgaacagttgcttggatttttgcaataatagattgtcagttggggtcatatgactctcaggtgctagaaaatactctgcctttcagaacgtaaccgtgggcacactgaatgcaactgtataaaaatgaatgtgaatttttaaaggtagcataattaaagtttgtacattttaacagtttatgtaaatctgtctcatagaatacatgtaattttctctgaggtggatgttgtgatacttgatcaatatttgtcacctacagtaaatgtaccattggtcttggaggt

SEQ ID NO: 264222 - DNA, 672 bp, Homo sapiens
cgtatgctgacttaaattgagggttggtcaaagttcaaaagcctgggggaaggaagcttaatattttctctagatcagtaagtacaagcaattcagctaagaatttgcttcatttatgaagcaaagaatggtaattttcaggacagtctgtgtctgattttgttataagtaaatgggggaagggagataaacatctgtgagtcttatctaagtcacccggggaaggatggttctttataataagccatttcctggaacacgcaggcgatgggcaggggggttactacaaccttatagaaataaaatttctttaactctgcctatatttcagggtatagtcctcaggtaaagcttcacattgtcaagaagaacttgaaaataccttttttccataaaaacacaatgaaactaatactatgtaacggaatattccaaagcactagttcttataaataactattggccaaaatacaaataactgacccaattcaaaattctctaagatttcattaagatccttttgtagttcataagcctgatgcatgggtgttcacgcgcatgtgtgagatgtgcctccctcaaaccttgttatggcgccagcccattaccggtctgtcatgaaaaaaaaaaaagtcgacgcggccgcggaatttagtagtagtaggaaaacgc

SEQ ID NO: 264223 - DNA, 396 bp, Homo sapiens
cacatcggtcacagggaactgcttcccaaaaggaagcgtggcttgactgggactttcctcactgagaatgttctgttgggagaccctggccaggtaggagaaggatccctgggtcccagcccagctccacagcaagcctgagtcccaacctcagttgcagaccctgggggcccttgttgaagccttgcggtttcataaaaataatgtcttctgctcctaagtcctctgagaagctactgaaagctatgaattcactgctcagaagttccacctgacaaataccaggcaggggctacagataattttgtgaaattcaaggaaccccttctaggctggcccccaaacctcatcatgctcatgttaagccctgttttgtgtaaaatgtatgaaacgatc

SEQ ID NO: 264224 - DNA, 526 bp, Homo sapiens
cacgaggcctactgtaagttccacaaggcagtgaccagatgggtttcattcatcattatctccccagtgcctatcacagtgcctggcacacagtaggaactcaaatatatttgccaaattgagttgcaaattaatatacatatgctgtggtttactttctttcttttttttttttttttgtctcttttgagtttagtcatcaaaagttagcctctttgaggccaggggtatctgcaggacccagcttgtcacttcacaacagggtgggccaggctcggagcatgagaaacttaccaaagtgatgccgtccggtgggagcgccaggtggccaccagccagcctttccctggtgatgacccaaccttcagccacacacatcgccctcacacgtctgcagtaagcctgggaagtaacatggagaatgcagtgtctcctgcttctgaagcacggcatccctggaggccgatgcagtggccctgggttctggcgcataactagtaaaggagtaaagacagaagtgagggga

SEQ ID NO: 264225 - DNA, 399 bp, Homo sapiens
aatacatacaaaacaacctctagacctatacgatttgtaaatgtttttaaacaaaataccagcacatatttaaaagcattctgcaaaatactggtacatcatgaaaaagtagcttttactccaaaagttcaaggatacttcaaacttaaaaaaacttattaatgcgaaatttataagtagaaggatagaagccaaatgatcagcccaatgcatacagaaatttatttcataaaattccacatgcaattccgatttttttaaaaaatgggtaagttagaaatataaggaatcttcttctaaataatgggttgtttataaaacagctgtcaaaaagatatgtaatagaaaaattagagacaatttcatgtcagtcaggatccagtcagaaatgctcattat

SEQ ID NO: 264226 - DNA, 399 bp, Homo sapiens
tacaaaaaaaaagaaagtcaaggaagaaatcacctgtcgggtttagatatgtagagtcagaaggatgtaatcctagacaaagagaaaggcatggacattggcaagaaaaagcacggggagttcacaaaacgtgtagggctgatctccagccaggagcgcacatttgttgtttagtgtctggtgtctattctgattggttcaaaaagactttgctgaaatggcgtcttccctatggaggcaccccagtcccactaatgcttctccttcccaaaacacttacttaattcttctcatagcacttttatttttataacagatgttgtaatttactcattgattatcctatttactctctgtattttcccattggaataaaagtaagggaaggatctgcatctg

SEQ ID NO: 264227 - DNA, 564 bp, Homo sapiens
caagttcagtggctattcataggcatgatcatggtgcattgcagcctcaaactcctggccccaagtgatcttaccacctcagcctgccaagtagctgtgattataatgagaccatgggttggcgcccctgctcctggcttgtgtatttgttatactttttttttttctagattaaccaattggacttactgtttaaactttgagatactttccctgaaaaggtatatggaaatagaagaaaaacataatgagcatattatatgaatatgtagctagcatacctttaaaattttttatgccttcttgactttacagataccttgtatattaatttgtcttaatttgaaactcatagaacttgtggtttacagtttagtgaatactattagcttaaaggatcttatccaaatgctttatttagattgagatgatttggagaaataagcctttcagaccatcttgcgcttaacttttgtgggtctaggaacaagagtacaaatggagtgtcacataccgtacgtctaatttaaacgttataaatcaatcttaaaaaagaacttgcca

SEQ ID NO: 264228 - DNA, 414 bp, Homo sapiens
agtcaggattccaacccaaatcttgtctaacttcagaatctgcacgcttaaccactacactgcattgcctccagtgactctgggttgataactaagatgaaataagaaggaaatttgtacttctcagtggcaaattttaaaaacatattataaatggagggtattttttagaacatgaacaagtttcatatacatagtcatacaatttttatttccaaatacatgtagtaatggtgaaaatcccacacaatgaatttctcacaatttttcataagtactcaatcatggtgttttttttttttttagacagggtttcgttcttgctgcccaggctagagtgcaacggcagatctcggctcactgcaaccgccccctccctggttcaagcaattctgcctcaacctccagagtagc

SEQ ID NO: 264229 - DNA, 261 bp, Homo sapiens
tagaaatgtggcaccgaaggtaaagacatctgtgaggctctgaaccagcacgtggtggaatatgatgagctcaaggaaacatgatagtgggaggggctgcagtggttccgactttccacatcttaggtaatggtcccctggcacaaggtaagcagagcactgcacactggatccttagccagtgctgaagaccaaattgctggaaattccagatatcctcagagttgactggataatcccaccacaagaggctttttttct

SEQ ID NO: 264230 - DNA, 1237 bp, Homo sapiens
tgatagtgaataagtctcaggagatctgatgggtttatcaggagtttctgcttttgtttctctctcattgtctcttgccgctgccatataagaagtaccttttgcctcccactgtgattctgaggcctccccagccatgtgcaactgtaagtccaatgaaacctctttttctcctcagttttgggtatgtctttatcagcagcgtgaaaatggactaatacgatcaccctcttctttgttctcctttctatttcatcgctaattttttttggcatttggagggtgctatacattgcaaaagttggggactcactaattccactgctcactgtatatcaaggtaatctgtcaggggtttggttttatataagaaacaaatgagtccccagaacatacaagttaagattattcaatcaagggaggcagtcattaccctttaacctctgaaagaaaactgcaagtaggcatcaaactaaccctgagatgggagagagtagaagttcccacacccagtgaattgtaggacattaggtaattattggtgggaagtaaatttgagtggggaactgaatttcaactgacttttatccttgaagatggtgcttctattttctcaaattagaaggttatgaaaattgcatctgaacaacaagttgtattagcataagttctagaagaaactgagaaagcaaggctagtctgaggaaaatttataccgctcacatttcccttctgaattggagaatagaattgaatagcaaaattgtaacctacctttcaaagatgcattttatagtgaagtatattttgtgaacttttatatcttctattcttatttttctattgccctattttaaaatctatcttgaatttattaaatgtatatgtctctgtttatatatttatgagtaatatggtagtctttttggtatcagatgagaacccaacacacacaaatacatactgacacatacaaagatgtttatactgcctcttacatctgtcggaagagagagggttccaagaattcctgtgatgagggcttaaagccaaatatttttgttatcattttatacatatatattttattttttttctatttgggagaagctagaaaacacacattacttttttttgtatcttttctgttttagactaaaatctgctgctattcaaagaataaattgtatctttgtgtattctgatagacataataagtaagttgtgtaagttataa

SEQ ID NO: 264231 - DNA, 1523 bp, Homo sapiens
tcatgattacgtcttatggttctggcattgattaggcccagttaggcagttctcatttgagactggtcttgcggtggcagtcagatggtggctggggctgggaccttagctccagctatttgtggtaacacctactactcatggcctccctgtctctgtgtggcctgctttctcatggcatgattattgggttccaagaatgagcatcccaatggtcctaggaggaagccagcctctgaagtcacatactgctagttttggcttagccacaggcccacttcaagaaaagggaatgtagatgccatgtctggatggaggaagggtcatattataaaaagaaaatgttgaatgggagatctttttgtggccatattagaaatacaatctgacacaatagctgtatcagaatcgtttaaactatagcactgtaggatgactatagttaacaataatatatattttcaaatagctagaagagagaatattgaatgttcccaaaacaaaggaatgataaatgtgtgagatgatggatatgctaattaccactctctgatcactgtgcattgtatgtatcaaaacatcactacgtacctcatgaatatgtacaattattatgtattagttaaaaataaataaaaaataaattttagatcctatatagagactttcactggtttattgaagcaggaataacaaaaagagggaacttactggaatcagattgtttaaattatagaactgatggaatggcagaaaaccagcctcagaaaatgcaaaccaaaaagccagtagaaggtaaagacaatgttggactggctggaggatggacgaggagaaagatgtaatcttcagtgagacagaatctatctgacttcttacctgaaaacatggaggtggtgggaggatgtacatacactgaagagggcttgatatgtgttggtaaccttgtgctttattgaatttacactttgattttgctgcttcttttattgtaataaccactctatcatctcccactgttaaaatctattcatctttaaagagtcagcccaaatgccaatactctctaatgctttgtgggttttgtcagttaaaattgctttctttctccactattcatattacacttttcccttctcttttaaaacttattgcacaatggttagtatttaagtatgtgttaacctgccttatcaacccaaccaggtgtaagttccttgaaggcaagttccttggcttagttttatttccctagagtatctcaaagcaacaggtgctcagacatatttgttgaataaataccaagttagagattctacaaatagtttagtgataaattctgaatgaatatttccttttcgtttctttaaaatccaataaagatcattcttttcccttcacgtgtcattaataaaaagcttttatttgcttattaaaaaatagttccagattaatgattgatattacctcagaatattgaatgaaatgaaacaatgaaacaataaaatctctctaaataatta

SEQ ID NO: 264232 - DNA, 480 bp, Homo sapiens
aggctgagataggggaattgcttgagtccaggagttcaaggctgcagtgagttgtgatcacactacttcactccagcctgggccctatctcttaaaatatatatatgtagagagagagataaataatttatatgccatataattcacctactgagggttacagttcaatgatttttagtatattcatagggttatgcaatcattcccgcaataaattttagaatattttcatcattccaaaaagaaattcttaaggtgctcattttaatggtaaacaaaaaaggacacaaatttgttgtaccatattatcacaactgcacaacactggaagaaaatatgtcaaaatgttaagagtacttcggtgactggagctctaatttttccccctatttctactttttaaatatttttaaagatttctgtaagtagtgtgtatcagtttgctaatgagagaatataaatattaatttttaaaaattg

SEQ ID NO: 264233 - DNA, 499 bp, Homo sapiens
agccataaacagttggaaccaaaagataagccacaattattatagaatgttctaagagagccgctaaaacaaatgaatgaagctttgttttcttggtttcatacaagtacaagctttgtgctaacaccccataatttacagaatttaaaatcttacagtacacagtgaaggtaagtgttggcgtacttactgttagttaataagaatgccaccttttcttattctgataatgaagtctttcataaagcagaattttctgagcatatatctatgtaatatcagggggaggctacattcttattcagctctcaaactattaactctctttttaaaaattgtgatatgtggtcaagaaagcaatacttctttgaaatagtgatatcactccagggctctggcggtgcagcagctgcccaaagattgcctttgctattttaatctgaatcctagacattttgttccataccaagccaaagaaagagagaaagagtgaggaaaa

SEQ ID NO: 264234 - DNA, 250 bp, Homo sapiens
ggggggatcccttggtagcggggacttaggggcatatgcccaaactgtgggacaacaagcaatttgtcccaccctttcaggtctgctcagttcttattttgacctatatgtataatgggagctcttttctggatcatatagtatattggctataaaaacagacattgagaaagagaggaataagcagagaaaaaacagaagagaaatactgatgaaacaagaatagaggaaaggaccaggggatgagttg

SEQ ID NO: 264235 - DNA, 433 bp, Homo sapiens
tctaaaccttaaaaagttgtgcacaagttgaaatttaataagtgaaattgtacagttatatcctgaacctgatgaggattgtcactgcagcactgagcatgttggtgtgggtggtggctggctgtggacctgggagtgtgcagtgatggagtgagggggtgaacaaggatgacgtacttccaaggggtacccgggtcagtgcagtgaatcaggtgtgctcattgcattgaggaagggttggttttaaaaatggaaggcttagggaagaaaatagtgatttataatataatgccattcgggtcaattaaaaatacacagacacaaagcaacatgcattctgcagaatatattctaaaagacactataaaaaagtttctaaaagacactatagaaagaagctataagaaaatatgtctaaaagacactaaatgca

SEQ ID NO: 264236 - DNA, 645 bp, Homo sapiens
aggaatgttatcattcacagggcttccaagtgactgtggaaaatcttgggaggctttgctttggactttgttatccatttagggactggctgttctgaattgttctctgtgctaggccttatctaaaccgcttgccttaaatctttgaccttcatttaaattgctgacactttccccatgtgaaactgtatcataatttcttctgtcttctttaggctagcagcatttccctttcttattcccagaagagctcagagaagcttatttttttagatgagtgatgcataaaaaggaatgtggctgcacaattctaattatttcataaagttctgaggtatttttagggtgttgcaaagtgctaataaaaaataatcatattcatggacatacagagtggaataatagacactggagactccacaaagtgggagggcagtgagggatgagaaattacctgttgggtacatcgtatactactcaggtgacagtcacactaaaagcccagactccaccactgtgcaatatatacatgtaacaaaaatgtaccctttaaatctataaaaaataaatcctttctagcccagtttgctaagggtttttttttttcatgaagaacatttataataaactctttgttctgcataa

SEQ ID NO: 264237 - DNA, 252 bp, Homo sapiens
taatcttatgataatcctgcacatggcagataatttcttaaagtgaatattttttaaatcataaggggaaagatttttaaactaaattaatactcaaggtcatgtgaattgatggataaaattcttcttgaatttgtgtgggaaacttaaatgcacataggctgacaatggacaaaagcagaatatgcctttgagcatgacatagtagaaaatggacaggtttgggagccagagctgcattcaaacttaggc

SEQ ID NO: 264238 - DNA, 1589 bp, Homo sapiens
  misc_feature (935)..(935): n is a, c, g, or t
  misc_feature (1099)..(1099): n is a, c, g, or t
  misc_feature (1170)..(1170): n is a, c, g, or t
tggtagagatggggtctttctgtgttgcctaggctgatcgcaagctcctgggctcaagtgatcctcccatcttggctcccagactgctaggattacaggcacgagacactgtgcccaggcccaaattctgtacttctcccagctattgtgaagcctccgacatggtctgttctgattctgtcacctttctcttccttctcaagccccagtaggggccttgcctctccagcgtaccctgcttttggagatcttgcctccatgtttccattattgatggagggaccgtggcaggactttgctttccaatgtcactattatgtcagcaggctagccctgaaccccacacagtaagaccccttatgtgagggttttacacctacttgatcttattcctctttccaggtgagcaccacacactgacctagctaggctcagggtaaggtagctcttgctcattttggccaggtatttaattacgtgacattcacagtgtgcctttctacttatctttttatccttttcagttcaagaaacgtggctataccaacttgccacagtgcccatcccactttgtagaagactttgatatctgactcacagagaaactcctgccaggagtttatattgtgtgcagctgattcaggcagtaacttccactcagcgagggggtccatttacaaaaaattacttctcttccttttatgcccagtatggttcttaaaatcaaccagacctatctttcaccagcacgacttggttcttttaaaccacagtatttctgcttcttctagttggaaaactttaatatgagattgaagatatgatttgctttctggattgttgtatgctactaaaaccgaagaaagagaaggaaaaatggatgaatcgacggaccatatcaccctggcacctatatcagctcaaaaactgaaggnaatacccctttcctgccctctctttgactaatgctatagactctgagtcagtagttcctggtgggacctgagagtccacattcctgatgagctccaggtgttcccatgctgctgcccctctgaccacacttagaataagaaggcttgaaatgaaatctgagaantcagcctcttgattccaattttaaacatgcaattgattcttgtaatttttcattcttgtcaaaatgcatancagtaagtttgtaatcagtattggcatgcttaaaagaatttaagacttgctatatttgtcattttaatttatttaaactttaaagatttgttcagaacttggaaagattttgcttaagctcataaatttacccactcaggcatatgagatagggtactttgatttataaatgaagtttaaaattaagggaatttaattaagttttcaaaatgagattggttgttttaaggggaatttactttgtgtaacttgagttcatcaaacgctaatccaagttccctgcaaaacctgttctgttttatataacatttactcgttttagaaatagatgagatttgcaaattgaacctaaagacttaaggcaaattatgtatctttttatactttagtaaagaaaaataaaataaatttgaaacaca

SEQ ID NO: 264239 - DNA, 703 bp, Homo sapiens
cacacaaaaaatctatatgcaaatattaatagtagctctattcataatcaccaaatcaacccaaatagccttcaacaggtgaatggataaacaagctctggtatagtcatacaacagactactactcaagaataagaactgctgcatacaacagtgtggatgaatctcaaaggcactgtgttgagtgacagaagccagtctcaaaaggttacatactaaaagattctatgtatatgatattctggaaaaggcaaagttatagggatagagagtagatcagcgattgtgaggaggtaggggttaaagaaggattttactacaaaggtgcaatgcaaggaagttttgggggtgatgaactgtcctgtatcccgattgtggtggcagttacatgaatctatatttgtgttaagatctatagatctgtactccctcaaaaagtaaaaaaaaaaaaaaaaaaaaaaaaaaaggatctcagtaaatttgaaaaattaaagatcaaaaaaggcaaagttatagggatagagagtagatcagcgattgtgaggaggtaggggttaaagaaggattttactacaaaggtgcaatgcaaggaagttttgggggtgatgaactgtcctgtatcccgattgtggtggcagttacatgaatctatatttgtgttaagatctatagatctgtactccctcaaaaagtaaaaaaaaaa

SEQ ID NO: 264240 - DNA, 793 bp, Homo sapiens
agagggagagggggctcattcagcagtgtttggggaggggctgtagtgccctgagcccactacaggcggcccatccctggctggctgctagaacccaggacaacacctcacccccaacccccagcagctcagcaggtgtggaaaagaacaactgctaattgttgcgaagtacttgacaccagggccctgtggcttcaacaccgcacttcccgagcccgcgaggagcgcggtacacactgtctcaagacacgcagcgtcagccctctcccaccctgcgctgcatcctgaatcctaaggtgtcagcacgttgttcatccggacgggctcacaccttcctgagactgtcgcctgctctgccgagtggagtcctggtgtcccagcacagacatctgagcctgctgcttagacacgctgaggatgggagatctggtttccacactcatccctcctccttaggaggcctccccagcgttctggaaacagcctttcgccaggacaaggacaattggtaagaaggtcttaccagagtagcagaaataattaataacagaagcttgggtgaagcacattttttatggctgtttccatctccatgtaatggaataattgacaataagagacacaccccattacaccagaaatgtacttggagaaattaaaacatttcactaaaatacaaaatagacataataataatttatagcttggaactgcagtcctagagaaaaaaaatccccccccccttttttcagaaccgataaagcaaattaaatgcaaattaaacagttactag

SEQ ID NO: 264241 - DNA, 1386 bp, Homo sapiens
gcggggcagagggtccccctttgcccctccacactgcctcgcgcctttcacgcagagttctagaaggaggttctcaggggttcaggaatccgtgcatgtggccagggcggggccgtggacagggaggtgacaagtcttggagcccacagtctccttcactgcacgtgtgtcttcctcccccacagcctgccgccatccagttcccaccccgcggagagcagggcctcgcggccacaccaggcccaggctctgcccgggacgccccctcccaggggtcaggcttggctctgggagaccccagcttcccaggctccggtggggagtggggccaggcgagggtgccctgacgagggtgggcgcggagggagcagccgctgccacagtcggagcagaggaggtcttggcagaggtccgcggggaggagacggctctcctggcctgttttcctccaacactgtcgccgctggctttttgggtacaggcccgtctggccatttctgctgtggcgccggagggtcttgctcagagatgcccagagagcagccctatggcccatccgtcctcgctgggggctgccaccccgtcgcccttttgtccagcgtctgcagctgggagcgacacgcagtgattgacggccgtggctttgacgccacgtgtgtaaataggctgtggctacggtgggtgggtcggagcccaggaggcagctggggggacctggctatggcctttcctgctgttaggtggctgcaaggcttccattgtgtggttatgtgggtccttgaatgattttggggaggtttccagctcagaatgatgcagaaatgataagactcaaagcaggggccaggccaggccagtgccttcgcctctcccggctgctggtgggcacggaggaaccagggcacatctgtggtacccagggacgtcccttgtcagcccgtttgccacacattgttcctcttgtccaggggagggtggaggagctgcttcccaggactggaggagcagctgggcccctgctgcacgtccggtgggacacacctgtgagccctccagagggagagtgcaggccccttctgagcctggtgttgcagggctccgctctctcccggaagccagggcacccagggcggaggctcctcaggccggggaggcggggagggtgccctgcatggagagagacgccggcgctccccgccttctctgatgctcacccctcccaggccccgttctccctggggtcccccgtttagtagcccccctgcactctttgatatcttagtgtctgaggttgactgtgggtaaatctttaagacactccccagctgtgtttgtttataaatgctgtttatagtgcaataaaggtgtttcgggaataaaaaggtg

SEQ ID NO: 264242 - DNA, 178 bp, Homo sapiens
ggaaagtccctttgaagaggaacctctacttcattttctacagagtgggacagaggtgctggtggaagacagtgatattgatgatcctgaccctgtgtaggcctggctaatgtgtgtgtttgtgtcttgtttttaacaaaaaagtttaaaaagacaataaaaattttaaaccagaaaa

SEQ ID NO: 264243 - DNA, 114 bp, Homo sapiens
ctgtgactgtttcttggtcttatctattgttcccttcccactgcagctgcacccaatcaggtaggtcctcactggctcttccttgatctcacttgaaaccttctaacatatccc

SEQ ID NO: 264244 - DNA, 408 bp, Homo sapiens
ccatcaagcatgcgacaaataatgaagtccacactccaaactcaggagtagactgggacagtcagtgaggtaacagagtttgggaatcgaaatctcaacaagaaaatccaggtggataggtatagggaaattctagtttgaatgctctaaaaattacaaaatactcctatatttggatatctagaggtggcggttttggctttgttttagcaaaaataaagtacctaacttttcctgtgcacacaattatccaagcaattatcacaaatccttgctttccagaagaatgggctgaaggctgacgtttgtgtttattttccagaaagttgcacatttctagcctcaaccttgaaagaaatggacccaataagcccaagcaagcctgacatggcagcaagcactgagaaa

SEQ ID NO: 264245 - DNA, 447 bp, Homo sapiens
aaaaaatgttttaaaagcatttaaaagcagaagttatacatatactaacaatttaagatattatttcaaaaacactttaaaacatacactagactttgcacatcttggtcactagccccatgtgccctgggtgcctcgactttgcacctggttaaaggcttccttggttgggaacaggccacccttccctggcagcattccatttgtccactgacatcctcaggctgaatccattgttcttttcctcctgatcctctgtttatatacttagaatgttaattacaacattgtttcctgtgtagtacatacatattattctttccagccagttgtaagtttcctgagggttaggaacagatcttacttgccctcagactttgtacagggccttggtataaagctggtgtcgcatatttgttgcatctgcaacaggttttattattttct

SEQ ID NO: 264246 - DNA, 408 bp, Homo sapiens
aaagacaaaacaaaaaatcagagtggcttagactagggttcagacatgaagacagagagattttgtattaagaatatatttctaatataattcataggacttggtgattaactaatgtgaaagcaaaaaatgtcagataaagactgaaaaactcataacatttgaagttttggttaatgaacgcaaataaaaaggaggcgtctgggaagaagtgccagagatacagaaataaatttttaatgggtaatcacgaagaagacaggtataaattatgtgtaactcaaatctttctgtttactttttccttctgataggatgaccccagctaacttacagaatttggttttattttctgtcctgtgtttatagagatcggactttcttcaccgcttcttcctcccaccaggg

SEQ ID NO: 264247 - DNA, 563 bp, Homo sapiens
caacccctttaccccttgccagttgatgatgatttgatgcattggtatgtttccaggccactctcagggatctgaaattcttggctagacagggaagagcatttgagcctgcccgtgcacttgcactgccaggactagcaagcagtgccaaggtttgcctgatcacttgtccccatccttgatggggacaagaaaactaaaggaatttttcttttgatggcaaaagaaaactaaaggaagactgatacattccatatcagatacccatgttgcactctaaattactctcctcagatactttaaacccttcacagctggagttttccattatctaagcacttgtaatatttggaaagaaaaaccataaccaatctcaaaacaaccatgattcactcccccacaaaaaatgaaaaattaatcttaattttaaaatattttgttcttatacattacagtacacttggaatttcattcaactttctgttttacacggtattactgggtgaacaaaaggctttctggctctgagggtatcttcaaagacgggacttttaccttatacc

SEQ ID NO: 264248 - DNA, 603 bp, Homo sapiens
gtcggaggggagatgactgccaccagcaatcgtggtaactgggaggatcttgaggtgccctcattaaatagcacccagtgttaaagaggaggccaagaagcttctcatcgtcttgagggaaggccactgcaggagctggagaatgcaacagaagcttgtaaggactaagcccagatctgagaaggagtcatacagctgctctgccctgccttcggggagtggagaggagactgaagtccagaaaggtagatgcatttgtccaacttcacacagagcactatggtgaacaagggctgagacgcagaacaccgcaggcgacttcttgccaagctgcctgctagttcacctccccagagggtgtgtacaccaacgtgcacgcagaagtacaccagaagtacacggttgcctctggcgctctgctctttacactgctgagaatgtatgtttgctccattgttgaaaattcctttctcttcatgttcatctcagatgtctggagcggtctcagtccgttcgtaaagacaggaacatctgctctttgtcaaactgccctgatgcttgcccgccccaaagaggaatcatatcacgctcatcttttccgtg

SEQ ID NO: 264249 - DNA, 323 bp, Homo sapiens
ttttttggaagccaaaatgatttacattgaaaattaaattactgaataaaatacatggtatgaagctaaaatggtttataataggtgaatagtagtgatagaatttccttctcagaaacgagaaatatatatgctaaaaccatttctgaatgaacttccaaaactattaacatcattcatttaaatactttgatatcaagatgacaccaacttaaatactggttctgacagtttattccatttatataagatatcacaaggagaaatttagaaacattctgatgaacccaaatgagaaacctcaatatagcttttcaactaat

SEQ ID NO: 264250 - DNA, 528 bp, Homo sapiens
atttttggtgtttaatgacaatgtggtgtgtgtacacaactgaatattattcagctatgaaaacgaaggaaatcctgtcatgtgtgacaacgtggatgaacccaaagtcattatgttaagtgaaacgacccaggcacagaaagacagatactgcatgtcactcatatgtggatctaaaactgtcacaactcacagaaacagaataggacagtggttgccaggggctgggggaatgcagactgtggcgatgctgattaaaggtgtaacttcccgtcacaaggtgaagttctgaaggtctgataaacagcatggtggctagagttaatattatacagcatggtggctacagttaaaatcatacagtacggtggctatcagttaatataacttgaaatttgcgaagagagtagaccttaggtgtctgtatctccaaaaaaaaggataattgtatgaggtgatagatgtgtattaagttgattgtgtcatcagttcacaaaataaatcatcacgctgtacaccttaaaaaaa

SEQ ID NO: 264251 - DNA, 556 bp, Homo sapiens
atttttggtgtttaatgacaatgtggtgtgtgtacacaactgaatattattcagctatgaaaacgaaggaaatcctgtcatgtgtgacaacgtggatgaacccaaagtcattatgttaagtgaaacgacccaggcacagaaagacagatactgcatgtcactcatatgtggatctaaaactgtcacaactcacagaaacagaataggacagtggttgccaggggctgggggaatgcagactgtggcgatgctgattaaaggtgtaacttcccgtcacaaggtgaagttctgaaggtctgataaacagcatggtggctagagttaatgttatagagcatggtggccagagttaacattatacagcatggtggctacagttaaaatcatacagtacggtggctatcagttaatataacttgaaatttgcgaagagagtagaccttaggtgtctgtatctccaaaaaaaaggataattgtatgaggtgatagatgtgtattaagttgattgtgtcatcagttcacaaaataaatcatcacgctgtacaccttaaaaaaa

SEQ ID NO: 264252 - DNA, 635 bp, Homo sapiens
cagtggtgagtacagtcagcggccctgggccagggaatactgtgctggctctggcagggcctggttgtatgtttatgaaaccaggagcacagcctagggaaacttaaagcaagctgccagaggaggctgcaaattgatctgttaaatcgcagatcaccaaacagaacctgtcccacctctatgcttacttctggcgaggttctgattggaaggaagtgctgtcacccaaggaaccccgtaactccgaggggcaggcacatgagcttctaagggtgtgtgtaaatttatacttcagtcacagctaaagtctggccttctaggaaaactatcccccacccctttcccaaacttcccacgaagccctccaaccacaaaaaaacaactttagaaacttgagtggggcttttctggaatcaggttccctcagttacagtgaaggcagatatctagatactttatcccacactttcccttaagtcatgaggtgcctgtttcagttgcctcttcgctctagttgctgcctccacccccaccccccatgaaactgggggagaggaaggtccttcatgtcctactgcatgccttctatatgctaggcactattctagcactggggatacagctatgagcaaaac

SEQ ID NO: 264253 - DNA, 627 bp, Homo sapiens
atgggaattgtaggctcatccatttctgaaagtaatgtgtgtgtcaaaagtaaaaaaaaaagtcttatctcctataaattatacatctcatttgatttactgtttaatgctgattttaaaagctaagattttaaataacttaaaaagaccaatgaggctgggcgtggtggctcacgcctgtaatcccagcactttgggaggcagaggcgggcggatcacaaggtcagatcaagaccatcctggctaacacagtgaaaccccatctctactaaaaatacaaaaaaaaaaaaaaaaaaaaattcagccgggcatggtggtgggcacctgtagtcccagctactcgggaggctgaggcaggagaattgcatgaacccgagaggcggagtcgctgcaacctgcacctcctgggttcaagggatcctcctgcctcggcctcctgagtagtggggactacaggtgtacaccaccacacctggctaatttttgtacttttagtagagatgggatttcaccatgttgtccaggctgctctcgaccgtgcccggacaaaaaaaactatttttctactctggttgactagcagaggaagccataaggtagctgtataccaaaaaaaatggtcctgca

SEQ ID NO: 264254 - DNA, 1017 bp, Homo sapiens
tactactaaattcgcggccgctcgacctcagacacccaaggagagagactgcgaggaaagaaacagagtcatgatagttgtacctctatttccctaagtactatctaagtatatttcttcctatggacacccacttccagattctacttctgcagggttccacagaagtctccaatcttcaaatcttcagtgtatgaaagcacagattcctgaaagaatggcctcaaatgaccagaagtaggagctctctatatccctgctcctgaaaaacaagctaactggagtctccatcacctgccaccagctatacacactaccaactacccaactgaactccatgactgatttgccagctaatcatgcccctgacccagcccacatggacatgggaaggacatcagtgaactgtgaaaagaggcagaggtgaggagacacctgtcctgtgccacacatctatgtagttcagcaatttccagccccttagtactccaggggctctaagccacccctttgtaagtcaggatggaagtagatgacaccacatttctatctgctgtagacattcttcccagtgtctcaaaatgttttggcatctttcagtaaaaatcttcaagtttgtcagtccttgatttaaaaaaaaaaagcagcaaaatttttagagctcccttgaaccttctattttaatgtgcctttgtagataattcccaacatcttgtgtccttcatttttataatttatctttatcaaacttgtcataaaccccaatactttgatctcttgtagaagagtccgtactcctatccagtccagtgttgtttatcttcaaacttggacttcccctgctcattccattcttatctacttccattgggttcaccagctaattccattctcattctatccacaggctcactcccgtttgtattattaaaacacacgccaataggacataaaaagaagcaagagtactgggctttaccatgagttcaaatctcatttctgccaattcctatgtct

SEQ ID NO: 264255 - DNA, 541 bp, Homo sapiens
tcctaagtaatttgcatttttatcattagcaaaataatagaatcacattttttacattggaacatagataaaacaacaagtcttccacagttctgctgctctaacacagccaagtattttcatgcatttctaagaggaaacagctgatgttttaggaggaggggttgtgttgggcacagagagtccagtgctggatatggtgcccagtgaagaaatggtgccatctttcctctagtaaggataaggacaggtctacccaggcccattactccacattcactctggtacacacatgctgcttaactaatcacccaggaattcagattccaaaagacacatgttcttgctcaggtgcacacagaagagcacaccacacatacacacctgtgctcctgtctgtctttggtccctttcagagttgagagatcaggagaaaagatagccaggttcagaagtgtgtgctgtcactgtagggatggacgccaggtagtctaaggaggagacctttttcctaagcagggaaaaaacaaaacaaaacaaa

SEQ ID NO: 264256 - DNA, 216 bp, Homo sapiens
aacaaacaaaacccaaacatagacagtcatttccgttttcctgctgagattctttacaaagagagaattatttttatatttagtaagaataagaatccaagaatccctggggagtttttaaaatgcagattcctcggtcctcctacctctgcggtattcaccagctcccctcccagcctcagaagggtggttcttatgggctgggcacagtggctt

SEQ ID NO: 264257 - DNA, 401 bp, Homo sapiens
tgagacaaagtagattagtgattgtcagggtctaggaggaggagaataggaagtgactactgagagtgggttttctttttgggggatgaaaatgttccaggctgggcgtggtgggtcacgcctgtaatcccagcactttgggaggccgaggtgggcggatcacaaggtcaagagatccagaccatcctggccaacgtggtgaaaccccgtccctactaaaaatacaaaaaaaattagctgggcacggtggcgtgcacctgtagtcccagctactcaggaagctgaggcaggagaatcacttgaacccgagaggcggaggttgcagtgagctgagatcacgctactgcactccagcctgggtgacagagtgagagcgagactccatctccaaaaaaaaaaaa

SEQ ID NO: 264258 - DNA, 299 bp, Homo sapiens
agtaaaacaaaaaaacctttcaacaagcaacatcacttaagtagttttgagggtagagcaaaaaaaaaaaaaatatatatatatatgtatgccaaatatgtccccattttaaataaattttttttcatttcaataatgaatcaaagatcatttgtaattgcctaatttgataattttcagggtggttccatagcagaaatgccccaaaacagtgaatcaggagcatcaggctggctgaagaccaagggcagcgggtagagccagggcccggggacatgctcctctgagtggctctgtgt

SEQ ID NO: 264259 - DNA, 277 bp, Homo sapiens
caaaatgacagagaccaatgtgctcagtcttggtagaactatgacatgagagatcaccagataacagctgtcagacagaaccagcttcttttcaatggtataattgtccatctcatccatcgtgaaaacttaagcataagttaagcataagtcttacatacattatgtccaccttttattactgttgttaactacaaaacagagctaaagagaacagaacagaaagtcccacaatttcctggctgacaaaaataaaattaatacatgtgtgcttaaa

SEQ ID NO: 264260 - DNA, 336 bp, Homo sapiens
ccccgcaaaactgcagcacaaaagaatttcagatccacccactcagaagtctgaagccagtgtggctcgccctcactgatctcagggtctgcatttgcaatgtaccaagacagacctgatcataaaaccaataacaaagaatgtcagaagtcttttacatggattaagaaaaaaatgcgagcaagaaggcctaagaaaggagaggtttcaatagatggtacactcggttgttcccttagaccacctttgttagtcttcgcctcaaagaaaaacatttccactgaaaaccacataatctggtttaacagattaaatatataaactatgatgtgctgg

SEQ ID NO: 264261 - DNA, 255 bp, Homo sapiens
ggtagaatatactataatatggatcatctctacttctgtatttatttatttattactagacctcaaccacatgtcttctttttccccttccacctctctttgcctgtaagatgtactgtatgtagtcatgcactttgtattaatatattagaaatctacagatctgttttgtactttttatactgttggatacttataatcaaaacttttactagggtattgaataaatctagtcttattagaaaataaaaaata

SEQ ID NO: 264262 - DNA, 342 bp, Homo sapiens
agatgctggagaactccttgtgcagccccacctgggaaggatcccagttctgggtaacggtgcagaggactgaggcggtcgagcactgtggcctgcatgcctcctacgtgctgagggtggaggctgaaaggctgactctcctgaccatgggagcccagagtcaggtaccggagctgctcctgtcctggccctacactctgttgcattgctatggccgggacaaggtcatgttctcttttgaggccagcgccgctgcctcttgggccctggaaccttcctttccagacggcacagggaaatgacatcttccaggcagatgagactgccatccaccggcagaag

SEQ ID NO: 264263 - DNA, 332 bp, Homo sapiens
gcaaagtccctgttcagtccttgggaagcatcaccactgctacatttctgatgttctgaagatgggttagaacagagcggccgggcgcggtggctcacgcctgtaatcccagcactttgggaggccgagacgggcagatcacgaggtcaggagatcgagaccatcctggctaacacggtgaaaccccgtctctactaaaaatacaaaaattagccgggcatggtggcgcgcgcctgtagtcccagctacacgggaggctgaggcaggagaatggcgtgaacccgggaggtggagcttgcagtgagtcgagatcgcgccactgcactccagcc

SEQ ID NO: 264264 - DNA, 399 bp, Homo sapiens
ccatgccacccctgagggcacggtgatggagaagatatgcttcctgcctccaagaaccccatagtctagtggcagagacaagcaggtacatagctgcctatagtacagcatcacaggtgccataacattgtgtaaactgggaataattctattctctggatatagaacatctaaccaagatattgagtatctggcttccccttccccacactggccctcactgggatccatgtctaatattatgaaagtcacacaatatcattataaactaatcataaatggcactgtcagtttgctacaaaaacttattcagaaaatattcagattctcccatcaacatatgccgctatgttggcaaaagctctgatttaaaatacttatttcgttttcctctccgat

SEQ ID NO: 264265 - DNA, 469 bp, Homo sapiens
gccacagtgctctccatcctcccagctggcagagatctctcctgctccccctgtggctcttcttgtatggaccgcggctggcaaattagcctctttccacccctcctagcatttttataatccaccctcccctgcagcacctagcccagtgtcctcaggtagggggaggtggggaaataatagatatccctgcagttgcatttagtgtgtgtgtgatgtgtgtgtcactttctgtaaaatgggttcttgcaggctcacctcactgacaggtccccacaatcctggcagctccaggactgtcagtcagctgctggcctttccagatgctcgtaggggtcttccatgcttcatggagaaatggctgtgagcactactcagtcatggcaattaaagaaacaggcactaaatttaaagggaacactgaaaggtagcctagaaaatgataccttagtggagcatgtttttctga

SEQ ID NO: 264266 - DNA, 441 bp, Homo sapiens
agatgatcatatggtttttgtcttttatcttattgatatgatgtattacattagttgatttttggatgttaaaccaaccttgtattaggaataaatcctacttggttgtggtgtataatattgaggagagaagccatttctctgactgtctcctgtctctgaagaggaggaggaagtaaaagttgaaaaacaacaggaatgaagtcagtggcaagaccagccggtgccactgatgacctgacctgaggttaaaagattaactcccccactctaaccacatgtgctctcaatcaatcacgaccctttcacgtggaactccttagagttgtaagcccttaaaagggccaggaactctgtcttcagggagctcggctcttaaacgacgcgagtctgccaacgctcctggccgaataaaaaacctcttccttctttaatccggtg

SEQ ID NO: 264267 - DNA, 306 bp, Homo sapiens
atgtcagacgcagccgtagacaccagctccgaaatcaccaccgaggacttaaaggagaagaaggaagttgtggaagaggcggaaaatggaagagacgcccctgctgacgaggaaaatggggagcaagaggctgacaatgaagtagatgaagaacaggaagaaggtggggaggaagaaggtgatggtgaggaagaggatggagatgaagatgagggagctgagtcagctacggacaagcgggcagctgaagatgatgaggataacgatgtcgataccaagaagcagaagaccgacgaggatgactag

SEQ ID NO: 264268 - DNA, 298 bp, Homo sapiens
tatagaaataacttttcaaaaagttaatcagttggttagtcagcacaatacattaactatttcccccactgatttgaggaacttattatcatatactgaatatatgagccaccgcacccggcccatttggtgattttcttgctactctttattttaatgagtaccttacagcagtgcttgaagtattttcaaagtattccacttaaatgtcataaagtaaatgaagataaacttttcattaaaatactttagaaatttttgcatttatgttgcaataaaagaaaacttgccatacacc

SEQ ID NO: 264269 - DNA, 159 bp, Homo sapiens
cactccgttatttctttgatctcctagggcattctgatggtcatagtaattttgaaggccaggctcttccttcctctgaattgggtcggtgaaccttcttgctgtccccatgaagggtccctgttatgttccatgacagcccagatctggaactcagtc

SEQ ID NO: 264270 - DNA, 416 bp, Homo sapiens
agatttacttttcttttctaccttcctcagaggctgcatgacataccaattcttatggaaggactcagtgctcaccatcctcgaaaacctgattcaaaacctatcttgccattcttgcgtgctcctaaaagaagagaaaaaggcctccagttagaggccatcaacaaaaatgctgaatgggtcatcgtatttcctaaaagtcaagaacaaagaagacccagacaaggcttctgagaactatggagacgtatccagatgccacactgaaaatacaattccaccacccatccattatttgctcaggcatataacaagacatctcttttcactggtttctcttctgccacctgttaaattagaaaaacaactagtcttataaatgaataaaggtgcttattatagatacataccacttc

SEQ ID NO: 264271 - DNA, 384 bp, Homo sapiens
tccctgaggctcagcttcagttagaggccaaggttaagagatgcccctcagcagcagtcagtagtcaggaccagattaaaaagtgcacggcagatgaaaatacccacacttcatgctgaaacatttccagggatctacatagctctcaggatgaaaactagagcccttgcctatggcccacaagggctgtgggatggcacctgtctccttagcctcacaggctcaccctgccccatccccaacccctattcagggccttgcaactgaacttgcctctgccacgtgtgctttctttccactctcctgtcatctcctttcatccattctaattttaatattccaggctccagagccacacttcttgacattctatcctggctctgt

SEQ ID NO: 264272 - DNA, 627 bp, Homo sapiens
gaccaacctggccaacatggcaaaaccccgtctttgctaaaaatacaaaaattagctggccgtggtggtgcacgcctatagtcccagatactcaggagactaaggcaagagagtcacttgaacccgggagacagaggttgcagtgagcggagattgcaccactgcactccagcctgggtgacacagcgagacaccgcttcaaaaaaagaaatgttttggtgggaaaaaaaagtcacagaagacacaaatgctgaggagactgtgccaggaatacatgttagaggtctttggcagacaggcaaccggctgtagctattcttttcttttctttttttttttttttttttttttttttttgagacagaatctggctctgtcgcccaggctgcagggcagtagcgcgatctcggttcactgcaacctctgccacctgagtagccaggattataggtacctgccactacacccagctaatttttttttttttttaagtagagacggggttttgccatgttagccaggctagtctcgaactcctgacctcaggtgatccacccgcctcggcctcccacagtgctgggattacaggcgtgagcaccgtgccttgcctattcttacagagatcac

SEQ ID NO: 264273 - DNA, 981 bp, Homo sapiens
gaacaggaaagtaatacctggtggagcatttaaatgccatggcagagttaagtatcttccttttttctcttcttcatatggtgatttttttttcacaaagaaggatatcattggaatcaactgaagatgctagattaagaaagattaagtacactgccatgtaactcagatatttttgtatagtaccgacataacagaatggtatcaatgcagttgaatttcagtagcataccagctgcttccggaaggaggggaatttattctttctctctttgctatggactactatgcactttagcatcttcaggacaaataagggacaactagcagagaatgactatgcccggaagtagaacaggaaagtaatacctggtggagcatttaaatgccatggcagagttaagtatcttccttttttctcttcttcatatggtgatttttttttcacagagaaggatatcattggaatcaactgaagatgctagattaagaaagattaagtacactgccatctaactcagatatttttgtatagtaccgacataacagaatggtatcaatgcagttgaatttcagtagcataccagctgcttccatagccttaggaaaaataattaaataagcagtgttttctaccagttcttcctactttggtctcttgtattacctttttatcaccatcttttacctttagattgccctaagcacttcatcaggtttgtcccacaccaggtatctcttactctcaaatcatgttttcctctcttgccagtagaaagattctttaccactagaagtttccaagttatcatttatttcctttctaaaaatggaagtaaaaagggggagcagaggaaaacctagcttgagttagagtattaaaccatgtgaaatcatacttgtttgtttatgatattaactcctcatacctgcttctttcattttttcattaaagtgactctgactctagtacccagtaaa

SEQ ID NO: 264274 - DNA, 540 bp, Homo sapiens
taaagtaactgttcatttgagttatttacagctaaaaccacattatgtttttctggagcataatgtttgtgttttctagttatcgtaccaaagtaaacagtaatatctttagcttaagaacccaactgaaatgtttgtaaaatatagattgttttgtaatttggctctttttttttaatggtcctatgaatgcaactatagtgtttgcagtatttgtacagtgcatggggtgctttttctgggtgctgagaagggaggagaaatgatagggaagaggggatttggagtagccgaaggaaaaaatgtgcaatcagtgttgttgattccaccgaattctaagaattccattacatcttgatatctggtacaagctcaaagttaatcttaaattttggcttagggcatggccgtacttgctggctacttgggaggctaaagcaggaggatccttagagcctggaaggtcaaggctgctgtgagccatgaccgtgccactgcactccagcctgagtgacagagtgagaccctgtctttaaaaag

SEQ ID NO: 264275 - DNA, 538 bp, Homo sapiens
ggagtgattgataaaatcttcatattaagtaaaaatgcatattttgtatctaagtaagtttagtttaaaaacaataccaaagtatgccctaatgggagcaattactatcctaatgcactaaaatgtagactagatataaagatatagatgctacttagaaatcatttaatccaacctcctaatttttcagatgaagagaccaaggcccacagaggtgcctttgatttgcccaggtcctattagttagtggctcaggtggaccagaatgcaaatctctttatgctccacctgtttcattttccaaaatacctattcctcactgtaccactctgatggccaggaggaagtacattccacaatggtgaacagtttgcacttaaaagagagctctattgaaggtatgcactcaatacattgttgatttggatttaatttttagataggagagccaagcctaacagtagtaaataaatacctcaatagtaccagaaaaacacttttcttccattagattgagttctaaaggaccatataaacc

SEQ ID NO: 264276 - DNA, 794 bp, Homo sapiens
cgctcctggttcagccgcctctgcctgcgagacggttcaattcctgcgtgcggacgtttgttttgttggaccttgacctgactaggaaatttccctctctcattgcagtttcgggcatcctcgtccggagcacgctgggcgtggcatggctaaggctcagccttcgaactttgtatcaaaggcgtgtgaggagccagagtcccaggccggaagtcataagtgcgaaggggcgtttctctgcacggtgtgcttagtttttgttaatactgcaccataagcggaaaatagactcgggaactgattgaggttactttgaacgcaccaagatttttttccggtctctggtttgtgtcttaatttccatactgttaatgttttagggaaacgtaataatggtgcattattgtcctcgttttgtttgaaaatcagatcttcacataattttgggttgggtagttggggttcagaggaaattggcaagagggctggggtttttcggggacgtcagcgttgccattccaagcatgctgcccagaactgctgtagatgggaagagaaagctgctctaatgtgtccgcagccctctcaagtgctaccatataattcgcgtcttgtttggcctcaagacagttggcctcacaatagatataagatgtggtttagtagacacctcgtccagtggataggaggatgctctcatggactggacacatcaagtttttagcctgtttaattaaacctagaaaaattgttacattttagaaagtttttattgatgataaaatgttctctga

SEQ ID NO: 264277 - DNA, 554 bp, Homo sapiens
atgcaagtcattggatgggcatatgcatatgttttcatttatcttgggtagatttcaaagagtggaattgctggatcatatggtaacatgaactgtttaagaagctgccaacttttttccaaagtttgtgtattaatttacattttcatcaacaatatttgaaggttccagtttttcatattttcgccaatatttgtattatcagtctctttgattatagttgttctagcggtatatagtagtgtggtttttcttttatggatagtgtttttggtgttatatgtaaaaattctttgcctaactcaaaggtcacagatatttttttctgttttctgttagaagttttatagtttttaagctttatgtttaggtccattttgagttaatttttttatgtgtggtatacagtaagggtcttcattctttgctttgcatgtgggtatccagttgttcctgcatcatttgttgaagactattctccacccactgaattaccatgacatctttgtcaaaaattaattgaccataaatataagagtttatttcctgacttt

SEQ ID NO: 264278 - DNA, 349 bp, Homo sapiens
ctatggttctgtggtagcctccagttgctaccaaattataaaaagctttcagttaccctcccagataactgatatcatccttagcctgcaggacagctatgcaaatctgaaggtcaactatccacaatatatgctttggtcttaaagtcactcctttcagttttgaaccaaattcataccttttgctttcaaaacactcgaggactccccacctgccttctgaagtctgaaattttctctaagtaatcctgattttgcacctgttacttcgatcactccattacccttagcacttgttattgtacttcctgtgcaagttttgtggattattaaatgtctttcacaaatg

SEQ ID NO: 264279 - DNA, 283 bp, Homo sapiens
tttctaaacatatataaggtaaagagaataatataatggacttaatgtatgcatcacttggcttcagcaattctccttttataaaatgcattccaaacccttaccctcttctgcctctttcagcaaatttgtttgaggtggtggatgtttgctgagtggacggatgaaaaaaaatagttgaagagtaattgccatttgatacagaacagaagagcttagctttggtttaagctgttcatttccctcccacagtctgaagttcagctgcaggaaaaaaaaataa

SEQ ID NO: 264280 - DNA, 144 bp, Homo sapiens
ttatttttgcaagactgaaccatgtatacctgctttgagatcaaacagaaagctaactccaaaagggcaatcctatagctatcccagaagagcatgttttgcttgctgggatgaaatgtgaatatattttatgaatatggactt

SEQ ID NO: 264281 - DNA, 466 bp, Homo sapiens
cttgttctaggtttcagagtacctgaaatactgtaagtatctcatcatgctgaatgagactctggtgtctaaagatttgaattaccactgaacatacccccaaatataagctaactgtatcatttgaaactcaacatgagaaaccaccacaggaacacctttcgaaactcagcaggtttcaacaagggaggaaagactgactgtgttggacttaaagaaaggaagctcatggctctctaacaagatgccttcccatgagattcttgaagataattttgccctaatgattttcacctcacccactgactacagaactgagtcttcatgtaaactgagatattgccgtagcctttaaaagcatcccacaaagaaaaacattaataatccagtctaaaattttcagatttgaaaacatgggtatgtgtttgtatatgtcatgctaaatataactgatataaagttcatg

SEQ ID NO: 264282 - DNA, 152 bp, Homo sapiens
cagaaggagacgccccttccagtctctctaccatctgataaaacaatggtcatggaggcactatcattagctaaaagttctagtcatctatcacccagtgaagaagtgagatgcactcaggatttcctttcacagactcagagtctcctcgg

SEQ ID NO: 264283 - DNA, 402 bp, Homo sapiens
agtccctcctgccgccccgcgggccctggcgctgccgtctccccaaagccacagaggcccttccagcagcagaaaaccctctacagttcgtcccaccctggacaaggtgggcagcccaggccagagtgacatagttcccacgtttttcccagaagttcgacagtttttaagcatccgtgcctctcaaatttgtgttaagcctttgctcaatttctacagtatggaaatggatgattttgttcattttttttcagctttgtgcttgcctatttggaagacaatttcctgatctcatttagcaatagctaaaagtgctatctctttttttcacaaatcttttttaagtaaactgcatacaatactgaaaataaaaataaaatacgaatccatcatgacaatacc

SEQ ID NO: 264284 - DNA, 682 bp, Homo sapiens
aacaaatatgtaatgattattatgtttcttttttttttgaggtggaatctcactctgtcacccaggctgaagtgcagtgaccgcaatctgagctcactgcaacctccaccacctgggttcaagtgattctcctctttcagcctccgaaatagctgagattacaggtgcgcaccaccatgcccagctaattttttgtgtttttggtagagatggggttgcaccatattggccaggctggtctggaactcctgagctcaactgatccacttgcctcagcctcccaaagtgctatgattactatgtttctgacatgcgaagtggcaaatatatgacatatgttaagatctcaggaaaccagaattttagagtaataacatttccattttctcactcttcagaaacacttattttttttttagtggcatcttgccctcagaactccactcaggaaagtaatacaagtataattatttttattttatatatgaagatgcaatcatggaatggatttgaagacttaatccaaattacagagcaagataacaccaataccaggaattaaacccatatattttcactcaatcttggcaacacttctatggattattaatgtaataagaataaggtttacaattattaaactatttcaaccccgtacgtgtgttgaatggcagtcatcaaa

SEQ ID NO: 264285 - DNA, 241 bp, Homo sapiens
atctgttattcaaatactgaatgttacagtcattgattttagtgaagaatcaggaatttttaaaatatctgcataagaatgacaaataacagggaatatgttttttgtctaccagggtcagtttggtctgagggtggaggaatgagatagagaaggtagagggagagagatcaagaaaaagaaagagaaaaaagaggtataaggagaaaatgcaaaactcagttaatatgtcataatcagg

SEQ ID NO: 264286 - DNA, 404 bp, Homo sapiens
tggtacacagagacgaggaagtgggcagaaaggtgactgattaggctccctcagcgtacgttatcacatcattctattcccaggttgctatggtgcttcctataatccaagttgcttatagacagtgtgcatggagctttctcaacctgccttgctcacctctttgctttctcaacctgcattgctcaacctgcagtctgcaactctttgtggccatggacagaagctcagaccgagagctctctgcgattctgtgattcagagaccgaacttgtgtgtgaccatctccttgaactccttgatttctagcctgagaaatgaaagtgtgaaacaagcttcacataaaatatttaaagaacaaactttattcatgaaaataaatgagaagatgatgaacttctaaa

SEQ ID NO: 264287 - DNA, 602 bp, Homo sapiens
gcggtggctcacacctgtaatcccagcactttgggaggctgaggtgggcagatcacttgaggttagggattcgagaccagcctggccaacatggtgaaacctgtctctactaaaaacgcaaaaattagccaggcatgatggtgggcacctgtgatcccagttactcaggaggctgaggtgggagaatcgcttgaacctgggaggcaaaagttgcagtgagccgagatagtaccactgcactccagcctgggtgacagaacaagactctgtctcaataataataataataatgatgataataatatttttcattacccttttaaaattcatgggatcagtagtgatggttcttttgtcattttcaatattaatgctttgggtcttctctctttttttctcaggtaacttggctagaggtttagcaattttattagtcttttcaaagaatcaactttttattgatttccagtttttcttactttaaactatatgcattcaatgctgtaaaattttcctctaagcactgcttcacttcatcccatatactttgattaagcatattttatttttaatttttaattgaaatagaatattttaaaatt

SEQ ID NO: 264288 - DNA, 249 bp, Homo sapiens
accctgtcaaaaaaaaaaaaaaaacactaacaaaatgggcttcatcaaaatgaaaaactcccactcattacaagatattattatgagaatgatatggaaataatctcaatgtccattgtcagatgaacaaataaagaaagtgtggtaaacacacacaatgaaaaaacatttgttcttaaaaaggaaggaaatcctgccatttgtgactacatacacagacctggagggcattatgttaaatgaaacaag

SEQ ID NO: 264289 - DNA, 434 bp, Homo sapiens
gggcaaactatgttacatggattcttctagtaatgtgcctggaaatggaagctgagcaatttgcaatcacctcatgtgttccagtactaaaaaagcctctatataattgcaatgcaattgaatatgtttaaaaaactaatacaagtagaatggttaaagacctcaactaagaacattttggatgaatttataaaatacgcctttactttagaaattaatgcactttgtttagctcatgagaagatgaattttcttaagctatgattaagaatacatttaaattaaaatgcactcataagatagaacatgagaacttaaaagtctcatccaacttaaaacattcaatggaagtaatttcttttgtctacttaaacatagtttatggcatctatattgtgctagagggacaataacaaagtttgtaactcaatgag

SEQ ID NO: 264290 - DNA, 452 bp, Homo sapiens
agcaattaaagcataaaaagtagatctaagattttctaaatattagatattctaaaatattgacattatacaatgtctagcatccgtaacttttgaagatattttatttcaaggtaatttcataagaattcataagaatttacctactcagactttgggcaggatggaaaatagagtttctgtgaggtgtgcctatgaatcataagaagggcttcttaatgaggtcagtaattaaggaaatacatttcaatagtgacatttgacttacaacattgtttgggggtggagtcttagaagaattgatagggaacttttaacttcaacaagtgaaactaaaacattaactccagttgttgttacctaatacaagaccagtgcccaataaggactttggaattctttcataacaactccttggcaggtgcacttcacttgttctggaagtgatattc

SEQ ID NO: 264291 - DNA, 407 bp, Homo sapiens
atttagctagaatcaaagttgtcagcatttcctcaatttgcattgtttcaaagaggaaggctcaaatggatgtgagggagtatatccctatgccagttcactgcacccagtaattggcatcctgacttggccatttaggcacagccattctggcttctcatccctttgctgagcttctcactgcagatccctatcttttggttggaggttgggggtaagatcagacttttgacaagaccacaacaaaggaatcacaggtctatcactttggtcaccttagaagactagccaaagcatttcctaactctttgaggtcgcatagactgcctctgaagttgtatttctttcatagctgcagtagccacacattaattcacttgctataaataaatcattggatgcataat

SEQ ID NO: 264292 - DNA, 642 bp, Homo sapiens
cacgccaatgtatttagaccttgttcgacttgtctttgtttagctgacagctggccaagctggaggcagtacaagcagacagagtagggacagttgccctatcggcaaatcacgggaggcattaggaagaccagcggaactcccagcacaagctatcaaaccagccaagtcacaatctctgtttgtcattccggagggctctgcgcctcttagaagtcttgctcaataccctcctctcgaatatgacctcatatgacttttctgggcttatgcggggaaccattttcacattgtttgagttgaaccccacttgtatctcttttgagtgctagtaaatatttgacttaatggaagaaccccgctgagttaacaaaggtagaggcaaccaagtgcctccaaggcccagaagagagtcacagcctgatgaggaggcagtgagtgtggaagatggggcataaggcacagttggggtcagccatggcccttcctgagctagtccctgtctgtaagatggggatgaaagcatttacctctcaagggtgctgggggtcccaaacagtgcaggagtaacaacacaaggcactctgaacctgcccctgcagaaaatatataactttattgaggcctagtttaagacatatc

SEQ ID NO: 264293 - DNA, 406 bp, Homo sapiens
cacatatatacgtgtatatgtgtatatatacatatatacatatatacatatatatacatatacatatatatacacacacatatatatacacacatatatataatatatatattcttcctaatcagtcatcatatccaattggctctatcttctatatatatgtatacatatatacatataaaaattatatataccaaaatttatatatatataaatttcttctgtgttttgtatacattatgttacctgatgatattctgaattctccctatagaaaccaaatagaactaaaattttataaatctcccctataaaaaccataatttagagtatattgtttgataatttcttctacttttctattgttgttagtattttctcatttcttttcttaaattgcttttag

SEQ ID NO: 264294 - DNA, 601 bp, Homo sapiens
attataaggaaagaaagtcaccgctaattttacatctcagacagagccatagttaacgccttcatgtaatttcttctagcttttttccccatacatatacatgtggttttgtttcttacctcttttcttaacatagtatcaaaaatgttttcccttgtcattaaaatcttcataaatgtgatgtacatttttccatttgatgcatatttagtgagtgtcaggcatggtggatacatcagtgagcaaagtgcaaaacttcccatctcatgggctgccctcctgcaggtgaaatgacatactgggccattgggagctcacctagtaccctcaacccagcatccacccaggcccccggtctctcccaacctatggcttacttcctgttggtgaattcttcctttaagcgatcttgaaaataagcccttgcttattttcaaatgaataaatgtgaacccagaataaatgtgatttgtaaagttctcataactatcacatgtatatattctactatttgggttttttccacctagtttttgccattacaattaatgttcaaatgaacatctttgtacttcattgtgacattttgatctatggctca

SEQ ID NO: 264295 - DNA, 431 bp, Homo sapiens
gagaaggaagaaaaggtgtagagtggtggggaaaacttgataggtggctggaagaagcctttgaaatgctaatacagttacccacacagcaaacatgacctcctatgtgtacagaataaatatttaagggacagggaccattcccagaactgaaagtaggaaaacatgttggagtgtatctagccatgaatgcactgccctcaaatgcccaggcagcagtcttaagaggattccaccttgggggattcatggggctcatttttctatcgcaatctgtggtcagcattcagttagaaaagcagagccactaggagattttgataggcagatacatagataagcaggctgacagacagatagatggacagatggatagacttagtatacagatttgactttatgcaattgtgcgacctggtcaagcaggctct

SEQ ID NO: 264296 - DNA, 383 bp, Homo sapiens
ggtacttgcacataagctttaaatgtgtgttgtggtgatttattgctgactttgagcacatttatgtagcattgtggtaaaccacaaccttttcttccatttatgttttaatggaaagtagctttttttttctcctttcaaaacagtttaaccatttacttatttgatgtggtatatctcacttaagaatgagccatgtggagtgataattttgaaagctttgtaaaatgtttgaaatatccagtaaaaaaggaaaccaaattgtaccaattgtatgattatgactataaaacagctgtgtatttatatacttttacatgtttaaatgcacagatactttatttttgatgaagcatattaaacggaatactagttttacattg

SEQ ID NO: 264297 - DNA, 967 bp, Homo sapiens
  misc_feature (52)..(53): n is a, c, g, or t
  misc_feature (145)..(145): n is a, c, g, or t
ctgtatagatccctaaccagttgcatgtaacaagtcggtcggtgtatatctnntggaaatgaatttggtcatcagtgatagcactgcaatatgatgtaatggatacaattcacttatctcacaaaataagcttgctgtttctccnggggggccagggtggtggtatggatcagatctgacttggtccacgtcttctctctgctcaacaaagtgaaggaatcaagcctggtgtgatcaccacagtctgctgtatccagcacgttctctggtacacgctgggtgcccagtacatccttgcagatgagtgaatggcctgcctttccgtaatacaggctggcgaagcttccctgcgctcatgtctcagaagagatgctctctgctcccctgcaagtggaattgtctcccttgggagtagttgagaggtgacagaggctgctgtgagtggctagaccaaagtctccctgtgaagccacgtgatgactccaccgctccccagagctgcacatggtcgctcagaagccttggaggggttgggggaggcccctgctctcaagcccccactatcacaatcactttgtcccagctattcacctgcaaacttgcttgatctgcagaagctgcagagtggcccactcttcctggacatgtcaggaaaactttgacgtggctgctctagcttcagggaaggtctaatttggtgaaaatttgaaagcaggtttgtgggagtgccagggagaaatggggagagagaaagcctctgtatttgatggatggcaatggcttggagctggtgtgatggcctctctggatgacaaggacattggacttagagccagaaggactgaggtatgaatctcggcattcctggtttgtagttatggggacttggcagagacacttgaatgaaacttcctttgcccaggtataagacggaccccctaataaaggttgactgtgttctgatcct

SEQ ID NO: 264298 - DNA, 366 bp, Homo sapiens
ggaacttcacaacacctgggcacctggatggacctcaccccaggccaacagagaacccctggagtgggggcctgaatgctgaccatttctcaagagctagggtgatgcaaatgtgattgctttaacttagcacttctcaaacttgaaggacagtagggatctctggagatcttgttaaaatgcagggcctgattcagtgggtctggggtggagaccacatttctgcattctaacaaaactcaccaattactttgccaaatgaccattttgtctatgtaaccagatttcttgcttgatttggtaagcacaatatttagatttttaaagggaaattcatgcttgcttaagaaactttactagcagaaa

SEQ ID NO: 264299 - DNA, 441 bp, Homo sapiens
acaactttgcctaacctgaagtgacctaacaagcaaaaatctcagttgttcatcctccttcccacattttggtttggtttctagaacatacacagccttcccctaaagattttcagaacacctgcctttcagtcttcaccagagtaaaatctccacaagaggacaaaagcccacctaagaaactccttgtaggcacattaaactctaaccttgcaacaaacagaaggctacctgaatccctgcactgaactatattttatggtcatgctgtggctttccttaagggatgactacaggactgttgttatggatgcatgtgtctgactcttcgaagttgcctacctgaaatttctctaaagaaatttacattaaagataagtgcttgagaagctggtagttttattcctctaaaataataaaatgttccccacatcctgatta

SEQ ID NO: 264300 - DNA, 152 bp, Homo sapiens
tgtggtcattttcccatcttctccagaccaaacatttactcaataaagcattttccatttaacttctcagatgttattaagccaagaaccccttcttttcaaatggaatctcatataaaatcctgatatttaaacagatactactttagata

SEQ ID NO: 264301 - DNA, 488 bp, Homo sapiens
cacctaggctcctgctgcctgccctgatgtctgcagattcacttggtcaagaggagttccttctatgcctgctgtgtttttcagccatagcacagaactgttttatggggggagcatgctcatgcgctaaatcagtggtctctcactcagggaggaagagaggccaacatttgctgagggcttactgtgccctgggttctcagctgtccccacgagggggtgcaatgcccttggttttaaagagatgaaaatatcaaggctccaagaggtaaaaaacttgccccaggccacctagatgtggctggtgaagctatgtttgaacccaccgctgactaactccaaaattcatattcttttctcttgtctcggctgtcttccaagtatccagaatggactgtctggaaagcgttctgttagtacttcttgactgtgggactacaggtctttgagtttctcctaataaagtgatttctgatgaaaatctgaaa

SEQ ID NO: 264302 - DNA, 405 bp, Homo sapiens
aaattagctttaaagattagcttttaaaagccagttaagattcctaggtgcacaaacaagaactgtaaaattcacttgagaatgtgagatcagtaatgggggtgccacatgcaccaagaagtttgaaagtaagatgctgtgaattcggactccattaaacagactaaactcagtagtttatgatgaaaatattttctacttatttgtattttccttggtctgaaagattccagtaaagcaaaaaaggaattagagcttcattaaaaaatggctttattggccgggtgcggtggctcacgcctgtaatcccagcactttgggaggctgaggcgggtggatcacgaggtcaggagatcgagaccatcctggctaacatggtgaaatcttgtctctactaaaaatata

SEQ ID NO: 264303 - DNA, 1879 bp, Homo sapiens
gatgtacactaagcgaccctcagctgtgtgggaccagccctgccaacttccatcgtgggctcagctgcagctgccacctgcacacggtgcggggaagcagtgatggcaacctttcaccgtgcccacgccaccagcagcgtgaaacccagggccagacgtcaccaggagcctaattcaggcgattggcctggcagctacagggcgggaactcgctgctcagccatcggatttaggctgctgcacagtccccagcactggcgacctcgttctctgggcgcagggcaaggaagagaggaccccagttgggagggtggtgcactcggagacctgaaggccctctgggaccagccttgccagcctccgccttgggttcagctgcagctgtcatctgcatatggcgcgcggcagcagaggtggcaactctcaacgctgcccgagccaccagcagcgcggacccctggccagatgccccagcagcgcctaattcgggcggccggcccttcagctgcaggaggggggaaccagtggctcagccccatgtaggcggctgcacagtgcccagcactcaagacctcgcgctcaaaagagggcacaggaggagcagctgcagggggcagcgtcgttaggcgggccctgagacagctgggaccgcgcgctcggctctagggagctcggccagtccacaggcgtctcagcagcagctgccacctgcatgcggtgccggcgagtgctcggctcagggcggtttctggccacacgcagtttctggccacgcgcaaggcggttgccttttgaggtcccatgggcgctggggcccaactgctctgctccgtatattatttattctccgagaggttggagacgtccttgtccgagaagttggagggtccctgtctgaggtctgggccagactgccttgctttctggtgctgggccggatgggggccgggtgggggctgggctgggggaagggcgagggcgagttgtggcgtctctgaagccaatagctgggccatgaagatgatcttggctgtggagagccagaagggccaggtgcgcctgagctcctggagtagtaactgcatcttctctgacccctggtaccagactccagatgaggatgtcgggatgatacacaaagctgcgtccaggggaacgcgtgggagctgcagctgaggctcccgctgaagagaaaagaccagtctgaaatctacaagaacagagaattcttccaaatcaacatgaaaatacctctaaaactgggcaaagtactttttccagctctgcaagtcacctatgcacataggaaaaaaatacttaatgtgtccgataagagaaggactttaatttaaaaaaggaataaaatgccgttttctgtcctaagtttgtgaagatgaggagcagtgatatttacacttctgcttaaagttaagttgctgatgacttttcaaaaagacaatttggtggatggttccacatttggcctgtgccaatggctgcccagaagtggtaacttttctggtgcacagaaaatgccagcttaacatctgtgacagtgaaaacaagacacctctaacgaaggctataatgtgccaagaagatgtgaaactattctgctagaccttggtgctgatccaaatattaccgatgtctatggcaacactgctctccatatgctgtctataatgagaatatgtcaatggtagcaagactgttttcacacaagacaaacatcgaagtgaaaaacaatgtagagcaaccaatgttattttcaaaatatttgaaatccacttgttttaacattgacatatgtaagggtcagtttttgctatttggaagcttaagcaatccctgaataaaaataatttgaaataaaaaa

SEQ ID NO: 264304 - DNA, 407 bp, Homo sapiens
ataaaaatgaatttgtctcattgaaatataactagtttgtgaaacctgtggaatacttattttaatttcctacaatttacaatttatttcttgttctaatactgacaggctataatgtgccaagaagatgtgaaactattctgctagaccttggtgctgatccaaatattaccgatgtctatggcaacactgctctccatatgctgtctataatgagaatatgtcaatggtagcaagactgttttcacacaagacaaacatcgaagtgaaaaacaatgtagagcaaccaatgttattttcaaaatatttgaaatccacttgttttaacattgacatatgtaagggtcagtttttgctatttggaagcttaagcaatccctgaataaaaataatttgaaataaaaaac

SEQ ID NO: 264305 - DNA, 148 bp, Homo sapiens
cactcagcaaaagggtgaccttggacaatttacttagattctctatgcactggcactctcaactataaaaggggactaatagcacttaatttagtggattggcatcaagataaaatgagtgtagcctcattcctggattaaaaaaaaa

SEQ ID NO: 264306 - DNA, 1061 bp, Homo sapiens
ggagtttcaagaacagcagcacaaaaataatgacttaactggatagaaaaaaaggcacatattttcaggaaggcctctttattcttagaagttacccttcaagatgacaagtggtgcaaactcttcaggatcttacctgccctcagaaataagaagttctaaaatagatgacaactacttgaaggaattgaatgaggacttaaagctaaggaagcaggaactgctagagatgctcaaacctctagaagataaaaacaacctcttatttcaaaagttaatgtctaacttggaggaaaaacaaaggagtcttcagatcatgagacagatcatggcagggaaggggtgtgaggaatcctcggtcatggagctccttaaggaagcagaggagatgaaacagaacttggaaaggaaaaacaagatgcttcggaaggaaatggagatgctatggaacaagacattcgaggcagaagaacttagtgatcaacaaaaagcaccacagacaaaaaacaaggcagacttgcaggatggaaagaggctctttcttccaccaggaaaagcaacagaggaaaatggaatgggtcaagtatcaggaacaaaataacatccttcagaatgattttcatggcaaagtgattgagctgagaattgaagccttgaagaactaccagaaggccaatgacctgaaattatcactgtatttgcagcagaattttgagccaatgcaagcatttttaaatcttcctgggtcccaagcatttccttgagctcttctgagaaaaacctgaacgttggatgtactatgggcattacaactatggacagagtgactactggcagaaatgaacaccatgtgagaattctgggaacaaagatctacacagaacaacaaggaactaaaggaagtcagcttgataatacaggagggagactcttttttctgaggtcattgccagatgaagcactgaagaattagcaggctttcgctccatttgctttggacagatttaaagactaggcacagccatttgtgttaattaaaatctctcgcacctttaaaaaag

SEQ ID NO: 264307 - DNA, 889 bp, Homo sapiens
ggagtttcaagaacagcagcacaaaaataatgacttaactggatagaaaaaaaggcacatattttcaggaaggcctctttattcttagaagttacccttcaagatgacaagtggtgcaaactcttcaggatcttacctgccctcagaaataagtcttcagatcatgagacagatcatggcagggaaggggtgtgaggaatcctcggtcatggagctccttaaggaagcagaggagatgaaacagaacttggaaaggaaaaacaagatgcttcggaaggaaatggagatgctatggaacaagacattcgaggcagaagaacttagtgatcaacaaaaagcaccacagacaaaaaacaaggcagacttgcaggatggaaaggaaaagcaacagaggaaaatggaatgggtcaagtatcaggaacaaaataacatccttcagaatgattttcatggcaaagtgattgagctgagaattgaagccttgaagaactaccagaaggccaatgacctgaaattatcactgtatttgcagcagaattttgagccaatgcaagcatttttaaatcttcctgggtcccaagcatttccttgagctcttctgagaaaaacctgaacgttggatgtactatgggcattacaactatggacagagtgactactggcagaaatgaacaccatgtgagaattctgggaacaaagatctacacagaacaacaaggaactaaaggaagtcagcttgataatacaggagggagactcttttttctgaggtcattgccagatgaagcactgaagaattagcaggctttcgctccatttgctttggacagatttaaagactaggcacagccatttgtgttaattaaaatctctcgcacctttaaaaaag

SEQ ID NO: 264308 - DNA, 452 bp, Homo sapiens
ctctaaattcaactgaatttcccatcatatctgctggtgtttaaagaagaggtttatcttcagcaataatataacttgtgttaagacatttgattctgatagctttgcttttctctcctcccctcaatccccaccaactcttagcatttccttgagctcttctgagaaaaacctgaacgttggatgtactatgggcattacaactatggacagagtgactactggcagaaatgaacaccatgtgagaattctgggaacaaagatctacacagaacaacaaggaactaaaggaagtcagcttgataatacaggagggagactcttttttctgaggtcattgccagatgaagcactgaagaattagcaggctttcgctccatttgctttggacagatttaaagactaggcacagccatttgtgttaattaaaatctctcgcacctttaaaaaag

SEQ ID NO: 264309 - DNA, 1150 bp, Homo sapiens
ggagtttcaagaacagcagcacaaaaataatgacttaactggatagaaaaaaaggcacatattttcaggaaggcctctttattcttagaagttacccttcaagatgacaagtggtgcaaactcttcaggatcttacctgccctcagaaataagaagttctaaaatagatgacaactacttgaaggaattgaatgaggacttaaagctaaggaagcaggaactgctagagatgctcaaacctctagaagataaaaacaacctcttatttcaaaagttaatgtctaacttggaggaaaaacaaaggagtcttcagatcatgagacagatcatggcagggaaggggtgtgaggaatcctcggtcatggagctccttaaggaagcagaggagatgaaacagaacttggaaaggaaaaacaagatgcttcggaaggaaatggagatgctatggaacaagacattcgaggcagaagaacttagtgatcaacaaaaagcaccacagacaaaaaacaaggcagacttgcaggatggaaagaggctctttcttccaccaggaaaagcaacagaggaaaatggaatgggtcaagtatcaggaacaaaataacatccttcagaatgattttcatggcaaagtgattgagctgagaattgaagccttgaagaactaccagaaggccaatgacctgaaattatcactgtatttgcagcagaattttgagccaatgcaagcatttttaaatcttcctgggtcccaaggaattagaattgtttaatcttattaatcttgctggaatagactctgctacttcaaagcagaaggccaaggagacagacatctgacaaagcatttccttgagctcttctgagaaaaacctgaacgttggatgtactatgggcattacaactatggacagagtgactactggcagaaatgaacaccatgtgagaattctgggaacaaagatctacacagaacaacaaggaactaaaggaagtcagcttgataatacaggagggagactcttttttctgaggtcattgccagatgaagcactgaagaattagcaggctttcgctccatttgctttggacagatttaaagactaggcacagccatttgtgttaattaaaatctctcgcacctttaaaaaag

SEQ ID NO: 264310 - DNA, 711 bp, Homo sapiens
ggagtttcaagaacagcagcacaaaaataatgacttaactggatagaaaaaaaggcacatattttcaggaaggcctctttattcttagaagttacccttcaagatgacaagtggtgcaaactcttcaggatcttacctgccctcagaaataagaagttctaaaatagatgacaactacttgaaggaattgaatgaggacttaaagctaaggaagcaggaactgctagagatgctcaaacctctagaagataaaaacaacctcttatttcaaaagttaatgtctaacttggaggaaaaacaaaggagtcttcagatcatgagacagatcatggcagggaaggggtgtgaggaatcctcggtcatggagctccttaaggaagcagaggagatgaaacagaacttgcatttccttgagctcttctgagaaaaacctgaacgttggatgtactatgggcattacaactatggacagagtgactactggcagaaatgaacaccatgtgagaattctgggaacaaagatctacacagaacaacaaggaactaaaggaagtcagcttgataatacaggagggagactcttttttctgaggtcattgccagatgaagcactgaagaattagcaggctttcgctccatttgctttggacagatttaaagactaggcacagccatttgtgttaattaaaatctctcgcacctttaaaaaag

SEQ ID NO: 264311 - DNA, 361 bp, Homo sapiens
cattcctataaggtacactcaagggactgaatgaaaggaagggctcattacattctcaactccctttggtagtacacttttcatgccaggccctgagaagctgctgactggcaggaaccaaaaccttgacccatattggttttccacttccctctttaatttccactactttaaagctttgccaaaatgtctttccacagacattcgaggcagaagaacttagtgatcaacaaaaagcaccacagacaaaaaacaaggcagacttgcaggatggaaaggcaagtggactgcatgtacttaaaatttcaagattgtcgatgtcacacagctggaaacagcctgctgacaatcagggctaatt

SEQ ID NO: 264312 - DNA, 266 bp, Homo sapiens
tttccccctcaaaagaagctcttattttcctaatgtttccccttaggtactatgggcattacaactatggacagagtgactactggcagaaatgaacaccatgtggtgagaactactttctttaaacaaacaaaaaatcgttttaagggcttgaatagatagtgggtatagatttttggaatgcattgcttaacatatattctaatttaatattttaggggatttgcagagtgggtgctagggtactcaatattttagctgtcctt

SEQ ID NO: 264313 - DNA, 531 bp, Homo sapiens
atagaagtagaaggaatctttatcaatttatttgataaatacatgttgagtgtctgctgtgggccagcacttgggggattgtgaccacaatgtttaagcttttgtgctaactaaggagcagatggtggatatagcagacatgtattacagacttcagggggaaatcccaaatatttcagagaagaagaagatatagttctatagccggagactctgaaagagaagatgactaaagagatgagaagcccatctctacattcaaattagggctctttctaggtactcctaaagctcctcaaacagtcttggcacatagctgatacccagtaagttttacatatacatatataaaatatgtgtgtatatgtataaaatgaaagaatcaacaatgaaatcttgataatataatcatgattatgtttccaaattaccaaagataatgtacacattctgtcttacacatacacatgtactccaagtctaacagtccataactgtttgaatgattagaattagagatttgatagttct

SEQ ID NO: 264314 - DNA, 431 bp, Homo sapiens
aagactgctgggccaaatggtagctctaatttccttgagaaatcaccaaactgctttctacagtggccaaacagcaatattcacaatagcaaagaacatggaatcaaggtaaatgcccatcaatggcagactagataaagaaaatgtggtacatatacaccaaggaacactgcatagccataaaacaaatgagataatgtattttgcagcaacttggatgagctggaggccattagcctaagcaaactaatgcaggaacagaaaaccaaagactgcatgtgctcacttgtaaatgggagctaaatattgagtacatatggacacaaagaagggaacaatggataccagacctaattgagggtggagggtaggaggagggtgaggattgaaaaactacctattgggtactatgtttattaattgggtgatga

SEQ ID NO: 264315 - DNA, 494 bp, Homo sapiens
acttgggttgttagaataaggtcattcttgcagaatatggcacttaaattatctccagctgtaatgtcctaccatataatccagaggttgcatagaagcagagttgtcacagtctctgtagcacgtttgtgagaattctctaggcaggcccagcccttctctagaagtttgaatttcactcccaccttgttgctggggtaccttcttcagggtacatctaaacacagtggccttatacagaaatgttgttcaacccacacagtgctttaaaaaattaattgccaacatttaaaaatcagggagtttcacataaaattcagacttcttgtttccctttaaaaatgagaagctaataacatgagttgaattcccacaagtcaacaatgagctggaatctaatatggatggtcctcttatctttaccagtgcacatggtgaaaaaattcaaacagtataataaagtcttctttcaagtcaaaatatagagacgaatc

SEQ ID NO: 264316 - DNA, 516 bp, Homo sapiens
  misc_feature (6)..(6): n is a, c, g, or t
  misc_feature (11)..(11): n is a, c, g, or t
  misc_feature (20)..(20): n is a, c, g, or t
  misc_feature (500)..(500): n is a, c, g, or t
  misc_feature (502)..(502): n is a, c, g, or t
  misc_feature (511)..(511): n is a, c, g, or t
  misc_feature (514)..(514): n is a, c, g, or t
atggcntagancgttatgtngccttctgtaacccactccattatccaggggttatgtcccagagactctgcattaagctattagttagttcatatgtcatgggtttcctaaatgcctctataaacataagtttcactttctcattgaacttctgcaaatccaaaacaattaatcactttttctgtgatgaacctccaattattgccctaccatgctccaatattgacctcaacatcatgttattaacagtatttgtgggattaaatttgatgtgcactgtgatggtggtcatcatttcctgcatatatgtcctggttgccatcctgaggatatcttctgctgcagggaagaaaaaagtctctctacatgtgcctcccacctgacagcagtcaccattttctatggggttctctcttacatgtatctatgccatcgtattaatgagtctcaaaaacaagaaaaagtggcctctgtgttttatggcattattattcccatgntnaaccccttnatnta

SEQ ID NO: 264317 - DNA, 522 bp, Homo sapiens
atgaaaccatgagcattgctgtgagaggattttgagttttaggatgacacttatttctaggaggtgaaattacatttggctattcaaatatttgaaggcagcatttttacacccccacactaattttaaatgaacacttaaaaaaaatgaaataattattgctcccaagcattttgtatgacatgacttctcaaactgtccttatacttagctgggcttgcttttcagcatcctaaaatatgaaggtcagcattgaacctcaataatctgtgataattcataagtcaattcaaaaaataaaaatcaagatttttatttctgttgatattggcataaattctatccctctattaatacaagccatgatcttattattattattattactgttattaatattatgatcatctcttgaggaaaacaatctaagaaaaaataggatttgagactcaatatatatgattagaaataactagtgaataccttgaaggaagctataataaaattaaacatttttatgcc

SEQ ID NO: 264318 - DNA, 658 bp, Homo sapiens
tcatttattattttacagagcaggattatatttattatataaaataatcaaatgtataaaaaggaaaataaaataattcattattttcccagtgagctataaacctgtgttaacattttgatgaattggattatatttccttctctgttttctattacttttccccccatttttgctcaggaggtttgtgcgctttgatttggtttttgtttttgtttttgtttttgttttgtcaaaattgggatcatactgtatactacctcattaatgaacatttttttatatcatcaaataatctataaaatatagttttaaatatcagtgtaattgtggatgttcatgttcatttagttatttagtcattgcctaagtgatttaattaacttctgtggtaggggctcagcattgtgtggtggtgaagaacttggcatctggattagcaaaaggtctgagtttgtatgccagttctgtcatttctttacattttctttttataggtccagtgagttttctgtttgcttattataattatgttttttcctgtaaaattaaggggaaaaaatatattcctgtccactgatccaacagcccagggaatgtagggaaggaaccagagccacaggtagtctcagctagaaatctgcccctttgcccaaga

SEQ ID NO: 264319 - DNA, 451 bp, Homo sapiens
gcagacgaaggtttctgcaccggcatctctgctcagaagagatttgctgatgtaacaattatttgcactatttatattcaaatgttcttttaaaaaaatgcagcctctaaatttacggatagtaactgtgtgcaaatcaggaaacttatctcctttttatagtctaaaatcaaattacactttacatttttctcacttgcagaatattagattgtgatgcctaaatgacttgtgtttatgaaaaaggtgaattttaagaacaaattttaaaactgcataagcagtttaatgggtgtttttagaaagtgagaatgatcagctggtaagcatttattatatattaaactggaagttatatcgtcgcatccgttagcactgaattctgaaaatcatcatggcccaggtttgtgtttatgaaatgatggaccacaggactgttaaataaagttgt

SEQ ID NO: 264320 - DNA, 753 bp, Homo sapiens
tgagggtcttaaaaactgtccaaatattcttctgtcagtaattccagagtctagaagttaggactcccactggccctgtcatttctcaaatttgacctaaggactcagtgttttcggactggccagctagaacctttgtcgttcagcgtagccaagctcttattacccagtagtgtaccgccgtggttcaagattcttaagtgctgaattctccaaaaccttcatctctcatctcttgaaaccaggtggtataaccctgcttcagcatttctctctcactatcaaggtgatcaaactgtcgcttagagaaaacttcacctttgtcagtgtgtcctgaacttctctggcttctcatccccagaagtgaagcccacctagcaatctcagacattgttcatcacattgtccctatcagagatggcatcgcacaaaattcagagtttctgggaacatgttaaacctgtcacagcaatggttctggctacagcaggagtaaagaaatgtctaagcaagaaaaatgttttgaaagcctcaaaaaaagtttgtttgctgtcattaaaccagtggttctcaagcctagctggatggctgaagagcaggaagaagaggagaggttggtcttgctgtcttaggggtggcagaagcagaagataatccatgcataaatggacctgcacagtccaaagctgtgttcttcaagggtcaactgtatatttatttaaatttacataaagagatcatattctacataat

SEQ ID NO: 264321 - DNA, 459 bp, Homo sapiens
tgctaactcctttcctttccccgctgctcctcaccctgccctccctccctccctccacggttcctttctccatctgcctcactccctcccatctgtctccttgttccttccatctgtctgtcctctgtccgtcctcccctccctcctccctctatcctacttcctttctcctttttcttggctttccttcccgcctgtgtcacctctgccttgcacaccccgccccactcgctgctgccccggctctgccaccatctcttgggtccctgcctgcctggtgctcctcccttcctccattctgtcctgtccctgccctctcccgtgctctccatcttccctttcctttccctctgtcttttactctgtccatacccgcttcctgcctgactctctgcccccgtgtttcttgacatccatgtcactgcactccagcctgggcaacaaaacaaaactccatca

SEQ ID NO: 264322 - DNA, 476 bp, Homo sapiens
tgctaactcctttcctttccccgctgctcctcaccctgccctccctccctccctccacggttcctttctccatctgcctcactccctcccatctgtctccttgttccttccatctgtctgtcctctgtccgtcctcccctccctcctccctctatcctacttcctttctcctttttcttggctttccttcccgcctgtgtcacctctgccttgcacaccccgccccactcgctgctgccccggctctgccaccatctcttgggtccctgcctgcctggtgctcctcccttcctccattctgtcctgtccctgccctctcccgtgctctccatcttccctttcctttccctctgtcttttactctgtccatacccgcttcctgcctgactctctgcccccgtgtttcttgacatccatgtcactcccttcggccaacttcccattcccacgatgatctcgggatccttagagtagcc

SEQ ID NO: 264323 - DNA, 440 bp, Homo sapiens
aactccaaaatggactggcccccagtaatttacagtaggtagtcctaagccataaataaatagaatctgtgaatattagctttgttcatctgtaagaacttaagaaagtgctgggcattgggtcagttcaagtctattggatgaactgtgaatctcataatcatggaaatgtaggaataaagataaatatacataaaccaggccaggctcggtggctgactcctgtaatcccagcactttgggaagccaaggcaggaggatcacctgaggttgggaccagcctgaccaacatggagaaaccccatctctaccaaaaatacaaaattagccaggcatggtggcacatgcctgtaatcccagctactcggtaagctgaggctggagaatcgcttgaaccctggaggtggaggttgcgttgagccaagatcgtgccattgcac

SEQ ID NO: 264324 - DNA, 796 bp, Homo sapiens
aatgtatcagcaaggactgatttggcacagatgcaaaagccccagccagtgaacccagagctcacttcatggtgcataactggagtcctagacatgctcaacaacttcagagtggatagtgctctgagcacggaaatgattccttgctatataagcctttctgaggatgtgagatatgtgatatttggagatgaccatctcagtgctcccacggatccccagggagtggacagctttgctgtgtggggagcgcaacattcacctccggcaagcattactgggaggtggatgtgaccctctcctccaactggattctgggagtctgtcaagattccaggactgcagatgccaatttcgttattgattctgatgaaagattttttttaatttcctcaaagaggagcaatcactatagtctctccaccaactctccacctttaattcagtatgtgcaaaggcctctgggtcaaagttggggtgtttctggattatgataatggatctgtgagtttttttgatgtttctaaaggttctcttatctatggttttcctccttcctccttctcttcccctctgaggcctttcttttgctttggttgtacatgaaaagttggtttcacgatgatttattgtgacctcccacatatgaggcaaatactgtcctaagacactatgtgcgagagcctgtgagctcattgtaacttcatggaatgtaattactatgtggttatgaatgggataaccaccttgaatgtgtacttttgttaattaaattattttaattaataaaaaaaaa

SEQ ID NO: 264325 - DNA, 559 bp, Homo sapiens
ttcccttcaagttattgagccttctttaacgttatcacacacatacacacatacaaaggagcagcaccagtacatctactcaactgcaatgaaaaaataaaagtaaagatgccatcaaaacttgaataagtcaataaatcataacttagtctctttcttagatttacttagtaatgtccagtgaagaactctagttaaaaatacaaaaacaaaacccagcagttaatgagctactgattagaaaataagtgcataaacaataccagcgtagcagcaaaatacagttattgttaacattctgatgcacctcatttatcattttgtgcaagaaaaatgaccacagtctggccaattccagatttcaaactaaattcaaactcatacttaattgagcaaattatgcttatttgaaaataaatgaattaaattcacctcagagaaattatttgtatagacataaatcatgtagcaaataaagtacaaaataaatatcaatgacaaacatattggaatcaacttccctagctgaatttggagtgtgaggaaagatgatactgca

SEQ ID NO: 264326 - DNA, 355 bp, Homo sapiens
tagagatggggtcttgttctactgcccaggctggagtacagtagtgcaatcctagctcactgcagcctcaaactcctgggctcaagtgatcctcccatctcagcctctggaggagctgggactactacaggtgtgtgtcaccatgcctggctaattttttaaagtttttttgtagaggtgggatctcactatgttgcccaggctggtctcgaactcctaggctgaagtgatccttccacctgggcttcccaaagtgttgggatcacaggtgagaggtgccacgcctggcctatcaaactttttgatgtttgccagtctgacaggtggaaaacgctatgtccctgttgtattactt

SEQ ID NO: 264327 - DNA, 307 bp, Homo sapiens
ggaattcgaggtgggatgaggagataatctgtgtatggggcaaaagagatgcttccatcctcatctcctggcaacagccagattccatttttctccccattgtacaggaggggcacagaagttccgtaacttgccagaggtcacaaagatcacaatttgtagaggaagggtttgaccccaggcagccagcgaaggatgtatgtggggaacttgactaagtcattaaagcatatgagttttctacttcgtatactttaatcatttgaaaatgtattaaataaacataaaataccttaataataaaaaa

SEQ ID NO: 264328 - DNA, 547 bp, Homo sapiens
gacagacagacagacagacagacagacagacagatgacacaacaggcagggcatggtggctcatgcctgtaattctagctacttaggaggctgaagagggaggatcagttgagcccaggagttcaaggctacagggagccatgatcatgccactgcactccagcctggacgacagatcgagatctcatctctaaatatatacattttgaatgactattaatgaatatcacaatgcgtatgtgtatagcaactgtgctttacacagatctcatttaatcaccccagcagccccaggtagaggtgctgctgtttcattgatgaggagcccaaggctcagaggagttgaatcccttgcacaaggatgccaggctagtgactggcagaagcaggacttaggcctggcaatgggacttggtgtgtgctcagtggaggctcagagaggttgtgaaatttggccaaggtcacacagccagtctatgtgagaagaaagggattggacccttagctgtctgactccaatcacctgctgtgccctcagctttttctg

SEQ ID NO: 264329 - DNA, 446 bp, Homo sapiens
gatacctaccccactaattcctttccaacttggtttgttctgtacttaccttttttctttgttcctgagatctaataagcaagctgtaacttttccttcccacctggtatcctgcctaacaggtctgggcattgaggttgaaggcaaaagaaagctctccgatttgtgactttcagggtgtcagagtatgaattgttactgcagacagttatctggactgtgcaggggaagattttttacttattctagtcaccatgacccatgtacatctataagcaaatctaattagagactcaaccataaacagtaatatatatgcaaacatacatatatgtgtgtatgtgtctgtatatgtatatacacacatagtaatatatacatacatatatgtatatacaaacacaaatgtgtgtacaccatatatatgacactcatagaaaaaaaaa

SEQ ID NO: 264330 - DNA, 422 bp, Homo sapiens
gtcctgtaaattaatctttgtgtagatattcctgaatttcaggaatatgtagactcaccccaaggtattctaaatttataagctcaccagatcttagatccagccacaacagaagtgaagattatactctcttaagtggagagttgaaggtatttactggaacatgactatataccagtaaaatgaaatagggggcaatgaaactctaaatttcaaccgggtagacggctaataaggctcatttgtatttaggaggttcttccttacctcgaaaaaataaaaaaaaaccctaataccttgaatctttactcttttaccctttcagtgtgtccatgttttatatatttgatatacacagatatatatttatatatgcaaatcctttccatattactattttataatttttcccagtgttccag

SEQ ID NO: 264331 - DNA, 396 bp, Homo sapiens
caatgatcctagctcttaattgaaaaaattctgcctcatcccaccactcacctgagtcttgagctctcactgttaataatgctgacagacagacagtcacccagctgggtttttggagtgagttcatgtttgtaagatgaggctcacaatatgtggttataaggaagcaacgccatcagcccatcccctcaaggcctataattttcacgtcaactataaagatagtacaagctctggttttgtgattttaagaaagggaaccaccaagggaaaattaaactttttgattcctagaaaatacattagaaacagctgtgctccaacttttccatgtgtaagcttatttccccaggtatattcagcccagtggattgtatggtgtctgttcttattaaa

SEQ ID NO: 264332 - DNA, 345 bp, Homo sapiens
gttagaatcatcctcatagatttaccactatgtctatatccctacacactgctgtatagttttgcttatcttttaactttctgaaaatgacattttactgtctgctttcttatacttcatgtttgtgtcacttagcatatgtttctcgaattcatccatgctgtgtgggtttctggatctttgcagaaacagagctgccataaacattcttgtcgggtctcctggtttccatgcacaggagtttctctagggtatacaccaagaagtgaaaatgctgggcagagcaggctatgcaatttgtaaattaaaattaaattaattgcattaaaatttaattaaatttta

SEQ ID NO: 264333 - DNA, 440 bp, Homo sapiens
aatcattgccatggtcagcatgtatagagattgtttcacctaaaaggagtctcctagtttggatcaaggagttgacaacagcatattctaaaataaaattcgaacttcctagcaaagctaattaaactgctgaaatgtgttagagtttatttactataacaatgtttatgaattcaagatggtctagaaatggatatcattgactaaaagagagatgattcgatttaagtattttcaagtaattatattataaaaaacaatatattcattattctaatcttatcataccttattttattctgtatttgttgatcagattctagtggagttcagagtcattgaaatgaaggccaatttttgttgtaaaatattatgtcttgtaaatttagaaagtgttcagatggggctaaataaaatttgatggttcaagcaacccagga

SEQ ID NO: 264334 - DNA, 320 bp, Homo sapiens
tctgcagaggttacactttatagcctataaaatgttttcacaaactgtatttcatttagttgtcagcacactgctgtcaggtacctaagattattcccatttcacagatgaagcaactaaggctcagagagtcctggatgagtccagtatgttggaggattctagacagccatctgaattccaatactcatgcttttggaatatggacattttaatagccaagactgagtcagcatcttctctttctttggaagtctctcttccagattccgtctggtaaatttccacttgtacttcaactcctagcttcgaagtcatca

SEQ ID NO: 264335 - DNA, 544 bp, Homo sapiens
cacacagactcgaggggcccccatctcctgttctgaacccaacagggtggtcccactgtgggaccacaaccaggtatgactgtgtgagaagcaggctcactaccaggctaccagggagcacaggggagcaggcgccaccttgaggcataaacccagagaaacaagacctccaagacggccaggcactggggcacacgccggtaacacagcaccgtgggagctgagacggaaggatcgcctgagcccaggattttgaaaccaccctgggcaacacagtgagaccccgtatctacaaaaaaatacacattagccaggcatggcggcatgcgcctggggtcccaagtactcgggaggtagaggagagaaaaatcacttgagcccagagaggtcaaggctacagggagctgagatcgcatcactgtactccagctggggtgaaacggcgagactctacctcaaaaataaataaatacatacataattaataaataaaacatcaaagaccagccgacctaactccatctaaaatacacaacttctacgc

SEQ ID NO: 264336 - DNA, 262 bp, Homo sapiens
atttacaaactttgtgacctcggcaaatccagtctagctgagcctctggttcctcatagataagatcgtgaaaatgagacagtctatctccaagggcagtttggaggataaaggagacagcgcatttctttgtggtaacatttaaaatctactcttttagcaattttgatacgtgtatcataatatcacattgtattccataaatatatacaattattatttgtccatcaaaaatagaatgaaaacatttaaaaataatata

SEQ ID NO: 264337 - DNA, 517 bp, Homo sapiens
catggggaaattttgtactagttttttaataattataagtcttacatgttctctaattcttcttgaatctgtttaatttttctcccttgggaattgttaagtgtacatgtattgtgataactgctataattttgcttttattgattttttttgctttatatctgctacaatttggttcctccaaatcccatgttgaaatctgatccccagtgttgctgggggatctaatagcaggtgtttgggtcatgggaacaggtccctcatgaatgaattaatgccctcactgggaggaggggataagtaagctctcactcatttagttcccaagacagctggttgtttaaaagagcctagtgccacttctctcttgcttcctttcttgccgtgtgatctctgcacatgccagctcccctttgccttctaccatgagtggaagcagcctgaggctttcacctcatgcccagtcttccagccaccagaattgtaagccaaataaacattttttctttataaatta

SEQ ID NO: 264338 - DNA, 386 bp, Homo sapiens
gcaccagcaaaattagttttcttagtactagaaagatttaaaaagaagcagtgctaggtcaatgccccatgcaaggccatttaaagttggttctgtatctgctatgagaatctgactagtctaacattgctggtttgtagagttgctaaagaaacaggaggctagcctgggtctgtattatgtattaaatgatgttatgttaccaggtgcccttgatgatttcacaatgtggaggaaatgtattctttaatagagctttgtttctatacaaagcactttgtagtagtagcagtaggaatagaaaagtgggtgtagataggaagtcaaattactggactgagggaccataatgattgggggctacggaaagaaacaaaaaggacagg

SEQ ID NO: 264339 - DNA, 754 bp, Homo sapiens
taatgataatatgaatatttgttgagttatagcaatgtataccacatcacctcgtcacccctcctcagcaggagcatcagctccttcaggaagcttttcctgattatttgtgcctgcttcagacacattagatgaccccataaatctctggacatatctgcaccacttctcttgccagcttgtatgttaattattaatagctgtttgggtgtctgtcccccacagggaatcatcaaccaccgcaatagagaaatacataggattctgtggaacacagctgggagaacaggcaaatttgctcaaagagttccaaaaagctatagaaaagaagtgaccttttaatctggatctaaagagatgagtagagatttgttttaggaaggaaggagtaaagggcattttcaagtagatcaaaggcatggtgtgtttgtcaggccataatgcttatggggtcctcccacatccaggcactttgctagtgctaagagtagacagaaggtagatttggctggaaggtggagtgtgtggggcaggaggtaatgggggtgagaatggggaggtgagttattaccacaggtaaagaaccttgtggaactagctaaggagacagctctttttttcctggaggccaagggaggcttctgaaggattttaaggagataagtgtcagagtcctatttaattctaaatgagaaagatctctatgaacaggtatggtgtgattcataggatgtattgattggtgaaaaaacaa

SEQ ID NO: 264340 - DNA, 402 bp, Homo sapiens
cctctgcattaagaacacagacatggggagagcaaagaggcttgaggctacacaatcttcaacccatcagggttctctcccaagggaaagcctagacctggccgtccatgcctccgatccagacagagcatcccagatagggcccaggttccttaaaagcaaaagcaaagctgggtcacctggagaccttgtctgggaggaggcagaagaaaccacaggtagagataggcaccgaaggccacatcagcacattccttaacctcagaggttctgaaccaatgggccatttgcaaagtctggaaggagacgttttcagttgccacaactgaggagctgctgccggttatgcagcaggtagaggccaggaatgctgctgacatcctatgctgcctgcacagggca

SEQ ID NO: 264341 - DNA, 316 bp, Homo sapiens
cgctgcttgacccctggggaggggggcaactagaatgatggagggggagagcatttggcaggatatagggaggcaccaagccgaggccccactgcagagtgttaaattacgtcttcagcgtgcagctccagttacacatgaaatcagattaaatatctggagaatcaagacttcgactcaaataccttcaagtggatggtgaaaaaaatcagtagcctcattttttaaactacattttaaaaccaccaacagtttagagttacagatccatggcaattttaacaacttttccctcctttttggaattttctaagta

SEQ ID NO: 264342 - DNA, 645 bp, Homo sapiens
gttgaactaactgtggcttgcaacaatcaaaccactctttcatatatacttaaaggaaaaaatggcattatttgggacagactggaagactgtggaggctggaaggagaagggggtgaaaattacattcttggccacgttttccacacaacccattcctgaacccctttccacagacaatttggaaatgtgcattcaataaaacccctgtcgcaattgcagagaagcagagggtagaagagatcgggcttggagtcagcatctgggaaaccttgtataattttggccttgccataaaccagcagaatgacctcgggcaagtttacttttccgattattagtgtccttatctgtaaattggtatcaatcattctatcttgcaggattacctgagtggttagtgataaatatacaaagaacctagcgtaatagctggcacatagtaggtgctcataaaaaataattattgctgtattgctacctttataactagtgttgacagcttctggattcgacctggtgaggaaaggggataaatatagaagacgtttatgaatttgttttttaatctattttactctttaattatttaatatttaactggttaattattcatagtcaaacagaaggcttaataaaaatgtgc

SEQ ID NO: 264343 - DNA, 397 bp, Homo sapiens
tgcccccttccttgaattcctcaattcatttggctctatcatctgtagttttcctacccatcaccatcagatcctcttaaaaaaaaagtttcaatttctactaacagtttctgaacacctggatctctgctgggccctgtgttaaatcattgaatgggaagcagctaatccatataaataactccggctttggagtcagtaggatttaggttgggatcacagaccagatgaactatgaaatcttgggcaggttcctgtggctgtcttggctttggcttcttaaatggagagaattatatttgtctcacaagatgataagaggaataaatgaatctttcttaatcctaacattaattttacttccaaaaataaaaatcctatgaatacatttttaaaa

SEQ ID NO: 264344 - DNA, 295 bp, Homo sapiens
tgatactctctgaagaaggtttggcattgcaatatattccactggttatttaaaatagatctgtgcgatctgaaaatcaaactgggtgttaacgcggtggattcctaaatgaaagtttactttaaaagatgtaagttcaggtgttcacgcaggcacctatttctctcagaagaggacttttgacaaatgattgacccaaggacaaaagaacaagagtggtgtgacaaatcattccaacagaaaaactttgctaaggatagctaatgaaaagtaagccaaaaattagttctactct

SEQ ID NO: 264345 - DNA, 414 bp, Homo sapiens
tattacaaataatccctacattataggaattatttgggtttctgaaaaggtggctgggcagaaaagatgaacaatctcttcctttgagtctatttgctagtttaaatttagtggcaaaagcaagttgcatcatagttgctcccgtaataactagtgacatgggctctacaccctgcctggcacaggctgtctttgctgtgtgctataaagcccttaccaggcccaatacagtgagaggcacacagtgggtgctcaagaaatgcttgttgaggctgtcaaccatgggccgtgcaggcagtttaaagcacagtaggcatctggatctttaaaggaaattgtaccgttctaagagtcattaaatgagttcttcagggagggcagtaacaatatgccacctgattgctttgttcagaa

SEQ ID NO: 264346 - DNA, 311 bp, Homo sapiens
actaacataaacggttggagaccactctagcacactgagcagttctctatgataataccacatccatctctccatcagccaaggtagacaattccgagatacaatcacatttctgcacctctcatgaaagtttgtgaggtttatgatgagatgttgtatgagatactgtattcttacaggaattaaatggaataaagtataattatttttatgttattttaatatattagttatagataataacctccccttcttctgtgatataatatcaaagttatataaataaagagtactaacagtattttactgtg

SEQ ID NO: 264347 - DNA, 685 bp, Homo sapiens
aatggcccaatcaaaagtagacctctattctttgtttttctgagataggaacaagccagaaatttagttattcaggggtggggtgggaaagctgtgggacccaggggtggaaggacccacacagttcaaaataaaccgaaccaactatagtgaaggaaaagagaactatacgcagatagtattcctcatccccctgaattgacttatataaaaaagaaaacggagcatccgacaaattgatgcaatcaaaagggagcaataagcctttttctccttttaagcctcttaagaaataaacccatcattttatctagtgttttctctgctcttgcagctgctcgactgatccaaaacatggatgccaccactgagccttgtacagactttttcaaatatgcttgcggaggctggttgaaacgtaatgtcattcccgagaccagctcccgttacggcaactttgacattttaagagatgaactagaagtcgttttgaaaggttagtagagattgtgtctgtgcatcaaagatttctctcttaatatgttcattttttaaatatacaattgaaaaatataatgaatgaaatgaaaaagtcaacagagagtatcaacagcagaattaatcaaacagaggaatcagtgagctcaaagattatatgaaaatatacagtcagaggagaaaaaag

SEQ ID NO: 264348 - DNA, 412 bp, Homo sapiens
cagagtgcaggcagcgtgtggcctggagtctcagtcgcagcccgaggccctcaagcccacgtgggttacaggacaaggtgaaccatcagaaatcaaacaatcccagacggagagagcctggggcaggagaatgtatctccaggcagtaggaacatgtctctggaggatgagtttgggaagccaaggacaggatgaaaatgatcataaccacgagatttaatatcctctttaaaacggcacatcctgtatcactttcttactaattatgaagtgaagcagatggataaatatttaaaagagggcagcctgaccatcccatgcattattgaaatggagctcagcagtcactcactttgcttttagccaaagtcctgccccagccatgaaatttcaagtcacatgtccgtgactt

SEQ ID NO: 264349 - DNA, 727 bp, Homo sapiens
gttcataaaagatacacaaaaagtatgcaagatcaggaattttaaaaactaaggtaaatagatggctgtgattgcaggacttctgattgactgcctgagctctgccatgttcacagatgtggatgtttgaattatctatgtatttggccaaggttcattatattttctaagtctgaaaactgatgtctttcaaatactcaactagtgaattcctctccttctggaactctaattaaatgtgtgttggacctatcactctatcctccataactctcaccatgcttttcaatgttctgcatttcttaggctcatgcatttttggagtgattgctctgagccggacactgttcaaggcacttggaaaacatccacaaacaaacaaataaaaatcccagccttggtagaagttacattcccgcagaaggcaataggcaactgaaaaaaagcaggccaggtgcggtggctcacgcctgtaatctcagcactttgggaggctgaggcgggtggagcatgaggtcaggagatcgacaccatcctggccaacatggtgaaaccctgtatctactaaaatacaaaaaactagccaggcgtgttggtgcacgtttgtagtcccagctactcgggaggctgaggcagaggaatcacttaaacctgggaggcagagattgcagtgagctgagatcacaccactgcactccaggctggcgacaaagcgagactccattaa

SEQ ID NO: 264350 - DNA, 736 bp, Homo sapiens
caagtcaccgactttttattacccgtccactgatcagaaggcgtgatctagatggacttcagtaggcagcaattcagtccaacaaataaggatctattactgagcatcaactatggtgaaactgtgcttggtggaagttcaagaatgaatatatcaaaagtcacgtcctgcaggaagtcacaaccaacaacggagataaactgttaaactgaaaatgatccttgtatgaatcaaagatgctggtacacttgattttcattgtcttttttatggaactccttctcaaatgttcagatctacttaatcttgacaatttatctctttgctggctgaggtaaaaagagcaacaggcagtataggtcgtcaggagaccctgaaaagggatgagtgtgtgtgtttgtatgtgtgtgtgtgtctgtgtgtgtctgtgtgtgtctgtgtgtgcgtgattataaatagtacacactgtagaagcctccacattcagtccacactgccctcttctcaaccttaacgccaactgctcacaagtccatgcgctgcaaattctccatgaatctccaggttctcattagaaagtgcactttcaaactgctttatctttactcataacagtttcctcttctggaatgtctccctcctccaaatgcccattacactttaattatgtttcacatagtcagtgctcaataaatatctgtggaaataagtgaagtctcctatccttatatgtaat

SEQ ID NO: 264351 - DNA, 977 bp, Homo sapiens
caggagacagacatgatcataggaaacttcctcagatcttccaagactaggtttgctttgtccctgaatatgcttccagagtaccctctgctgaccctgagtactgtctatagcaccaaatggaagactgtctgtcgatacacattttgtgacaggctcagttttgtataactattgtcaatctccataaccctagcacataggaagtctctggcacatatcagatgctcaatatcggttgagtgaatgtattaatcatctcctttaaaaccagagtcagtggattgaagggatggacttcagtaggcagcaattcagtccaacaaataaggatctattactgagcatcaactatggtgaaactgtgcttggtggaagttcaagaatgaatatatcaaaagtcacgtcctgcaggaagtcacaaccaacaacggagataaactgttaaactgaaaatgatccttgtatgaatcaaagatgctggtacacttgattttcattgtcttttttatggaactccttctcaaatgttcagatctacttaatcttgacaatttatctctttgctggctgaggtaaaaagagcaacaggcagtataggtcgtcaggagaccctgaaaagggatgagtgtgtgtgtttgtatgtgtgtgtgtgtctgtgtgtgtctgtgtgtgtctgtgtgtgcgtgattataaatagtacacactgtagaagcctccacattcagtccacactgccctcttctcaaccttaacgccaactgctcacaagtccatgcgctgcaaattctccatgaatctccaggttctcattagaaagtgcactttcaaactgctttatctttactcataacagtttcctcttctggaatgtctccctcctccaaatgcccattacactttaattatgtttcacatagtcagtgctcaataaatatctgtggaaataagtgaagtctcctatccttatatgtaat

SEQ ID NO: 264352 - DNA, 525 bp, Homo sapiens
caggagacagacatgatcataggaaacttcctcagatcttccaagactaggtttgctttgtccctgaatatgcttccagagtaccctctgctgaccctgagtactgtctatagcaccaaatggaagactgtctgtcgatacacattttgtgacaggctcagttttgtataactattgtcaatctccataaccctagcacataggaagtctctggcacatatcagatgctcaatatcggttgagtgaatgtattaatcatctcctttaaaaccagagtcagtggattgaagggatggacttcagtaggcagcaattcagtccaacaaataaggatctattactgagcatcaactatggtgaaactgtgcttggtggaagttcaagaatgaatatatcaaaagtcacgtcctgcaggaagtcacaaccaacaacggagataaactgttaaactgaaaatgatccttgtatgaatcaaagagcggccgtccccacccgcgccgacaatacaatcatcaaaccaacaca

SEQ ID NO: 264353 - DNA, 621 bp, Homo sapiens
ggaggcactggggactcagaggctggactgggatctgtgagctcccacaggctggaccggggccatctaggagcccacatctcctgcaaagccacataacttatccatgccccctgtaaacagtgctcacaacacagggccttaaaggaggtagctctagggtacacacggaatccctccgctgggggctggccagtggtagcacccagctggaggtgctttgctgccacctcctgagggtgttgctgggaggatttgaaatcagctgcacggtgcctggtgcattccagcttttagcgaatgggtgccatggctggttattgttattatttatattttgagtccaggtcttgttctgtcgcctggattggagtgcagtgttgtaattgcagtcacagctcactgcagtctcccagctcctgggctcaacccatcctctcgcctcagcctccagagactataggcgagagccaccttgcccggcctgttgtcattatttatcattatattgtttttttttgagacggagtctcactctgttgcccaggtggaggttgcagtgagccaaggttgcgccactgtactccagcctgggtgaggagagcgagactctttctgaaa

SEQ ID NO: 264354 - DNA, 408 bp, Homo sapiens
aagtgaactgtagcctaaaaaaacatgaaacctagaaaagagttggtgaaattgaggtaaaaggacacaaagccaacactaatgagaacctcttaacaacaaggaatcagacacacaaataaaaagtccaacattctgggtaggatctgagagcagatgcccaaatttgggttaaatatcatagttatttctcataggagaggcaccatcaacaagcagtatgggctgggtgcagtggctcactgcatccagtgagcctgtcatcccagcactttgggaggccatggtgggaaaatggcttgagcccaggagttcaagaccagccagggcaacatagcaagacccccgtctctgcaaaaaaattttaataattagctgagtgtggcagctcatgcctgtaatcccagg

SEQ ID NO: 264355 - DNA, 452 bp, Homo sapiens
gcatcacagaccaagcccattattgaggactgtacgtatggagcaggcccgtgagcttgtgactgagtttcccaacctgccaggctcccatttgcttaggatgaatatttttctgccctccctggtgagccactgtgggccactcgccactccttacaccccttccctttaatacctcgcttggcttacttgcaaaatccacatgcatcctcctggatctcacagaagatgtatgaaaagtcatggccatgaaaagggcacggaaatcaaattaattaattttgctttttccccacgtttgtttctgtctgtctggtacttttcctttttaagcctgccatctctttgaaagtgagccgcacagtgataatccattttcttcattgtaaccccacagtgtatgtattccacattaaataataaaagggattaataattaaatcaaaatgaaa

SEQ ID NO: 264356 - DNA, 317 bp, Homo sapiens
agggcagccactttggaaaagcttgtcagttcatcaaaagattaaacataggctgggcacggtggctcatgcctgcaatcccagcactttgggaggccgagatgggcagattgcttgagcccaggatttcaagaccagcctgggcaacatggcaaaaccccgtctctaaaaaaaatacaaaaattagccgggcatggggccacgtgcctgtggtctcagctatttgggacactgaggtcggagaatcatctgagcccaggaaattgaggctgcaatgagccgcgattgcgccactgcactccaagcctgagcaacag

SEQ ID NO: 264357 - DNA, 1194 bp, Homo sapiens
gatggttttttcctatttctgaaaaaagagttattaggattttgacagggatcaaaattgaatttgtaaatcaagggtagttactgtcatcttaacaatgttaagtcttccagtctgtgaacatggaatgtctttccatttattttggtcttcttttatttctttcagcaatgttttgtacaggtcttttagtgtacaagtcttgtgcttccttggttaaatttttctcaagtatcaatcagtataatctaccacattagtagaatgaagaaaaaaaagaactcactacagtctgtcctttgtatctatgagttccacatctgcagatcaaaaatatttggaaaaaaaaataaaaggtaatacaaatttattccttaatcaaggaccagaggaaaaaaaatacaacatttaaaaatagagtataacaactgtttgcatagtatttgcattgtattaggtgttataagtaatctagagatgatttaaattgtataggaggatgtgtgtaggttatatgcaaatactatatataagggacttgagcattcaaggatttggtatctttggggggtccagggtccagtcccccacagatactgaggaatgactaaatcatctcagttgatgcagagaaagtattaaagaaaagctaacatcctttcctttgtaaaagcactttaataaactaggaaaagaggggaatttcctcaacatgataaaggctacccatgaaaaatcattgcttacatcatattcagtggtgaaagactgagagattttatcctcagatgaggaacaagatgaggatgccttctttcaccatgtctattcagtgtagtattagaagttctagccagaagttaagcaagaaaaaggaaataaaaagcattcaaattggacaggaagaagtaaaactatctctatttaaaggtgacatgatcttatacgtagaatacccttaaagttatgccaaaaacaaaactgtgcaagttagtaagaaattcagcaaagttgcaggatatggcatcaacacacaaaaatcagttgtatttatgtacactagaacaatcccaaaaggaaattttaagaaaacaatttcatttacattagagtcaagaagaaaaaaaaaatactgaaacacctgtatccctttgacttaactccaatagtccttgaaagattcctccccgtccg

SEQ ID NO: 264358 - DNA, 1044 bp, Homo sapiens
cttgggctgatgagatgagatgaatgtattttgtatgtagtaaagatatgaattttgggaagccaatggtaaaatgctacagatggaattttgtcctcctaatactcatatgttggaacctaatatgactctatctggagacagtgatagtaggagatagttaagattaaatgagccaggccaagcgtggtggctcacgcctgtaatcccagcactttgggaggccaagacgggtggatcacctgaggtcaggagtttgagaccagcctggccaacatggcgaaaccgcatctctactaagaatacaaaaattagctggggtggtggcatgcagctataatcccagctacttggaaggctgaggcagaagaatcacttgaaccaggaggctgaggttgcagtgagccgagatcatgccactgcactctggcctgggtgtcagagcaagactccgtctcaaaaaaaaaaaaaaaagattaaatgaatcataagaatggggccttaatctgatagaattgtggccttttaagaagaggaagaaagagaaaaagagaaacatctgtctctttctctctcttaaccgtgtgaggacgcagggagaacgtggccatctgcaaatcaaggagagagtcctcatcagacattgaccctgctgtcaccttgatcttggacttccagtgcccagaactgtgagaaaagaagtgtctgttgtttcagccactcagttgatggtgttttattatggcagcataaacagactactgtaggagcttagactctgggtcctgatacatatcggatcctgatgcttatcaaatccaggctccttccttgaatgtgtgacctttggccaggttctcgacttctctatgcctcagtttactcctcagtaaaatggagataataatattacttatcacctcagtaaaatggagacaataatattacttaccatctaggtttattttgagacttaaataacttaatgtatgtaaagtatttatattgtgagtgcaaaataaattaactattataataaaaaaa

SEQ ID NO: 264359 - DNA, 508 bp, Homo sapiens
agagtccacctcagtgtggagtcacatattattacttctgccgcatcctgttgacccagcctaaattcgtggtgagagaaatagattccacctgttaatgggagagtgtcccgggatgggggcactatagtggccttctgaaaatctgttttggccctcctcaaggtgatattggattactgcttctcgggggtctggttgggggagagggtgggttttaacctcaaatccttttcataatcatacagaaaaaaagagtagtatgtttttggggagaaaccttgggagctgtccaaacagaaattgaaatcacagcatccacactgcctgatctaatgcccagctagaccatgcaaacctgattccgaccgaatgcccagccagaccatgtaaatctgattctgagctgtgcacaaggctcacacctgtaatcccagcactggaggttgcagtgagccaagatcatgccactgcactccagcctgggcaacagcaagactgtctcaaa

SEQ ID NO: 264360 - DNA, 591 bp, Homo sapiens
cttctttccatcctcttaacagacctgacaagatcagcttcccctcctaaaccatgaactctctcaaggacctggactgtgccttgttgtctgttcaactgtgacctcactctagatggtagagcccaatgcccagcatgcaattaacaggagctgcctgcagacacaaggctggctctgtgtcccctcccagctgagacactgagccccagcactaggcacgtggatgggttgggcacatgacctccctccctttctgagcaccttgcccattccaagagctcacggaatcagactccgcgactgccctgagttctgacttctctccccatctccctgcactttgattctcttgaccatgggtcctcctcactgcatatcccctgcctgcttgagaaaagggatgcagcccagatggtcaataaccccctgaggtcctcctcctaggaatgtctgtatttgctcacaaagagaagtttatatatataaaaccaagaaacaaatttctaatggtattaattgaattttaggcaggccttgaatgatggggtggggtgctctgatctgagtcggtgcgctcacgacgacgag

SEQ ID NO: 264361 - DNA, 728 bp, Homo sapiens
agcggaggtgaagaggagaacgatgtccaggcaggggccggggaagctcgtgccaaggcactgaggggaagtgctgcaatgaacctcagaggctggatcttgctgactcatctggggtaccaaggacagacaaaggacatggagtccaggcccaggaggcgataccaggccagcagtttcactgatgctcctgtcatgacgatgactgcctccctcctccccttggtccctgactcagtgtctgcagtgaccaggcaccaggcagggagcaaggaaccaagcctttcacctgctcccaccaactcctatggtgctccctttccaaggctaggtctcctctccacccagttccttatcacgtaccatgagaagctgtcaccttggcaactgtcaccttctggtgagatttacaattgcactgctacaactgcttgtggcatggtaaagttgcaccaggacctctgctgtccatgagatcaaagttccaggccaagagacgggtctcactatgttgcccaggctggtctcaagttcctggattcaatgttcttgccttggcttctcaaagtaccaggattataggcatgagccactgtgccaggcccaaacctagcttctgagtggaaaaatttctgctgccccaccagcttcaggaagtgggagtcaactctagtcactgtggtgatgcagagattatacggctgataaaaccccttatttttctctcc

SEQ ID NO: 264362 - DNA, 653 bp, Homo sapiens
agcggaggtgaagaggagaacgatgtccaggcaggggccggggaagctcgtgccaaggcactgaggggaagtgctgcaatgaacctcagaggctggatcttgctgactcatctggggtaccaaggacagacaaaggacatggagtccaggcccaggaggcgataccaggccagcagtttcactgatgctcctgtcatgacgatgactgcctccctcctccccttggtccctgactcagtgtctgcagtgaccaggcaccaggcagggagcaaggaaccaagcctttcacctgctcccaccaactcctatggtgctccctttccaaggctaggtctcctctccacccagttccttatcacgtaccatgagaagctgtcaccttggcaactgtcaccttctggtgagatttacaattgcactgctacaactgcttgtggcatggtaaagttgcaccaggacctctgctgtccatgagatcaaagttccaggccaaggtgagcacccgcctccatcctagagaggattctgtgagaatcattgagagggagctactctctccaggcaatcacgggggtgagaaagaaaaaaaaaaagagagggagttactcatgtactgacttattcaatgaatgcttatgttgtaatacctacta

SEQ ID NO: 264363 - DNA, 680 bp, Homo sapiens
agcggaggtgaagaggagaacgatgtccaggcaggggccggggaagctcgtgccaaggcactgaggggaagtgctgcaatgaacctcagaggctggatcttgctgactcatctggggtaccaaggacagacaaaggacatggagtccaggcccaggaggcgataccaggccagcagtttcactgatgctcctgtcatgacgatgactgcctccctcctccccttggtccctgactcagtgtctgcagtgaccaggcaccaggcagggagcaaggaaccaagcctttcacctgctcccaccaactcctatggtgctccctttccaaggctaggtctcctctccacccagttccttatcacgtaccatgagaagctgtcaccttggcaactgtcaccttctggtgagatttacaattgcactgctacaactgcttgtggcatggtaaagttgcaccaggacctctgctgtccatgagatcaaagttccaggccaaggcaccaggggcacgaacagtgttgcccgcatggaactcacacttaatgggagcggcagccaacaggatgatacccggcaaattcttcaaagcagtgttctccaacttgaatgtttgtgatgtgggcgattctgactgagggggtctgtagaccacatcttgataaacaatgctttttaaaaaattc

SEQ ID NO: 264364 - DNA, 284 bp, Homo sapiens
ttgagtggattaatttattaattcaactggtatttactaaataaaatccatgtatctttcacaatttttactaatactttctatcactatcagaatctgaaatctcagatttcatgctttaaaaagaattaatttaacatgaattataaattataattacttatatgaattggataactaaataaaataacaagatatttaaggggagaaaatcttatatgtggcaagataagtggtgctccattcagtgtattaattgcaaccaataaattggttaactgtgt

SEQ ID NO: 264365 - DNA, 1462 bp, Homo sapiens
ccgggaagcggtttgggaagctcgggggtcggctcggaaagtagagggggcgcagctggggcgggaggacagcgtttgtgcccggaagcgggagaggaagcgggaagtttgtgggatccccgccccctgtgtcagtggatgcgaccgggcgggccctcggccttcccggccgctggagagggacttcggccgctggctcccggggcggctgaggctgagcgttggtccggagcaggtgccgggtgcgggccgcggtgtgcgggaccggagcccggcgcgagcggcggcgggggtggggaaagcgcatttgtaacgcgggcgacaacgtgcccgaaatccccggacggtgggtctgcatcgagaccccgagctctggagctggaaaaacccggctgaggctttacagttctctatactctcccaagagccacagaaaatgaacacatttcaggctactgctttacaaaaccagaactgatcttcacattggaacaaggagaagatccatggttattagagaaagagaaaggatttctaagcaggaactccccagaagactcccaacctgatgaaatctcagagaagagcccagaaaatcaaggcaaacatttgttgcaagttttattcaccaataaattattgactacagagcaagaaatttcaggaaaaccacataatcgagacataaacatttttcgtgcaagaatgatgccttgtaaatgtgacattgcggggtctgcttgccaggggctcagcctgatggccccacactgtcagtattcaaaagaaaaggctcatgagcgtaatgtttgtgacaaatggctcatcagtattaaggatggcagaactaacactcaagagaaatctttcgcttatagtaaaattgtgaaaaccctccatcataaggaggaagttattcaacatcagacaattcagactctggggcaagattttgaatataatgaaagtagaaaagcttttcttgaaaaggctgcccttgttacatctaacagtacccacccaaaaggaaaatcttacaatttcaataaatttggggaaaacaaatatgataaatcaacctttattattcctcagaacatgaatccagagaagagtcactatgagtttaatgatactggaaattgtttctgtagaatcactcacaaaactctcacaggagggaaatccttcagccaaaagtcacacattagagaacatcatagagttcatataggggtgaaaccctttgaatatggaaaaagtttcaaccgtaattcaaccctcccagtgcatcagagaactcatgcaacagataaatactctgattatcacccatgtacagagacattcagctaccagtcaactttcagtgtacatcagaaggttcacataagggcaaaaccctatgagtataatgaatgtgggaaatcctgctctatgaattcacacttgatttggcctc

SEQ ID NO: 264366 - DNA, 1806 bp, Homo sapiens
ccgggaagcggtttgggaagctcgggggtcggctcggaaagtagagggggcgcagctggggcgggaggacagcgtttgtgcccggaagcgggagaggaagcgggaagtttgtgggatccccgccccctgtgtcagtggatgcgaccgggcgggccctcggccttcccggccgctggagagggacttcggccgctggctcccggggcggctgaggctgagcgttggtccggagcaggtgccgggtgcgggccgcggtgtgcgggaccggagcccggcgcgagcggcggcgggggtggggaaagcgcatttgtaacgcgggcgacaacgtgcccgaaatccccggacggtgggtctgcatcgagaccccgagctctggagctggaaaaacccggatgccatactgctgttaacatatgtgacactggagactttgtccctacctcatagaatcccatgcatgatgatacatgaagggttttccgtggctatctacttctgattcttttgaaagctttaaagacattgggcatgaaaggttcagtgagtttccggggatccctcgtttgtggtagagccaggaggaaaacagttccgttcattctttcacagctgaggctttacagttctctatactctcccaagagccacagaaaatgaacacatttcaggcatcagtgtcattccaggacgtgactgtggaattcagccaggaggagtggcagcacatgggccctgttgagaggaccctgtacagagatgtgatgctggagaactacagccacctcgtctcagtgggctactgctttacaaaaccagaactgatcttcacattggaacaaggagaagatccatggttattagagaaagagaaaggatttctaagcaggaactccccagaagactcccaacctgatgaaatctcagagaagagcccagaaaatcaaggcaaacatttgttgcaagttttattcaccaataaattattgactacagagcaagaaatttcaggaaaaccacataatcgagacataaacatttttcgtgcaagaatgatgccttgtaaatgtgacattgcggggtctgcttgccaggggctcagcctgatggccccacactgtcagtattcaaaagaaaaggctcatgagcgtaatgtttgtgacaaatggctcatcagtattaaggatggcagaactaacactcaagagaaatctttcgcttatagtaaaattgtgaaaaccctccatcataaggaggaagttattcaacatcagacaattcagactctggggcaagattttgaatataatgaaagtagaaaagcttttcttgaaaaggctgcccttgttacatctaacagtacccacccaaaaggaaaatcttacaatttcaataaatttggggaaaacaaatatgataaatcaacctttattattcctcagaacatgaatccagagaagagtcactatgagtttaatgatactggaaattgtttctgtagaatcactcacaaaactctcacaggagggaaatccttcagccaaaagtcacacattagagaacatcatagagttcatataggggtgaaaccctttgaatatggaaaaagtttcaaccgtaattcaaccctcccagtgcatcagagaactcatgcaacagataaatactctgattatcacccatgtacagagacattcagctaccagtcaactttcagtgtacatcagaaggttcacataagggcaaaaccctatgagtataatgaatgtgggaaatcctgctctatgaattcacacttgatttggcctc

SEQ ID NO: 264367 - DNA, 427 bp, Homo sapiens
gcatcagtgtcattccaggacgtgactgtggaattcagccaggaggagtggcagcacatgggccctgttgagaggaccctgtacagagatgtgatgctggagaactacagccacctcgtctcagtgggtgagcacagcttaccatggggttccctccagagtgcagttctgtttctcctctctttctctctctccataccgtaccatgtgactccctctacagtgcaattctggttttccttttttatattagtcacttttattgaggtatacttaacagaaaataaaattcagcacctttcagtgtacaaatcaatgagttttgaaaaatgtatacattgattaccacaatccaaatcatggtttggaatatttttatcaccccccagaagattctttgtagccctttgcagtgagtcccctccct

SEQ ID NO: 264368 - DNA, 163 bp, Homo sapiens
catgagggcggacgttttgcctcattctctttggaacagtggacacacagggacttacacaaatatctgttgaatgaatgaatgtacgcttcacatttgatgacttactaatgtaatgatgtctgaccaatagataaatctttttccgtattaactgattgga

SEQ ID NO: 264369 - DNA, 309 bp, Homo sapiens
gcttattattattattattattacctcaattcatggcttctttgtagaaatcagcttaagctacttgctcattttgggagaggtaatttagttaaaatttaacaatataatttgaaaataatctaatatatattgtaaaatgctgaaggtcctactgtcaactctctgtttgtggaagctttctctgcccttaggttaccttgtaaacagagtataaggagtgacctgcttggcatatcaataaatgagactgccatcgttaaaaattagtaaagctttcctgccagcagaggtgtgctaaaaagaaaa

SEQ ID NO: 264370 - DNA, 404 bp, Homo sapiens
ctgggctttttttggttggtaagctattgattattgcctcaatttcagagcctgttatttgtctattcagagattcaaattcttcctggtttagtcttgggagggtgtatgtgtcgaggaatttatccatttcttctagattttctagtttatctgcataaaggtgtttatagtattctctgatggtagtttgtattttttaattttcttttgtacttgagatgaaccatatttgcattctaaccccaacctttaatacaaccaggatgtttttactttcccttttttgtgtaagtaaaaagcaaacattggtgaggaaggtagaagatgtgtgtcccctcctctttaatttttttttttttttgcgacagagtctcgctctatcacccaggctggagtgcagt

SEQ ID NO: 264371 - DNA, 1544 bp, Homo sapiens
  misc_feature (110)..(110): n is a, c, g, or t
cctcttcctgggcggcgatctctgggacagatgcgcagaagacttcctgctcaacgacgacgtcctccctgagagcgcccaggaaaacgtccacttccagcccagcagangagtcgtcctgcgctcctgagcgttcgtcgacagagctcaggaggacctctgggatcaggatgagggtgtgtccatcgagagacactcgcaggatcgacgttggcgggagctccagcaccaggtcgacgtcgtccaggggcacacgcagggcacagcccgcggccaggaccactatggagcactttgagtatatcatcccactgtctcctggagggcaagattcagccttaagggggttcccttgtatgtgagtgctgcaagaactgggtgtgactcggaatccctcccaaccacttccggcgcaagtggcttctgataatcatggcgcccctcggaacaactgtattgctgtggagcctcttgaggagttctccgggcgtggaacgggtctgtttccgggctcgaatccagccctggcacggtggcctgctccaaccgctaccttgctctttcgagatggggctgccacgccgccggttcagctccgaggccgcagaatctggtagcccagagaccaagaaacctacatttatggatgaggaagttcaaagcatactcacgaaaatgacaggcttgaacttgcagaagacttttaagccagctatacaagaactgaagccaccaacctataagctaatgactcaggcacagttggaagaggctacaagacaggcagttgaggcagctaaagtacgattaaaaatgccaccagttctggaagagcgagtaccaataaatgatgtgttagctgaagataagattttggaaggaacagaaacaaccaaatatgtgtttactgatatatcatatagcataccacaccgggagcgttttattgtcgtcagagaaccaagtggcacactacgcaaagcctcttgggaagaacgggaccgaatgatacaagtttatttcccaaaagaaggtcgtaaaattttgacaccaataattttcaaggaagaaaatcttaggactatgtatagccaggacaggcatgttgatgtcctcaatctctgctttgcccagtttgagccagattccacagagtatatcaaggttcatcacaagacctatgaagatatagataaacgtggaaaatatgaccttttacgttcaacaagatactttggtggaatggtgtggtattttgtaaataataaaaagattgatggtttgctgattgaccagattcagagagatttaatcgatgatgcaaccaacttggtccagctgtatcacgtgctccatccagatggccagtcggctcaaggggccaaggatcaggctgctgagggaataaatttaatcaaggtctttgcaaaaacagaagcacagaagggagcctatatagaactaacactgcagacttatcaagaagcactcagtcgccattctgcagcttcctaaaaatattttaaaaatacatttattttacc

SEQ ID NO: 264372 - DNA, 323 bp, Homo sapiens
taaaggagcctccttaaggagcacttgtaggaccagagagagtcagagttaatagcaatgatagtaacttcaatactttatgtggagcagctgtgtacaatgagctagggctgggaccaagcattttatattcatcatcttgtttaatctgtgttgttaccttgtgaagaaggtaggattatctcgatttcacagaagaggaaactagagatgagattccctgtccaagtttacactgcaagtaccagatggaccaagcttccaaccctcctctctctgactttaaaccttatgcattccattaaaattaaaggaaaaagagt

SEQ ID NO: 264373 - DNA, 267 bp, Homo sapiens
tcccctgcattacctctactgtatatgtaatcacttcctattaacgtattaatctcctccaataaaaactgcagcctcttaaggtcttggactgctctatttcatgattggttagtagagcatttctttcctataatccacactggccctctctgtgaagaatgccctgtatgcaataatctgactgatatcacagctttacattattctcagccccctacaaatcttaattcagccattttttttcctttttttttttttttgaga

SEQ ID NO: 264374 - DNA, 640 bp, Homo sapiens
gcgggagaacacagaacacgcaccctttcttttagtcaccctggaggcctcggagaaggcggtttcagtgatccgtgaagagaccccgagtcttttacatcccggagaatgacaagagagcgagtacctgggcgacgtttacgttctgggatttcgggagatgcggttttctgcacgccaggggccaagcctgagacgtagatggacggcagggataggagctctctccgcgccacaaacgcccctgctcatacctgggttccttgattttcctgcctatataacccagcctcccatggccgggctctgagctctcattctgcggactgggacaaaggggttaactgtgatgcgctttgtataaccccaggattctgcacttgcccaagggcgaggtgcaaatcaaaaactacgcacaactgaacaccgagatcagaaattgacaagcttattctgaaggacctagagtaacctaaataattaggaaaagaaaaacaaagttagaggacttacaccaagtaatttcaagacttattataaagctaaggatcccgactcagattgaaaaagcagaggatggtcactgccttccaggtctgaggctgtctcccagaagcttcactcctggcttcgccttggt

SEQ ID NO: 264375 - DNA, 398 bp, Homo sapiens
ggttgcagtgagccaagatcgagccactgcactccagcctgggcgacagacgagtgagaccctgtctaaaagaaaaaaaagatgagttcttgccagcttgttctaaagctttcactgatgagtgctgaacactttgcagatgcaatgttaacaactgctgcaacatccataaacagtacagtgacacccctatttccaggtgaggaaactgagctcagagaggagagggacccagatcaggggaacccagcagggaagtgggggcccaggttttgaaaccaggactgtctgatttcagaccctaagaccaactgggctccaggcctcctggcttagacaatttgggacccaaacaaactttctcactctctggccatgggtgctgtgggaaactgcct

SEQ ID NO: 264376 - DNA, 586 bp, Homo sapiens
ttgattctcagcttggctgttgttggtgtatagcagtgctcctgatttatgtacattgattttgtatcctgaaactttactgaatccatttatcagatctaggagcttcttggaagagtctttaggattttttaggtatatgattatatcatcggtgaacagtgatagtttgacttccttttttccaatttggatgccctttatgataagtgtgaagacagtgaagaccaaaggaactcaggataggaagagattcccaagatgaggttggaagagcaggtaggatttaacttgagctttgaaggataaagagtatttaaatagtgaagataatgttttacacaagtggtagcatgaataaagatgtgaatttgggaataaatacaagaggtatattcaaagcaagcaaatagaccagcccagttggaagagatgactcaacaatgttgcagtcaaatgcccagttagttaagaactacaaagtaaaatatttcagtaaaggatcatttgacaaagcaaaagacccagaccctcataaaggctaccagtctcccctgctacagaaaaatgcagaaaatacataatg

SEQ ID NO: 264377 - DNA, 343 bp, Homo sapiens
gcaatgtctccaccctccaacctccaggaatgtttcatacctttcttattacattggtcgtgttttgtgtgtgcttgtttcattaccattcttttttccttccttcatttggtaggtctttgttgtctttgttgagcacttatgtgtcagacactatgctttctaattgggttgtaataaatcatgcattaaatgtagcaattgccacatttaatagcagtctaaaggcctggcgtggtggctcatgcctgtaatcccagcactttgggaggcctaggtgagaagatcacttgaggccaggagttcaagaccagccttggcaacatagtgagtccccatctct

SEQ ID NO: 264378 - DNA, 426 bp, Homo sapiens
gagaatcgtttgagcccaggagtttcagaccagcccttgcaacatagtgagaccctctctctacaaaaaaatgttaaaaactagccagatgtggtggcgcacacccgtagttccatctactgggattgctgaggtaggagaatcgcttgagcctgggaggtcgaggctgcagttagctgtggtcatgccactgcactccagcctgggcaacagagcgagaccatgtctttaaaagaaaaaggcgtattaatcctgtggcaattaaataatcataggagataatagctgctcttaaatttgggtgctgtttttgtgcatagcactcattttatcagagctaattggttaaatggggactgttgaaacttaaggaatttctcctttcacacatttgagtgcttactttgaaccggatactatacccag

SEQ ID NO: 264379 - DNA, 436 bp, Homo sapiens
aggttgttcctggagactttgcgtgaaggctggtgttgacctgaagccctcctgcagctcgttttgcctcccttgtgtttttccttacatcttttcccttctctggcttccatccattctctgtgaagaggcagctcactaggtgagctgtggctttagagcttctttgcattcagtagatttccaggccattttctccaggcttttagtgcatggcgaaggcatcattggatgagtatcatcaggagggaaagggcagatggctgtgtgtggactgttaaagcagtgtgtgggcacggtggcacgcacctgtagttctagccactccagaggattgcttggagccaggagttcgagatcagcctggcaacatagcgagaccctgtctctaaaaaaacaaaaaagtttacaaatctaggcttttaatctgtatata

SEQ ID NO: 264380 - DNA, 425 bp, Homo sapiens
caagtcctagttgaactaaatgattactgtacatctgaaatggaagcaagacaaagaccaattattctaaggagaaacaaaagagggcagatgtcttaaggtgaatccaaaactaaaaggtccatatccaggccgtaatccaagcagaggtgtgaacaggatatgagaaaaaatctaatacctgtcattggtgaaagtacttatgagtggtcagttggtactaagaaaggggcgtggagaaaggaaatacgacagcaattgtacccactttgggatagtgatattcataaaaagaatttccttgggagcagggataaacatcagaaaacagagttttagaaaaagagaagatcaagaagtaccacgttcgatgaaacactgagttataggacagtgagtatcattgatagaatagaatttaattt

SEQ ID NO: 264381 - DNA, 409 bp, Homo sapiens
gatcagaccacatggcgttacagtcccttccactctgagagggagctgtgtgatgtgcacaaatgccctgtacttctcctatgacaactcgcagggccctatcacagggagatcccacagcaacaccatgactgtcaaacagcctcagtttccagacgctcctcagacatgtccagcctggcttcctggaagctacttctgcatcttgtagaagagtctccagggcatttcagaaccaagggaaacattgtagcctattggaaacctaaccacatgggatccactgtagctaatgcaatgtaagttatccacatgcaatgagggaatatttcaataacagaaacgctccccttcccaagttgccttctttttttaggctgttaaaacataatttgcctgacagcccacc

SEQ ID NO: 264382 - DNA, 660 bp, Homo sapiens
agagtcctcccatcccaatgggtatgccagcttgtacatgtgtcactctatggtatctgttcatcctagactcacattgcacaacgtcctttgattcttcccttctgtgaggcttgtagtctaaatgtttgcaagcatcactttgcatctgtccttgagagaaccttattttctgtgtttctgaaccttctactgttttattaaagttacctggaatcctgattacaacaccctcaaataactactctcttaatatccattgatgccaccttcccacttcatggatctcctgtagagaacattattcaaggatttgatgatgaaaaagaggctaaatattactggtaggagaattaacttttatggctcatgtttcttatattcctgacctgaaactgaattcacttatggttgtgtgatatagatcttatttgtacaagttattaaataataaattatgctaagcaatatcctatgtcctgtgaaagtcaacgttgaatatatatcatttttcttgaccaaccttgtccaagtggtctcctgattcataagggctcttatgttcctgaaagaaattaggtaaccccgagagattttgctattccagaaacaatgttgtgttttatttataatctatcaattgttctccccagtattttc

SEQ ID NO: 264383 - DNA, 418 bp, Homo sapiens
atttctgttttcttttaagataggtatatttcagaattatacaagactaccacattgtgaataataattaacatctgtgtgctattacctcacttaaagaagtaaacattagcaatgcaatcgaagccctttctacagccctccacaattacaagccccttcactgctctcaggtaaccagtatcctgaaatataaattcattattcccacgaatttttttagaattttactgactctatgaagtaactctacccatatatagcatcgtttgcatgttttaaactttgaatggtttgctttgtatattctccaacttgctgtttttgctcaacaggagcgagttaagaatgaggactttgttttgttcactgctatatccagagaacctagaaaagtgcctgacatataggaggaact

SEQ ID NO: 264384 - DNA, 313 bp, Homo sapiens
gttgccagcagtggtgggtagggttgaatagatggagcacaggacatttttagggcagtgaagccattctgtatgatacaaccattagagctgcacaagagtgaaccctaatgtataactgctggcttttgttaataatattggttcatcaactttaacaaatgtaccacactaatgcaaggtattagtaacaggagtaaaatgagggattggaaggatatgtatgggaactcactgtattttctgtgcaaattttctgtaaacctaaaactgctctaaaaaatagtcgattaaaatttttttaaaaaaacga

SEQ ID NO: 264385 - DNA, 2055 bp, Homo sapiens
  misc_feature (25)..(25): n is a, c, g, or t
  misc_feature (336)..(336): n is a, c, g, or t
  misc_feature (1175)..(1175): n is a, c, g, or t
  misc_feature (1822)..(1822): n is a, c, g, or t
  misc_feature (1858)..(1858): n is a, c, g, or t
  misc_feature (1898)..(1898): n is a, c, g, or t
  misc_feature (2047)..(2047): n is a, c, g, or t
  misc_feature (2050)..(2051): n is a, c, g, or t
  misc_feature (2053)..(2054): n is a, c, g, or t
tatctgagttcatacaacagctacnatacatccaagcagtatgaagatgggcaagttatttaactcatgggagcctcagtttcctcatctgtaaaggagagaggctaagaatatcttccgtagaggactgttttaagaattaaattacatgtaatattatagttcgtctaaaaggaagggatgcttatttgtttcatttcactgttataacactggtacctaaaatagtgctggcacttggtaattctccttaagtgttaataaaaaataaatgagataactgttcgaatctcacgtatttcatgttactttcaagttgctgcttttcacatctangagttctttcctcatgctctgagacttagtccttcgcctctccggattttattaaatgatggatgttctcactgtcagtgtaatctccaaggtcctggcctttcctgaactggggtttgggtgcactgagacggtaactacagccttactaccccactactcaattctttactcaagagaggctgcttagaaagtctgggtctgcagaatctcatagtgattccaatctattagatctgtaggatatttccggataacatatcatgtgctttggtgattgtttctgaaaaggcaatagacttgtaagtgttctatgtgtcatgcatattggaagtacactaaatatattactacttcactggggactctcttgacaataatgtgaattgctgagggaacagaaatcaatttttaaagtgtttctgacatcaaaggtgaccgctgggcttcaggaaaagagttcaaagtaagattgacttcgtgattgagatattcataagactcacactgcaaaggtaggttgggcattcttccactgcccaagatgcaagcgaatgatgcaggcagattccaagctgagtttgctgagataagggcctccaaggaactgagttccggcaacatgcattgtgagtacccataccatcaggtctgtctttgtattctgttctctgaacctaaaatgccccttcttcagttctctattaaaccctcttcacctgcacatgcttcaatactcatctcaaatgaatccatttctggctggcagagtttttcatctatcatttttttctccctgtcttatagcaaatattggatcctaaccttagttattttcncatgtaactcttttttttaccctacgatccttggcaacaggggatatggcttacttatttctgtgtctccacaccttgcttagcatagagccaaaccaattttttttttaattatcatacttcaggtttagtagtatctgcaaaaaaaaagtattctttatacagtattatctaagtggaaattttattttaaaattcaatagaaataatataaattagattttttttaaatctcaatatgatggaccaggttggccaaataccatccacagtgagggttattaaacggtagattcaaacagcagcatggtccatcagaaataatactttattcatttacttcaccatttattgtgcacctactatgtgccaggctaaaatcataagcagcttacattttacaaagggaagatataatatgcagctgcaaaatgccagcaagaaaaaaatataattttgtgataaaagtctgtaatcaagtgagtaaagtagaatattataaaaggcatcagggagatggtgaatttggagctggattttgttagctaaacacatattgtccaagccaacagcaaagggaaaatttgggccatcttagctacattaaatggctacacagtccatgtcataaatgcaattataagttnatggtggtctatgtatttggaaacactgactcaatnttcagcaaaagtggtttgaaaatgaaatgggaaaatacantaagcaagcagagaccataaaagaggcactaatgacataaacattcaaccttccttacaaactttgaaacagaaaaatggtggttgcccagttttttgttgttgtttgtttgtttttgagacggagtttccctctgttgcccaggctgnagnncnnt

SEQ ID NO: 264386 - DNA, 373 bp, Homo sapiens
gaaattataataaaagttaaaactaaattacagcccagggcagcagtttcaccaacttctctttttcctttctcaagaagatagatcgggggccaggtgcggtggctcatgcctggaatcccagcactttgggaggccgaggcgggcagatcacaaggtcaggagttcgagactagcctggccaacatggtgaaaccccgtctctactaaagatacaaaaaattagccaggcgtggtggcacactcctgtaatcgcagctactcgggaggctgaggcaggagactcgcttgaacctgggaggcggaggttgccgtgagccgagatcacgccattgcactccagcctgggtgacagggtgagactctccatctc

SEQ ID NO: 264387 - DNA, 571 bp, Homo sapiens
aatttactagttttcttattacttatgagggtgtgttttttgtgtgcttatagaacttttctaagtgttcttatagcagtgaagcctacaaagtaagagtttccagattccatccgttcttttagctgacttgaatgactctaatgcagtgggttgcaggtttggctacttacctatgtactctgtaaacatccagaggcccagggatattctgagccactgtgtgtgaatggagtttggccatctgtagatttccgcagtctctccaggtgatcgcactgtgcagcctcattgctcataaacaaaactttaatatgcttttaatgatctttcaagtgtgttgaggatttctttcttgattttgaggaatatatgtcagtatatttttcaactttaagtgttcgtatatatattagtaaaaacattgaaactgaagtctgggggaagtttgtggaactagaatattagaatcaaaagtttggatttaaaatctaatgtgactatcgagtggcatgctggaaatttttaatttatttggccatcttttagtatgccattcttaatctcatct

SEQ ID NO: 264388 - DNA, 532 bp, Homo sapiens
  misc_feature (46)..(46): n is a, c, g, or t
  misc_feature (49)..(49): n is a, c, g, or t
attcggcacgaggaattacaggcatgagccactatgcccagccacnttnttaaccttaaagggctctgaatatggagatagaacactggagtcgaagtcccagccccctctgtcgctctctctgaagctcagtgactactccagtattaaatgatgcatgtataaagttagtcactctatcattatctgtaatagcagatgattggaaatgacctaaatgtctcataataaggaactagttttaaaaagcatgttccattcatgccttgaaatactatacattgaaaaaataaaaattgtataaatatgtgaaaaaaacagtgtgtatattatactacgacttacttctttgtgcatagatgttctacaaggctatataaaagattgttaattatggttgtctcttgggagggggagtttagattgtataatggggtagaaggctgacttttcgttgtttactattctgcaccttctggattttgtactatgtatatattttatatattaaaatagctttatataaataaaa

SEQ ID NO: 264389 - DNA, 570 bp, Homo sapiens
  misc_feature (46)..(46): n is a, c, g, or t
  misc_feature (49)..(49): n is a, c, g, or t
attcggcacgaggaattacaggcatgagccactatgcccagccacnttnttaaccttaaagggctctgaatatggagatagaacactggagtcgaagtcccagccccctctgtcgctctctctgaagctcagtgactactccagtattaaatgatgcatgtataaagttagtcactctatcattatctgtaatagcagatgattggaaatgacctaaatgtctcataataaggaactagttttaaaaagcatgttccattcatgccttgaaatactatacattgaaaaaataaaaattgtataaatatgtgaaaaaaacagtgtgtatattatactacgacttacttctttgtgcatagatgttctacaaggctatataaaagattgttaattatggttgtctcttgggagggggagtttagattgtataatggggtagaaggctgacttttcgttgtttactattctgcaccttctggattttgtactatgtatatattttatatattaaaatagctttatataaataaaactagccccatggctgaataaattttattacaattttat

SEQ ID NO: 264390 - DNA, 784 bp, Homo sapiens
agcggggggggcccgtccgactcgacgggtgagcccgtggttcccggctccgcaccgtcgcctgcctctctgcatgaccaccccgcgtacccgtacccctcgatgccgacttccccacgctgcccctttcgcttaccccatgacgcggggcctcatgacgcaggtgtctgtggccgaatgaggaacttccccgacaagaagtgccgagcttaaggacgctactaagggggcgggatcgccatgtggattttgttttaggtgctgtctctcctgttgttgttgtcctttacacgatggtgttgcaagaaaatggatatggtgttgaggaagacattccaacattactaatggctgctagcagtatggatgacattctggctatcactggattcaatacatgcttgagcatagtcttctcctcggacaaaacttacgttgaagagaggattccttgtttggactacgtgtgtttctgctgtcttaggcagccaacgtatcggtttacatggatctggcaggattatgcacactagtgttgagtttcattgcacgggacaaaatggtcccaatgaacacgatgaaagtccaaaagattattaccaaatgtgtgggactatttttcaaccacttctttatggtataggttggacgcaagaagtatctgttcatcgcttgaactcacatatcgtggcatatctgctggcactctgagtttgaaccttatgtgtccacatttgaaccacatatctattgatgtgctatgtggtttaggattaggacgaac

SEQ ID NO: 264391 - DNA, 653 bp, Homo sapiens
agcggggggggcccgtccgactcgacgggtgagcccgtggttcccggctccgcaccgtcgcctgcctctctgcatgaccaccccgcgtacccgtacccctcgatgccgacttccccacgctgcccctttcgcttaccccatgacgcggggcctcatgacgcaggtgtctgtggccgaatgaggaacttccccgacaagaagtgccgagcttaaggacgctactaagggggcgggatcgccatgtggattttgttttaggtgctgtctctcctgttgttgttgtcctttacacgatggtgttgcaagaaaatggatatggtgttgaggaagacattccaacattactaatggctgctagcagtatggatgacattctggctatcactggattcaatacatgcttgagcatagtcttctcctcgggctgtgctaggtcctctggctctagaaacagcaagagtctccgcaccccacttggaaccatatgcgaaggatgtgatgacagtagcatttttagccatctcgatcacagctccaaatggagctctacttatgggcattctggggcctaaaatgcttacacaccattatgatccaagcaaaataaaactgcaattgtcaacattagaacatcattaaaaagtttacctgtc

SEQ ID NO: 264392 - DNA, 519 bp, Homo sapiens
aatttcacaaatactaatttggatacagagaccatcaacatgacagccaaggatcaaacccctgcatggcagcagcacctcattcatgctaattgacagtttcacgtgaccaaatctggtcagaggaaaagcaagaaagcaattctaaaacagaaatatggccggacatggtggctcacccctgtaatcccaacactttgggaggcagaggcgggcagatcggttgaggccagaagtttgaggccagtctggccaacacggtgaaactctctctctactaaaaaaataaaaataaaaattagccaggcatggtggcgggtgctggcaatcccagctactcgggaagctgaggcatgagaatttcttgaacctgggaagcagaagctgcagtgagccgagatcgtgccactgcactccagcctgggtgacagagtgagactccatctcaaaaaaataaaagaaaataaaattctgaaatatctgaaagggctgtaccttccacctaaaggaacactggca

SEQ ID NO: 264393 - DNA, 593 bp, Homo sapiens
aagtagaacctcatctagaaaaaattagaagtcatttggctacaagaaatcatgaaagaagaactgggatgtgatgttttccctgatgtttttcgttggctccctaatggaataggttcccttactgttctggcatacagattctctttgtgattctcattcttgtgtgaattatatgtgtactattcaaataattaatgctatatatttcctgcttctgagaaaactgattttatggtatctgaagactagaaatgattcaacgagtgatagctgcagacttaactgaggtctctctctcctcctttttttcttttcttctctttttcttttttttctactcggtgtcacccttttattgggcttttgggtgctcttaaaaattcctcagtgaggcagctcctttcctcccctgccctcaccgtgggaaagactatctgggaatgagctttcctggcaaagagggacacgttggctgagcttttgatcatcaatgctttcaagaagaaagattttttaaagaatttttatctgaggaatgtgagccacttcacatgatcagagagacattaaatcaagacagcaaccacatt

SEQ ID NO: 264394 - DNA, 454 bp, Homo sapiens
tgatagaatttggtcaatagaatcccctttctattatcaaacacctaaggagacattgaagtataaaaagaattaggcttctccttgtaagttaaaaccaaaagaaatgaaagtctgtatttctttccaacccattttcttaattctgatgactctcagccacagagtctcagttagatacctgcatagaaacagggttactcagcagttttattgataatttttggcttaagatttacaagttaattcagaacatttaatatgtcacaatacttaatgaggccagagttaataatgcaaataggattattatagctcacaaaattacaaatgtgcaagaaaattttcagaccttatgataattaccctaggaaaaagaaaaaaggaaatggtcccatatcttgacacttagcataagccagacacacattgcttactgttattaaaaaatggc

SEQ ID NO: 264395 - DNA, 589 bp, Homo sapiens
caaatccacatttatttgagtaattgtacttggttttacccatctttctactgcagccccaattataaataccatatggaccatacttttatatgtctctgtctcacatcatgcctcctgatcacacacacaaaaaaggttccgtaaggtttaaaaaatggctagaaaagaatggaagagtattctccgtattcttagatttaacaatcattttatttccatccagaccttatggaaagtccattggctgaaaacagaacagacaaacaaacaaacaaataaccctgaatgtttcatagagactgcccagaataacaggatgtattgtatggcctttggacatggtgtgcttcctttacatttgccaattcaagagcttatggttgggatgatcatataggccagtttgtctctgacagtcttgctttttgtgcctgtaattatcgataatatcttcccttcactctcaaaagagttctggtttagatgagaaagtatatggtcactctccctaaggaccatttttatgggcaaatattatagaactgggatagattagcatctcacccatttcttcccaaagctttag

SEQ ID NO: 264396 - DNA, 127 bp, Homo sapiens
ttttttcactattggatatcctattttgtgaggtgcctattttaaccttttgtccttttttctgtcgattcataggaattctttatctattctggatataattcctttattgaatacatgtattgca

SEQ ID NO: 264397 - DNA, 401 bp, Homo sapiens
tattattatttccaaagacagtccaccctaattaccaacaggcattcccaaactcttcttagtctatcattaatctcatcctttcttctatctttagatatttggtagccaagggctgggcgcagtggctcacgcctgtaatcccagcactttgggaggctgaggcgggtgaattacttgaggtcaggagttggagaccatcctggccaacatggtgaaaccccgtctctactaaaaatacaaaaattagctgggcatggtgtcgtgcacctgtaatcccagctattcgggagactgagttaggagaatcatttgaacctgaggaggcagagtttgcagtgagctgagatcgcaccactgcattccagcctgggtaacagagtgagtgagactctgtctaa

SEQ ID NO: 264398 - DNA, 232 bp, Homo sapiens
cacagtagccacctctcagtcacagcatgacttctggaacttgtgcctgcttgcttcaaacccaccgattaaaactccctgcaggaaatctgtatagagaatgccctagactccaataaaggcaagggtccttctgtctctctccctcacatgctccctgacttctgtgtgtgtggcctctgggcatgccgtgtaccctcaggacctgtaagtaataaaatctttatttcca

SEQ ID NO: 264399 - DNA, 392 bp, Homo sapiens
gagaacgtatgtactcacattctgtgaccatatggggcataatgttatgtgtatgtctctgtaagtggaattaagggtgtttagcttgctggttttagggttttttggggtttttttgccactcttctccagtaggaatctcctcccctagcacagggtcaataaactttttctgtaaagggccagatagtaaggctttgcaggccaaaaagtaaaattgagaatattaggtagatatctagttaacaggaaagaaaatttttttctacaaacttttttttttttatgaaatgaaaaacatttatttatggaactaaaactttaatttcatattattttaaggtatcacaaaatattattcttttgatttctttcccaatcatctaaaaatc

SEQ ID NO: 264400 - DNA, 443 bp, Homo sapiens
ttgtttaggccaagttaaaaggcactgttaaggagcacactgttaaaaggcacacctgattttccctgaaacaatctctgtacatgctgaaataattggattcccatcagaattctgcttaaggtaggtgacaactaactcctgattctttggagaaagatcagaacaaatgtctcatcaggagagagatttgaacaagtccctccctcagcctgatgtttgtcttcccagtctgtggcaaaatacatacactgggagggaaagaggcatcgaagaattgtgaaagaaaggaagaaaggggggaaggaaagaagtaagaaaggagaaaaagagaagatgctatatccaccagctacatttactctaatacttgatgaacatattacataactatcagtataagtgtgttttacctcgtaaatacaaatctcacaccttgtaaa

SEQ ID NO: 264401 - DNA, 444 bp, Homo sapiens
cattataaagcatgtacatttttaaaataagggagtttcaggtaagaaataatgcaagcaaagaaatggaagcaaatatattgaaggggtaatgatgactaaaccagtccaatttgaggaaaggatttaatagagaaagggacaaatgttccacatgattttggggttagttcatgacagttcttgtggggctgaggtgggcggatcaggaggtcaggagtttgagaccagcctggccaacatagtgaaaccctgtctctactaaaaaaaaaaaaaatcagccaggtgtggtggcgtgcatctgtaatcacagctatgtgggaggctgaggcaggagaatcacttgaaccctggaggtaaaggttgcagtgagctgagatcgagccattgcactccagcctgggtgacagggcaagactccatctcggaaaaacaaaacaaaac

SEQ ID NO: 264402 - DNA, 494 bp, Homo sapiens
cagctgcagctctttctctagctctggaattgcttcatgtttcccagttcaaattcttgagaacaagagaaacgtatgggcttcttctttttgtatgaagccacagcctacattggtctgaggatcatggactgattgcccttgagtcaaagaaccatgtctttttcgatcagctgtttttgattgctggtagggtctcaactgtcaggctggctttgcccctttagcagtgcctatcagcagatcatttgagttagaataaactgagcaccagcagaaatggtgatttattaaatatatctaggcctggtgagtgatgaatgtcaggagtcaaggtggatcaagaattcaccaagataagaaatacaagataaatggatttgatggctaatttgtgagcttagtttaatgaagttactgccattaacaatataattaatactagtaatatgccaaaacttagccatgcttatttgtagggcatacttaattac

SEQ ID NO: 264403 - DNA, 230 bp, Homo sapiens
tacactgtacttacatttacttgacccaaattgccgtatcaatcacatctcctatcccttttgcagttccaggttggaatcagtatttcaaataaagtagggacacatctaaaatatttgtgtatcggtaaaggtgtttctggctatttaaactcaagcatcctttgccacagtagtatctccgttttgcacggtactactgtctctcaaaccagttacatctgaaaacc

SEQ ID NO: 264404 - DNA, 569 bp, Homo sapiens
gatgatggttcctttccttacctaccctgctgtgtgcaccaggtcaagattttttggacctgcagataaaatgtttcagccttaggagttccccactgtaagtaaaattttctggcaagctcaatactaccatctgatgagaacaatgtagtctgttagctgcctgcaagatgactagtctatactcccaagaaaacacccccttcagaacaatagagaaggaactgttttgcatgtggaccacttaaggtccaatttgaggctggtttggggaaaacatccactcctcctcaaacctatctttagacttaaagtcaacttaaatgtcattgagtttcccaccctgggttaagcactttcacttatctttgcttacactatttttctatctaaacatacatttttaaagcagaaatcctcatttaatctttaaaacagatctgtgattttgaaacactatttaatcaaaattcagaattgtggtagcatttttgctgtttgtaagttaaacaaaatagattgtaagtgtgcaatgccattcattcattcaactaatgtgccaataattt

SEQ ID NO: 264405 - DNA, 331 bp, Homo sapiens
attatcttttatcccaaggtatgatcttttattcctgtatatattcaatcttctgtaggtttcattaggccctagaaaatatagctttcccttctgtacttgcaatgggaaataaaactgtctgctggattggagagtttcagatgcttattcattcatcttttaaagatcctatttatttcatttataatccatttgtcttcttcttttactgacattccaaatgtcagattaagatagggacatttaggaactacatgaaaggaaaagtaaatgggcataatatatacatttgtgatgaatgaagaccttttttcctgtacaagaggat

SEQ ID NO: 264406 - DNA, 305 bp, Homo sapiens
ctccatccgtccagtggcgtaagactcagccataaagaggggcgaggcgctggcacaggctaaagcacggaggagcctcggaaacacgacgctgcgcggaagaagccacgcacacacggccgtgtattgcgtgattccacggatgtgacacgtccagaacaggcaagtcctcgcgaacagaaagcacactagtgtttgccgggggctggtgggtggggcaatggggagtgactgcttacaaggtgtgggatttccttttggggatatgaagatgttttggaactaaatagaaatgatggttgacc

SEQ ID NO: 264407 - DNA, 393 bp, Homo sapiens
cacgaggagaattcaaacagcatgaacattttcaaggctcttaacacatattgccagattatttccataaatatcatatcaaattatactctcaccaatcatatgagtgtctgtagtctggatgcagtggctcacgcctgtaatcctaacactttgggaggccaaggcaggtggatcacctcaggtcaggagttcgagaccagcctgcccaacatggtgaaaccctgtctctactaaaaatacaaaaattagccaggcatggtggcaggcccctataatactactcaggaagctgaggcaggagaattgcttaaactcaggaagcaaaggttgcagtgagctgaaattatgccactttactccagcctgggcgaaagagtgaaactccatctc

SEQ ID NO: 264408 - DNA, 419 bp, Homo sapiens
aataaggtatttttcttggttgagaagaattactggagttcagcattttagtgaacagctgttactctgggataactatgatttcataacagttgtaaagcctattgttagtactagagtctgctgtttacatgggacactgctgggtactgttgaggaaaccaaaaggcatgatctttgtacccaagaaaggtagagatagattgtaaacaccacccataggaaactattcataatttccacctcataggtaggcaacagagtctgttggttaaagggcaatctatgaaataatatggccttggttcacatcttgtctctgctatttacagctttgtgtcttcttttccttagctgtcttatctgaaaattgggtatatcaatcacacctatcttaaaaaatattatgaggattaata

SEQ ID NO: 264409 - DNA, 357 bp, Homo sapiens
  misc_feature (335)..(335): n is a, c, g, or t
  misc_feature (344)..(344): n is a, c, g, or t
gacattctcttacacaaccacagaacaattatcaaaagcttggaaactaacattgatacaatactttaatctacatacctcattcagatttcaccagttgtcctaataatgtaataaaattatttctggattatgtctatctcatttatagtaaaagaaaatcctggatcatgcattgcactctgttgtgtatctttagtctccttcattctgaacacttcctcagtctggctttatctttcctaacattgacgttttataaaaatacaggccagtttttttttcctttttgagatggagtctcagtctgttaaccactgcactctagcctgggngacaaagtnagactccgtctca

SEQ ID NO: 264410 - DNA, 481 bp, Homo sapiens
gacattctcttacacaaccacagaacaattatcaaaagcttggaaactaacattgatacaatactttaatctacatacctcattcagatttcaccagttgtcctaataatgtaataaaattatttctggattatgtctatctcatttatagtaaaagaaaatcctggatcatgcattgcactctgttgtgtatctttagtctccttcattctgaacacttcctcagtctggctttatctttcctaacattgacgttttataaaaatacaggccagtttttttttcctttttgagatggagtctcagtctgttaaccaggctggagtgcagtggtgcgatcttggctccctgcaaccaccgcctccccagttcaagcaattctcctagctactcgggaggctggggcaggaggatagcctgagcccaggggagttggggctgaagcctgggtgacagaggaagaccttgccttcaaaaaaac

SEQ ID NO: 264411 - DNA, 337 bp, Homo sapiens
gctgaaatctttttcatttaattttatatttgttggggtttaaaaatcagtgcaggctgggcacagtggctcatgcctgtaatcccagcactttgggaggccgaggtgggcagatcacctgaggtcaggagttcgagaccatcctggctaacatggtgaaaccccatctctactaaaaaacaaaaactagccgggcgtggtggcgggtgcctgtagtcccagctactcgggaggctgaggcaggagaatcgcttgaagccgggaggtggaggctgcagtgagccgagattgcgcccctgcactccagcctgggctacagagcgagactccgtctcaa

SEQ ID NO: 264412 - DNA, 392 bp, Homo sapiens
tgcattctgctgtaatgaaatgaatcataaaatatgttttagaagaaaattactataaaaagtttcaaaattgttatttaaaaaggaccccgccaacacgcatattgacccaaggaatcttcgggatggactctgcttctgatcacatcttcacctgctcgaggatcacctgtggcacgtcgggctctgaatgcaagccccaggacaccccatttcatgcgtctgcattcttaacctcactgcccattaacatgcatctcaatgcatccaaaataccgcacccccatcacatcagagagcattaaaaataagccagctcaatgcacaaaaatgagggcgacaatcggaaacacaatgatgtttctaaagaatgtccaaccttaactgcagct

SEQ ID NO: 264413 - DNA, 463 bp, Homo sapiens
ggattgagaaaatggaacagtactgactccaagttagagaaaagcttgtttacttgaacacaattattgctttgcttgagtctgcagattattaaaaatgccttgggaaaacaggaccttcaacagaaataaaagaaaatacaccaaccaacaactctgagaaccaacaactcactctgggactcaacagctctgggaaccaacagctctgggaatgggctggccagcctaagaataggctgatggtgcctgcagaaggccacaaggcattgaccaagaaagcaaggattaactgcccatctgagactctgcaggtttcacaagggtgctttaatcatctcccttaatttcccttaaaaacccctgatctggagtcacaactccaggggaggtgatctttgaaaacaagtctaccacccagaggttgctggcttccttaataaagctaactttcctttcacca

SEQ ID NO: 264414 - DNA, 691 bp, Homo sapiens
gctaacatagttacagtttccaaggactaggatgtggacctctgaaagactattgttctgcctatcgcaccaaccttcctgtctttctgtttgcctgttcttgacagccaggccatgaacaacttctcatgagtgtatatttgaactatgctccactcctcttttcatccaaagtgtatgaataggtctacaagctgatgctttgaccatgaggaagattttttttctcactactttctttcaagatcttcattgagtggaattctactgtggtcattaacctgtttttgcttgcatcaaagtatcagccaaccagtcaggaatttttactaccatatgtctgaactgagctgtgcaatagtggtggatgacatgaggcccgtataatctgatgatgttgcttgcttgtgccttcagttcctgcttgtagtcaatcctggctaacctatgtccatcttaaaattggttatttctgggtctgtctctgacttgttgaattttatagaacccaacttatgactcttccggacacatggtcaattatgaggtgttctgtcgctacaggtgcccaatggcaagccaagaggtattttcctaaaagatatgcatttctttaaactgctggataaagatatggttcgggtttctaattttcccattggggcacttcataaactctaaagagtgtatt

SEQ ID NO: 264415 - DNA, 398 bp, Homo sapiens
caacagcattctttaacatcttcctccaccatctctttgctgttcctctcttttactcatctttattttcttagcactcatcaccatctgccacattttatatttatgttttaatatttttcttctctttagagagtaagcatcttttctagagcaaggacttgatttgtttacattttgctgtaatttgctgtgcctaaaaagtgcctagctcatcataggtgcttgataaatatttgttaagtaaacaaatgaatgaatgagccttggtgtgttaaccaatgaatcatttaatgtattgtctaatagcagtctatctcccatgatattgggctttgaaaaagacaaacaaacaaacaaaacaagggagaacaacaagggagaacaaacaaacaaac

SEQ ID NO: 264416 - DNA, 365 bp, Homo sapiens
ctgttagcaagacttcttaaattctgcctagtgataatcatgccataagatcatctccttcagttacctttttttgagtgtgtcccaaccacctagtacagttagttgtgtatgatcttcttgaggagcaatcagaagagacttgtgaaatatcattagcctgttagccttgttccagtgttttgttgcttacccatcaaaactttaaacttatattcagcatatttgtttctgccttaatttaagctcagacttcctttgtagcttcaagggaataaagaacaattgtgtgacatcctcttttttaaaaactttgaaggtaaataagggcaatgtgaacatgagttagtataaaacactgactg

SEQ ID NO: 264417 - DNA, 452 bp, Homo sapiens
accctatctttcaggattctcaagacacagttttcatggagtgataatgaaaggagcagcagccgccttaatatcccagagagagcagacggaccagaaggcaacttaaaccagattgttactgaaccccatgcaaactttccctagttcttgcatgaggggtatgtaccatgccaaggtctttactcccatatcaaccagaccttgaaggaggctcacttcaacagcctgcagcagtgagggcaagctccaacatgatgaattaggacttccttattccaacctaaactgtgtttataaaagtaattgcatacacaccaaaaaaaaagtctattggtttttaaatctaaattttaagtaacaagttaatgggcagttgtttaattggggttttacttcactgctgtacttttaaagaggctgtgaataaatgtttatgaaattaaaaaaat

SEQ ID NO: 264418 - DNA, 666 bp, Homo sapiens
acttcagatagcatggcagtcttctcagtcattcagttctcagctctaaagtccctttctcagatggcataaacagccacccgtcactcacaatactttatgaattcactaaacttatcactatcttaagttagcttgtttatttgtatctaagttaacatctctccccaatagaatgtaaactccatgagagcagggattttgtctgtcttagttgcaacctaaaataatgtcagacacataatagagctcggtaaagacctgttgaatgaataccacccacatagctggaagttgcttgggaaagtggcagaaagatcaagctgactacagaaatcagaaccagcataaaagccagttagcagcttgaacagagggctgaggtacttttttccaactatgtgtcttccttacttctctggcacatgaagcctttacctattctgagcacacaacagggcaaggaggtatacacaacagcctctagggtgcaatgggccaccttcacagttagctgacaagaattcctcatggcaccaaataggcaaagagggacctccatatgtcagtgggagctcttgggcagccttgataccagaaggaggaaagttacccagtggcagggcaagatcacaaagccaacaagcactcactaacccccagcca

SEQ ID NO: 264419 - DNA, 298 bp, Homo sapiens
ctcataccagtcgtgacaatcataccgataacaacactgagctgctcaggtttgaatcctggctctgccactttctacctgcgcaacctggaacaaacaactcaatctctccccgtaccttggttttctcacctgaaaaatgggaatgattataatagtactcgtagagttgttacagagattaaattagataattcagtactgggcacagaaaaggggttttgttttgtttttgagatgcagtctcgctctgttgcacaggctgaagtacagtggcgtgatctcagctcactgcaac

SEQ ID NO: 264420 - DNA, 560 bp, Homo sapiens
gtattggccactgtttggtttgtgtattggtctaggaaagaaatgagaattttattttaaaaagccttccagcaggaccccagcagagactgggcaaacacctcagcgacggactgtaaacagtgggaaggcccagaccctggccccgtggccacgagctgcagccccacggctcacgtcagccttcctgcccttcccgggcctctctcccacggcactcacacacagagccttttcaataccctccggcagaacagaagaatccatttccacacgccagcacgcacgttcctcacaccatcccaggggagtgggccctgccaagaggccagtttatggacctagaaggacagacagggctggggcccatggtcgcggcgggggggtggtccatggacagaaaaaagctcagagccaaatcctgtgctcccaggtcccccagctactcaggaggctgaggtgggaggatagcttgagcccaggaagcagaggttgcactgaaccaagatcacgccactgcactttagcctggggggcagagtccaaactttggggcaaaa

SEQ ID NO: 264421 - DNA, 1018 bp, Homo sapiens
agaagcagatggtcagcccggtgcatccaaggaccagatgcgcgagtttctggcccaaatagaaaaagccagtaagctgctgttacagtaccagttctagattttggatgatgacgtctggacatggaccagaagagaccgttttcaccttcctgggtcaggtgcagacagatgttagcccattgttaccccgattagaacttctaggcctatgcccttgtgtgttgtctttcttttttttttttaacgttaactctgtgtgtttagtagttcattcgttttacttctttgcaggctgaacataacttctttttttcaaagttccctgtgttgtgaactgagcttgggtgaagtgaaatctttgaggtaaggcaaccctaatgataaaaatggaaagaaagcctgtgaaatttgggagccttcagagataacattttagagtcactgcctaaatattgaaatgccgccatttgttgtttggggggatgtggagctaaattgagaacgggagcacacatctgccttgactgctaagtatatccatctctactgctcacccataatagaatttttatgtgtgcactcactagtcttggttttatcaacagtttaaaggaggaaaaagagaatgaagagacttcatttcttggtttttcccttacatgtttgagtgttgtccctggtaggccctagttctttttcattattatcactaaagtggcttttgttctttgtttctttagaaaggacaacagagaactgaaaatacattatttcctagtatgctagtaagaagcagaatattactattccatttttattttctggcagatgaagcttcagagttagtaaagaaaatttccctgtgccatctaatgagtgttactgaacaaaggatttttgaagtctttcacccagatgaggaaccattagatagcacaccttgctctaaccattagatagcacatcaagaaagcaaggtcagttgagaaattgatgctcttttgaaaatatcaag

SEQ ID NO: 264422 - DNA, 459 bp, Homo sapiens
gcaaatttgtcacctagggaacatttggcaatgtctggagacattttgattgtcaccactgtgtggggggctgctactcactggcatctagtggttagaggccaaagatgctcctgaacatccacagtgcacatgacagcccccacaacaaagaattatctggcccaaaacatcaatagcaccaaggatgagaaactgctatagtcttataactagtctccctacctcccatattaagccattccagtcatgatcattataaattccaattccctgattaaatctattttgttattaatcataacttgaaatcccttttcttttcttttcttttcttttctttctttctttcttttttttttttttttgagacagagtctcgctcttttcgcccaggccggactgcagtggcgctatctcggctcactgcaagctccgcctcccgggttcacgccattc

SEQ ID NO: 264423 - DNA, 510 bp, Homo sapiens
tcttcttctttttctttttcttctcttctgtaaaagtgccatcattattagttcatcttacttcaactacacctatttaaatattgaaaaatactcacccacaactcttaaggctggaatgggcttatttttcactgttttaggaaatatgccaggttttcttggtgcttattctggtgggttgttaagaaactgaaatgattgcaaaagttactattttaatacttgttttcttttctttctttttttttttttaggatctggacttacctcaattgcttttgctgcttgttcttttgtttcaaattccacaaacgcaaatccctttggatctccagtagacttataatgtggtatacttatataaacaacattgccacatttcccaaatactctttcaatccagctgtgattaacatttttgggaagtaactcctattataaattaaaagcaatattagagtttttcacaatcagaatgtcaataaatttttaacttaaaaaaaaaaa

SEQ ID NO: 264424 - DNA, 288 bp, Homo sapiens
tgtgactttggaggtgctgaagttaaaaaaaacgggtgctagaaactaatactagacagttggggtgggtcacacctataatcccagcactttcagagtctgaggcagatggatcacttgaagtcaggagttcaaaaaccagcctggccaacatgtaaaacaccatatctactaaaaatacaaaaaaaattagccacgcatgggggcagacatccataatctgagctactcaggaggctgaaggaaaaagaatcacctgaacctgggaggtggatgtttcaatgagct

SEQ ID NO: 264425 - DNA, 314 bp, Homo sapiens
atgacaaatcattgagcctcttcataccccaacttaaggagtatgggccagaaggattggggcagatggtgccatgcaataagctgtaaaagtaaagctgaaggagtaaaggctctttctctaagatattggtgatggcagtgaaggatctgaagtctgagcggtgacctcgtttcattgggtgaattcatctggcaactttgagaaatagactatgattaattaattaatgtatctatgtacgcatacatgtatgtatgtgtgtgtgtaatatacttaacgaatactcataaagaactatgtgaattacataa

SEQ ID NO: 264426 - DNA, 508 bp, Homo sapiens
aatgtttctaaatatctttcataagtagcactatgcaggaaggccaggtctgcttggctgggccagttgactttcggtgaattgatgtgtttcctaatcttcacacctagaagaaatggactgatggctgactcttaaattgacaaagccgtttgtttgtgtatatgaaactgctttaaaaagagagattttgaatattagagtatatattctcctccctacccctcgcatttaaaaggtgttaagttggctgggcatggtagctcatacctgtaatcccagcactttgggaggccaaggcgggtggatcacctgaggtcaggagtttgtaaccagcctgaccaacatggtgaaaccccgtctctactaaaaacacaaaaattagccaggcatggtggcacgcgcctgtagttccagctatctgggaggctgagggacgagaatcgcttgaacccgggaggcggaggttgcagtgagccgagatcacaacaagagcaaaacccgtctc

SEQ ID NO: 264427 - DNA, 677 bp, Homo sapiens
acagaacacttcaaactcctcttacgtgttcttgatttcatcatttagctgaagatgcaggccctgtctttctttctgagttttccttagcaccctccttttaaattacctttttcattggttaaatgccatgaaacttcatcaattctagttttagctatcacttgacccaaagacaagagagttgaatcctggaccttaaagaaaaagaaaaaaggaaaaaaagcttgtgggaaccttatttacctcaactggggaaattttttgctcttgcgcaaaggtcaggtcccgtgaaacttgtgaaataggtgtttttatctcttttcttttccaactgatcagatagatatctttccaggaatttggtgtcagaaatcaaattcaatgagtgggaagtttgacaagattcaggatagtcttgccaaatagcacaagagaggaggtaaagttaggtcaggtcaagggggcagcaaaaatgaagtttataacagatatactgtatatttgtcatgggaaagggcttcagtcaatagcaattgatattaataaaacataaaagaaatgacaataaacaatcaggataactttgaaacaacttctttttatgtaggtaacattaaagaaaattaaagaaaaggaatcgctttattttataaaataaatgcactactatttgc

SEQ ID NO: 264428 - DNA, 1068 bp, Homo sapiens
tcctgtgatgcgggcgtaccttgctttacggcactcatgtgcaggcgtacctcgctttacggcacctccatgcttagttgagcttcaaagatgctgcgttttttttcaccagttggaagtgtgtggccacctcgcattctctctgtgttacgtgttggtggttctcacgatctttcagacttttttattgttatgacacctgttacagtgatctgtgatcagcgatcctccatgttagcattgtcattgttttgggcaccacagaccggacccggcaaccttcatctatgaacgttgtgtgttctggctgttccgcccaccagcctttcccagcctctctcctctccccgctccagcctccctattccctgagacacaaaaatatccaagttagtccagtgagtaaccctacagtggcctcgaggtgtgcgtctgtcactttaaatcaaaagctagaaatggttcagtttagcccgggctcggtggctcacgcctgtaatcccagcactttgggaggccgaggcgggcagatcacgaggtcaggagttcaagaccagcctggccaacatggtgaaaccccatcgctactaaaaatagagaaattagccgggcgtggtggcgggcgcctgtaattccagctactcaggagtctgaggtgggagactcacttgaacctgggaggcagaggttgcagtgagctgagattgtgccgctgcactccagcctgggtgatagagactgtctagaaaagaaagaaagagggagagacagaaggaagagagagagagagagagaaaaaaaaagaaatgatttagtgtagtgaggaaggcttgttgaaagccaagataggctggaagcggagcctctcctaccagttagccaaattgtgaacacacaggaaaagtgttttaaggaaattcaaagtgcttctccagtgaacacaagaatgataagggaaacagccccactgctgatatggagaaagtttgagtggtcggataaagatcaaaccagccacaacgttcccctgagccggagcccaatccagagcaaggccctcgcactctg

SEQ ID NO: 264429 - DNA, 602 bp, Homo sapiens
tcttgtttcctgcacttcagcatggttgagagtgacactccatctcaagaaaaaagtcatttcaatgactacctcaggagattcataggtatctgaccgacatctgagatgggatttgcattgcattttcgctatgatgagaagaaatatttaatgtcttagaagattaaaagcatactgtgataatatggaaatcttggtgggaattcagtcattagtgagaatgttttgcgttaagttcaaaccagcctcaatgaagctgatgtgagggaagggaaagtgaactctgagtagagcagggacagaaggaagagagagagagagagagaaaaaaaaagaaatgatttagtgtagtgaggaaggcttgttgaaagccaagataggctggaagcggagcctctcctaccagttagccaaattgtgaacacacaggaaaagtgttttaaggaaattcaaagtgcttctccagtgaacacaagaatgataagggaaacagccccactgctgatatggagaaagtttgagtggtcggataaagatcaaaccagccacaacgttcccctgagccggagcccaatccagagcaaggccctcgcactctg

SEQ ID NO: 264430 - DNA, 859 bp, Homo sapiens
aaagaatgcccaatcatctgcagaatggtaggaaaatattgtgactttttagtggctcttgcccgagcctctccctacattgtggcagtcttaaagcagcagaagcccagtcccctcccttgaactggagaaaacatgctagaccttttttgcaaattactgtgtacatttttttctaacctgtctgcggatacttgaaggactgacacaaggtcacatgtttgttttgcctaactggtagggtgggcactgcttacaaaagctgcaaagaaccacaggtgcatggggcaagaggttatgggtgtaaacataaaatagaacaactaaggcccagaggagaatctggggtaagactttgggaaattaagaacagttacatatacaggggggatttaaaatgcgacatgcatgcccagggaaaacacttgcccggaaagttctaagacccaagctttcaccttggtctggtccctaagcccaaaagcaggccaaagtaagtattgaaggattacctgggacaaagctgatttgtaaaatctaggattgctcctagcattcaagggaatttatgtcaaaatagctgaacgtgacataaaaggaagagagacttcagtgatcacacacagaaggaatagtcttttataaaaataatttggaaaactctcaaaacaaatggatgacagcttttaaaaataaaaaaacaatgaaccagaaaaccgtggggaaaggaaagaatctcatacctagagttaccatattataatagtgaatatccaactctcaaggaaaaaaatcacaaaccatacaaaggaacaggaaaataatgcgcattcaaaagatcaaaattaattgaccttgt

SEQ ID NO: 264431 - DNA, 2090 bp, Homo sapiens
catggttggccattaagaaatgtaatccaaaatatttacaggctcagttaagtactataagcaatgcaaaagttaaacaacagtagaatgtggtagattcatacagtggaatactacactttagaaaaaaaatagataactttatttagatatgttaatgtggcttactctcacaaacttaatatgcagtggtatgattaagtcacaaaagaatatgtacaatataattcagtttaaataaagttcaagaacacaaaacagcaagttggattgtttataaaaggtttactggacactaaatctataaagataataatagaaattattttaacacatccttcaattacctttcattcctccagaaatttgttgaaacctcttgaatgcctatgacctttctcatttcctccactgtttaatttccttttatactttgtttaaaactttgaatggacatatgagagatgaagtcatatttttctaaataagttcaaaaatattttgctttaaaatataagtagtgattaaatttctaagaattgagcaatagttgaatgttataaatttagttttcatgaatatttctctctccacatttcttcttctcaacttgctcatatcccttcaaatgacaaaatacttagaagtatttgagtcaagttagatatatttttgaagatattatttgcttatttatctatgagaggtcaacaacaacttccatgaatattaggaaagcaaatgtcggtagctctattcacttcaatattgaattcacctatatctgaaatttaaatgtcagtgataagactgacagaaagcgtcacacactttaggtaacacagcactaagtggcaacactttaatattgtcactattacatttttcagatatacaatatatactttaccaagaatcctagtctattatgttctaaggatgagctgtctttatacaaattcacaataaatagctgtgtaaataagagttaccatttttattttatagcataaaatgtatttcaattagttgtacaaatcagatatgttataaaagaaacatctttcctattattgaattacccaaagttgcttacctaacatagaatcttgtggaggaaaataggccagtgaaattcagtgattattcattatgatcaaggtgattagtacagaaatctccatgactattctgtgcagtgtcttttctttaacaatattttataatcattcttatttttactttctgtagacaaatcctttcttgttttgcctccttttaggtacttttgagattataaaagtatatagtaaaaacaaatgcacacacaaaactattcggttggtatacttaattttgttagaatagatttagtccaggtatattccagtggtttcttactgagagtccatcctagtcccctgattattacttgagtgttcactgatggtttttccttcttgttaacaggaaatagttttggtttctgctaaaaatggcagttgccaccattctgctaaaaatggcagttgtgtgagttttatttcttagaaaataactatattttatatttggtgaatatcttagttttgcatttaatttgctaagcagaatcaatgcaatcactatcatattctatagtttttcctaacagattgatagagtaaaatgtatggtttttctaatttttagcatttgtgtccaataaaatgactttatataatttttttcttgttggttcattttttttccggtcaaagtttcttctttagtttctcatataattgattcaaaactcctaagtgatgatcacagtaaccttaggtatttcttatttctccataataaatatagcatctgagtctaatttcttctgggagatttattaacttttaagatagcatgtgtcacttacataatctaacaatgcattttgcatactaaaatgatgaaacattcttaatgaatttaaatagctactttatcagaaacaggagtcataggttgaatttttatgtgggtagtagagctaagaatatttgtaaaacagctctccatgatgggctccaacaggatgaagtaagaccacc

SEQ ID NO: 264432 - DNA, 196 bp, Homo sapiens
cccacggcccgccacacctggggaggaagggaagaaaaccacacctgctcagtgcgaatggaatgggttttgaagcttaatggtgcacggaatttctgtgtctttttgctgtctctgcatctgatgatcggtatctgtcttggatttgttttgttttgttttgttttttaccattcaataaacctcttaacataaa

SEQ ID NO: 264433 - DNA, 963 bp, Homo sapiens
catagacctagctctctcctcctatctttaccttacacatatactttcttcctggaaagtctgtcctttcacctctagtaaattccttatagtacaccattgtattcccagtgccaagaacagtgtctggaacatggtagactctcagtaaatatttgttgaatgaggaatgaatgaacaagcacacagttgagtgaaagaaatcacaaaattggctttatagtcccaactctccattttcttgagagaccctgagtaagatacttaacttctcagggcttcagtatacttaactggaagacaaaaaagactgggttgtaagttcctgccaactctaaaataataccattctataatgtagttaattcatggactgttgaacctctaagcaaaagtttctctgaggaacctaatcatattttgcaaggtaatatacatcctaataaagactgaagatgtaagagtctgtactgatgagacacttgcattcagttttagcttcaaaggaaatgtatgttttgttagcaagattaagactaaagattaagatttaaaatccctacattaattagaggggaaaaaagtgcatggaggagaaagaattttaagaaacaaataattaacaatactgtattgtatacttgaaatttgctaagagggtacattttaagtgttcttatcacaagaaaaaagaaaaaaatgctatgtaaggtgatggatatgttaattagcttgattatgatattatttcacaacatatacatacatcagaatatcaacttgaggccggcacagtggctcacacctgttgtaatcccaacactttgggaggctgaggcaggaggatcatttgagcccaggagtttgagaccagcctgggcaacatagggagaccctgtctctacaaaaaaaaataaaaatcaaattgtataccttaaataatatatataattcctatttgtc

SEQ ID NO: 264434 - DNA, 430 bp, Homo sapiens
cacataatccccaggagagccctccgacactgagatctgaaaagccctggctgggacactgcagactgacagtgcggtagaaacaaagagcttttctggtttactttcagctcaataaccacgacaccccagagccccagcattccagtcagctgcggcttcactctgtgtacactgcacactaaatcaggactacaggaactatcctaagccaagaatggccagccccacaatcgcttcaaaggcaggccccacacaagcgtgcacaccacacccaaggggctgggagcacaaagctcaaccaacagcctgaggccctgcttccaaacgctttcttatttcctgtttctaaaataggctaaagcttctcctcctgactctaaaatgtatgctttaaaagttttttagacaaaaccataagaaataaaac

SEQ ID NO: 264435 - DNA, 347 bp, Homo sapiens
ttatttttttcccgcaaaacaaggggctctagaattacaatttacatccaggttagagaagttgcgggaaggtctagcatcactcagttagcttggactaggtttaaaacttcatcagtgcttttggcacactcagggagcttctgccgtctttcaggcagctgtccgtcttcgagcccagcactgtgttgttgctttactgctattcccaaagccaagcttgtggagttcttagtcctcagatgaacacaattaagaataggactttgggaggccgaggcgggcggatcacgaggtcaggagatcgagaccatcccagctaaaacggtgaaaccccgtctctacta

SEQ ID NO: 264436 - DNA, 511 bp, Homo sapiens
tctggatggattaaagaaaccacagggatttctgctcttgtgtagttgtgtatttctgctttttactgctgatcccttgaatactcaccagattgaaaagctgtggcgaatgaaacatttatgagagtcagttattctttagaaaggtgtagaaccaaagcatttgccttggaatgtttgttaggaaattactgcttcttaggaatgctaaattagttctgttatctttctgtggtgaacttgataaatggctcaatatgtgcagcatagaataacatagtcgtatctggttattgagtcattcatttattttctctgtgagctcacagtacttgcacacctgccacatgcctggtgttgttgtaggtactagggcagcagtaaggaacaaaacatagaatcctgcttgcatggagctcacattatgatggggcaacaatgaacaaacaagtaagtaaaacttatgaattgtcagttggtgataagtgctttggaaaagaaaaaaaaacaa

SEQ ID NO: 264437 - DNA, 900 bp, Homo sapiens
actgctgggctacatggcccaaggctcctgggcgcaatggatcggtggtcttggattcgcctcagacatttaatgacatttgttcttgggctttcacaagtggtctctggttgagatggaaggaaaggacgcagggacacaaaatctctgactgcccagggaccacctcaccgtcctcacttccactcaagacgacatggccgttccactaaattcccgaggacatggccaacatgagtaacaacacagggaagtgccttacacagagttccatggaagcccggctagtaccctctagaccatttacctacacctgttgggatctctctagcatgaaatgctccagaggcagtcatgccataagcttggatcctccagccattgagtgtgagggtcttagcccggtctaaatgagcactgaattctagagagaccaagggaccgtctaagttctgaattctgagtcctgaatcctggaagttggcttctggccagggagcaggtgttactgcctctgatccacaaaagcagccccacagctcaagttgctcttctggatttctcccctctcctggttcctggccaggcaaatcttcactgctttgttagcccatccatttgctcaaccagatttttcaaatatgtatgttttcctccttttcccattgtactcagtggaaggaatggtctaaattacctaatcagcaattcctggaaaccaagccaccatgtacatacaatcttatacgttaatgtcacatacaagaaagaaaatgcagaggtaccagtagtggctacctaagcagtgtaatgtagaggtaataaaaacgaattgttggatagtatctatctatgccatgagtaaaatacatatcaataaattacaacttctaagaaaat

SEQ ID NO: 264438 - DNA, 532 bp, Homo sapiens
caaaagccaaaagcaatggaggtcaagctgcccggtacatgtttctttacgcctgacctcctgatggactcactagataaaatgctccttcttgtagccagcaagcaaatgagtacttttttatggcttacatctgtgcctggtcggccatcaagtctgggtgccactgtttgagatttggggctgtttcctgcaactgatctctgctacagataaggcttccctcctgaggccaaagccctggttaacgttaagagctctatgatgatgcaaacttcagaggcgatcacctaacataacaaaaacctccccagaaccagaacctgttttttcaccaaaacccttccgctgcttgaataagaatgtcttttcctttcctacaatttgtgccatggaaatgtgaataatttttcttagcggggtaaatcatagtggttacttgaatgccaaaaagatgctggaggggcaggtggatatgttgaaaagatatagaaagctttgtaaattgcttttgaataaatatgtgactagt

SEQ ID NO: 264439 - DNA, 501 bp, Homo sapiens
tgcaagacagatgattggattttagtgtaacaaagtatgaaaagttcattgatatcatttcagattctgtgttgcaactaatctttaagaaatgacaatttgttgaatttagtgtagcatcaaagaagaatatctacaattatgtgggagaaaaagaaactagtaaaatactctcccttttttgatggagatctccctggatctccgtcagccttgattttctttgtatacttaaaccaaaatgacatatcacaacagattggatatagaagcagatgaaaatctgtcttacattaagccacatattaaagagatttataaaactataaaacaatggctttcttctcaattcttttggaaagtaaagttttttttttctttttttttcaggaacataattatgttaacatataatgcaccttgtttttaaatgaaacagtgaaattttaaagtttttttcactttttatttctgattagatattatatatatcatatatat

SEQ ID NO: 264440 - DNA, 472 bp, Homo sapiens
caggcatataagggatgagaaattacttaatgagtacaatgtagactaatcaggtaatggttacattaaaagcccaggcttcaccgctatgcaatatactcatgtaacaaaactgcacttaaaccccttaaatttatacaaacttttttaaaagcaagaaaaagaaaacaccctttggggacatcaatatttttccagagcattaagttcttgagtgttaagttcttaaatgttaagatcttaaggccaaaacgtttaaaataattgatttatgatatctaaagaatttgaagtataaccacaaaactgttctgtttataaaatatgagaatagtaaaagtattaagcccagagttaggtaagcaatgtcacgttaagaagagagggggcaggcacattctaaaaattgtacatcaatatacttaatattaatcctcagggcaaaaggttagagaacagattcagcagaaag

SEQ ID NO: 264441 - DNA, 618 bp, Homo sapiens
gtctgactgccaaattgattccttttttgctatgccatgctgcctttaattcatagtgattgttacttcaaaatcaatcttgctgcagtatatatggactggactagctccgtcatgctctttcagcttgctatttacccgtattactttcactaggtactgtctagaaggggtccagtagaaccagaagagttttctcagagaggaagcaacattttacaactgaatctacactacatatacagaagagtccaaagttggaaacctaagcaatccaagaaatcgctgtccctacagaagttaaacaataggatactttctctcctgctttaataaatggttgttatcttgctctgaagataattgaagcagtggacatctcatatccttttctacttattgggctagagtcagagtcaccctgactctgacttattttttaattgataagctcttcaagtcagagagaacttggtgcaactccaggctctcctaattatttatggaaataaataaatatggacaagtccattactaagtctgtaaaatcgagaaaatatgataaaccatgcatgattatattgagtatttaataaaggatctttggtaccaggcact

SEQ ID NO: 264442 - DNA, 495 bp, Homo sapiens
cacgaggtgctaaaggtctgtgtttggtatcttactgtctcatctcccattaactcctcagtgcactgcattctggcttattctacctctactccagcttagatcaccaatggcactgcaattatccatcctcagccttctctccttcagtagcatttatatgcactctatgttggacacagttccacacacacccatggatatacttagtcaactctacacaagttttccacaaatccttcatatgcaacatgtctaacctacccctgcacacccctcctcagcccatctccccaacctcagttgtctaactagatgcctgggggtgtgcttgattctttccctttcctagacccctaatctaacaggtcaggtcaacaagtccttgactcctactacagactcttgaagttgtcttccttccagtctgtcactgccgccttagttctggctgtcttcatctctgtcttgaactgtaggcctctaaccagtctc

SEQ ID NO: 264443 - DNA, 452 bp, Homo sapiens
tcctttcccgagtcagtactgctttctagaagaaaaccggggagatctatttggaatgtatctaactccaaagaaaccatcagaggtaacagtagagacggggtttcaccatgttggccagactggtcttgaactcccgacctcgtgattcgcccgcctcggcctcccaaagtgctgggattacaggtgtgagacaccacgcccggcggatagagagaattttgacaggatgattacggagctaggaatttcctacgaagctgggtgataaaaggacattggacaaaaacacagatagcttcattctataccaggatccatcactgattagctgtattatatttgtctctactgtaatttgaggagaatgatacctgcttctctatcttgttgggttttacagatgatgtattgaaagttcaataaaatctataaacaatagatctctgtgg

SEQ ID NO: 264444 - DNA, 366 bp, Homo sapiens
tcctttcccgagtcagtactgctttctagaagaaaaccggggagatctatttggaatgtatctaactccaaagaaaccatcagaggtaacagtagagacggggtttcaccatgttggccagactggtcttgaactcccgacctcgtgattcgcccgcctcggcctcccaaagtgctgggattacaggtgtgagacaccacgcccggcggatagagagaattttgacagtctctccaatgaacgccttcactgatatccaaagcatgaaggacacaccagggaaaaacatagacctaacacaggacaaatggaattattagaaacattttctagcagaagaacactattctgttgccatttgaatct

SEQ ID NO: 264445 - DNA, 690 bp, Homo sapiens
tcctttcccgagtcagtactgctttctagaagaaaaccggggagatctatttggaatgtatctaactccaaagaaaccatcagaggtaacagtagagacggggtttcaccatgttggccagactggtcttgaactcccgacctcgtgattcgcccgcctcggcctcccaaagtgctgggattacaggtgtgagacaccacgcccggcggatagagagaattttgacaggtgaggaggtattccaatgcaaaagaataataggagcaaaagcacagtggtgagaaattggaggggaactgtgaaaattgccacatagattagaggcaggaaaataaaggacagctaagtttatatagtgaacagtgagccgcatggacacaggtgactgttttctcctttttgaacccctgcttactccagagtcaccacctctcctggctttctgccaatcttcttggccacagtttctcggtcttcttttctggcttctcttccttggcctgaatgctacatgttaagtgatgtcagcttcagttttcttaacctctcttctcttaagttgctatcatttaaatatctttaaatatcatctacatccaagtgacctctaaaccagtaattttacccatgacccatctcctcaactccggattgtatataaaactgtctactcaacatcttcacttttga

SEQ ID NO: 264446 - DNA, 291 bp, Homo sapiens
ctcctgctcgttttttttttcttccaaaatcaggtgcacaggggaaggaagtttcagcctagtactcagatatgaaactggctgatctgaaataaaagtgagggcattgaatagcgtggataatgacaatctggtttacagatatggttgatttcaaacaatgctttccacatgaaagaaaaacagcaatgtgtcacagagcttgccttgccttctccagagcactttgtaaaggagagagctgaagtttaaaataacatcattttctctagaatgctcttcttgttttat

SEQ ID NO: 264447 - DNA, 650 bp, Homo sapiens
gcccggctaatttttgtatttttagtatagacggggtttctccatgttggccaggctggtctcgaactcctgacctcaggtaatccacccacctcggcctctcaaagtgctgagattgcaggcgtcagccaccacgcctggccgtgaccatcttatttttttaaagagagagttcagtactggttctgagatcaaaagcagccagatccctggtatcacagaagcttcatcacggattcatctatttttcatctccagaatggccacctcagtgctgtcctggccaaaaatctgttctctagacctggagaaggaactgccctgagggtcttccacacctctctttttgagaaaagttaagaacaaagtaaaaagatgcagtggagaaatgacgtcgggggttaatggattgggattttagggctggagtccaggcttacagagacggaaatgtgaaaaacagtcaagtagagccattgatatttgctgaaaaattctatgtgacaggtgagaaaaaaggggacaatcaaagttttagctaaatcagtgagaaggatggagttgttttttctttgtgattgtgaagactgaaagtaaagcaggtttggggaaaataatgacttgttttgaacatgttaactttggtcgac

SEQ ID NO: 264448 - DNA, 1070 bp, Homo sapiens
gccaggtgtgcaggccgctccaagcccagcctgccccgctgccgccaccatgacgctcctccccggcctcctgtttctgacctggctgcacacatgcctggcccaccatgacccctccctcagggggcacccccacagtcacggtaccccacactgctactcggctgaggaactgcccctcggccaggcccccccacacctgctggctcgaggtgccaagtgggggcaggctttgcctgtagccctggtgtccagcctggaggcagcaagccacagggggaggcacgagaggccctcagctacgacccagtgcccggtgctgcggccggaggaggtgttggaggcagacacccaccagcgctccatctcaccctggagataccgtgtggacacggatgaggaccgctatccacagaagctggccttcgccgagtgcctgtgcagaggctgtatcgatgcacggacgggccgcgagacagctgcgctcaactccgtgcggctgctccagagcctgctggtgctgcgccgccggccctgctcccgcgacggctcggggctccccacacctggggcctttgccttccacaccgagttcatccacgtccccgtcggctgcacctgcgtgctgccccgttcagtgtgaccgccgaggccgtggggcccctagactggacacgtgtgctccccagagggcaccccctatttatgtgtatttattgttatttatatgcctcccccaacactacccttggggtctgggcattccccgtgtctggaggacagccccccactgttctcctcatctccagcctcagtagttgggggtagaaggagctcagcacctcttccagcccttaaagctgcagaaaaggtgtcacacggctgcctgtaccttggctccctgtcctgctcccggcttcccttaccctatcactggcctcaggcccccgcaggctgcctcttcccaacctccttggaagtacccctgtttcttaaacaattatttaagtgtacgtgtattattaaactgatgaacacataaagctatattaaaaatgtattgttgaatc

SEQ ID NO: 264449 - DNA, 455 bp, Homo sapiens
tatctgctaatcccactagagcaagttcctttaaggctgataccaggtcttactcctctatttatctcaactttattaatttggtaatgttaagtcttagcacatttagagaattggcttttaagtggcacatatccatatactaacccatgccatatgctaaactaatctacacgtgataggcaacactcatactatgtgctctgatggctgctatgctgacctctttcaccaatggctgccacttgtcacactgtgtctcctcatgagggaggaggtgtcctatctgcagtcattatttatacatggcttgaagatttgcaagatcgtaattttttaaaaataccacttcattctgattatgaaagcaaaatctactcattgtagaaaatatgaaaaactctagtgtacaaaaaggatattaaaaactacctgtgatttaacctactgtcatt

SEQ ID NO: 264450 - DNA, 564 bp, Homo sapiens
agataataagatgcaagtaaaggacttggaacagagtctggcacctggtaagttgttaacgtcattgccctttgattgtccagtctgccctttcacagaactcagcgtgtttgggtttcctttcctaagatgcagcagctgccagtaaagtccattcaccccagaataagggtctggtaaatgaactatttgcagaaagccaggccttgcagggtgctttcaatgggcaagaggacacgatgacaggtgccgacgaggtattcctctccacttcctgggaaagagggcaagcctgtaacaggtgcagtcatgggggccccagtaggggatggctgagaggatgaagcttccattttcagagtttggatgaaaacaatcagagccccttttccagtggaacttgtaactgcttactcatcacaaataacttaaagcatgtcatcaccattcctggctgcaggaatgaatcctgcccagagaggagatctgttttcttccttaaagccctaagagtgttctgcttcaattccctgtgtgggacatagatatattaaatacaaaaaa

SEQ ID NO: 264451 - DNA, 559 bp, Homo sapiens
agataataagatgcaagtaaaggacttggaacagagtctggcacctggtaagttgttaacgtcattgccctttgattgtccagtctgccctttcacagaactcagcgtgtttgggtttcctttcctaagatgcagcagctgccagtaaagtccattcaccccagaataagggtctggtaaatgaactatttgcagaaagccaggccttgcagggtgtcctcaagacgcacgcgtcctccagaccccctcccgtcgtgtgtcccttgtaaatagaatcagcccgggcggtatcctgttccattccctggcctccgggtgtcaatagagtgtgataatgatgttgataaagaaaacgtcggattgcacctgccaacatggcgccccccctcctacatgtataactcccctcctgtcctatgccaacaaagtttactccttcctcaccccaccctggaggcccaggtgagtcgtgcgcgctcctgatatcttagtttccccagtaagccttgcgtgtgtactgacccccgttcatttatgtgatggcgtgaaaacctgaaca

SEQ ID NO: 264452 - DNA, 557 bp, Homo sapiens
agataataagatgcaagtaaaggacttggaacagagtctggcacctggtaagttgttaacgtcattgccctttgattgtccagtctgccctttcacagaactcagcgtgtttgggtttcctttcctaagatgcagcagctgccagtaaagtccattcaccccagaataagggtctggtaaatgcacctatccatccaaccatccggtacaggcagctgtcgatccgctatatgagccgaggacaggagccccagccataatcattcagtattagtaggagagatggtcagagaggcacaagtgcagtagtaaatgtcccagtatggtatcctcgaaatgaataagcagcattttggacagtaggagtccgtgcaatatgaggccgttgtgaactgcgcatagtttgcgtgttctgatgaccaacagcttagagcaggtaaaggccgttcaaggctcccgtaatagatccagcgcacagatgaagtctgatttgttccttcaacccaagatagtgttcttgttcggtccggtgtggggcagcttcattaattgtatgc

SEQ ID NO: 264453 - DNA, 929 bp, Homo sapiens
gaggacctcagcggctgcggcgacacccagggaaggcggcgcggccgggtcccgaaactcctggctgtttccatcagagccctcggacactcccagcccgggctgagcacgcatcgtcgctccccggcggatacaagggggctccgccatccgctcccgtcagttcggcctccatctcctgggacccgcgccggcagccaggccaggcctctgagtggccccagagccctggctggactcgtccacggcggcagcgatctgcccggggtctcggaggccatcccttcagagtcggccctgtgctcgccaccgtcacctgctggttggattccggaaacccactgtctgaagaccacagaggggtgtcgctgaccaccccaaatcggatacgtccagacctcaagctcccttcccctctctggctgccctctgctcttttcatctcttctctcaaccttttggggatttctgtgtcctgacaccacctccccatccaccaccaaagtagccggggtgagccccaaaccttactgggtgtgctccacctgtgcctccaacccagcgaatctgacagcttcgacccaattctgcacacacccaggaagttctgccttttcttttctttcggtgtctcctgtacttcccaaaatttctcctctgaggcctgtatggaactcttggttgctgaggcaaccatggacctgttgctaggagatagctggggaaggcccaaggccgcccagggcagagagaggagacgaagagtttgggacagtgggggaggagatgggaagggatgggatttctgggtcccagagcgggtgggatactcacgcacagcttcttcactggtggggggtggggcacacattatttctcactggtcatgatttacaagaagaaaaataaaactgcttttggaaccacaa

SEQ ID NO: 264454 - DNA, 2767 bp, Homo sapiens
gaggacctcagcggctgcggcgacacccagggaaggcggcgcggccgggtcccgaaactcctggctgtttccatcagagccctcggacactcccagcccgggctgagcacgcatcgtcgctccccggcggatacaagggggctccgccatccgctcccgtcagttcggcctccatctcctgggacccgcgccggcagccaggccaggcctctgagtggccccagagccctggctggactcgtccacggcggcagcgatctgcccggggtctcggaggccatcccttcagagtcggccctgtgctcgccaccgtcacctgctggttggattccggaaacccactgtctgaagaccacagaggggtgtcgctgaccaccccaaatcggatacgtccagacctcaagctcccttcccctctctggctgccctctgctcttttcatctcttctctcaaccttttggggatttctgtgtcctgacaccacctccccatccaccaccaaagtagccggggtgagccccaaaccttactgggtgtgctccacctgtgcctccaacccagcgaatctgacagcttcgacccaattctgcacacacccaggaagttctgccttttcttttctttcggtgtctcctgtacttcccaaaatttctcctcctcctgtgccctcttcgcccccctcctttgggggccccgtgaccctgaatgtggggggcacactatattccaccactttggagaccctgacccgcttcccagactctatgctggggggccatgtttagggccggcacccccatgccccccaacctcaattcccaaggaggcggccactacttcatcgaccgggatggcaaggccttccggcacatcctcaatttcctgaggctgggccgcctggacctgccccgtgggtacggagagacagcgctgctcagggcagaggctgacttctaccagatccggcccctcctggacgcgctgcgggaactggaggcctctcaggggacccctgcacccacagctgccctgctccacgcagatgtagatgtcagcccccgcctggtgcacttctctgctcgccggggaccccatcactatgagctgagctccgtccaggtggacaccttccgagccaaccttttctgcaccgactctgagtgtctaggtgctttgcgggcccgatttggtgtggccagtggggatagggcagaggggagcccacattttcatctggagtgggccccccgccccgtggaactccccgaggtggagtatgggagactggggctgcagccgctgtggactggggggccaggagagcggcgggaggtggtgggcaccccaagcttcctggaggaggtgctgcgggtggctctcgagcacggcttccgactagactctgtcttccccgaccccgaagacctgctcaactccaggtctctgcgctttgtccggcactgaggatgctgttctcagtttgactgtggggaggagagagaatggggtactagcacccctgaagcctctttccagctctgcttcaggagctatgagagtcgggactctcctgcacctgactggagctcagatgtgggcaggaattcccaaacctgagcccaccaaggactcacaagtggtccagaaggtctcaacctgtgctgaccctgggaggggtagggaaggttctctcagcttgttcttgcctaaggctgagcacctccagtctctccttgatttggagctcagtgtttaagggcttggaaaaggggggaacatctctttacccagactagacctagcaaaaccctggaaggatattgaggtctggggaaaagggaggactttgcattttcccaatgcggtctcttggaccatggcttctactcctgaagctgggtggcctggcctggcctgaccaatgagaggccagaacactctggaacatcggaagaggagttctttgctatgttccaagccatctactgagggaggcagaaaggccacaacccaccctaggttgatgtatgggagctaggacagtccccatggcaatggggctggagcatccctcatctggaagaatcccatactgatggcagggctggccagggggaagagggtagtatctgtgggtcctggcctttcttcatgtgtgcgtgcatatcagcccgtgtggctgactgatgtataggtccctggcatcctggttcatatctgtgttgctgactacagtgtctgtgatgtccgcatgtccaggcctgtttggggttgcctagcgactcttctggcacagggtgtgtctgtggtatacctgtgaggtggttgacaattagtagtttaatcacagggtgtgtgtgtgtgtgtgtgtgtgtgtgtttatgtgcacgcatgtatatgcatcaccacgtagccaggaggggcctgttggggtttgagtcactgggatcttcctggtgagaggtaagagaagtcactgggcttagctgggcctctgaggcctgtatggaactcttggttgctgaggcaaccatggacctgttgctaggagatagctggggaaggcccaaggccgcccagggcagagagaggagacgaagagtttgggacagtgggggaggagatgggaagggatgggatttctgggtcccagagcgggtgggatactcacgcacagcttcttcactggtggggggtggggcacacattatttctcactggtcatgatttacaagaagaaaaataaaactgcttttggaaccacaa

SEQ ID NO: 264455 - DNA, 505 bp, Homo sapiens
acttttttctggtcctctgctacaggatgtgctgggctttcagaagaagggagcaaaaggtcaccatctctcttgtttattcaaggcctggtgctcattctctatgagacccttccaatgtctaacatgagtctttcatagtaggactaaacctctttgaaaactattgtatagtcaagatagaaaggaggttagagctctgttgactgtttttaccactcctggaagaattgaactcggggcatgtccaagtcacaagctctttttttaggaattgttttacatgagcatttaaaaaaaaatagtaggacaccccaaatacacacacccccccaccctggaatttacaaacgctaaccaaacaaaagggtctttccattgactgcctggatattagtgtaaatactaggatgttgctttgcaagtatattttggagagcgagtcagttacctatgatgagatttctgcaaagcagccgttttaaagcagcatgcttgagtgacc

SEQ ID NO: 264456 - DNA, 426 bp, Homo sapiens
aaaggatggtagagctttcatattataccatgtgaggaaaagaaggaaggaaaagaggttgagtgtacaagccttagaatgtagtgcagttctaaaaatgtttgtcaagactggtagggaatcatcacatcaaggttgcctgccagaggaattccacatctaggaacagagctacctcagtgtccttccaagctaattcactgcctgggagatacatgtgaaaagattggctttagtatacatttggtaaggaagttcaatgggcaaaatctggggtgaagatttgaaaaaaacattttcataaaagataacacaaaagaataaagaaaatggtagtgtgatggttaattttatgtgtcataaaagataaatataaattctatctatctatctatctatctatctatctatctatctatctatcct

SEQ ID NO: 264457 - DNA, 468 bp, Homo sapiens
gtgacatttcttggtgtctcctgaggagccgccccctcgtcagccttgctcagctcttcatctctctggtcgctatcaccggggacatgccgtccccagctcagtgacaaaaatgctgagtttcttccgtagaacactagggagtcggtctatgggtaaacatgcagagaaggaacgactccgagaagcacaatgcgctgccacacatattcctgcccctggagattccaggtccatcatcacgtgtcaggtgtcccttctggatggtactgatgttagtgtggacttgccaaaaaaagccaaagggcaagagttgtttgatcagattatgtatcacctggatcttattgaaagtggctattttgatctgagatttatggattcagcacaagtagcatcaccaaagtaattcaatggaagaagaatagtcttaataatggtgctggattagaacctgtggaaaaaggc

SEQ ID NO: 264458 - DNA, 563 bp, Homo sapiens
atccacccccttccttttttcttgcttttctgaatgggtcttggagatttttcaatgtaagatctagagaccatccatattgtttactgttggttgataattttatggtattccattgtatgaagatactggtctttacttaatcagtcctgtattggtggaacttagtggacatttgttttgtttgttttttgcattaagaaaagctcctggcaggtttcagagacttaaatgacagctaaaaatctggtgggattacaggtttcagaagtgacaaggtttaaaatagatgaaattgttgggggagccctagcctcccttcctgcacaccctcttcaggtatctaggactcgaagtcttatcaaaacaggacacttattacctgctagtcacaacctatctatatgaacatatacattggcgtgggaagtttgtctgtgattgtgaaacaagattgtcttgctaaagacattctgaatatgtgaaggcaggagggagagataattgtaaggctttgagtgcctctaaaatcctactggatagttgttggcttcaaaaaaagg

SEQ ID NO: 264459 - DNA, 223 bp, Homo sapiens
tggatggatccccgactggccaggggatcacaggcagtgaatcctctccctcacctgtccccatacacagtcttggcttttgtagttatagccaccttttcctacacattgaggctgttcctctcccatctttgccattggatctctacttgctttgaaattgttactgtcactgggtccattgcttgctccaaatacctgtttgtttgtttttaagacatga

SEQ ID NO: 264460 - DNA, 430 bp, Homo sapiens
attaaagagtacaggaaaatggcagccctctgctggtggtgtaatagtagactgaaagccagctaagtcaaaccacacatgtggcagagaatgcttctcctaacatcactcacagatctactgaaactcacaatgcatgcctacacctcaacttcaaacaatagacagagatttaaaagaacacctgaagggagacaggaagagaaacagaatatgaagaggattcaaccaaacagagccaatgaagcagacagagcaacttaaataataagagcaattttttaaaatgagacaaaaaggaaaggatactcagtgcatagttggtagcttaagaaaacaagaatttcttaaatcatagagcaaaaatgcaaaagaatagaaatcatgagcatcttaggatagattaatcaatgctatgaggtacagaagg

SEQ ID NO: 264461 - DNA, 448 bp, Homo sapiens
atggcagtctcctcctcagattccaaaagatacacggggcacttgagctcagccttgagagcctctgatgactgtcctggagaggttctcaaccacaatcttggcagccggtggaggcaggtggtggtcccaatctactaccaaccccaagtcttcaaagtccatcctattcaaaagtgaccttacgagctccagcaccatgttggttcgagtctcctgcttgagggtccaacggctcacagtcgtgttcatcgatataggacgccatggctgcccagccgtctgacatgtgatgttttgatacaggtatacaatgtgtaactatcaaatccgagtaactggggtattgatcatcttgagaatttatcatttctttgtgttaggaacagtccaattccactcttttagttattttaaaatatgcaataaattattaactgtagtcact

SEQ ID NO: 264462 - DNA, 419 bp, Homo sapiens
ctggttctgtttggttttataggtgtggaaagagggatgtgaaattttcctagactaaatgcacaaaagtttaggctagacatactttcccactgttttataactccttgtaaattttctatgtattgtaaatccatattttatttaaatggaaattcattgcttgaaaaaccaattgtgtaaaaactattggctatgaagtattttcaagtatcttcaaggaatccattataaaggtttgatttgataaagctttattactatatggcaatagactaatggagacaagcataagaacacaaacgacatcatgcaagatataaagcacgcacttcaaattgtatttattgtatgtgtttaaaagtgtgttgcctaataaactcaggagaaaaataaatatatccttgaatatgctgaga

SEQ ID NO: 264463 - DNA, 394 bp, Homo sapiens
ccaaagagtgcacttattcctgtaattcccatcaccaaatcaacaggctcccggttccggaatagcgtggaaggattgaatcaggagattgaaataataattaaagagactggggaaaaggaagagcaacttataccgcaagatattccagatggccatcgtgctccacccccccttgtacagagaagtagcagcacgcgcagcattgacacacagacgcctggtggggcagacaggggaagcaacaacagcagccgttcccagtccgtgtccccaacatcgttcctcaccatttccaatgaaggtagcgaggagagtccttgctcagcggatgacctgcttgttgatcccagagataaagagaatgggaacaattctcctttgcccaaatatg

SEQ ID NO: 264464 - DNA, 817 bp, Homo sapiens
ccaaagagtgcacttattcctgtaattcccatcaccaaatcaacaggctcccggttccggaatagcgtggaaggattgaatcaggagattgaaataataattaaagagactggggaaaaggaagagcaacttataccgcaagatattccagatggccatcgtgctccacccccccttgtacagagaagtagcagcacgcgcagcattgacacacagacgcctggtggggcagacaggggaagcaacaacagcagccgttcccagtccgtgtccccaacatcgttcctcaccatttccaatgaaggtagcgaggagagtccttgctcagcggatgacctgcttgttgatcccagagataaaggtacagtgctggaggaatgtgctactagatgataatggaatacctcctcttgtatcattcattctattcattttctagcagaacacacacactcgaggctactcagttaatgtgttcaaagcctaggttttcaatttggagtgtaaacaggtttgactgtcatgctcagttgatggtctagttgggcaagtttatgagcttttgttagtttgtagctctttttttgcacttgttaatacaacttccttattggtgagaaacattctttttggaataaatgagatgagcacttgctctgaaaagcactttggtctctgtcacctgatagtcatgattttattaccttaatgctttttaaatcaatacaaagccttcaagttagtgttttttaggatctgtacttgtgacattttaaacaaggattaaacagatttatatcaatgcaggatgagtgtt

SEQ ID NO: 264465 - DNA, 6475 bp, Homo sapiens
  misc_feature (4)..(4): n is a, c, g, or t
  misc_feature (8)..(8): n is a, c, g, or t
  misc_feature (25)..(25): n is a, c, g, or t
  misc_feature (37)..(37): n is a, c, g, or t
  misc_feature (40)..(40): n is a, c, g, or t
  misc_feature (52)..(52): n is a, c, g, or t
  misc_feature (64)..(64): n is a, c, g, or t
  misc_feature (75)..(75): n is a, c, g, or t
  misc_feature (514)..(514): n is a, c, g, or t
  misc_feature (1220)..(1220): n is a, c, g, or t
  misc_feature (1286)..(1286): n is a, c, g, or t
  misc_feature (3600)..(3600): n is a, c, g, or t
  misc_feature (5647)..(5647): n is a, c, g, or t
  misc_feature (5715)..(5716): n is a, c, g, or t
  misc_feature (5719)..(5719): n is a, c, g, or t
  misc_feature (5769)..(5769): n is a, c, g, or t
  misc_feature (5772)..(5772): n is a, c, g, or t
  misc_feature (5787)..(5787): n is a, c, g, or t
  misc_feature (5795)..(5795): n is a, c, g, or t
  misc_feature (5811)..(5811): n is a, c, g, or t
  misc_feature (5861)..(5861): n is a, c, g, or t
  misc_feature (5868)..(5868): n is a, c, g, or t
  misc_feature (6437)..(6437): n is a, c, g, or t
  misc_feature (6460)..(6460): n is a, c, g, or t
gtgntgangatggtggtggttgtgntgatggtgatgntgntggtgatgatgntggtggtggtgntgatggtggtngtgatggtgatgatggtggtgatggtggtgatgatgatggtgatcatgatgatggtgatggtggttatggtggtgatgatggtgatgatgatggtgatggtggtggtgatggtgatgatgatgatagtgatgatggtggtgatgatgccaatgatgatggcggtggctgtcatgccttgctaacctctgggaaagattgaggacatcggcatgtcggaaaggggcccagctccagttcctcagagtacatgccttgaatacttgggcatggaatctccccaaacttcccttttcccacctgcaaaatggaaataatatctgtatcagctataaaggcttatgcaaatattagtggttttattataattcagaggactaccctggagtttaatcctctgagtaaaaagcaggaagtaaaaactgtagcagtttgtaaacngtctgtgatgttagattgtttccatttaacattttatgtgattggtgtttagacatttctcttcatctgcattggtttttcttagggtagattttcaaacttatgtcttttaaaatacttttaaaaaatacaaaaagtacagaagatgatgtgctaagcctccctcgcctgccctttggtgtggtgtttgcgacggcccagggcccagctcttccaggcttgtctgctgatgcccacagggacccctccctgcagtctttgttccggtttcctcagggcctttgccactagtgggggttcatgctgaagcctctgcctgaggtagtgagttcccctgggccaagtggctagggacagctggacctccctaagagccaccagcggcagcaaacatgccaacatgtctgcaggtcaatgggtgagaagcaagaggagcccaactcgctttcccgttttaggtcattcactagatttcccccggttttgccttttttttttgagacagagtctcgctctgtcgcccaggctggagtgcagtggcatgatctcggctcactgtaacctccgcctcctgggttcaagcaattctcctgcttcagcttcctgagtagctgggattacaggcgcctgccaccatgcccggctaatttttgaatttttagtggagacagggttggtccggctggtctcaaactcctaacctgangtgattctcccacctcggtctcccaaagtgctgggattacaggcatgagccaccgcgcccggcccnttgcatacatcttggtccaaatcagattctgtcttggggagcatcatttcataatcctgctggctttgaacttgtcacagttcagacgtcttccttcttctggctcctcctggtagccccaggtgcctccttcctgacagagcctgctgctcccgtaatacacactcacccctaatgagctacttaaaaataatcaatgatttccagataaaaatcaccattaattttaaatgccctctgtaaaccttgttacaaataattgccagaaacacacaaagtctgaaattaattaaaatcgacagcctcatttgacgggagttgagcttctggcttcttggttatgtgcgtctcttgcttgggcagaagcagtggctgcgagatgtgagcccatgggggagtttgcttaggacccgccgagcacttgggcctgtggaggagtggggaggacacgggcttagagtcctgcagacttggctggctggcctgtgccctcttagggtaatcggatgactttccgagccccaggtttctcatctgtggaagggtttggtagtgccagctccccagggttgcacgtaggtgatggcaagggtgtgcctgccccaagtggatgctcagtcatgatcttgtcgtctttcctcttctctctccctgccccagatcagcctttgcaaagtactcatactgggtcattcactcactcattcactcctgcagtgagatacacagaagctgataggcagcagaggcggcagggacaccgggttcccctcatctgaaaaaaaaacactgaggctgagaatggagaagtgacttagtctgggccagtcctggcagaaccaggagagaacctgtgtgccatgaccccctagcccagcgctgtttccaccgccacatccccgttccctcggggctggtgggtgatggggaaaccgcatttgccaaggcaacgggaggcagccgagggctggggctgggaagtcctgcaaccccctggccctagggtggcacgagcccctttctcagcagtggggtacgtgtgcaggcaccagccagttcttcagctgggttgccatagtaactggatacacttttgttaccttcttttcatggtcaaccttttgtcagtttccattccagaactctgagagtcatcccagcgtgtccttgagcagaacacctgcgtgccgctgtagcttgtcacatttctttgttggtccccgtgtagctgttgttaaggggcacagaaaagccagtgtcccctccctcccctcctttctgagagagcacaggtgaagggcttgtccagccaggaacgaattctcaggtccactcttcactgatgcacaaatgctaggcagtcacttagcatctctgagtcttggtttcctcatctgcagaatcaggaaagtcacatttccctgatcattagcctgttcattgagccagggcttcctgagcacctgctgcctgccaggccttgggtgaggtgctgggttcatgacagcacagggtccccaccttcaagaccatagccagatctgcagacagatcagtaaactccaacttggtgagtgaggcggggagtgcagaggtctgagggggtcacgagaaggagctaccagcccagccaggggctgctggagacagtatccgaggagggtagagatgacacagggaaagtgttgaacagatcatgccgctcagttagggcagtttcttgcctcctcctccctctccctcccagtctctaggtctctcctctcctcccctctgtctccctctttctccaacctgatgggaagctttggacataaaggccgtttcctcatcagacttcttctatgcctttggtcccagagacacggcaacccccacgccctaccctaagtctctgcagacagcagctccggagaagagaacaaagcttgggacttatttatttcccgttttgcagaaatgtttatttgaaagcagcacagcaaggtggaatggtttgatttgattagcaagtctaaatgtattagcagcaagacagaaacgatattacaattagcagtaattagctgtgtgatgactctgggcggcagtgctgggtgacagatgctgcttcctggtcccgggttagacggagagggcatgttacccttgtgaaggggctcggcttcctggggcgggcagaggaccctggccttgttttcaaggctgagtgacagctaattgtcccttggaagagacacaggtgtcagcacccacttgtgttgtgtggaaagtgactttgcggtcttgggggaggcagtggcttgacttgtanggatttggaagcttcgcagctgccctgaatttgcctctgatggcagtggcttccttcgtaccactcatcccttttccaatctttatcacacacagctcctccagacccccttcactgggttttacttatgggctggctctgtccctgagatgtggcctgtgctgcatccctgggcctccaaggtctgcagtgtggacgccctgtgtggtgatgcccggtaaccctgcagggtgctggacatacactcaggagactctgggaaccgtgtgtccacatcgctacatgttacctacttcagcgtgggtgagcagtgactgcaagccagtctgaggtgtagatagagacacctgagaccctgaacctgtcctccaggagtccagatcttccactgggggccagacatgctgacatcctgcagaaagaaaccagtgctccttttggagtggtgaaaatgtcctggaacttggcaggggtggtggttgcacagcttcgcaaatggagtaaatgcagtggcctcgtaggctttgaaatggttacttcttctttccttttttttttttttttttttttttttgagacgaagtcttgctctgttgcccaggctggagtgcagtggcgtgatcttagctcactgtagcctctgtctcccgggttcaagcgattctcctgcctcagcctcccgagtagctgggactacaggcacccgccatgatgcctggctaaattttgaatttttagtagagaccgggtttcaccatgtcggccagactggtcttgaactcctgacctcaaatgatccccctgcctcagcctcccaaagtgctaggattacagaagtgaaatggttacttttatattatgtcaatggttttacctcaatgaacaaaaacaagcaagacaacaagacattttgaaagcccaaacaccataaactgggcacagcttaaagtgtctgagcacacacagccggtaaatggagatagtcatggacaccaagtctccctctgagcagggaaggagctggaggagccaagaggggagaggcacagctgccacggcgctgggcacgtcacaggccagagttggagaaggctggggaggacactgggcagacatgagacaacctttcctttctgccactggctgccctccaggggctgcaggaaggggtcagggtctgccttcctatggctgggagggggctggcagtcctgcagccccgcctgtccttaagactgcctcctgagtgcccttgcacgacctcgggtgcctgtcagagaccacgacagcctctggagtgttggctgctctttccctggtgtcacacgtgaacttggccttggccactgtgttcatcaggccgccaataccaaaggaccagggctgctcagagaggcagcccccagatggcacctcctccctgtaccccactgcccccaagccagcaggaggatcctccacactctagatctctgccaagcactgtgggtgcaggagagaatgaaccagatgtggtctacccttagggggctgcagctggagctgcctgagccacgtggcagcgaggtctaggggtgctggaaagggacaaagctggaagaaatgttttctgagcccaaagtgcagtttcattgcagggggtggttgttactgggggtgaggctgtgaactgggaagatgccctgtcctgcgttttctccccggggccagtgggcctgcctcacctgggatctccagatgcagcagctgcacgcagagtctacacagcagtggccacctggttcccctgtggacacatcctttgttcctcagaatgaaaccatcttgtcaacagccttcgcctatgggagccaggagattggttagctcctacgggagccaggagattgggcaggtgtagtagaagaggaaaaaagggcggtcattctacaattgggaggatgccttacccgaatcagagaaatgctgatgaaaaccacagggaggctgggcgtggtggctcacgcctgtaatcccagcactttgggagaccgaggcgggtggatcncttgaggtcaggagtttgagaccagcctgaccaacatggagaaaccctgtctctatgaaaatacaaannttngccaggtgtggtggcgcatgcttatagtcccagctacttaggaggttgangcnggagaatcgcttgancccgggangcggaggtggcagtgngcctagatcgcgccactgcactccagcctgggcatcgcagggagtctccntctcaanaaacaaacaaaacaaacaaaaacaaaatcacagggagagtcctttttgtttcttccagacgaataccaacactgaaggagaatgatgacggtgttgggggctcctgggtgtgaggagtgctgctgggtgggaagtgggagaatttggaaaacaattcggaaacatctagtaaagatgaggggagatgtacatctcctgcaaaccggagatcccacttgtaggtatttcccatagagaaattattacacacgtgtcctgggaggcctgaaaatcctagcagccaaaatgaaatacaacagaatgtggccaccactgatggataatggataaatatgcacatgtatgcactgtgtctacagcaaggaaaaggaatgagtgaggccacgtgcaacaaccttgactcttgggagcttggagttgaagttttcttcaaaaagttgcagaagaaaacttcatatgatttcatttaattaaagttcaaaacatgcaggccaggtgcagtggctcacacctgtaatcacacactttgggaggccatggtgggaggattacttgaggccaggagttcnagatcagcctgggcaacatggtnaaactccatctctac

SEQ ID NO: 264466 - DNA, 2305 bp, Homo sapiens
  misc_feature (4)..(4): n is a, c, g, or t
  misc_feature (8)..(8): n is a, c, g, or t
  misc_feature (25)..(25): n is a, c, g, or t
  misc_feature (37)..(37): n is a, c, g, or t
  misc_feature (40)..(40): n is a, c, g, or t
  misc_feature (52)..(52): n is a, c, g, or t
  misc_feature (64)..(64): n is a, c, g, or t
  misc_feature (75)..(75): n is a, c, g, or t
  misc_feature (514)..(514): n is a, c, g, or t
  misc_feature (1220)..(1220): n is a, c, g, or t
  misc_feature (1286)..(1286): n is a, c, g, or t
gtgntgangatggtggtggttgtgntgatggtgatgntgntggtgatgatgntggtggtggtgntgatggtggtngtgatggtgatgatggtggtgatggtggtgatgatgatggtgatcatgatgatggtgatggtggttatggtggtgatgatggtgatgatgatggtgatggtggtggtgatggtgatgatgatgatagtgatgatggtggtgatgatgccaatgatgatggcggtggctgtcatgccttgctaacctctgggaaagattgaggacatcggcatgtcggaaaggggcccagctccagttcctcagagtacatgccttgaatacttgggcatggaatctccccaaacttcccttttcccacctgcaaaatggaaataatatctgtatcagctataaaggcttatgcaaatattagtggttttattataattcagaggactaccctggagtttaatcctctgagtaaaaagcaggaagtaaaaactgtagcagtttgtaaacngtctgtgatgttagattgtttccatttaacattttatgtgattggtgtttagacatttctcttcatctgcattggtttttcttagggtagattttcaaacttatgtcttttaaaatacttttaaaaaatacaaaaagtacagaagatgatgtgctaagcctccctcgcctgccctttggtgtggtgtttgcgacggcccagggcccagctcttccaggcttgtctgctgatgcccacagggacccctccctgcagtctttgttccggtttcctcagggcctttgccactagtgggggttcatgctgaagcctctgcctgaggtagtgagttcccctgggccaagtggctagggacagctggacctccctaagagccaccagcggcagcaaacatgccaacatgtctgcaggtcaatgggtgagaagcaagaggagcccaactcgctttcccgttttaggtcattcactagatttcccccggttttgccttttttttttgagacagagtctcgctctgtcgcccaggctggagtgcagtggcatgatctcggctcactgtaacctccgcctcctgggttcaagcaattctcctgcttcagcttcctgagtagctgggattacaggcgcctgccaccatgcccggctaatttttgaatttttagtggagacagggttggtccggctggtctcaaactcctaacctgangtgattctcccacctcggtctcccaaagtgctgggattacaggcatgagccaccgcgcccggcccnttgcatacatcttggtccaaatcagattctgtcttggggagcatcatttcataatcctgctggctttgaacttgtcacagttcagacgtcttccttcttctggctcctcctggtagccccaggtgcctccttcctgacagagcctgctgctcccgtaatacacactcacccctaatgagctacttaaaaataatcaatgatttccagataaaaatcaccattaattttaaatgccctctgtaaaccttgttacaaataattgccagaaacacacaaagtctgaaattaattaaaatcgacagcctcatttgacgggagttgagcttctggcttcttggttatgtgcgtctcttgcttgggcagaagcagtggctgcgagatgtgagcccatgggggagtttgcttaggacccgccgagcacttgggcctgtggaggagtggggaggacacgggcttagagtcctgcagacttggctggctggcctgtgccctcttagggtaatcggatgactttccgagccccaggtttctcatctgtggaagggtttggtagtgccagctccccagggttgcacgtaggtgatggcaagggtgtgcctgccccaagtggatgctcagtcatgatcttgtcgtctttcctcttctctctccctgccccagatcagcctttgcaaagtactcatactgggtcattcactcactcattcactcctgcagtgagatacacagaagctgataggcagcagaggcggcagggacaccgggttcccctcatctgaaaaaaaaacactgaggctgagaatggagaagtgacttagtctgggccagtcctggcagaaccaggagagaacctgtgtgccatgaccccctagcccagcgctgtttccaccgccacatccccgttccctcggggctggtgggtgatggggaaaccgcatttgccaaggcaagccaagtgggaggacacaaccaagtgggaggacgcaaccaagtgggaggccaaccaagtgggaggccag

SEQ ID NO: 264467 - DNA, 278 bp, Homo sapiens
cagagttcaggccgggccagaccgggccagtccagagggagaagccgctactgcaggagacagagcgatttttccgctgcaaatccttgagaagggaggatggaggcggcgggacgacccagtgaagccggccccgaacgccaagtgagtgtgtgccgtgcgcgcgcgggtagctgccgaccgcaacgacataaacttgaaagtgaccgctgtcccggagctccctgctcccaagggacccgtcgcgttgcagagttgtccggtcgggcctctggggc

SEQ ID NO: 264468 - DNA, 361 bp, Homo sapiens
accctgaaaagttgcttagtgtcctttgtcttccactctgtcacttataacggaggcagcctggccacaccgtgctggaactcttcaaagctctcacagaaccagaccaaaggctttttctgttgaatagtgctatggtctaaatttctgtgtctccccaagctcataggttgaaatcctaacccctaggacaagaggtggggcctttgggaagtgattaggtcatgagtgggattagtgcccttataaaaaaggccaaagagatccttatcctttcccccatatgaggacacgtgagaaggtgctgcctatgaggaagcaagccttcatcaaacatggaatctgcaggcatcttgatctc

SEQ ID NO: 264469 - DNA, 372 bp, Homo sapiens
tcaccaacaaggccatgaaacccagagaagggatgtgacttgagatccagccagacccagatccagagttgggagggcaggggtgctgcaatatgatcacagaatcgacactcgacccctcccagcgacctggcaaagtgggcactaactccattctgcagaggtggaaactgaggccagtgtggggaatggaaattgactgggctaagcttagaagcctgaactctgaccccaaagctctctcttgtacctttgacccccttgtcttgtcctgcagctcttaaggttacagtgagccagtttttcattttgcctttctccaatggaggcaccttggaaaatagagatctggctggagcaacctggaaaaaa

SEQ ID NO: 264470 - DNA, 467 bp, Homo sapiens
tatgggcccagaagagaagaccatcatgacagaaaggtctgcagctgttttcatccaggcctggtggcggggcatgctggtgcgacgcacactgctgcatgcagccctcagggcttggatcattcagtgctggtggaggcaggtgctggagaagctgctggcaaagaggcggaggatggtgttggagttctatgtgcagcaggaatgggcagcagtcaggctgcagtcctgggtccgcatgtggtgtgtccgccagcgttactgtcgtttgctcaacgctgtccgcatcatccaggtctattggcgctggcacagctgccattcccgtgtctttattgagggccactatgaactcaaagaaaaccaacttaatattcaacttgaaatctctttgggcttacaggcttgtaaggtgcaacaatgcataccccttccattaaaagaatgaccaggtctgctaaaaaaat

SEQ ID NO: 264471 - DNA, 395 bp, Homo sapiens
tatgggcccagaagagaagaccatcatgacagaaaggtctgcagctgttttcatccaggcctggtggcggggcatgctggtgcgacgcacactgctgcatgcagccctcagggcttggatcattcagtgctggtggaggcaggtgctggagaagctgctggcaaagaggcggaggatggtgttggagttctatgtgcagcaggaatgggcagcagtcaggctgcagtcctgggtccgcatgtggtgtgtccgccagcgttactgtcgtttgctcaacgctgtccgcatcatccaggtctattggcgctggcacagctgccattcccgtgtctttattgagggccactatgaactcaaagaaaaccaacgacgatccgacaccgacccattccgtc

SEQ ID NO: 264472 - DNA, 358 bp, Homo sapiens
tatgggcccagaagagaagaccatcatgacagaaaggtctgcagctgttttcatccaggcctggtggcggggcatgctggtgcgacgcacactgctgcatgcagccctcagggcttggatcattcagtgctggtggaggcaggtgctggagaagctgctggcaaagaggcggaggatggtgttggagtctattggcgctggcacagctgccattcccgtgtctttattgagggccactatgaactcaaagaaaaccaacttaatattcaacttgaaatctctttgggcttacaggcttgtaaggtgcaacaatgcataccccttccattaaaagaatgaccaggtctgctaaaaaaat

SEQ ID NO: 264473 - DNA, 271 bp, Homo sapiens
acatgactctgagctactgagacgatcaagctgacttccccatgctatgactatgcatgtgtttatgggtacgtacatacacatctatctttatataaatcactaataagatgggcaagtgtctagcatgcagtagatgctaaaacaaatgttgaatctttgttactcagataggtacatggacatgaaactgcctcaaagaaatgtgttaaggcctaataatgtgaattcaaaacattcaagaaataaatattttcactttccctttttc

SEQ ID NO: 264474 - DNA, 425 bp, Homo sapiens
ataactaatgcttacgtttttcactacaaatatttccccattctgttgttttcctctttttcttagttttgtggtccatatttttctttctgatttttttattgcttcataactttaaaagttatccttcttccagagttgacattatgctttatcaaataattgcactgatgatttttaaattctatacttctacttgatttgatgttacctaaatttaactccttaaatcagctgagatacattgtgctgccttagtaggagataggtagaaaggtgaggataggaataacatctaccttacaccattgctgtgacaagtgaaagacgcaatgcatgcatgtctaacactgcgcctggcaggtaaagagcagggactcagtaagtgacgaaagctattaatttaattcttattatcagtatct

SEQ ID NO: 264475 - DNA, 351 bp, Homo sapiens
ccaaaaccaggccagtcacactgttgcctgctcacgtttctgtcactttggtcatggggaatttacctataaagggaaagggagacttctcttgctttgaccacaataaattgagtgtgtttgcgaggggcagagtggtggccgtggaagctagcgtgtgtttaggccctgtctggggcacgtggaggaacagctttctccttctcattggcatcaggattaaagagaagaaaatgggttgctgtcttttctacctacgcagcagaaggagcattcacaaatgagaatttccccagccccagcagggtgtctaaggagctactttgtagagtgtaatttcatgtagtatct

SEQ ID NO: 264476 - DNA, 363 bp, Homo sapiens
ccctacagtaactctcccattgagttcttaatagaggtgagttaggttttgcagatttctggctcctcgctctgcttagagaagccagaaagaggccgggcacggtggctgatgcctgaaatcccagcattttgggaggctgaggcaggtggatcacgaggttaggagttcaagaccagcctgaccaacatggtgaaactccgtctctactaaaaatacaaaaattagctgggtgtgatggtgcatgcctgtaattccagctgctcaggagactgaggcaggagaatcacttgaacccgggaggcggaggttgcagtaagccaagattgtgccattgcactccagcctaggcgacagtgagac

SEQ ID NO: 264477 - DNA, 427 bp, Homo sapiens
tgggggaaggtgcaggaatgtgaggctcaatactcacgggcttaccatgatgcacagagtgggggtagacaagacggcacttccaagccacagcgtctgccctcatgccctatccctacccttcaaagacagaagtgggggccgggcacagtggctcacgcctgtaatcccagcactttgagaggccgaggcaggtggatcatttgaggtcaggagttcgagaccagcccagccaacatggtgaaaggccgtctctactgaaagtataaaaattagtcaggtgtggtggtgcacacctgtaatcccagctactcgggaggctgaggcaggagaattgcttgagcctgggaagtggaggttgcagtgagctgagatcgtgtcactgcactccagcctgggagacagagtgagactccaactcaaaaaa

SEQ ID NO: 264478 - DNA, 320 bp, Homo sapiens
ctgacacatagcagatcttcaggtgcaagagattcagactctttgtgctctccttcagcaaggcacaggttgaactcaggaaaagtaagtcagagattaaataaatgtcttcatataaaggtgtgagtttacaaagaagaatcaaatgaggaacccaagcaactgttgctttcacataacttggaggtttctaaggcagtgtttctcaatgtcaagatgtcacgtttcaaaagacaacctgaattctcagatgatttcaatgcaagattaattttcacttgcctccattttacaaataaataaatgccatactgtgaaaa

SEQ ID NO: 264479 - DNA, 300 bp, Homo sapiens
ggagaacccgcagaaacggcaccatgcactgttctccgggtgagacttaagcacacacagacctcgggggtggccaggtcttgctgcgtcccggagccattggggcctgtggctgccacaaggggcatacctaccagagaggacctttccatcgtgctgaagggacggttccggtggcgcaggccagagaaccgccttgagtgctgcctgcgggcagtgctgccggccggccctgagcctgcacagacgttcacactgactcctgcttgccgaagacactgctgcttggtgatgctgcgc

SEQ ID NO: 264480 - DNA, 447 bp, Homo sapiens
ttttttttgagatggagtcttttctggcactcaggctggagtgcagtgggttggtcttggcttactgcaacctctgcctcctgggttcaggcgactctcctgcttcagtctcccaggtagctgggattacaggtgtgcaccaccacacacaactaatttttgtattttcagtagagacagtgtttgtccacgttggccaggccggttttgacctcttgacctcaggtggtccacccgcctgggctcaagggatctccctgccttggccacgcaaagtgctgagatgacatgtgtgaaccactacgcctggccctctttttaatattcatttgaaggcgctggttttgttttgcgaaaggtgttgtaataaaagtgaatttttatcacaatgttgggaatgcacaagtattcaaagctgtagttgttgaattaagcgagattgggaag

SEQ ID NO: 264481 - DNA, 437 bp, Homo sapiens
cccttcgggcctcctgccctggaggtcatctcccctagaatacagtgtctgtggagaagacaggcccacctactgggctgcccctctcctcccaccagctaggggagcaagaactcagaggagagcttcagagcatcagggagggggcgcatgactgcctgctgagcttccagtgtactggccctgtttcaacatctgaggagccgtgagcccctcgagccctctctggcccctgggttcctgtctgtcaaataaggagttcagctgatggctgagtttcttctgtttcagcattttggctctgtgaactgcagggacaatagcctgaggtccctccagccacctctgcctcagccagcaggacaggttccagacgtttttccagtagctttcaggctgaaggggagctggggccacgctgaacccaagggggagat

SEQ ID NO: 264482 - DNA, 423 bp, Homo sapiens
tagagacagggtcttgctgtgttgcccaggctagtcttgaactcctgagctcaagtgatcctcccaccttggcttcccaaagtgctgggattacaggtgtgagccaccacaccctgttggaagtcttctatccaaacaaaagggggagtagcgcttggagcggtggcagccatcttgtgactaggatggcagggccaggaggtactgggagatggtgacgcagagctctgacaccacggaatgtagggaccggcttggagctccttccctccagactttctgctctaagaggcaagtcatgctcttactatttcaggcatccttagttcaattttctcttacttatagctgcatgtgccaaactgccagagctcattttgtggatgctgaggtagattcgtctattgatgaccatttactttg

SEQ ID NO: 264483 - DNA, 401 bp, Homo sapiens
tccctcaatgtttttttactctttttttctccattctgttcctgacacccaaattcaggtcttcatcatcatctgcctcatctatggcaataacccgacaacttttccccagctccgtatctccttctttcggtttattctccacactgccatcaaaactctttcaaatatacagacctgactgtattacaccctttgactaagtatattttatggctgtcaaatagctaatgcacatgatgctaatactaattccttagcctagcagtttacgtgcatcacgacataaggcttcaggttctgccattaaccccgtcatcagaaaacacagcctatggcaggctttatcaaagcatgagcaatctacaaaacaatcatataggcacttacaaaaaatataa

SEQ ID NO: 264484 - DNA, 554 bp, Homo sapiens
gaaatgttttgttagccatcaggcaaactgaaaatagatttagaaagtatttaagattcattttttcaatgcacagtaattgagaaacctgtatgtgccaggcactgtgttagcactggagctctaaagggcagaaggctgaatgtgatagatggatctctaccttcagggtgcagtctagtaacacatagaaggactgagaccaatagccatgttgaagaggagacgatggttctcccatcaccttcattactccacctgctgctcatgaaggttgctgcgggatgtgctgattaacttgtgttttggtcgaaatctgaagtgatgctgaatcttcgtcctttaatgttgtctgttttattgttgaacaattttatcatgcatcgtgtgaacttttatgcttatggtgtgtatcatcacagcactggacaataatgactcacacagtagaataacataactgtatacttgcatcaagggtagttaaaacatggtaaggttttctcatgtctttattaataatgattaaaaaattaattattcacctctgagtt

SEQ ID NO: 264485 - DNA, 293 bp, Homo sapiens
ttttttcttccaagtttttttgtagagatggggtttcactatgctgcccaggctggtctcaacctcctgggctccagtgagcctcccaccttggcctcccacccaacatccttgacatcccaccttttgttctatttctgcaggaatcgctgtgtgtagaaagaaagcctttggtcagtggttcccagacttggctaggccgggatatcatctgagaatcctgtaccccgagtttgtacacacacccctagattcctttgctccacccccaaattggactcatttgggctcgg

SEQ ID NO: 264486 - DNA, 281 bp, Homo sapiens
gcaggaggtaccatgtgattgatgggttaagcacaaaatctccctctttgaaaaccaagacatttcccatctcattttttcctcaagaacttcacacggtgttacctgcagtctggcatatgcatgcagacacatactcagaacaatttcctgaacgtcaggaactaaagctgacatgataagtctgggaacaaaacaaaggcagagcccagaaaacgaggaactgctgtcaatagcaacagtcgctgatcacagcggccccttaggctctcacagctgct

SEQ ID NO: 264487 - DNA, 487 bp, Homo sapiens
cagaggaatgggaccagaaatcaggcaagcccctgtgaggagttccatggcagcgcgcaggcggggcattcctaacctccagagggaaccatgagggatcctgtgttctggcagatgggccagagaatttgaacttgggaccattgtgtgagccctgggtgtgtgagcccttcaaaagtcctctcagcacgtgagaactatcattatggatgatgctagggtggtgggggccccagaacagacctgtatgttgagttcaggggttgctttgttgcatttctgggcaggggcaagaggcccagggtttgtcatctgccccttcccctgccttatccccttcccttccaagttccccaggctccttttctgccagtctgtcaagagagggaagagtggcgaagagtcctttgtgcctggacattggggactgaacatggcccttttgcctgggcattgcccaaacatatatttctactggcataacttt

SEQ ID NO: 264488 - DNA, 445 bp, Homo sapiens
tattctcttaatcatgttttagaatatttttgcatactatgtaatacttaagtatatgagtaaaatgtactaatattgatctaaacattgaaaagtgatctttagtaatagaaggataagataaaaatatgtagacaccactcatttagacaaggctatacccaagtcatctctgttcatggatttaaagaggcttagtgaataaaatatacatgctcagattccataaaaaatgttacctttggccgggcgctgtggttcacgcctgtaatcccagcactttgggaggccgaggcaggcagatcgcgaggtcaagagatcgacaccatcctggccaacatggtgaaagcccatctctactaaaaatacaaaaattatctgggcatggtggtgggagcctgaaatcccagcttctcgggaagctgaggcaggagaatctcttgaa

SEQ ID NO: 264489 - DNA, 352 bp, Homo sapiens
tgggcgaaatagtccctgaaacctgcccttctgtgactgggcctcactaactcacgataggattgactgggtcatatattaatttgccaagtcagacctccactgtgcattaaacatacccctgacaagcagcatcgtttgttttcacagccatcatactgggtaattaaactgaagtggagatactttacagagatcatttgatgtgttttttcccagcttgactgaggtataattgacagatgaaaattatatctgtttatggtatacgacatgatgttttgatgaatgtataccttgtgaaatgattaccaccatgaagctaataaatgcatccatcacctcaaaaaaa

SEQ ID NO: 264490 - DNA, 1047 bp, Homo sapiens
cagtcacaagaggctctcagcagctctacagccaacaaacgtggttggtttgtcctttttttttttgttgttaggtgatgtattcattttctattgctgctgtaacaaattaccacacatttagtgactttaaaacaacactaatttattaccttatagttccagaggtcgaaaatctgcaacaattctcactgggctaaagtcaaaagccgtgttgctttctgaagtttccaggaaagaatccctttcctcgctttccccggttctagaggccgctcacgtaccttggcttgtggctccatgccttcatctttaacatcagcaatgttgcatctctgtgcctggcttccatagtcatatcttcctctggtgcttccttctcccacctcccctcttccacttttaagggcccttgtgattacactgcacccacccagatattctaggcttgtctccctattttaaggccagctgattagcaacctcgaatccatccgcaaccttaattccccttttccatgtaacttaacgtattcagattcgaaaatgaagatgtggacatctctggggggtcaatattctgcctaccacagttgccacatttttctttttgatttttttagaacataatatctagctttctaccttttcttaaacaaagatctggcaacacaggacccaattcttgcctaatgtgccccattacagtatggcagcaatgatcttggattgagctgctccctgtttgccccaggccccacctgccttactgcaccctcatacaatgcccagagtaggttgcattaggcggtcagttatcccatcagacgtgcttcattcatttgcatttccccctggccttatcagcctttgagcttgcagcacctccttgtaactattaggaaaagccaactctacacttttgctatctgtttacatcagaaatatcacagagtactgcatgccactggtgcacacccacatgtgatacaggagaggggagctcaaggttatctccaacccagggacgcacagcagtggagaacc

SEQ ID NO: 264491 - DNA, 863 bp, Homo sapiens
tggcttccgcggaggtttcggcagtggcatccggggccggggtcgcggccgtggacggggccggggccgaggccgcggagctcgcggaggcaaggccgaggataaggagtggatgcccgtcaccaagttgggccgcttggtcaaggacatgaagatcaagtccctggaggagatctatctcttctccctgcccattaaggaatcagagatcattgatttcttcctgggggcctctctcaaggatgaggttttgaagattatgccagtgcagaagcagacccgtgccggccagcgcaccaggttcaaggcatttgttgctatcggggactacaatggccacgtcggtctgggtgttaagtgctccaaggaggtggccaccgccatccgtggggccatcatcctggccaagctctccatcgtccccgtgcgcagaggctactgggggaacaagatcggcaagccccacactgtcccttgcaaggtgacaggccgctgcggctctgtgctggtacgcctcatccctgcacccaggggcactggcatcgtctccgcacctgtgcctaagaagctgctcatgatggctggtatcgatgactgctacacctcagcccggggctgcactgccaccctgggcaacttcgccaaggccacctttgatgccatttctaagacctacagctacctgacccccgacctctggaaggagactgtattcaccaagtctccctatcaggagttcactgaccacctcgtcaagacccacaccagagtctccgtgcagcggactcaggctccagctgtggctacaacatagggtttttatacaagaaaaataaagtgaattaagcgtgagaaaaaaaaaa

SEQ ID NO: 264492 - DNA, 629 bp, Homo sapiens
tgcacaccaccctggattacagagtgagatacacttctttcgaggaaaaaaaaaaagtggggggggtccagttcacgcctccgcgccattcaacgcctccggccacgtcggtctgggtgttaagtgctccaaggaggtggccaccgccatccgtggggccatcatcctggccaagctctccatcgtccccgtgcgcagaggctactgggggaacaagatcggcaagccccacactgtcccttgcaaggtgacaggccgctgcggctctgtgctggtacgcctcatccctgcacccaggggcactggcatcgtctccgcacctgtgcctaagaagctgctcatgatggctggtatcgatgactgctacacctcagcccggggctgcactgccaccctgggcaacttcgccaaggccacctttgatgccatttctaagacctacagctacctgacccccgacctctggaaggagactgtattcaccaagtctccctatcaggagttcactgaccacctcgtcaagacccacaccagagtctccgtgcagcggactcaggctccagctgtggctacaacatagggtttttatacaagaaaaataaagtgaattaagcgtgagaaaaaaaaaa

SEQ ID NO: 264493 - DNA, 454 bp, Homo sapiens
gcaatctacatacatgtaacagttgagatacccagagtaaatcaaagttttatgagaagagattagaaagtaaaccaagatagacctctgatgaataatcatatttagaactagacccaggactaaaaaatacaagtagagaaaaagaagaggtaagcagaggcttagaaagattaccatgaggtttagattcaaggcaagggagaagaaagtctcaagatggtgtttcaaaacaccatcagtggccagacacagtggtgcatgtctataaagctacttagaatgctgaggcaggggaatcgcctgagcccagcctttgagattacagtgagctgtgatcatgccaccttactccagcctggatgacagagtgagaactcatctctaagaagcaaaacaaaactaaaacaaaaaaccaccatcagtggtgttttatgtcaaaattaatttaagt

SEQ ID NO: 264494 - DNA, 459 bp, Homo sapiens
gagtaaagatgggatgtggctgagcttttaagttgttttcttaaacatgattgcagttctatgtttaaaaatgagtcaagaacatctgcttctttctagggagatattccatggcttcttaacaactgctctaacttttgtggcagctgtctgaaagttagctgtctcttgaggcagtgatgtctttatcactagggggttttcactaaaatctcagtgatgacttgcagatgtcatagatgttggatgaggggaagggaagttgaattacatggcattggagatccttcctaaccctgagagtctttgaggttctaagttccattaaaactatttcaggacacagttaagagcagagcagcaatctttaggtcagtgttttatggcatttggccaaaggccatttaaaagttgatggagcaaagagaagtggatataatgggattttgaaaaaaaata

SEQ ID NO: 264495 - DNA, 1158 bp, Homo sapiens
tgccccggaagcttctgggccacggactgccggaccgttgggctgtgaggcagcgtctcagcgaggcggcacccggagccatgtcttcacataggaggaaagcgaaggggaggaataggagaagtcaccgtgccatgcgtgtggctcacttagagctggcaacttatgagttggcggcaactgagtcgaatcccgagagcagccatcctggatacgaggccgccatggctgacaggcctcagccaggatggcgggaatctctaaagatgcgggtcagcaaaccctttgggatgctcatgctctccatttggatcctgctgttcgtgtgctactacctgtcctactacctgtgctccgggtcctcatattttgtgcttgcaaatggacatatcctgcccaacagtgaaaatgctcatggccaatctctggaagaagattccgcattggaagctttgctgaattttttctttccaacaacttgcaatctgagggaaaatcaggtggcaaagccttgtaatgagctgcaagatcttagtgagagtgaatgtttgagacacaaatgctgtttttcatcatcggggaccacgagcttcaaatgttttgctccatttagagatgtgcctaaacagatgatgcaaatgtttgggcttggtgcgatcagccttatcctggtatgtctgcccatttattgccgctctcttttctggaggagcgaaccggccgatgatttacaaaggcaggacaacagagttgtaacgggtttgaagaaacaaagaaggaagcgaaagaggaagtctgaaatgttacagaaagcagcaagaggacgtgaggaacatggtgacgagtagcaagagaccaaagtgtttgcttgagcaagtcctttaactttcttgggcttcatttcaccaatcttcagaatgagaaggttgatttgatgaataggagaagtgatttatctcagaagaaaaaaaagaaaatctttatataagcattattttcccctcaagacaacagaaaccattcagagcagaggggactgtctcagccatgcaaacctcatggagcattttggaaagttaaaaattgattcttatttttgtcatgtttactttcaaacatgaaataaaattgagttctgttttcatgcatcaaaaagaa

SEQ ID NO: 264496 - DNA, 428 bp, Homo sapiens
ggaataacttgagtggtccttaaccccactttattgagacttgaggttgagaggtacgctgggataaacatgggtttttgtttctccataggtgaataagccacagagtagattgtgtctggtaagatgaggactctggctggcttctccagcaacctggccccctgctttaaggactatggtctgtcgccatcactgcgtatgtctgagcagcccgttaatttgaatatattttgtagtcaagaattgatagacaggtagaaattttatttgcatgtaaaaatacataatacatacaatgagtcaaagaacaattttttttcaataatctgcgatttgtgtcattcatgtattgacatggatcattgagagctatggggttatgctgacttacagcccagtagcctgtattgctgagaaattcattg

SEQ ID NO: 264497 - DNA, 414 bp, Homo sapiens
cttaaaaatgaagaagtggtgttagccacataactctgaatttactaaaaactattgaattgtatgtttaaatgggtaacttgcacatatgtgaatgatagctcaagaaagcttttaaaaactaacccttgggctgggtgcggtggctcatgcctgtaatcccagcactttgggaggccaaggccggcggatcacaaggtcaagagttagagagcaacctggccaacatggtgaaaccccgtctctattaaaaatacaaaaattagctgggcgtggtggtgcatgcctatagtcccagctactcaggaggctgaggcaggagaatcacctgaacctgggaggtggaggtttcagtgagccaagattgcaccactgcactccagcctggcaacagagcgagactctgtctcaaaa

SEQ ID NO: 264498 - DNA, 355 bp, Homo sapiens
tttttttttagtagagacggggtttctccatgttggtcaggctggtctcgaacccctaacctcaggtgatccgcccgcctcggcctcccaaagtgctgggattacaggcatgagccaccatgcccgacctgacaaatgcctagttttaaccaaaaaatgaatatgttctaagtcggatgttggttaaaatgcacataattatccacataaagtgaatcattgaaagcctggggtttttattttccttttttatctctctccttctctttctcgcttacctctatgaagcttcccattctgacctgagaactcagccgtgcattattactactcacaccagatcctcttcccaaat

SEQ ID NO: 264499 - DNA, 455 bp, Homo sapiens
tgatgtgccctaaaaactaaaagtatataatcaagacagactgcaaacaacctcgctatatcgcatagaagcattgtttcagagttccaaccaggcgggacacaagtgaatatcctctaagaggctatggaatctgtgacaccccattccccgattctcctagttcaaaaccaggtttgggggatcaaagagaggtgatttactagttggaagccaaaaagttgaagtttctgatctttagatcccatttaatctcttgagaagatgtatgatttgggagcatcatacatttgttttggggtaaggaaggcaatttgtatgtgtgagtcccacatgaacacgcacaggcactaaaatggcactactttgggctcgagaaacacagagtgaacacaacacacaaaagttgctatcatggagtttacaagctagtgtcgggaggcaatcaacaaaaa

SEQ ID NO: 264500 - DNA, 443 bp, Homo sapiens
ccacgcccggccccggagcaggcttttacgcatgccccgcgcgcccccttgtgtccggaatttattccttccggtgggttcgcggtctagctgaccaagaacggaactggggactttcgcagtgagagttacagctcttaaagatggcaccgacccaggccgggcgcggtggctcaggcctgcaatcccagcactttgggaggcggaggcaggtgaatcacgaggtcaggaaatcgagaccatcctggctaacatggtgaaaccccgtctccactaaaaatacaaaaaattagccaggcatggtggctggcacctgtagtcccagctacttgggaggctgagccaggaaagtggcatgaacccgcgaggcagagcttgcaataagccgagatcgtgccaatgcactccagcctgggcaacagaaggagacactgtctcaaaaa

SEQ ID NO: 264501 - DNA, 942 bp, Homo sapiens
tagtcattaacttttaatattactctttgttgcatcattaatataacctaggaatcaccggcgggtatagggtcaggtgctgaagggacattgtgagaagtgacctagaaggcaagaggtgagccgtctgtcacgcccatataagggccgtttgagggctccttggtcaagcggtaacgccagtgtctgggaaggcacccgttacttagcagactgcgaaaggcagtctcctttctttgaaggagtcagggaacactctgctccaccagcttcttgtgggaggctggatattttccaggcctgcccgcagtcatccggaggcctaaccccctccctgtggtgcttcactggtcacgctccttgtccactttcatgctcctcccatactcctggttcctctttgaagttcacagtagatagcggtagaagaaatagttaaagtcttaaagtatttgatctttcttagaaatgcatagaagaaaacgctgacgtttgctgccttccctctctgcttcagctacctaaaagggaaggggcccctgtcctgtgatcacgtgacatgcttcaccttgtcaatcactcagaagattcaccctccttaccctgtccccttgtcttgtatgcaataaatatcagccgtttggggccactaccggtctcctcctcttgatggtagtggtcccccgggcccagctgttttctctttatctctttgtcttgtgtctttatttattataatctctcatctccgcacacggggagaacacccactaagccccgtacggctggaccctacatgttctgaggaaaatttatagtcattttaagatgacttcattatggtgggattacagaagtaagccacccagcctcgtgactacattattaatgaagaaacgattcaaaaagcttagtatatatcttacaaatggaaaaaaaata

SEQ ID NO: 264502 - DNA, 264 bp, Homo sapiens
gatttccagctgatgcctaagtggatttttctggaagaaagaatgtatctttagaaagcagagtgaggatccttcctaatgtaatttgaaacatagtttcgtatgtctaacttctgctttgcctcatgctcactgaaatctacagctagcctcattttccacttgtttttgactctctcaggcatcttgaggattgagatcatgtcgtagttatcttttagacttagtaaatgagtaataaatgtttcttttgagtgactcaaa

SEQ ID NO: 264503 - DNA, 457 bp, Homo sapiens
caaaatgctgagattacaagtgtgagccactgtgctcagccaaaataaaatgtttcttattctctgatcccactaaagggacaaatcccatttcagttaaacacccagtcataatcttaagtcttaaaccttggcgcaagtgccagttaatgagaaatgacatctccttgcttggacctacatttgttctttattcctttatatatttaccgagtacccgccatatgccacacacagttctaggattggaggagggagcaaagagcaaaaacacatgggttctctctcatgatgctcagtttgctgacgatacaaggaacaagagaaaactctgcagaagagatattttagctgacatgggaaagatgaaggagttaaatggggcaagtatttcaggcaaaaggagaagcaattttcaaaggcttgaggaggacagtggagcatgctgggacactta

SEQ ID NO: 264504 - DNA, 324 bp, Homo sapiens
agggatccaccatccagctagctcacattcctcagcagccagcaggaagcttccggagaagaggcagctggctctctgtgaagcatggaaggcctcatgaattggcccatagcatctacctctgcaagaggattggaaaagtgcctggaaggaaggaggaatgagaaatgctcttgggtgaagaaagctttcatggaatggagttggagctggggtaggaggggctacggaggaggaggaacccaagcttgtgtaacagtacctgctacacagcaggtgctcaataatgatttgttgttggaataaatgagctcctggttttcc

SEQ ID NO: 264505 - DNA, 340 bp, Homo sapiens
gggagaggggcagctcctcagacggagagttagggagaggagggggtatttggagccaggatagacagagcagcgtggtgctgggacagcaagaaggggcagctggtgacaaggagagcagagggagaaccacagcagggggagacctgggatctgggggtgccaaagagtggggacaaggaagtgaaacagggaagaggggatttaacagggagagcagagataagggaagaaagaggcagaggttgcagtgagccgagatcgcatcactgcagtccagcctggatgacagagtgagactccatctcaaaaaataaataaataaataaaaatgaaatta

SEQ ID NO: 264506 - DNA, 250 bp, Homo sapiens
caccatattggccaggctggtcttgaactcgtgacctcaagtgatccacccgccttggcctcccaaagttctgggattacaggcgtgagccactgtgcccggccttaaaattatttatgttttcactcctctaggttgtgtgtatgtgcccacctttctgtttttaaacacgccgcttcttggcctggggagcccttttcgtttttctcgctccagctagcccttgcccccttgtcagttagtgcttgtt

SEQ ID NO: 264507 - DNA, 494 bp, Homo sapiens
ggacgttgctcattccttatgttttccaagtccacaaaacccacatgatacagtggatatttctgtgggagttggacctacacatgatctttaatagaggcctggcctgggtgtccatgttttgattcagatgcattggctttaagtaatagtaaatcccaactgaaattgacttaagcaataaagaaacttaccacacataaggccgggcgcagtggctcatgcctgtaatcccagcactttgggaggccgaggtgagtggatcacctgaggtcaggagtttgagagcagcctggccaacatggcgaaaccccgtctctactaaaaatacaaaaattagctgcatgtggtggcatgtgcctgtattcccagctgcttgggaagctgaggcagaagaatggcttgaacccggaaggtggaggttgcagtgagccgagatcacgccactgcactccggcctgggtggcagagcgagactctgactcaaaaaaaaa

SEQ ID NO: 264508 - DNA, 624 bp, Homo sapiens
tgaaactgtcatctggaataggttccatctcttatgtgtgttagatcaaaccaaagaagcccccagccatgcccaaatgctgcttcaaaagcctgccttccagtccttacaaaaaccttgcaggattaaatgtgttaacttttttatttttgtacagtttctaagtgatttttgctagtgatgttaaaatgaattaagtttatttgaggggtgtgagcacctcctccatttaaataaactggtgactttccttttattttttaaaagtggaaacccgttgtgtgcctctcgatttaagggtttctgatgacattattcttaagaccagcattgatcctttatatacaaatatatgttttccttgttttttattgctatttcagaagaaaatgaaccttttattttgctctacccagtaactgcgctggtacatagacgcactgagcaaacaaacttttgtaaccacctctgactacttttgtatatcaaagctagtagttcatgaaaatatttggatctagtttctaagttattttagtgttttatatgttccccaaaattactttgaatctgtcaccagcataatgagttcttggtgatacaatggtgagacttgtaatgagc

SEQ ID NO: 264509 - DNA, 537 bp, Homo sapiens
  misc_feature (2)..(2): n is a, c, g, or t
  misc_feature (371)..(371): n is a, c, g, or t
gntgtactagaggatcccagcgctgagcaatacaaaggctaagaagggcagatctgatctgatctgagccaagaagcgatggctcctaagaaaataacctaccagcatctcagaaactccctttgtcttcccatgtttgaggttctacccaggaagcaggcaccaaatggaaatatctgaaaccatcccagcaacccaaccacagctggttctccctggagaccatgaaccacactgtccaaaccctcttcactcctgccaacaccggccgctccaccaaccatgagatgctcaaggagaagcatgaggtggctgtgctgggggcaccccacaaccctgtgcctccagcgttcaccatgatccagcgtatngctcagcgctgacatactctgaatatggttgtagggggggagggggtgtgtgtgtgtgtgtgtgtgtgtgtgtgtatgtgtgtgtgtgtgtgtacacgcgctgtgtccatcagtatcagtgcctgcctagagtaggaaaattacatcccgtggtctgtatggagga

SEQ ID NO: 264510 - DNA, 654 bp, Homo sapiens
ccagacgacagcaactctggtaagattcagaaccatcccagcaacccaaccacagctggttctccctggagaccatgaaccacactgtccaaaccctcttcactcctgccaacaccggccgctccaccaaccatgagatgctcaaggagaagcatgaggtggctgtgctgggggcaccccacaaccctgtgcctccagcgttcaccatgatccacatctgcagtgagacctccgtgcccgaccatgtcgtctggtccctattcaacaccctcttcaagaattcctgctgcccggacttcatagcattcatctactctgtgaagtctaggacaggaagtctatggacaggaagatggttggtgacctgactggggcccaggcctgtgtctccactgccaagtgcctgaacatctgggccctggctctgggcatcctcctgaccattctgctcatcatcatctcagtgctgatcttccaagtctctcgatagaacaggagacagcatccgggccaggagctctgcccacaacctgtctcccatgcactccgccttccattccttgccctgcccccaaagctgagtcctgtatcagccctttatcctcacacacttttctacaatgtcattcaataaagtgcatgtgttcgtggtgc

SEQ ID NO: 264511 - DNA, 692 bp, Homo sapiens
ccagacgacagcaactctggtaagattcagaaccatcccagcaacccaaccacagctggttctccctggagaccatgaaccacactgtccaaaccctcttcactcctgccaacaccggccgctccaccaaccatgagatgctcaaggagaagcatgaggtggctgtgctgggggcaccccacaaccctgtgcctccagcgttcaccatgatccacatctgcagtgagacctccgtgcccgaccatgtcgtctggtccctattcaacaccctcttcaagaattcctgctgcccggacttcatagcattcatctactctgtgaagtctaggacaggaagtctatggacaggaagatggttggtgacctgactggggcccaggcctgtgtctccactgccaagtgcctgaacatctgggccctggctctgggcatcctcctgaccattctgctcatcatcatctcagtgctgatcttccaagtctctcgatagaacaggagacagcatccgggccaggagctctgcccacaacctgtctcccatgcactccgccttccattccttgccctgcccccaaagctgagtcctgtatcagccctttatcctcacacacttttctacaatgtcattcaataaagtgcatgtgttcgtggtgcaaaaaaataaaaataaaaataaaaataaaaaaattaac

SEQ ID NO: 264512 - DNA, 668 bp, Homo sapiens
cttcctcctatgaatcatgaatgttctcactaccatctagaatgaaccatcccagcaacccaaccacagctggttctccctggagaccatgaaccacactgtccaaaccctcttcactcctgccaacaccggccgctccaccaaccatgagatgctcaaggagaagcatgaggtggctgtgctgggggcaccccacaaccctgtgcctccagcgttcaccatgatccacatctgcagtgagacctccgtgcccgaccatgtcgtctggtccctattcaacaccctcttcaagaattcctgctgcccggacttcatagcattcatctactctgtgaagtctaggacaggaagtctatggacaggaagatggttggtgacctgactggggcccaggcctgtgtctccactgccaagtgcctgaacatctgggccctggctctgggcatcctcctgaccattctgctcatcatcatctcagtgctgatcttccaagtctctcgatagaacaggagacagcatccgggccaggagctctgcccacaacctgtctcccatgcactccgccttccattccttgccctgcccccaaagctgagtcctgtatcagccctttatcctcacacacttttctacaatgtcattcaataaagtgcatgtgttcgtggtgc

SEQ ID NO: 264513 - DNA, 1365 bp, Homo sapiens
  misc_feature (20)..(20): n is a, c, g, or t
  misc_feature (141)..(141): n is a, c, g, or t
  misc_feature (1177)..(1177): n is a, c, g, or t
atgcagctcagcctgggctncacagccaggtgtcagatgtgtctctgctgatctgagtctgcctgtggcatggacctgcatcttccctgaagcatctccagggctgaaaaatcactgaccatggcaccatggtctcatccntctgcacagctgcagccagtgggaggagacgccgtgagccctgccctcatggttctgctctgcctcgggctgagtctgggccccaggacccacgtgcaggcagggaacctctccaaagccaccctctgggctgagccaggctctgtgatcagccgggggaactctgtgaccatccggtgtcaggggaccctggaggcccaggaataccgtctggttaaagagggaagcccagaaccctgggacacacagaacccactggagcccaagaacaaggccagattctccatcccatccatgacagagcaccatgcagggagataccgctgttactactacagccctgcaggctggtcagagcccagcgaccccctggagctggtggtgacaggattctacaacaaacccaccctctcagccctgcccagtcctgtggtgacctcaggagagaacgtgaccctccagtgtggctcacggctgagattcgacaggttcattctgactgaggaaggagaccacaagctctcctggaccttggactcacagctgacccccagtgggcagttccaggccctgttccctgtgggccctgtgacccccagccacaggtggatgctcagatgctatggctctcgcaggcatatcctgcaggtatggtcagaacccagtgacctcctggagattccggtctcaggagcagctgataacctcagtccgtcacaaaacaagtctgactctgggactgcctcacaccttcaggattacgcagtagagaatctcatccgcatgggcatggccggcttgatcctggtggtccttgggattctgatatttcaggattggcacagccagagaagcccccaagctgcagctggaaggtgaacagaagagagaacaatgcaccattgaatgctggagccttggaagcgaatctgatggtcctaggaggttcgggaagaccatctgaggcctatgccatctggactgtctgctggcaatttctttttttctttcttttcttttctttcttttttttttntttttttttttttttgagatggagtcttgctctgtcaccaggctggaatgcagtggcgcaatctgggctcactgcaacctccgcctctcgggttcaagtgattctcctgcctcagcctctggcaatttctagagggaggaatgggtgtttgagtgcagagacactggtctggggtgatccatggagga

SEQ ID NO: 264514 - DNA, 571 bp, Homo sapiens
tggtgaacaggatttgtgtagcctatgttcattgtcatgtcagtgaggtcaactgacagaaggagagccagaaaataaaaaataaataaactgagaggaaagattgagttatttgatggactgattgcctcgacacctctgctcagagaaatgcattttgccaaacgaatggctcatctagttatcacttgaaaggctaggcaatttgtctgtggacaggatacagaagaatgaatgtctatggctagcccatagtttcagctgggttagaaacatcaggcttgactgataaagctagaggttgcttttctagacttttctccttgggggtttaccagatgcacaggagttaaaaggaggatgtggaagcataacagatgacatttgtggatatgtctaaactgatcattaaaaagatgccagcaatcctcaatttttaaagatttgcatataaaacgtaccttttgtgaaacctttccattaaatctaatgcataaggaacttcattattaattcctaattttaaaagcaacaaataaaggaaacattattgaacatttaaaaaaaaaaa

SEQ ID NO: 264515 - DNA, 451 bp, Homo sapiens
tgctgggattgcaggcgtgcagcggctcccggcctcgcctctgcttctttcacagttgtttgtacagctggccgcccagtggggacttgagcaatactaaaagaaccatagattcttccattgcaattctttccgttggctgtctcctgttttcacatacttccttgagccagaggtcatcccattcctctcccttttcccaaaagggctttctctctagggggtcccccccaacccaacgtctttggaaaaggacagtctatggcttactatcaacgatgtaacaaaattttggccatccaagaccatattttcatctaatcacttggtccacccaatccagtagagatgttcttaggcatgtattttcacacgtgctttgatgacaataaagagaaaactgccccatccagattcttaaataaacaaaagtaattactctaaaaaaatt

SEQ ID NO: 264516 - DNA, 232 bp, Homo sapiens
cccattctagctgaagaaagcataggcatgttagaagtatgaactgccactaaaaaaaaaaaggagaagaaaaaattccatcttgaatcagacccatggtctagtgagtctatgcttctttcacttcccccaccctgtaaagtcagggacagggattaagattttgtcatttcgacaaacccagaacctgccacagggcctgacacacagcaggtcctgcataaatgtttgc

SEQ ID NO: 264517 - DNA, 1085 bp, Homo sapiens
gcggggaggtggtcccaagcctgtcagtgggaacgagggctgctgggaaacccacagtccaggtctctccccgagtgagccctccggtccttaccagcgtaataaatgggctgctgtactggcctcaccctgcattagtcaggatgctcttaacaaatgaccatgttcctgctcagaaaccgcccaaggctgcaaagagcaggaggaccaagccaggagaagccctgggccctcctgactcccactttgggctctccctgccctggtgaaatgacagaacggccaacttgacacgctgaagctgctctgtctcatgcgtcctcctcatttctggatccagagccagggctgccaggagtagccagagagctctgtgtggtgatgttcatattagtgaggtttaccttgaccacgagcagtgggaaactcaaaataatggtggcttatttctcatctaaaaacatcccggggtgggtggtctgggactgatctggtggacccaggctccgccttgttgcttgactgttggcagcacctgcttacttaccactcatggtgcaagatgacacttcagcctccgccaaaatgctcaccttccagccagcaggaagtcggaaggagaagaaaggggacagagccccatggcgtccatccttagaggatgctgccacctgaacctctgctttcatcctgttggtcagaacccagtcacatgaccacacccagtggcaacggaggctgggaaatatagtctttattttgggcacccatgtgtccagcaaaactgggggttccatcagtcggcaagaacgggagagtggccgatgcagtggctgatgcttgtatcccagcactttgggaggtcgaggtgggcagatcacctgaggtcaggagttcaagaccagcctggccaatatggtgaaaccctgtctctactaaaaataaaaaaattagctgggtgtgctggcgcacctgtagtcccagctacttgggaggctgaggcaggagaatcgcttgatcttgagaggtggaggttgcagtgagccaagattgtgccactgccttccagcctgggagacagcaga

SEQ ID NO: 264518 - DNA, 207 bp, Homo sapiens
cacatttaactgggtgtcttgggtcgttttgctaaatctggcagcctgtctaggaagccctctggcttgtttgctgtggcccacagccctcagtggttcagctttgtgtctctgtggaaggccccagacccccattcccccagttcccatccttaacagggtaggagcaggtggacggctgtgtgtccagcacaaggtgtttccata

SEQ ID NO: 264519 - DNA, 291 bp, Homo sapiens
attgggaagcagtatgcctaatgggtaaagcgtagtctctggatacagggcgtgggtttaaatttcagctgcactacttctagctgtgtaacttctaacaggctatttaacctctctggtcttggaatctttagctgtaaaatgggcaaataatagcactcacaccttagttgatgtgaggattaactgaatttgcaaagaacttaatgcatgtgattcttgattacttgaattgtcataaatgtaattccaagcttggaagtgttttaaggaaacttaataatgtttttc

SEQ ID NO: 264520 - DNA, 516 bp, Homo sapiens
acccgctaatctgtgacaccgggcaagcactactgggattggactttcctagcattgtccaattgaaggttgagacaacaaagccctacggactgggacagttattgggaccaaactctcctgagagctggcacgagtggacaaagagaatgccgcttgtcactgcatcgtgggcttccagcctatttgactggctggctgacacaggctgacacttgcaccctcagctggcagaggccagagtgttctcactgatggaaaagccaagctctgaggacataaaacaagacccaaggagcacctcatctggtttttgtcttggggacccacagcaaaattagtctgaacagacattggtttgcagagaactgtgaactcaccagtctttgaggcctgtgttcttgccctatgattctcttctgtatgacacaacacaaaagacacagacatgggaaaataatgaccatctctgggaggggaggaatcagaaaacaataatacctcccctcaccacca

SEQ ID NO: 264521 - DNA, 634 bp, Homo sapiens
tcacaactgtaatcccagcactttgagaggccaaggtgggcaaattgcctgagctcaggagttcaaaaccagcctgggcgacatggtgagaccacatctctactaaaaatacagcaagttagcctgtcatggcggtgcacacttgtaatcccagttactcgggaggctgaggcataagaatcgcttgaacccagcaggtgcaggttgcagtgagctgagatcaggcactccagcctgggtgacagagctagactctgtctctgagaagaaagaaagaaagaaagaaagaaagaaagaaagaaagaaagaaagaaagaaagaaagaaagaaagaaggaaggaaggaaagaaagagaaagaaagaaagagaaagaaggaaggaaggaaggaaagaaagaaagagaaagaaagagagaaggaaagaaagaaagaaagagaaagagaaggaaagaaaaagaaaaaggcagaaaagaaagagagagaaagagagaaaggaaggtaggaagaaaaagagagaaagagaaagaaagaaagagaaggaaggaaggaaggaagattctactcttagttgaattttttaaaaaatgattagatttgaattaagaactgccctactgtagagctcattttattga

SEQ ID NO: 264522 - DNA, 219 bp, Homo sapiens
ctggctccactcattatgtgactgtgggaaagtcagtgaacagtgtgcctcagtttcgtcatctgtaaaatggggataatgatgatccatacctcacagggctgtcatgagggtgcactgagctgattaacgcatgaaaagtacatggaggagggccggcacctcatgagggctttttccatctgtgctcttactgatgctgccataatatgtgtcact

SEQ ID NO: 264523 - DNA, 448 bp, Homo sapiens
tgttctgctcagtgtggccttggacagcagatgagaactgtgcagtgtctctcctacaccggacaggcatctagtgactgtctagaaactgttcggcctccatcaatgcagcagtgtgaaagcaaatgtgacagtacccccatttctaatactgaagagtgcaaagatgtgaataaagtggcttattgcccactggtgctgaagttcaagttctgcagtcgagcatacttcagacagatgtgttgtaagacctgccaaggacactgacccacagaaagccagagagagtgccttgtcatttcatcatggaaatgcatccatcaaagagagccacccagaggaagaggattgatgtccttgcaaatgcattaccctgtggaaaacgtaaccactggtcagccctagctgacaaaatttcaatattattttagcttctgtgaagtgggat

SEQ ID NO: 264524 - DNA, 380 bp, Homo sapiens
ggtcagagtaaggaaggaatatcatcagaggcacaggaaggggatgtaagtaatttttttttcttcaactttaagttccagggtacatgtgcaggatgtacaggtttgttacataggtaaacgtgtgccatggtggtcagctacacagaccatcccatcacctgggtatcaagtccagtattcattagctattcttcctgatgctttccctggcaatttttgtaatacttctggtattaaataagttaatgatctcaaataaagcaatattgggaatcttatcagttacagatttaaaaaaaaatttccaaaattaagttttgtactttgtacagctgtcgaataaaagtcttctcatgtttaacatttacttgttgtct

SEQ ID NO: 264525 - DNA, 521 bp, Homo sapiens
tttatcacaaaagtttgtgtcacagttttttggtccctgaggttacacagtgaagcacacttagtctctgccaacagagaagataagaatacatgtaaaaataacagctataaatatgccagcattgggttaagtgccttttcatgccctttctcctttagtctgtacaaccttatggggtaggtcctgtgttccccatttcacacagaggctgaaacaaagcagtttaaaaacttcccatgggtcgggcacggtagctcacgcctgtaatcccagcactttgggaggccgaggcaggcggatcttgaggtcaggagatcgagaccatcctggctaacatggtgaaaccccgtctctactaaaaatacaaaaaaaattagccaggcgtggtggtgggcacctgcagtcccagctactcaggcgcaaacccgggaggcagagcttgcagtgagccgagattgcgccactgcactccagcctaggtgacagaacgagactccatctcaaaaaaaaaaaaaaaa

SEQ ID NO: 264526 - DNA, 690 bp, Homo sapiens
gtttttgttatatgtttaaatttcagattctgtgataaatgataccttctgaggagtcattctctctctctgagggaactctgaatgcattttaagcaagacaaaacagaaaatgcaaatgggagtaagttccatgggtccaggaaagaaagagaactcaacatcactggagagaagtgagtaagagagcaagtaatggtcaggggcagctcctgtaagcccgcttctcctcctctctttagaaggcagtaaagcagggggaagggatccatttctagtgtccttacatgagtccagagcccagagttgccgctcacaggctcagtacccttggaccagttgttcaacttctgtctacctcagtctccttaactttatgatggagaagataatagaacctacctccaggaactgtgtggcttaagtgtgctaatacatgtaggtttagaatgtcatctgggcacaaagtaagtgtctgagtgttcaaaaaaatgttagtggtttatattgtcattcctctgagtagaagctactgctttatctaagaaagacacaggacagacctaggggttgattttttgagacactggtgcctcgctctaggtgtttctcccactactggttcaccttagccacatatgattgatttgtaaagatcttttacattctgaatcagcattcataggtcta

SEQ ID NO: 264527 - DNA, 674 bp, Homo sapiens
gagctggagaggatggaggctacagttacaggttaaaggcgatgaacttagtgaatccataattacacaaatgacttagaaggtagaaaggagacttttctataaaagcagatagaaaaatgaggtcaacatttaaaagctgatgtgactaataagcagatcagtggctgctgggctaggggtgggagcccagattgactgcaaatgcagatgaaggaactttcttggtcaaagtgtctaacactggaatgtggtgatggttgcatgattctatgcatttattaaaatcattaaataatatacttaaaatgggtgctttttgtagtacgaaaattatagcttaataaagctgtaatcattttttattttaaagttgacatgtttttaaattttgcgatattcacactctataaaatagttgtactgtatatctctgtgatgtgttagttacattaaaaatgttctttttccactattgggaatataaatttttataataatctaaagtaagattcttaagtttttaaaattactctaaatggattattttcataatcattaacaatccaaataggaatcaaaatagcaagaaacacttagaagaaattgaaagaagacatttcagtagctttctcaacatttactgtcttttggcaacccagtctaaccctttt

SEQ ID NO: 264528 - DNA, 360 bp, Homo sapiens
tgtttgtgaggattaagtaaagcacttggaacagtgcccaacacacagagctcaacaaatgtttactataatcctaattatctccgcaggtttcacctggacaacatgtggggcgtgggcaggcagtgagaacacagatggtagccctcgaagcatcccagcctgaaaagcacatgagtcagcccttccttccacttacccactacctctcacgctggtcgtcttttttattttttctctctctctcttttttgagacggagtctggctctgtcacccgggctggagttgcagtgagccgagactgccccactgcactccagcctgggcaacagagcaagactccatctcaaaaaataaa

SEQ ID NO: 264529 - DNA, 407 bp, Homo sapiens
gttctctattctgtttcatgggtccgtgtgtctgtttttatgccactaccgtgctgttttgattactctagctctgtagtataatttgaagtcagataatgtgattcctctagttttgttctttttgttcagggtagctttatctattctgggttttttgtgattccatatacattttaggattgtttttctatttctgtgaagaatgtcattggtgttttgatagcaattgcattgaatttgtagattgctttgggtaggatggatattttaacaaaattgattccaccgcgcccgacctcccgtctcctttcagtcctcctcgggatcgcgcatcacccgcattttctggtctcctcctgcacttgctctcctcgcctctcctccgtctcctctcacttttcgga

SEQ ID NO: 264530 - DNA, 273 bp, Homo sapiens
ctctggaagaagcctggtctctcctacatcttgaatctgcccctcgctacttgcttctcctcccttctgacaggcaaccaaattagccatggaaggaacagcagacagacagagcagacagcccaggaaggagactttgaggacgctgcattttggacagaagggcgagggaaggaacatcgcagcaggaggaagcaatacaggaaatagaattttcaagaatctgtgaagcaccacaatacatttactataatgaattaaaaaaaattgaaa

SEQ ID NO: 264531 - DNA, 419 bp, Homo sapiens
cagcacgggcttgcaactggcgtctgaagtgggggcagtctaatgacagtcccattagacttcaaccagtaggggctgtgccaactccaggtagtgtcagaattggattgaatttcaggacttccagctggggttggaaaattggtcaatgtggggaaaaagttcacacatctggtttcagaagtgaagtattgagagtagttgagagtacagagaaaatcattacgtgtgtgggaattttcttcccctgtatttagttttgttttgctttgttttgagttaggggctccctctgtcacctagcaggagtgcattggtacaatcatggctcgctgcagcctcgaactgctgggctcaagtgatcctcctatctcagcctccccagtagctgaactacaggcgcataccaccttactcgg

SEQ ID NO: 264532 - DNA, 254 bp, Homo sapiens
tagtgttaaaaagacatatactcaatggttgagatttaatgaaagtaatacttattactgattcatcaaggtcattcttaaggacttttttctgtaagtgcaagaaatccagtgattagtagtgtggcactcttattttgattggtgctagggcaccagtagtagtttcacccactctttcttttgtatcatcagagcaaatgtcaacccagtgaaaaaggcaaataacatagtagtattatgaaaattgtttt

SEQ ID NO: 264533 - DNA, 633 bp, Homo sapiens
ggcgggccgctcccacttcggcacgaggggcacgaggtaaatcttttctgcttactgaaaaggaagagtctgatgattagttactgatcctctttgcatttgtaaagctttggagatattgaatcatgttaccatttctgtttttttccaccctgttttcttccatatttactgaagctcagaagcagtattgggtctgcaactcatccgatgcaagtatttcatacacctactgtgataaaatgcaatacccaatttcaattaatgttaacccctgtatagaattgaaaggatccaaaggattattgcacattttctacattccaaggagagatttaaagcaattatatttcaatctctatataactgtcaacaccatgaatcttccaaagcgcaaagaagttatttgccgaggatctgatgacgattactctttttgcagagctctgaagggagagactgtgaatacaacaatatcattctccttcaagggaataaaattttctaagggaaaatacaaatgtgttgttgaagctatttctgggagcccagaagaaatgctcttttgcttggagtttgtcatcctacaccaacctaattcaaattagaataaattgagtatttaaaaaaaaa

SEQ ID NO: 264534 - DNA, 624 bp, Homo sapiens
tcagaaatcatgtgactgatgactaaggtaaatcttttctgcttactgaaaaggaagagtctgatgattagttactgatcctctttgcatttgtaaagctttggagatattgaatcatgttaccatttctgtttttttccaccctgttttcttccatatttactgaagctcagaagcagtattgggtctgcaactcatccgatgcaagtatttcatacacctactgtgataaaatgcaatacccaatttcaattaatgttaacccctgtatagaattgaaaggatccaaaggattattgcacattttctacattccaaggagagatttaaagcaattatatttcaatctctatataactgtcaacaccatgaatcttccaaagcgcaaagaagttatttgccgaggatctgatgacgattactctttttgcagagctctgaagggagagactgtgaatacaacaatatcattctccttcaagggaataaaattttctaagggaaaatacaaatgtgttgttgaagctatttctgggagcccagaagaaatgctcttttgcttggagtttgtcatcctacaccaacctaattcaaattagaataaattgagtatttaaaaaaaaa

SEQ ID NO: 264535 - DNA, 621 bp, Homo sapiens
tatttctgtaaattgttgtgttagtggaggcaagaagagttcagggcttctgattctgccacattgctgatgtcattcttctggggagatattttcaatcatcatcaatttttcttattttataattttaatgcaagattcatcttaaaaggctgatattcagaatactatacttaatggagatgatttgtagtaatttattgacattatctttattgcttttagataaaatgcaatacccaatttcaattaatgttaacccctgtatagaattgaaaggatccaaaggattattgcacattttctacattccaaggagagatttaaagcaattatatttcaatctctatataactgtcaacaccatgaatcttccaaagcgcaaagaagttatttgccgaggatctgatgacgattactctttttgcagagctctgaagggagagactgtgaatacaacaatatcattctccttcaagggaataaaattttctaagggaaaatacaaatgtgttgttgaagctatttctgggagcccagaagaaatgctcttttgcttggagtttgtcatcctacaccaacctaattcaaattagaataaattgagtatttaaaaaaaaa

SEQ ID NO: 264536 - DNA, 880 bp, Homo sapiens
ggcgggccgctcccacttcggcacgaggggcacgaggtaaatcttttctgcttactgaaaaggaagagtctgatgattagttactgatcctctttgcatttgtaaagctttggagatattgaatcatgttaccatttctgtttttttccaccctgttttcttccatatttactgaagctcagaagcagtattgggtctgcaactcatccgatgcaagtatttcatacacctactgtgataaaatgcaatacccaatttcaattaatgttaacccctgtatagaattgaaaggatccaaaggattattgcacattttctacattccaaggagagatttaaagcaattatatttcaatctctatataactgtcaacaccatgaatcttccaaagcgcaaagaagttatttgccgaggatctgatgacgattactctttttgcagagctctgaagggagagactgtgaatacaacaatatcattctccttcaagggaataaaattttctaagggaaaatacaaatgtgttgttgaagctatttctgggagcccagaagaaatgctcttttgcttggagtttgtcatcctacaccaacctaattcaaattagaataaattgagtatttaaaaaaaaaaaaaaaaaaaaaaatttgtgctgcgcgcttgggccctggagaaagtttttaacacatctgtgtggcgccgggggcccattgggtacctgcacactgggccaaaggggtcccaaagataccccggggcaaggaacaaggcccggggtttccccaataaaaaacgcggggggaccccgaggttcgcaccactccaagggggtccggggcacaaccgggtctctcacaggggcccaggaaccaaaaataa

SEQ ID NO: 264537 - DNA, 445 bp, Homo sapiens
aaatcagaagtaggttctacttcacactctaggatggccagaagtaagaaatacaaacaccagaaaacagtgtatcagtgaggatgaatctggaaccctcaaacaatactggtaggaatataaaatggtgcaactgctgtggaaaatagtgtgatggttccagcccattgcagccttgacctcccaggtcaagcaaagcgaaacagaattaccctgtgacccagcaattccactcctagatacagaaaccaaaaggtgtgaaaacggcgttcaaacacatgcatgtccaagaaaaggccacagcagccaaaaggtggagaccacgctcatatgcgtcaacctgaagaacgaataaaccagtgtgctccatccatgcaatggaatattattcagcccatgaacaggaatgaagtgctgaaactatccacagtgcaggtgaatcaac

SEQ ID NO: 264538 - DNA, 217 bp, Homo sapiens
actattttctgacagataattctgttgtcctttgagaggcttgggaaatgattaggatcagtatggaagggcttttcacgttacaaactatttttagagttttcatttaattcacataaaaacaataagtatcacactgtacatataatagtcccttttcactgagcaagatggaattagcactttaaaatgacattggcatataatgagacctcat

SEQ ID NO: 264539 - DNA, 548 bp, Homo sapiens
tgagctctgctgtcttagtcaatctctctctgtctctctgattactcactctgtgaaaagctagctgccatgctgtgagcagccttgtgtagaggcccatgtggtgaggaactgaagtctctggccaacaatcagaaaggaactgaggcttgccaataatcatgcagatgagcttggaagcagatccgtcagccccaggagagtcctgagatgattttgccatcaattgaaagattgacttcaatctcatgagaaccctgagcctgaacctccagctaaaccacttccagattcctagacctcagaaactgagagataataaatgtttgctattttaagctgctaagttttagggtagtttattagataaaatagataatgaacagataagtagttatgagaaaattctcagaaaaaaaaccaaacagaattccaatgctcttatatggacaggatagggacttatttccctggctatagtcaatggtttgggataagcatctgatctagcactggtccaatcagaatgaacttggatatactggtac

SEQ ID NO: 264540 - DNA, 436 bp, Homo sapiens
ccagagcccatgctttccacccacccatagagcctctcacgatctgtcgtattgtatgcaatatatgacatattgttttaaaatacgggtgccctgttacccagctttaaaaaactcatctttgtttagtgcacatggtctcaaagtatggttcagggagtctacaaggtcataattattttccaagtagtactaagatactctttttcctttttactttcattttctcatgagtatacagaggagttttccagaatgtcatgacctgtgatatcacagcagactcaataccaaagcaatctatgaaaatctagcaagctgggtgcagtggctcacgcctgtaatcccagcactttgggaggctgaggtgggaggatcgcttgagcctgagagtttgagaccagcctgggcaacatagggagaccctgtcttcttg

SEQ ID NO: 264541 - DNA, 4416 bp, Homo sapiens
aggcgaaggcttggacccccagctgaggagtcctgctcaagacacggtcactggatctgagaaacttcccaggggaccgcattccagagtcagtgactctgtgaagcacccacatctacctcttgccacgttcccacgggcttgggggaaagatggtggggaccaaggcctgggtgttctccttcctggtcctggaagtcacatctgtgttggggagacagacgatgctcacccagtcagtaagaagagtccagcctgggaagaagaaccccagcatctttgccaagcctgccgacaccctggagagccctggtgagtggacaacattgttcaacatcgactacccaggcgggaagggcgactatgagcggctggacgccattcgcttctactatggggaccgtgtatgtgcccgtcccctgcggctagaggctcggaccactgactggacacctgcgggcagcactggccaggtggtccatggtagtccccgtgagggtttctggtgcctcaacagggagcagcggcctggccagaactgctctaattacaccgtacgcttcctctgcccaccaggatccctgcgccgagacacagagcgcatctggagcccatggtctccctggagcaagtgctcagctgcctgtggtcagactggggtccagactcgcacacgcatttgcttggcagagatggtgtcgctgtgcagtgaggccagcgaagagggtcagcactgcatgggccaggactgtacagcctgtgacctgacctgcccaatgggccaggtgaatgctgactgtgatgcctgcatgtgccaggacttcatgcttcatggggctgtctcccttcccggaggtgccccagcctcaggggctgctatctacctcctgaccaagacgccgaagctgctgacccagacagacagtgatgggagattccgaatccctggcttgtgccctgatggcaaaagcatcctgaagatcacaaaggtcaagtttgcccccattgtactcacaatgcccaagactagcctgaaggcagccaccatcaaggcagagtttgtgagggcagagactccatacatggtgatgaaccctgagacaaaagcacggagagctgggcagagcgtgtctctgtgctgtaaggccacagggaagcccaggccagacaagtatttttggtatcataatgacacattgctggatccttccctctacaagcatgagagcaagctggtgctgaggaaactgcagcagcaccaggctggggagtacttttgcaaggcccagagtgatgctggggctgtgaagtccaaggttgcccagctgattgtcacagcatctgatgagactccttgcaacccagttcctgagagctatcttatccggctgccccatgattgctttcagaatgccaccaactccttctactatgacgtgggacgctgccctgttaagacttgtgcagggcagcaggataatgggatcaggtgccgtgatgctgtgcagaactgctgtggcatctccaagacagaggaaagggagatccagtgcagtggctacacgctacccaccaaggtggccaaggagtgcagctgccagcggtgtacggaaactcggagcatcgtgcggggccgtgtcagtgctgctgacaatggggagcccatgcgctttggccatgtgtacatggggaacagccgtgtaagcatgactggctacaagggcactttcaccctccatgtcccccaggacactgagaggctggtgctcacatttgtggacaggctgcagaagtttgtcaacaccaccaaagtgctacctttcaacaagaaggggagtgccgtgttccatgaaatcaagatgcttcgtcggaaagagcccatcactttggaagccatggagaccaacatcatccccctgggggaagtggttggtgaagaccccatggctgaactggagattccatccaggagtttctacaggcagaatggggagccctacataggaaaagtgaaggccagtgtgaccttcctggatccccggaatatttccacagccacagctgcccagactgacctgaacttcatcaatgacgaaggagacactttcccccttcggacgtatggcatgttctctgtggacttcagagatgaggtcacctcagagccacttaatgctggcaaagtgaaggtccaccttgactcgacccaggtcaagatgccagagcacatatccacagtgaaactctggtcactcaatccagacacagggctgtgggaggaggaaggtgatttcaaatttgaaaatcaaaggaggaacaaaagagaagacagaaccttcctggtgggcaacctggagattcgtgagaggaggctctttaacctggatgttcctgaaagcaggcggtgctttgttaaggtgagggcctaccggagtgagaggttcttgcctagtgagcagatccagggggttgtgatctccgtgattaacctggagcctagaactggcttcttgtccaaccctagggcctggggccgctttgacagtgtcatcacaggccccaacggggcctgtgtgcctgccttctgtgatgaccagtcccctgatgcctactctgcctatgtcttggcaagcctggctggggaggaactgcaagcagtggagtcttctcctaaattcaacccaaatgcaattggcgtccctcagccctatctcaacaagctcaactaccgtcggacggaccatgaggatccacgggttaaaaagacagctttccagattagcatggccaagccaaggcccaactcagctgaggagagcaatgggcccatctatgcctttgagaacctccgggcatgtgaagaggcaccacccagtgcagcccacttccggttctaccagattgagggggatcgatatgactacaacacagtccccttcaacgaagatgaccctatgagctggactgaagactatctggcatggtggccaaagccgatggaattcagggcctgctatatcaaggtgaagattgtggggccactggaagtgaatgtgcgatcccgcaacatggggggcactcatcggcggacagtggggaagctgtatggaatccgagatgtgaggagcactcgggacagggaccagcccaatgtctcagctgcctgtctggagttcaagtgcagtgggatgctctatgatcaggaccgtgtggaccgcaccctggtgaaggtcatcccccagggcagctgccgtcgagccagtgtgaaccccatgctgcatgagtacctggtcaaccacttgccacttgcagtcaacaacgacaccagtgagtacaccatgctggcacccttggacccactgggccacaactatggcatctacactgtcactgaccaggaccctcgcacggccaaggagatcgcgctcggccggtgctttgatggcacatccgatggctcctccagaatcatgaagagcaatgtgggagtagccctcaccttcaactgtgtagagaggcaagtaggccgccagagtgccttccagtacctccaaagcaccccagcccagtcccctgctgcaggcactgtccaaggaagagtgccctcgaggaggcagcagcgagcgagcaggggtggccagcgccagagtggagtggtggcctctctgagatttcctagagttgctcaacagcccctgatcaactaagttttgtggtacttcaccctcttctgccctcatttcatgtgacagccattgtgagactgatgcacaaactgtcacttggttaatttaagcacttctgttttcgtgaatttgcttgtttgtttcttcatgcctttacttactttgtcccatgctactgattggcacgtggcccccacaatggcacaataaagcccctttgtgaaactgttctttaaatgaaacacaagaaattggccactggtaaaactctgcagcttcaactgtacttcatttaatgccattaatgcaaatatacttcctcttctttttgcatggttttgcccacctctgcaatagtgataatctgatgctgaagatcaaataaccaatataaagcatatttcttggccttgctccacaggacataggcaagccttgatcatagttcatacatataaatggtggtgaaataaagaaataaaacacaatacttttacttgaaatgtaaataacttatttatttctttgctaaatttggaattctagtgcacattcaaagttaagctattaaatatagggtgatcatagttcctctaccaagtctggaaagaacatctcctggtatccacaattacaccaggttgctaactgtatttgtacatttccctttgcattcgcttctgttcttgctagaaacccagtgtagcccagggcagatgtcaataaatgc

SEQ ID NO: 264542 - DNA, 2914 bp, Homo sapiens
aggcgaaggcttggacccccagctgaggagtcctgctcaagacacggtcactggatctgagaaacttcccaggggaccgcattccagagtcagtgactctgtgaagcacccacatctacctcttgccacgttcccacgggcttgggggaaagatggtggggaccaaggcctgggtgttctccttcctggtcctggaagtcacatctgtgttggggagacagacgatgctcacccagtcagtaagaagagtccagcctgggaagaagaaccccagcatctttgccaagcctgccgacaccctggagagccctggtgagtggacaacattgttcaacatcgactacccaggcgggaagggcgactatgagcggctggacgccattcgcttctactatggggaccgtgtatgtgcccgtcccctgcggctagaggctcggaccactgactggacacctgcgggcagcactggccaggtggtccatggtagtccccgtgagggtttctggtgcctcaacaggtgtgaccttcctggatccccggaatatttccacagccacagctgcccagactgacctgaacttcatcaatgacgaaggagacactttcccccttcggacgtatggcatgttctctgtggacttcagagatgaggtcacctcagagccacttaatgctggcaaagtgaaggtccaccttgactcgacccaggtcaagatgccagagcacatatccacagtgaaactctggtcactcaatccagacacagggctgtgggaggaggaaggtgatttcaaatttgaaaatcaaaggaggaacaaaagagaagacagaaccttcctggtgggcaacctggagattcgtgagaggaggctctttaacctggatgttcctgaaagcaggcggtgctttgttaaggtgagggcctaccggagtgagaggttcttgcctagtgagcagatccagggggttgtgatctccgtgattaacctggagcctagaactggcttcttgtccaaccctagggcctggggccgctttgacagtgtcatcacaggccccaacggggcctgtgtgcctgccttctgtgatgaccagtcccctgatgcctactctgcctatgtcttggcaagcctggctggggaggaactgcaagcagtggagtcttctcctaaattcaacccaaatgcaattggcgtccctcagccctatctcaacaagctcaactaccgtcggacggaccatgaggatccacgggttaaaaagacagctttccagattagcatggccaagccaaggcccaactcagctgaggagagcaatgggcccatctatgcctttgagaacctccgggcatgtgaagaggcaccacccagtgcagcccacttccggttctaccagattgagggggatcgatatgactacaacacagtccccttcaacgaagatgaccctatgagctggactgaagactatctggcatggtggccaaagccgatggaattcagggcctgctatatcaaggtgaagattgtggggccactggaagtgaatgtgcgatcccgcaacatggggggcactcatcggcggacagtggggaagctgtatggaatccgagatgtgaggagcactcgggacagggaccagcccaatgtctcagctgcctgtctggagttcaagtgcagtgggatgctctatgatcaggaccgtgtggaccgcaccctggtgaaggtcatcccccagggcagctgccgtcgagccagtgtgaaccccatgctgcatgagtacctggtcaaccacttgccacttgcagtcaacaacgacaccagtgagtacaccatgctggcacccttggacccactgggccacaactatggcatctacactgtcactgaccaggaccctcgcacggccaaggagatcgcgctcggccggtgctttgatggcacatccgatggctcctccagaatcatgaagagcaatgtgggagtagccctcaccttcaactgtgtagagaggcaagtaggccgccagagtgccttccagtacctccaaagcaccccagcccagtcccctgctgcaggcactgtccaaggaagagtgccctcgaggaggcagcagcgagcgagcaggggtggccagcgccagagtggagtggtggcctctctgagatttcctagagttgctcaacagcccctgatcaactaagttttgtggtacttcaccctcttctgccctcatttcatgtgacagccattgtgagactgatgcacaaactgtcacttggttaatttaagcacttctgttttcgtgaatttgcttgtttgtttcttcatgcctttacttactttgtcccatgctactgattggcacgtggcccccacaatggcacaataaagcccctttgtgaaactgttctttaaatgaaacacaagaaattggccactggtaaaactctgcagcttcaactgtacttcatttaatgccattaatgcaaatatacttcctcttctttttgcatggttttgcccacctctgcaatagtgataatctgatgctgaagatcaaataaccaatataaagcatatttcttggccttgctccacaggacataggcaagccttgatcatagttcatacatataaatggtggtgaaataaagaaataaaacacaatacttttacttgaaatgtaaataacttatttatttctttgctaaatttggaattctagtgcacattcaaagttaagctattaaatatagggtgatcatagttcctctaccaagtctggaaagaacatctcctggtatccacaattacaccaggttgctaactgtatttgtacatttccctttgcattcgcttctgttcttgctagaaacccagtgtagcccagggcagatgtcaataaatgc

SEQ ID NO: 264543 - DNA, 400 bp, Homo sapiens
caggggaccgcattccagagtcagtgactctgtgaagcacccacatctacctcttgccacgttcccacgggcttgggggaaagatggtggggaccaaggcctgggtgttctccttcctggtcctggaagtcacatctgtgttgggtataggctaagtatctgctggctcccaaatcttccacttgccacagtgaggttgtgtctggtctgggactgaactatgcatctgccttaagacacagcaaggccttaagacctgaggccactttatggatttattcgtaatttataccctgtttgtttttctccaaaacttgagattgttcccattattaaaactcacaaaacagaacctttatatgagaagagggatgagcagtcattcagagggaggaaaaaa

SEQ ID NO: 264544 - DNA, 407 bp, Homo sapiens
taaaaagaaaaatcattaaaataaaaatatattggcagaatcctatcaaaaatggttcctattaatgacagatggacatgttaaaaaatcctcgaagttttattttcaaattctataagttatttcgtttctgaaataaatcataactttattaaacatggatgatagagtaaaattcattttctgcttccaggcaatacatgttgggaggagacataaaatgtattcataaagataaaaacttgaaagtataggatgtcataggaagttcactgcatttatacttagagatgtactataaaccaagttcaaacattaattgaatgagcaagaacaaatattttaacttccttaaactttgttctatcatttagaaaatgagatcttgttatatttgccaaatgctt

SEQ ID NO: 264545 - DNA, 332 bp, Homo sapiens
tcattaaggaaatctgcatgtataacagaaaggagatctcaactcctgctttgtgtctgtcttcttaagaacttagggaaaagtcacctttagaaagaggaaatggaaggctgggtaggagaagagcttctgtgagccaggcctcgatttggtatgaagaaatgacagttacattcaaacttgggatggtgtagagggtatccaagaagcttgtgggagtaggtgctttatcagatcccttttgagttaggttattagataaaatttgtttttatgtgaagctattttaaaaaaccttttcctctcgtggatgctgagatactgagttgaaa

SEQ ID NO: 264546 - DNA, 409 bp, Homo sapiens
gtgatctgatgacagacagcatcagaaactcaaatcctagcttctcagcccaaatttagtaaataaaaaccacagcaatgaaacagctagctctgtttgggagctcaaagctcacttaagcttgggaacattcccactcatgttctttctagtaattcatcagttcccctattgaagccctttccatggcccccatgctggcatttctgaatcacatctgagcaaccaacaactttctagggagaaaaaataactattattaaatttggtctggattaatggtgtggatgagtttgtatcacttcacttgctctccattttctatcttcttttgtctaactctgcatattgtgttttattttccctgataataaaaattgaattttatgtgccctttatgtagtaggag

SEQ ID NO: 264547 - DNA, 327 bp, Homo sapiens
ctctgaaactaagtgcctagtatattaccatgaatccatgatagaaaaaaatacacaaatatgtaaatgttcactgccttttctgtctcctaccaccaataaccccacctctatcccaggaaaattctggtgaagtctctcccttgactttcctgtcctcgaatatgccccctcaggatgtgttactgagttcaaaaagggggagagggggaggggtttgtatttaaagaagtaaaataaataggttgatttacatagaaggcaggcaagtgtgcctggaaaaagagaaaacattattccatgagaggaatatgagaaccaaaaaaa

SEQ ID NO: 264548 - DNA, 424 bp, Homo sapiens
gagaaggggtttcgccacgttggccaggctggtctcaaactcctgacctcaggtgatccgcccacctcggcgtcccaaagtgctgggattaccaccacccctggccaaaaactgttttatactttctataataatataaccaaattttgattactagagctatataattctttagaacactttgtgggcattatatttcttttccatatttataacaagagttttggactgttaatatgtgattccttacattgataaagcactttatgctaattcattagttacaaaacaactacgaactatgatctcagctttcaaggagtttgtagtgtagagataaatatgcagtatattaaaacaaaaaggctattgtgaggattataggagtttaatgctatgctgaagtgcctagcctaaataagtc

SEQ ID NO: 264549 - DNA, 381 bp, Homo sapiens
gttatcatgcctaggcctttttaatagggccacttaccctagcatgcttctacaactggaccctcaaaggtcttttagggctgagtgtggtggctcacacctgtaatgccagcattttgggaggccgaagccagaggactgcttgagcccagaggttcaagaccagcctgggcaccatagccagaccctgtctctacaaaaaatagtttcaacaaattagccaggcatggtgatgtgcgcctgtcatcccaagtacttgggaggctgaggtgggaggattgcggattgcctgagcccaggagttcaaggctgcagtgagctgtgatcataccaccgtactccagattgcgtgacagagctagaacttgtctcttaaaaaaa

SEQ ID NO: 264550 - DNA, 406 bp, Homo sapiens
tttatgcaaaagaaacaaagtctctgtaatcagctcctcaagggcgggaactgtcagcatttacagtacctagcacatagcaggcactcggaaattctgctgacttaacagttacacacacacatacacacacatttttaaagagcagtgaatgcacactggggttttaactgacaaactagacattcagggggaaaattaattctactaatagcctaacttgcttggttaagttcttccccccacaaaaaacactgaataaagcattcgctttcttgttaatcgaaatgacacagaagcaagaaaactgaagatgagaatttgatttcactgcacaaatccttcagataagacaggaacagtgacactgggaacccatatgttaaaatgaaaactagatagatga

SEQ ID NO: 264551 - DNA, 618 bp, Homo sapiens
atgtttgcaaacgtggaagctgttgtgtagatgatgttcactcccgtgaatatgcagctgtgatgtggccaacagaagggaaggaacacgcctgtgtgctctacgtcttctgcaagccggcacagctccatgcgggaccagtgctgatgccagagtgaggtgtgggggctgtggcctgtgtctgcccgcacgtggtggcattctagcaaagccacgtgggtgggtgcagcatctccagccaccctggttgttaactgtcacagcttgacctgtgtccttgggtcaaaagttgcatctggtgcctcactcacttcctccattgttcaaagcagtaagagggttcagtctttggaaaggaagcatttactggctatttgaagagattgatttcagaaattgagcatcataactaaatctgattgttttgaaaggatttactacttttcattactttcatcccagtgttcaataaaaataggaaaagaaaggaaaggtgtccccagaaaggggcagccagcaccctggcttccagtaccttcagcagcgttgtcctgtggccatggattggcttgccgatgagcagtggttcctcccagactcctccctcagggcccttcc

SEQ ID NO: 264552 - DNA, 419 bp, Homo sapiens
cacgaggagaaccaggactggaggctcaatgatactgtcagtcccttgggactactcagccaacaaaaaattattgcggtttaatgaaagggaaattagcataaggaccttggctttaatactataagatcaaacccatagagcagtttttcatcatagaaaagttccacagagggtgaaagccttatgactacaaccttatatgaaatgcagtgtttataagaggctagaatattcattggggacatgaatctgatgggtgtgctgaacatggaatgagtgtcttcgctgtagcaaatatgacattctgctctgttatttccatatatgccttatctctcttatgactaagatagcttgaaggaggggatcatattcttgtatcttccaaagtgctgagcacacaactatgcacacgg

SEQ ID NO: 264553 - DNA, 401 bp, Homo sapiens
ctgggtgttgtgaaggatgtagagtgacccaggccaggcttcctgtccttcaggagctcatagttcaaataggactaaatgctattaaaaaaataatctagttactggtacagagagaatgtcccgtggactcattgaggatgaggaggtccagtcctgctggggtatctgagaaagcttcagaggcattggaattagaaccagatcttgaagggagtaaggattttgacagatggccagatggcactgagaacattctagtggtggggaagtgaagtgtgggatgtgtttaggtgaccccactggttgaaagcagaggagagggtcagctggggagctgggccttgaatgccaggccagtcctcagagctgtacagtcaccgcagagttgggagtggaga

SEQ ID NO: 264554 - DNA, 343 bp, Homo sapiens
ggagactcagaagagggaggttgggagggaagccagggataaaacactacatattggttacaatgtacattatttaggtgaggggtgcactaaaatctcagttcaccactaacaatttgtccatgtaacaaaaaaacacttgtatcccaaaagttattgaaatagaaattaaaaataaataaataaaaagaaagaaagaaaaacctgcagccaacaccatatatgcaggcagctcaaagttttcaccctaagatcaggagcgagggaaggatgcctacttttaccatttctgttcaacatagcactggaagtcctagccagagcaatcaggaaagaaaaagaa

SEQ ID NO: 264555 - DNA, 2181 bp, Homo sapiens
  misc_feature (1395)..(1395): n is a, c, g, or t
atcttttggagcttctcctttgtaaaatggacaggatgctgttttaagatttaagtgcttcttatgcaataggagctcaaagagtgggagctgttgtttattaaaaataacaatatcattatcatattctctacctaaagagacctgttgaaattggacagaaaaggaacgtttctgtcttgataagtcttaaaactccagtaccaagtgcagcattcgtttcttgtgagatatttgtagaatgggtggatagaaggatgggagaggagaggggtctgaagaattcctgtagcaagctaaagaggtatcatcttccaattgagctatttttagccttactcatcatttgtaatcaaaacaatccttttcttagccttactcctcccccacccctgcccccctactacttttgcgatggtaatcgtcattgccaacttactttctttggaatacacaaacagagctgtctctttccgtcatggagattttaacagtaaaaaactcactgcaccattacctctgccttgtattccagacaatagtaaaggacattgtaacatcactgtgtcagcgcaaacaaagaactatgtaattttatcccatattaatacagtgtcacgcaggaggtactatcattagatggcaatctataaaaatggcccctgagaccaggcactggcacaattatttattcttcaattatttattcagtcctaaggatggaaatgctgacagacactgcaaaatgctctacctatcaatttacagaaattgaatgacggaatcatttgtggactgaagtagctttttattgaccctatttttatttatttaaattctcactttcacagcttaactatgtttactacacccacttacatgatagaaatgagaggctgttttgttcataaaagctacttcaaaacaaattaatatttattctgaaagggtcagatcacaaatggaggctttaaaacggcctcaggaacattcaaatcgcatccttaatatttcatatggttttatatttagattggctattttatgtagtcttttttccctttttagtgctcatacctcttgagatcccttttctagccaggatggagggaacagttacacatagcttccatttgcagtaagtaatttcaacttaatttatgtcaggggagatttccagaaggttcccgctcctgtctgctattcttgtgattctaatatattatttgtacatgataaaatacaattcccattaattcacacttaattaagtcataaaagaatttgtttggtcttaactcctaaagtttaaaagattatttgcatttgtattaatactggagtttaaaaattatggctttctttatagatcagttccgattttccctaaatcanttattttcagttttgatttttcaaacacttgggtgagatccaatttatctcaccttctgatagttttaaaagagaagtaattttaatttacattaactttaaaatatttgtatgccaaacactagttattttgaggggatcgaaacaaatcatagcagagataaggaactttcatactttgggaggattttttttaaataactgtatgtttactctaagtagatatgtgtatgcatgcattcacttatgatatgcacacacacacacacacacacacacacacacacacacacacacacgaaatttatgatgtcctttaagaatcttgggactatcagaaaaaagttaagtgaaataacaattttcaaaaatacatttttgtagtaaaaacgcaccatcggtgttacattactgtataaatcaaatttgctgaagtttataaatatttttatgtttactttaaacttggacataatcagatctatctgctgttgacgacatggctctcaatataaaaataatcaccttttctgcttaaagcctcattctcagaagtaaaatgtgtatgtgaggatattaactagttcataggattgttgtagaaaaccttttacatatgtggatactgaaattcttatggcctggatcagtggcctggatcatagctaatctttatgaaaagatcactgtattattacattgttactacaggtagattttcaccctggtccttgcatgaatcatttggttgtactgtccatgatgtccagtagtagattaaaaaaa

SEQ ID NO: 264556 - DNA, 419 bp, Homo sapiens
cccccatcttctaaatatgcacccactatatgcaaattttttacgcttgcaggtaacggtccggcattcccggttctcttactaaactaaattttcggcccgcttcgacatcatctatctgctgttgacgacatggctctcaatataaaaataatcaccttttctgcttaaagcctcattctcagaagtaaaatgtgtatgtgaggatattaactagttcataggattgttgtagaaaaccttttacatatgtggatactgaaattcttatggcctggatcagtggcctggatcatagctaatctttatgaaaagatcactgtattattacattgttactacaggtagattttcaccctggtccttgcatgaatcatttggttgtactgtccatgatgtccagtagtagattaaaaaaa

SEQ ID NO: 264557 - DNA, 1729 bp, Homo sapiens
  misc_feature (15)..(15): n is a, c, g, or t
  misc_feature (943)..(943): n is a, c, g, or t
ctcggtaccctcgtnttttgatagggtcattgccaacttactttctttggaatacacaaacagagctgtctctttccgtcatggagattttaacagtaaaaaactcactgcaccattacctctgccttgtattccagacaatagtaaaggacattgtaacatcactgtgtcagcgcaaacaaagaactatgtaattttatcccatattaatacagtgtcacgcaggaggtactatcattagatggcaatctataaaaatggcccctgagaccaggcactggcacaattatttattcttcaattatttattcagtcctaaggatggaaatgctgacagacactgcaaaatgctctacctatcaatttacagaaattgaatgacggaatcatttgtggactgaagtagctttttattgaccctatttttatttatttaaattctcactttcacagcttaactatgtttactacacccacttacatgatagaaatgagaggctgttttgttcataaaagctacttcaaaacaaattaatatttattctgaaagggtcagatcacaaatggaggctttatttagattggctattttatgtagtcttttttccctttttagtgctcatacctcttgagatcccttttctagccaggatggagggaacagttacacatagcttccatttgcagtaagtaatttcaacttaatttatgtcaggggagatttccagaaggttcccgctcctgtctgctattcttgtgattctaatatattatttgtacatgataaaatacaattcccattaattcacacttaattaagtcataaaagaatttgtttggtcttaactcctaaagtttaaaagattatttgcatttgtattaatactggagtttaaaaattatggctttctttatagatcagttccgattttccctaaatcanttattttcagttttgatttttcaaacacttgggtgagatccaatttatctcaccttctgatagttttaaaagagaagtaattttaatttacattaactttaaaatatttgtatgccaaacactagttattttgaggggatcgaaacaaatcatagcagagataaggaactttcatactttgggaggattttttttaaataactgtatgtttactctaagtagatatgtgtatgcatgcattcacttatgatatgcacacacacacacacacacacacacacacacacacacacacacacgaaatttatgatgtcctttaagaatcttgggactatcagaaaaaagttaagtgaaataacaattttcaaaaatacatttttgtagtaaaaacgcaccatcggtgttacattactgtataaatcaaatttgctgaagtttataaatatttttatgtttactttaaacttggacataatcagatctatctgctgttgacgacatggctctcaatataaaaataatcaccttttctgcttaaagcctcattctcagaagtaaaatgtgtatgtgaggatattaactagttcataggattgttgtagaaaaccttttacatatgtggatactgaaattcttatggcctggatcagtggcctggatcatagctaatctttatgaaaagatcactgtattattacattgttactacaggtagattttcaccctggtccttgcatgaatcatttggttgtactgtccatgatgtccagtagtagattaaaaaaa

SEQ ID NO: 264558 - DNA, 391 bp, Homo sapiens
  misc_feature (15)..(15): n is a, c, g, or t
  misc_feature (367)..(367): n is a, c, g, or t
  misc_feature (372)..(372): n is a, c, g, or t
ctcggtaccctcgtnttttgatagggtcattgccaacttactttctttggaatacacaaacagagctgtctctttccgtcatggagattttaacagtaaaaaactcactgcaccattacctctgccttgtattccagacaatagtaaaggacattgtaacatcactgtgtcagcgcaaacaaagaactatgtaattttatcccatattaatacagtgtcacgcaggaggtactatcattagatggcaatctataaaaatggcccctgagaccaggcactggcacaattatttattcttcaattatttattcagtcctaaggatggaaatgctgacagacactgcaaaatgctctacctatcaaaagncgagngtatactctagagtcggcc

SEQ ID NO: 264559 - DNA, 150 bp, Homo sapiens
cctgctctggtggtctcatccagcactttgagcatatttagaaggcacttgatcccaggcagcttgtctcgacttcattgctgcctccttcgtgatcttgtttagatcctgtgtggagcagatgattaagttaggtttgtttgggggtgt

SEQ ID NO: 264560 - DNA, 489 bp, Homo sapiens
gagatcgcgccactgcacttcatccagcctgctgacagggtgagactctctcaaaaagaaaatatgaaataggagcttcagtgcccacaaataaactcgtgctcattcatttaacatgttgtggtagaggctgtatggcccacaaaatttaaaatatttaccctctggcccctttcattaaaagctggctaattggctgggcacggtggctcacgcctgtaatcccagcactttgggaggccgagaagggccgatcacgaggtcaggagatagagaccatcctggctaacacggtgaaaccccgtctctactaaaaatacaaaaaattagccgggtgtggtggtgggtgcctgtagtcccagctactcaggaggctgaggcaggagaatggcatgaacccgggaggcggagctggcagtgagccaaaatcgcgccactgcactccatccagcctgggcgacagagcaagactcccgtctcaaaaaaaaa

SEQ ID NO: 264561 - DNA, 317 bp, Homo sapiens
  misc_feature (31)..(31): n is a, c, g, or t
gagcgatctagaggatcccggcactctagtncaaatgaagatgagatgtagcaacagatttaacgatgactttataaaactgttagaagaatggtaagatggacgtgtggatttgggttgattaaatcaggctttaggaaagaagcacattttcttcggagattggaaggtggataaatgaaaaaacccaagagtctgagttatattgacatgaattcgagaaaactccttccagatggatctattctgagaaggagagttattcaccatatttactcttccaatcaatatactgatctgtacgatttgaggggcaa

SEQ ID NO: 264562 - DNA, 440 bp, Homo sapiens
acttttaaattttgatcctgggtgacaggagaaatggaaatttagaagagaggttggtttcggagagaagatggaactttggttttgtcatgtcgaatttgaagtgatgaactgaattcaactgatgatagttggagatgtgggactagaaggggagtaagaagttaggactatagatacagtgtggagtgtcagggaccttggagagggagaatagaaagttagcacaagagaaagtacacagaaagcaaaactgagcgtagggcctgagcttggggcatcatggcactcgaagcactgtcataaaagcggaggtggaagaacatttcacaaagatgtgataggtgatagatcacacctagagccatcaattataatgaagatgagatgtagcaacagatttaacgatgactttataaaactgttagaagaatggtaag

SEQ ID NO: 264563 - DNA, 746 bp, Homo sapiens
tgtggacaaggtctccattgtctaagccactgtgagaattcaggtaaatcatggcccatcctgggacagttcctccacattcttgctactcaaagtgtgcttcatggactagtggcttcagcctcacccaggaacgtgttagaaacacagaatcgtgtcaccgccccagacctcctgatgcagaatcttcattttagtaagcgacccactgcccccgcgccccctgatgatttgggtgctcattaaagtttgagaagcactgttggagcttgccctgaagttgtagtgcgctcttacggatttcaaaccaaaaagcattacctctgtgaagccagtctggagcctggctagaccttctccaccacctcgggggcttcttatgttccagagtctaacactctggccagataccagggacctttcaccctcagaacctgtgctcacatgtggcagtgagcagtgcctgcacctcaaggcaccgcatcttcccagctacagtgggcctggctgctccagctgcgcccaacatgtgttagtaggggaattaaatacccctctcactcccagttttgtgtatttaaaaaatcctcggaagagagtggtatatgaggtttgaggcttatcagcagctgcagcagcacaggccacgtcgtagctgtgagtcatagacaagcatgcacactgtggctgcctgaggcctctgagctgccttcctcagtccttccctctgcagggcttgggcgtgg

SEQ ID NO: 264564 - DNA, 381 bp, Homo sapiens
ctattgctcctaacccagcttccataacattttccatggctaaacatccttagtagtaattcagctggattctgtaatttaccagttcctttactaaaaccatcactttagtttttaaaggccctgtcctgctcattttaatacttcagtctatattgctgaaatgggggtgtagttaaaaaaaaaacccatgaaagaaagaaagaaaaaagaagaaaaaagaaagaaagaaagaaaaagagaaagagaaagaaaagaaaagaaaaagaacgcttcagtcttacattggatagaaagccttttcctgcacttgccctggggcacgcatgaactatgattcctggggtgaggaggggaagtgaggatgattctctcataccc

SEQ ID NO: 264565 - DNA, 479 bp, Homo sapiens
caggcgcggtggctcacgcctgtaatcccagcactttgggaggccgaggcaggcggatcacgaggtcaggagatcgagaccatcctggcaaacacggtgaaaccccgtctctactaaaaatacaaaaaaaaaaaaaaattagccgggcgcggtggccggcgcctgtagtctcagctactcgcgaggctgaggcaggagaatggcgtgaacccgggaggcggagcttgcagtgagccgagatcgtgccactgcactccagcctgggcgacagagcgagactccgtctcaaaaaaaaaaaaaaaaaaaaaaaaaaagtatttattccctaagcatattcattatatgcatttctaggtattttgttgcagggacgctttcagattatctgtcttcagaattgctagatacagaagttgaccactcccttttaatctttaaatcaaggacaggattgaggtcaatatcgctgtgtgctgtct

SEQ ID NO: 264566 - DNA, 479 bp, Homo sapiens
gacccggcgctgggcagttctcagtgaatgggtgaaattcaccccaaagaggcagaagaaaggagtgagggagggtcgtgggagccatcagcataggcaatagattgctggaaacttagtcttggtataaatttggtcatgtgtcaaaaagaaaatttcaattaaaaaaaaaaaaaaagacattgggccaggtgcagcggctcatgcctataatcccaaagtgttttgggagccgaggtgggagaattgcttgagcccaggcgtcccagaccagcctggggaacacagtgaaatcccatctccacaaaaaattaaaaaactagctgggtgtggtggggcatgtctttggtcccagggtcccagttacttgggaggctgaggcaaggagaatcgcttgagcccgagacttcgaggttgccgtgaactatgatcctgtcactgcactccagtctgggccagtgagtgagactccgtttcaa

SEQ ID NO: 264567 - DNA, 416 bp, Homo sapiens
agagaattgcacagtaaaattgagacttctggattctttttgaaattttggaaaacctggcgacataaggcctgcattctctgtgccaacaattgattggcattgaataggggctgctgccttcagctaaggcagtactgtccagtttgccgtagttcccaccaccccatattgtccccaaaaccaaagctaagaatcaattgcccctatcacagttgcactctgcctttgcatataagaaaaaatggaataggttgaatgctcatgttcctgttaaaaatgggtaaacagaagatatatggggagaagaacatgtttaaagaaagatggggaaaaacatatttctacttgtttaatatacaaataaagtgtgtacattgaaaaaaataaaaatgaaggtgccattatgaaacaaa

SEQ ID NO: 264568 - DNA, 703 bp, Homo sapiens
aaagttactacccaagcaattattcccttagccacccatcacatcccaagcacctactgctagccaggccactgctgggtcctggggtacagaggacagtctgcccctcacctgttactgtcttctcgcccccccagccatcctagtggtgtgaagtggtatctcactgaggttttcatttgcatttccctagtgtccaatggtgctgagcattttttcacgtgcttattgggcaccacctcttggctttgccaccttaagtctcggttttcatatctgtaaaatggggacaatgacagcacctgcctcacagactgtgatgagggctcagtgagataatgtcagggtcctgggacatttgctgcttgaagctgcaggctggggttagggtccttcctctgaaagctggtatgagggagggacatggagaaagctggaagcctggaggtttctgtgagccccaaacccatgtagacagggacaaacatcagtagcgagggagctgacttaccagcccagccctgggtgatttctgctggagctctgatgctctgctgttctgcggcaggccgagtgaccccgacatgtctacacagccccagtgaaatgcagatggcacacgttcaatgcagacaggctcagcccatcacatgggcttctaatttttctcatggggaattattgggcctctgccccttggctg

SEQ ID NO: 264569 - DNA, 648 bp, Homo sapiens
tgtcttgatagactttcctcttttggttttcctggatgcctagtgtctgaaaagtatcctttccatagagcactactgtttaagatcttaagtatttcatattgagctctttttttgtgttgtgtttgttcctttttttttttagtgggtttagtgctcatgcaaagtaccagattgaaggcgtggagactgaagtcctctctatatccacagaacaggtatggcacaggcagcggcagtgtagcttttccactgtcccaccaatgtgcctcagtcctagcctagggggaacacgtttaggataagagggctgttcagtctccatgcccttcaatccttggctactgtgctaagattgccaagaagggggcccagtctgtagttacctccacacctccaaagtagaccaaatcaaacacatccatttcatacaaattcaaaaaagctttaagatatcataatcccagcttatttttttaagtagctggtttaaccattaagatttattaactaaaatgggcaaaaatactagcaagaaattatttaagaccctgaagtaatagagactgtcaccatggctactccctaccgaaaatcaaattgtcacaacaaagctagaaaacgaacagatttttttaaacctcaaat

SEQ ID NO: 264570 - DNA, 466 bp, Homo sapiens
cctgggatgcctgagacccgtcagggagtctgtaagatcaaaatcatgcacaagtatcctcacacaatgcaaaatagccaaacggattttaatataacagagcatggaaagaccattgatacggttacagattcctcattgcagctaacctttgagaaactaccattttttgaatattagtgttgtatcgtagaaaaatatctatagctaaccataaagatttaaactacttctctccctgttccaactacttatctgtgagaggccagattttcttcatatacttgaaccaaaacaacatgtttgtaacatattgaatgcagaagcagatatgagaatgcagctgtattttattaagccaaatattaaagagatttgcgaatgtgaaagtgatgctcttttcgtgaaatttgttgaatttggaaaacatctttattttttaataaaacctatggtgttcatgata

SEQ ID NO: 264571 - DNA, 363 bp, Homo sapiens
agaacattgtctaaaatgtgaagaattaggaagagagttaattttcactctttctctatatttgttattccacactacttggttataaatgcttggatgttaaaatgactaaaactacatcatgtaagcttttcagaatttcattatttttcggctatatttagaaaatattattttatgtaatagtttttccagatatgaaatactcacatgtcttgtatttaaaatattgctgagtagttggaaaaattaggatggagacaccccaacaaaataagaacatgtcccaagtaaaacaagtccacctaaagttttacagaaaatatttattgtgatgagactaataaaatctttctgacattg

SEQ ID NO: 264572 - DNA, 381 bp, Homo sapiens
gtttccctttccttctgggtccacagctatcttatgtgccttaaagtaaggtattgcaggtatggagttcctgccactggcatgagtagcatgaatgtgtgctgcttctagatctggcaggtgaaaaccttccatgaattcctctacctgttctgtttccaccctgccagctcaatgttgggagtcattttccaaagaatggcaaggctctgatcattggagactcagaaaggtggagggatggcagaagggtgagggatgagaaattacctaataggcataatgtacactattcaggtgaagattccacgaaaagcctagactttactgcatgcaatatgttcatgtaacacaattgcatctgtatccctgtaatctctt

SEQ ID NO: 264573 - DNA, 412 bp, Homo sapiens
ggtaatccatccgccttggcctcccaaagtgctgggattacagacatgagccactggtgcccagcctcaagcatttttttaagcctcagaaaaaaagtacctatacagtggggaaaaacaacataattttatatgtacagtacatttttaactggaatatgcctgatttcttaggaagtattgtacagatatttggtaacacactgagtattttgagctgaattgattaactgataagatatatctttgaatatatatatttttctttcatcacatattccagttggatattcattttcaaacagcacccttgcaaagtctagacagatattccctctcctcattcttttttctaggtacacagtctgtctataaaccatgtaagacaaatactactagcattctattttgc

SEQ ID NO: 264574 - DNA, 912 bp, Homo sapiens
tggatattcttacgcaaaaggagaacttgacatcatgtacagaaattaactcaggccaggcaaggtggctcacctgtaatcccagcattttgggaggccaaggtgggcagatcatcaggtctggagatcgagaccatcctggccaacatggtgaaaccccgtctctacgaaaatacaaaggaaaagatttagccacgtgtggtggcacgcccctgtagtccagctactcaggaggttgaggcaggggaatcgcttgaacccaggaggcagaggttgcagtgagctgagattgcaccgttgtgctccagcctggtgacagagtgagactccgtgtcaaaaaaacaaaaacaaaaacaaaaaggccaggcatggtggctcacgcctgtaatcccagcactttgggaggccaaggagggtggatcacgaggtcaagagatcgagaccatcctggctaacacgatgaaaccccgtctctactgaaaatacaaaaaattagccaggcgtggtgatgggcacctgaagtcccagctactcaggaggccaaggcaggagaatggcatgaacccaggaggcggagcttgcagtgagccaagatcacgctactgcactccagcctgggtgacagagtgagactccgtctcaaaaaaaaaaaaaaaaattaactcaatggatcatatacctaaatataaaacgtaaaattagaaaaaatgagattttgaattaagcaaacagtttttagatgtgagatcaaagatagaatgcgtaaaagaaaacatttataaattgaatttgttcaaaatttaaaacttctgctccttagaaaaaacagagaacgaaagacaaaccatagtctggcagaaaatattagcaaatgtcttttagatgacttgtatccagaataggtaagaactc

SEQ ID NO: 264575 - DNA, 449 bp, Homo sapiens
gcagtattcgcttcattgtggtggtctggaaccaaacccacaatatcttcaaggtatggctgtaccttaaattgaataaggccacagagaataatccccattattttatgccctttagtaatgatatagcacctgcccatgcgttcccaccactctcctcatggtgacagttcatgccaaaataatctgagtaacatgtccctgcagagacagccgtggcatgagtggcagcaagccagggcttttcatgtgctcttttgacctcagcctctttattccattctgggcagacccaactagccgagagtaaagagacagaaagaaagcagagagcctctccatcggcccgtggtggtggactgggtgagggaaggagcctcctcctcaactcaaagaaacttctttcaaaagataagaacttcagcaccataggaaagttaaaaaagaaa

SEQ ID NO: 264576 - DNA, 495 bp, Homo sapiens
tcatggcttaatttgcacagttaaaaaaaataggaccaattcttttgctttatagccaaagaagaaggaataaatctaagaggaggaactggtcaaaaccatactcccacttgtcttcttgtatgacatcacagcctttcttacattgcatgtaatcacctgtccacttgtcaggctcctggactatgagcgctttgagggcagagaccacattttttttttttcctgagatggagtctcactctgtcgcccgggctggagtgcagtggcgcaatcttggctcactgcaatctccgcctcccgggttcaagcaattctcctgccttagcctcccgagtagctgggattacaggtgcccgccaccatgccctgtcatccccgtgcctggcatgatgtctgaaatgtattaggcatttaacaaatgtttattgaataaacaaatgacattttgtttatatgtcaataaaatgaataaattgattttgatgcaaattt

SEQ ID NO: 264577 - DNA, 778 bp, Homo sapiens
  misc_feature (618)..(618): n is a, c, g, or t
  misc_feature (681)..(681): n is a, c, g, or t
  misc_feature (694)..(694): n is a, c, g, or t
  misc_feature (763)..(763): n is a, c, g, or t
ggaggaaaaaacagcttaaagttatcagaatataacagaaaattattttttcaatgtacaccatatttaaagaaaagtaaaattgtagaagtaaaagatgtagtaactagaattttaaaaatcagtgaatgaatgtggcagcagattagtcataaaataagagagaattagtaaattagaagctgagccagaagaattcggaaaatagcacagagagaaaaaaatagatggaaaatataagaaagaggctaagagatataaatgaaagttagattatttaaaatacatttaacttcagcttggaaacagaaaaggccaaaaaatatttaaagagaaaacaagaacatacaacaggtccaaagaaaacatccatcaaattccaagtacgttaaagaaagataaatccaaacgttgaaatattttagtgaaattacagaaaataaaggacaaagagaaaacaatgccaagaatagctagagaaagacaatagtgagtatgagattgatatagaattataaagaccaagtaaagatatatcatgcaaatattaatctcaaaaaagttgatatcagataaatgttttggaagaagtaaatagagtcttgtaacatataaagnttttaactcatcagaatagtacgagctgattcatatattttgaaataccagccttagatgatnaagaaagatatcnaagactccttcaggatcatttctttagttctctaagaggcttctcttacatgtggagcgctggaacccnaagaggagtgcgcat

SEQ ID NO: 264578 - DNA, 412 bp, Homo sapiens
tcagttagactgaaaactacctggcagccaggccctccggtcgggactggtggtggtgcagatatgatgacaggctttggtaactattgccaaagcctgtctctgtcccaatagatcaccagttcagcaaagtcaggcctgaagcgaagggagtcttgtgagccctggactgaggagccttcccagcctttccgctcctgctggccacctgggcccacatggcctcagggtcttctgccacagggtccttacccctacagcttaacagctgttctttccttctggatggattctcacattttatggttggttgatcagtcagatgttggaattgggggtagagggattatagagttgtgtgtgctatttaagttttctgtaatcattgctaattaaatttgttgattctcca

SEQ ID NO: 264579 - DNA, 588 bp, Homo sapiens
ttttataagaatacttgttaatggttttcgagacggattctgtgctaattcttcttgtatcatgaatgatggccctagctagacactgtcgctgggatcttcatctgttaatcatggaggctgctttcttattcggttgccatagtttcagtgcctcacatagtgttggggtgtcttgggaaaggtttgagatatactagggcttgcaagccttgcagttattttgacagttgtgctctgaaagactgaaaaccgcttctcgtataattcagtgttggattaaaagaggcaacttctgagagtgtctccctggaccttgttatgtgcacatccagctggtatttaatccaggatttgcctcttgctcagtcttgctggcaaaaaaaataaataaataaaaatacagtacagaggctgatgtcactttcatatttcaacaagaaagcaaagggacgcaaactcttcattaagactattcacaaatgtggaggtaaatgaggccattcatgactttgcttaaaatttctgctccataatttggctttggctttgcagattactaaataaataaaatgacatcatgattgc

SEQ ID NO: 264580 - DNA, 450 bp, Homo sapiens
atacagctggataaaggaatatatatatataaagaattggctcatgcaagtgtggggactggcaagtccaaaatctgcacagtaggctggcaggctgaagacccagggaagagttacagttcaagtccaaaggaagtctgctggcagaattcctcttccttggaggaggtaaactttgttttttggagtcttttttgtaacttaatttgaggctttcaactgattggatgaggcccatctacattatgggggataatctgctttaaaatctaattttaatgtcaatattttggtaattatatgatataaatttgtcatataaataatgctatgtgtgtgtgtgtgtgtgtgtgtgtgtgtgtatatatatatatatatgcagacacacatatgcacatgtatatatatttagagacaggatctcattctgtcacccaagctagagtgcag

SEQ ID NO: 264581 - DNA, 428 bp, Homo sapiens
agtgctaaccagaaaaaaaagagcaaggaagtgaaagggtgggtgagttgttattcatctagagtgattacagcagcctcatgagtaaagacctgaaagaaggagggagccattttggatacctaagcatttcaagttggggacacagtggaaggatatcctggtgtatctgaagagactatgcaggcccttgcacaccactctgagactttgactttcattctgattgaaaagggaagctctcaacaggttttaaacgtaaaaaaggaacaacctaatttttcaactttatttttaatagctttcttgaagtataatggacatataaactgcaaatatttgaagtgtacaatttgataagttttgacatatgtatatacccatgataccatcatcaccataaaaataataaacatatccacatctca

SEQ ID NO: 264582 - DNA, 630 bp, Homo sapiens
gggaaaacagttctagaataactgctccgtgttcagggggagaacagcggtgacgtgggtgccccgttgtcttcatccaccgtgacatcagcaaggagcagagaggaagtggccccggacccgcggccggcagctagacaaatgcactgctgggactgccatgcccagcacgggccgctcccctggggctctgcgcgtagagccgactccttgcttgtacctgcctgccttccggcctgcaccgggcaagaaacgtggggaggggatccacaggccaaggcgccgcacagtgatgccctgctccatcccatgacagggcctggaaggggactggcagctgcagaaatggtttccggccttcccacatcccccacgcacttcccggtgggggcatttttaaagtcgaaggagacacattcattcaaatatgtattaagtgcctgccagtggctctgagaatagaacagtgagctagactcttggcatcgtttcctagggagtcctcggtcctagggggaggagagagccctgtgtaatgatttcagatgatgttataaggtagggtgtggggcgggcgcggttgctcacgcctgtaatcccagcactttgtgaggctgacggaggaggagg

SEQ ID NO: 264583 - DNA, 546 bp, Homo sapiens
gaaaatactgggggaaagcaagccagcaaccgaaactctaacagatttcaggagacagacgagtacgggtgctccaggcaggggcagccctggctgtctgtttctaatccatgccaactttcaggccctgccagccgcacagcctccgagctggcaacaatcagccctccctgcctccacctcccgccctacccaaccccggcacactctgctcttcctccaacagggaactgaagccccacatctttccagagcttcccagacttggacacacatcctggccctcctctgaagccctgcaagatgtatcgagcctgccagccaaagatgaccacagagagcctctccgtgggtgtacagactgaatcgtgcctccaaaagatgttaaagtccctacccccagtactgcgactgtggcctgacttggaagtagggtctcctcttcgaagatgatagtgttaaggtggagttatcagggtgggcccccacccatcactggaaatcccatccaaggggagatgtggtcacaggcaggacacacacaga

SEQ ID NO: 264584 - DNA, 438 bp, Homo sapiens
ccaggctgctcctgggctgtagcctcatcagcaattgcctggagtggctccgcccgagcctgcagggccaccaggagaatggcagcaaggagggcaaggctccttatggctggggtcacctggaggagagagagcaggagcggatgtgtggggagggaggagtctgcctagatttatagctgggagaaggctcagagacaaaccttcttgaaccttctcagtgagaggaggtggagattcgttggagagggtgtggatatccattggcttcaatgttcctcctttccttctctgctctcccagctttcattctagcatgcatctctatgttgagtgtcttggctgggttggagctgatggtgatgatgaggaccctgccatgatgatgtgctttcattcagtgaattcagggaataaaggcctcttactttctgaaga

SEQ ID NO: 264585 - DNA, 438 bp, Homo sapiens
accatcatgtgcactgaaatatgtataatgggaatcccagaaggaaaggagagaggaatagaggcagaaaaaatatttgaagaaataatcactgaaaacctcccaaatttgatgagagacaatttgcagattcaagaagcttaacaaaatccaaataaaataaacacaaaagttccacatatagacacaacatagtcacattgttaaaagacaaagacaaaaaatcttgaaagcaacaagagatcaacaactaatgtagagggcagtagcaatagtattaacagttagcttatcagaaatagtggagtccagaagacagtggaatgacatattcagtgaaagtcaacaaaatggccaaccaagaattacaaatttaataagattatcttccaaagatgaaggtgtaaaaaaccattaccagagaaacaaaaaggaaaa

SEQ ID NO: 264586 - DNA, 458 bp, Homo sapiens
tgagctgagattgtaccactgcactccagcctggatgagagtgagaccctgtcttaaaaaaaaaaaacaaaaaactattcactaaaaggacccacagaattcactgagagatgttatgctcatggttacagtttattacaaggaaaggatacagattgtcatcacccaaggaaagaagtacgtggccaggtgtggtggctcatgcctgtaatcccaacgctttgggaggacaaggagggcagatcacgaggtcgggagtttgagaccagcctggccaacatggtgaaaccccatctctactaaaaatacaaaaattagctggacatggtggcatgtgcctatagtcccagctactcaggaggctgaggagaatcgcttgaacccgggaggcagaggttgtggtaggccgagatcgtgccactgcactccagcctgggcaacagagtgagactccgttc

SEQ ID NO: 264587 - DNA, 143 bp, Homo sapiens
gggagcttctaattagaaagaccccgttgtctggttactattatacactcactctgtctctgacgcatgtaggctattgctcctcaggaggtaatagctttctcatacttgtctataaaaaataagtaatggaaagaaaattc

SEQ ID NO: 264588 - DNA, 400 bp, Homo sapiens
tcattcacttctcatgtggttctaccttagacaacgatttttgtttacagagacaaatagaagtatctaatcctaaataacccaatcaattggtaaaggctacactacaaagctggcatgacttcaccaaatgctagagaaacagtgttaagagtgacaacactaaaagtcttacactctgatgatgctagttgccgccgaattgcttcccctaccagttccttaagtttcttcttatgatcccggctggttttcttatagaaataaagatctttttccaactgctggattttatcttcatatgttttgaaagtttccataatgccttctccatcttgttctatacaacaaaaatttgcatttaaaatcagttttaaataaatgatgcaaaattatgttt

SEQ ID NO: 264589 - DNA, 425 bp, Homo sapiens
gcattcaaggggcatcaagccatggacactttggtgaccctccctatccttggaaccccagccagctgatggggttcgtactggtaaaatggcaaactggtagaggcatctatgcttctgcctgttaaaaatatactaataggccaggcgtggtggctcacacctgtaatcccagcattttgggaggccgaggtggacggatcatctgaggtcaggagtttgagaccagcctgaccaacatggtgaaaccccatctctactaaaaatacaaaattagccaggcatggtggcacacacccatcatcccagctactcgggaggctgaggcaggagaatcgcttgaacccggaaggcagaggttgtggtgagctgagattgcaccattgcactccagcctgagcaataagagcaaaactctgtctcaa

SEQ ID NO: 264590 - DNA, 738 bp, Homo sapiens
  misc_feature (12)..(12): n is a, c, g, or t
agcgggttgccnacccccatgtgcagcactgtctggactctagaagatgctctgattcaagaggatgtaaagaaattctctaagccgataagaaaaatagaagaaacccaaatgggcaatgagtgcatgggaactcactcacctcagtggaaaggagggaatggcaagccagcccactgaagcccactggggacataggacaagtccgcaaagcagagacagcccctccaggaagagcgaccaggccttgagaggacatggccttaggaccagatccagggaagacacagtcactaacccctggctcatctggcaggtgtgggaagcagccaggcccgtggcttcaccagctccccccgatctctgccttcagctgtcctgcagcctgggtcaggcacctaggcagctttatggcaggcggagatgcaccacccacatcctctttccaggcagggcttgctgccctggctgtagcgagtgcggcagcaggtggcctccagctatcagcaacttcagagagctgccttgcctgaggtcccgtcccttctggggaagctcccatctgccagggggctacaaaagcacagtggacaccatgatgggcaattctggctgatgggagcaccacctggtggctgaggcattcttgggccacatagcagttgactgccctctccaccatcttttcacaagtgttaatcccaataaacacccatcctcttccatcccaaaaagtct

SEQ ID NO: 264591 - DNA, 379 bp, Homo sapiens
caatgtaaagtatagactttgggtgctaacgatgcatcaatatgggttcatacagttttatgacataatttaaagaaacataaaaaagtatttggttataatagtgataataacagtaaaagataaaaccagttataatatagaatgttaactgtaagtaaaattgtattaaatataggataatatgaatatatagaacaatatttagaggaaaagagaacatcatttataccgaatttttaagggaaatcagtagaggaaatttcaggacatgagacttctgttgtgcatgctgctttgtcagcttcctttaagaccctgaattatttatctacactgggcaagggatgtcgagtacctcggccgcgaccacgcttta

SEQ ID NO: 264592 - DNA, 454 bp, Homo sapiens
cctttttttttttttttctaagacagaatcttgttctgttgcccaggctggagtacagtggtgtcatctcaactcactgcaacctccgcctcccaggtttaagcaattctcctgcttcaccctcctgagtagctgggattacaggcacctgccaccacacctggctaatttttgtattttagtagagaaggggtttcactctgttggccaggctggtcttgaactcctgacctcgtgatcacctgccttggtctccggaagtactgggattacaggtgcgagccccgagcctggccagggctgcaccttttatctaaggctctgacacagcaaactgcagcctcctctgtccaagtcaagttcggagatcccaaggctgggggcaggctccacatgtgtcctggaatcaccaggactctgctgctatcaaaggcctgacgtcaagaattggaag

SEQ ID NO: 264593 - DNA, 511 bp, Homo sapiens
tgcctggcttccagtgactgtccgagatgacctgtggagtgcaccgcctgtacttggacatcactgtcttttccgatccatacccgtcatccttggaatttcccctgcatccaaacctgttcctgatacaggtataaccctaaggaatatcttggatgtcttcacggggcttatgacttattctgaggtttacaaaatagaggcccccagctgagcaaagagagggctgcagcgccgagggaacagctgccggactcaccggagaggcctcctggagcacgccgggaccccctccaccccctggctttggctgcatccatggctagtttgcctgaactatatctgagccactgagagtatttattaagcagagaataattttgagtttcacttttataacttttgtttcaaaagttgttttggataatttaatgaaatgactgtaaaccagaattccccttttcattatttctttgtgtcgatataaaaagagttgatgattttaaaagcc

SEQ ID NO: 264594 - DNA, 803 bp, Homo sapiens
cgcaccagggctctggtgaacagcaaatgctccacgctgggacgggccattgcctgatgcctgtacatggtgggcactgagagacaagattcctgggccctgccttccatacactccccacgatctcggaggaagctctgaggaccccgctgagaacccacagacaggaggacaactgcgctatgacagcaataaaggccaagaaggagaaagttgaggaccgctgacagccccgtgtgctgttgggagctgccctttctacttcaaaccttcctctagcagactgtgcagggaccccccaccaccaccatctgccgccatggttgtgcaaaacagcgcagacgccggggacatgagggcaggcgtgcagctggagcccttcctgcaccaggtcggggggcacatgagcgtgatgaagtatgacgagcatacggtgtgcaagcccctcgtctcccgggagcagaggttctatgaatccctgccgctggccatgaagcggttcaccccacagtacaaaggtaccgtcacagtgcacctctggaaagacagcacaggccatctcagcttggttgccaacccagtgaaggagagccaggagcccttcaaggtctccacagagtcggcggcggtggccatatggcagacgctccagcagaccaccggcagcaatggcagcgactgcacccttgcccagtggccgcatgcccagctggcacgctcacccaaggagagcccggccaaggctcttctgaggtccgagccccacctcaacactccagccttctcgctggtggaagacacca

SEQ ID NO: 264595 - DNA, 1031 bp, Homo sapiens
cgcaccagggctctggtgaacagcaaatgctccacgctgggacgggccattgcctgatgcctgtacatggtgggcactgagagacaagattcctgggccctgccttccatacactccccacgatctcggaggaagctctgaggaccccgctgagaacccacagacaggaggacaactgcgctatgacagcaataaaggccaagaaggagaaagttgaggaccgctgacagccccgtgtgctgttgggagctgccctttctacttcaaaccttcctctagcagactgtgcagggaccccccaccaccaccatctgccgccatggttgtgcaaaacagcgcagacgccggggacatgagggcaggcgtgcagctggagcccttcctgcaccaggtcggggggcacatgagcgtgatgaagtatgacgagcatacggtgtgcaagcccctcgtctcccgggagcagaggttctatgaatccctgccgctggccatgaagcggttcaccccacagtacaaaggtaccgtcacagtgcacctctggaaagacagcacaggccatctcagcttggttgccaacccagtgaaggagagccaggagcccttcaaggtctccacagagtcggcggcggtggccatatggcagacgctccagcagaccaccggcagcaatggcagcgactgcacccttgcccagtggccgcatgcccagctggcacgctcacccaaggagaggtgagggcactgggcaggatgacagaaaccctgtccctcggcagggaccggcactgctcccacctgtgcccaaggccaaccactccctattaaggctggtgctgagaaaaagaaattcagatgaatgctctgtctagaataaccaatgtgaccaaagaaaggaatggattttctttatgtcactcctagaagggaggattacgatgcattttatcccagaagttgatgcacaggcagagttgtctactgagtaggtattcagtacatatttgtttaattaaatatctgtttcactgaga

SEQ ID NO: 264596 - DNA, 628 bp, Homo sapiens
ggggtgggatgaaggagggagattgttttaataagcacatgctgatgggggctgctctgtggaccagccttgctctgtctcaggggttcagccttctcttcctgaggctgtcctactgattcctctggagttgcagcaactcctaccctgacctgatccatgggtcagaatcagggtcaggatgagtcaaggctgactcattgactatccactctaatggcccttcctccccagggctctatggatgctgacctttgtcctcttccaaactaaagaaaaacaaataagcatacaagcacaaaaccagccccttggacttcctgctaatcctatttggttatttaagtgtggcaggtaccttctctcctcagggcctttgcatatgtttctactccttcctcctgggcttctcttcgcagttctcattctcagtcccatttactgttgggcgagttcctaatcacctttcatacctgcatgtaaatgttacctcttcagggaagccttccctgattatcctccactccagtctctaagttccccgtcctgtactccaacagccacctgtctgccttttgtatcacttaatcagaattttaattaaatgattatgagtataatgatttaa

SEQ ID NO: 264597 - DNA, 491 bp, Homo sapiens
ggaagccggccgggtggaaggggagagggccgttatcgtggtgcgaatccaactcgcagcctctgggagcacgttgctaataaaggtcaaattaaaacaactaagtggtgccggcagggacgcgccgcatggtcaggagaagcccggctattaatcatccataaggagcattgctcttctggtgtgggagaatggggctgtgcgacagccccccggagttgcgctctgctctgaaccctaagctcccccagagcaagtggattgcgcagcctattaccccacctccccacggccccctcttggggcggcaccaccctagatggcaggaattcggagaaaatgcggtgtcacgtccgccgctatgcccgcacacgcgtctgcgccaactccagcaacacgtggggaccgtgaatctgggcgtctgctctccacttaggtggttatgtgggtatacttatatgattactgattaaaaccaaattggacggaga

SEQ ID NO: 264598 - DNA, 254 bp, Homo sapiens
tgtatattactcaaaataaagtttctttcacttaaaaaaaaaagcctctttttcaaagaggcttgacgtcaagctgaaactatcagtgagtggaagtaaaagcaaaaagtggggaatccttgaatttagcaaatacatctctgaagcttctcccccgaagttgggcccaagcaatgggaatgagaaaggtaactgtagccaggtgcgtttcttcaccccagtctttggcaggggatggggaggtggattcttaa

SEQ ID NO: 264599 - DNA, 363 bp, Homo sapiens
gtcgtgctgggcgggtgtcggaggcggcgttggagagatgagccagagggtggccctggacgccaaaccgccctgcagtcctccgagctgcgctttgagggctgttgagagaggggtggaaggtggaggtgcgatttttgcctcggcatctagagaggcgaaggagcagccctgggctccgctgctgactgtggccatgggccgttaacctcatcaaagcccagtttcctcctgttgtagatgggagaggaacagtttttgaactgcgtagaacctcggcaagtcttagcgctgcatttgtgttttctaagctgtaattctagttattgctacttttgacttgtggaatgtggctcctccctg

SEQ ID NO: 264600 - DNA, 440 bp, Homo sapiens
cttctatcctcaagtaggccccaattgtttattattttgaatggaactttttatcttgagataattctagatttatacagagttaaaataaataataatattgacctgatgtaccatttacctcatttcctccaatggcaatatcttccaaaattatagtacaattttacaactggggtattgatgttgatacagtcaaggtaccaaatattttcatcaccacaggatctaccatgtccttttatagctacccccacttcccttccacccctacacctttcttaactcctgtcaaccgctaattaaaaaatcaatttttagcagagaaaattttatgtgcaatcctgagaagttctgtattaaagatccacatggccttatgaaaagagcccttgggccgggcgcggttgctcacaagtgtaatcccagcacttgggagg

SEQ ID NO: 264601 - DNA, 532 bp, Homo sapiens
caatatctttagtatgaagactaaaagataaagctaccaaaaatgacaacaatttgtcaggagatgggcaatataaaatgatgtaaattgtggcaacaaaaagtcaaaatatgggaggcatggagtaaaagtgcagagttttaaacttttttttattggcttcctttctttgtgctgaatgttaagtttccatcagtttaaagtaacttgttatagctctaagatttttttgtaagcctcatagtaaccacaaaatgaaagtttgtcatagatatactaaaaataaaaaaagagtaattaaaacatactcccagagaaaatcagttaaccacaaaggaagatgggaaggaagaagaacagaattaaaaacaaccaaacctgggcatgatggcatgtaccgacagtcccagatactcaggaggctgaggcaggaggatcacttgagcccaggagttaaaggattcagttagctatgatcacaccaatgcattccaaacttgttgacagacagagaccttgtccaaaaaaaaaa

SEQ ID NO: 264602 - DNA, 333 bp, Homo sapiens
agcttgggtgacagaaccagactctctcaaaaaaagaatgtacttgttgaagcagtacaaattgttaatggcatttaattctgatatttgagtatgtatctttttaatattctctgcgatgaaatgggaaatactcataagcacttctactgtacaacaaaatatgatagttatcttgagaagatgtgcaatgatttgacttgcgaactgaggcagctgcttttttcatggaccactatttttaccggcaaagaaaactaacaaactacagtcatccaaacttgggtattttccagacattttctcaaataggaacaaagtcagcttgtcact

SEQ ID NO: 264603 - DNA, 468 bp, Homo sapiens
gatcattgggataattgagaggagaaacagagaaagtcctagatttagggccacagtttgggtgctagttctggctctgatgcgtaatgtttatgggatcttgggccaagaagtcacctttgtgaacctgttttatttgtgtgattaaggaaatgctgacaatagtgctatcacttagaaaatatgaaactgtaagcaaacatttatctgccttcatattttgtcacgtaagtttattcattccataggggagccagtggtttttggtcatgggaagtgttctcataaaattcattttagcttgtaaagtttaaaatcgtcaaagataaactgaaattgtaataaaaattgataatgcctcttgatagcttaccaaatatcggacactttacatattacttttaccctaatctttataataaccctttgaagccaggtactgctatttttactatcatacagataaca

SEQ ID NO: 264604 - DNA, 316 bp, Homo sapiens
agtggaagagatggacatacaattgcttgatgccagttatgtattgtatcagttacctggtgtggtacccagcatgtagtaggagctcagtatatgcgtgaagaataaagaataagtgaacaaataaataaattaattaatgattatagttcttccaaaatagctctgtattcagagcctccatgtctttgaatatgctagtccatctaataaattcctcttttcccttctccacctttttccaagttcacctggcaaactcctgtacttcttgagacctgaaaaatttgtgttacaccaaaacaaagcctgctca

SEQ ID NO: 264605 - DNA, 555 bp, Homo sapiens
accagctatggcaatagcttctatttttcaaagatggctacaacaatatcccctgtttcaggcactcatttacaacgtggccttgatattcctcctactgagaagtcagtctatgtcctctctctttcatgctggacaggcttgtgactcattggaaaccagtatatagaggtgagaatgatgctgcacaacttgtgagactaggtcagaaaaagcagtgcagcttttgctttgtgtttggggacacttgcctttggaagcctgagctgacatgtaagtcctactgtcctgaggccgccatgctaggaggaagcccagactgtatgaagaggccacatggaggtgctgaggttgacagcctcaactgagggcccagctgattgccagcagcaactaccagattgagtgaagaggcttctagatggttccctgtgtttgatttttcctagctgaggcattggacattgtggtgtagtgacaaaccactctgctttgctctgtctgaattcaggacccacgggacccatggaataatgaaatagttattttgaaaaa

SEQ ID NO: 264606 - DNA, 618 bp, Homo sapiens
aatttgggtggcttattacctactgttatgtatcttttaaagatccagtgatccaaaaagctgtgctttgcccaaaattccaaaatgagaaaaccataaaaaccaccctctagtttctggagccattttcaaatctgtgttgattctgaaggaatttcatttacgtagcattttcacatgttaacagtccttcccctaagggattatgggtagaggaaagaagatgaggtggtaaggaggcactggaggagatgaagtctgatttgtttagaaaggaccgatggaggagtgtagcagacactccttttgttctttgctcctgctttaatccttcagacccacaggacaagattgccagctaattgcaaggagcccgtaaaagagaattggcctaaattgaagaataaatatatattttttttaattcttcctttatttgggtcactttgctttacatatgtttatgtctccaaaaagtggttggataccctcttgagaggttttctttacaaaaaagaaagaaaaaaaaatctgaaattccaaagcctctttccctgccattgtagcacttaggcaaaagcatgaagaactaaatccactagactgtagtttaaactt

SEQ ID NO: 264607 - DNA, 654 bp, Homo sapiens
gagaaatttaacagtggtatgaaatgacctatagtgtcaggtgctgtacagaggccagcatggatgaggatcatgccaaagctgtaagactgaccattaggagaattttggtgtcagttaaaagagaagtggtacagataagagtaaatgcaaaggaatacaagcaaaaactaaaggatactttttgcagcagtttgggaatacaacaaagggacttagaataatatggtcaggatgaggtttttcagggtagatgcatcatttaggttttgctgtataacaaacactctaaagtggcttaagacaataattattattatagctcacatgtctgagggttggctcctcccagctgggcttgctcatacatcagcagacctactgggagctttgctctaggctggacacttacctatcatcctccttctgtgactgtccagctcacttaggcatatctttctcatgaagatggaagaagtgttgaagagggcaaacagaggctgggcgcggtggctcacacctataatcccagcactttaggaggccgaggcgggcggatcacctgaggtcaggagttcgagaccagcctggccaaaatggtaaaaccccgtctctactaaaaatacaaaacgtagccgggtgtggtggcacatg

SEQ ID NO: 264608 - DNA, 460 bp, Homo sapiens
aaagcaaatttgatagaccatagcaaaaagacatgttacatttgattattctcttatttgaaaagtacgcttttctacattttcctaggtaaccctgtttcagaaccatgggccctctggaagttaaaatcactctggaggtctcactggttgctctgacagcttcttcctcccgataaccggctttcctcatctcaaggcacattccaaactgccgcccggtggttgaaacagggaataaaccaaagaaaaaatactgttctcttcctttctctaggaaattatgcttgtggcattttctccctctgtttccattaccctaggataatctctctttcttctgcacatcagtactcagtgcagaagacaagggttgtaatctttgtcccccttctcacctgcctcttgcctagtcacactcactaaatctctcaagccatgtctttatatagtttgcttt

SEQ ID NO: 264609 - DNA, 407 bp, Homo sapiens
gaagacagtagccagatgggccaagggccccagccacccacgcccctccctctccttgaagaccttcggttccaaccccaccatcagcagggctctgctcagttcctccttatgtgtatcaccacagggctgctggctcgtgtcacgttcaccaccagaccccacatcaggagtcccgccaggggtgtggggaggcagcgctgcctggttggccgtggagccgtatggaacatggtgcctcacaggcagtctgcttggcgtcctggatcctggctgtatcccgctggaaaggatgtgtgtgggtctaagatatgtatataatagaaacatttattcagaagctttagtcaagacttcatttttaagttcagagtaataaactcatagtctaaatttaaaaaaaaaaa

SEQ ID NO: 264610 - DNA, 362 bp, Homo sapiens
cacttgatttcaccacttcacacccacgaggatggctaaaataataataacaaaagcatggatgtagagaattgaaaccctcatacaaggctggtagaactgtaaaatggtattaagtgctttggaaaacagttttgcagaccatgaaaatgttaaatatgacccagcaatttcacccctaagcacatacccaagacaactaaaaatgtgaagttcacacaaaaactcatgcacaagtattcatagcggcattattcacaatggccaaaagaggaaacggcccaaatgtccctcaaccaataagtgaatgaaaatgtgacatatccaactataaaaatggaatggaatattactcaactata

SEQ ID NO: 264611 - DNA, 445 bp, Homo sapiens
tgttttcagatgattatttcagaggatctgactgctcttcatcttcatgaataactttaaatacattaatccagttagcctcacaacaaccctcattttacagactaggaaacttttgtcagtcatgctgaattactttctcaggctctcacagctagtatctaaactcaggtgtgcctgtctcacacttatattctctacacaatagtaaacagcaggatttgtagaaatgtaggctagagaaattgtaatttgtattaattacatgattgtcatttgttaaaacctcagctgcttcacagatgatttcttagagaaaagtatactatgacagtaaacacaatgtgtttccgaggttcataagactgtgaaatgataccaggtgactgttggtttccgtcattacaatattgtacattaaaatgaaaacatataagtgaagtta

SEQ ID NO: 264612 - DNA, 434 bp, Homo sapiens
gaatatattttgcattttgtaaatcagtatgcctattaggggcacccaattaaaaaaaagtcaagcattctagagaaatggtgtattagtctgttctcacactgctgataaagacataccagagactagaaaatttataaagaaaaagaggctcaagggacttatggttccatgtggctggggaggactcacaatcagggcagaaggcaaaggaggagcaaagtcatgtgttacattgtggcaggcaagacaaagagcatgtgcaggggaacccccctttataaaaccatcagatctcatgagacttattcactatcatgagaacagcacaggaaagaccctcccttatgattcaattacctcccatatccaaattatggggagctacaatttgagatttggggtgggacacagccaaaccatatcaaatggtt

SEQ ID NO: 264613 - DNA, 432 bp, Homo sapiens
cacagggcctaggtgtcccaggagcccaggcgctgcagccctaggggacaaaggggaggaggaggcgaaagaagtcgggaatgattctcctatcctaccaacccgtgtgatggaccctggaccacaagaagaggaagcagttaggggcagtggagtcaccctggggttgactgcactcatcatccacaggatgtgcacacttacttcacagacactcttctgcagtctcaaaatctcacccatcaactatgacccctcctacctgctgccccaacaacatatttaatcagcagctaacactatgtagccccagggggttgcagcgcctgggttcttagggggatcccaggtccccaaaaggagtttagaatccaaactgaagagagcagacaagcacatgagaaatgcgaataaaactaaccacatctaagg

SEQ ID NO: 264614 - DNA, 399 bp, Homo sapiens
atcttgaggcactgaaggagcatggggggaggggaacggaaaggacaaagattctcctatcctaccaacccgtgtgatggaccctggaccacaagaagaggaagcagttaggggcagtggagtcaccctggggttgactgcactcatcatccacaggatgtgcacacttacttcacagacactcttctgcagtctcaaaatctcacccatcaactatgacccctcctacctgctgccccaacaacatatttaatcagcagctaacactatgtagccccagggggttgcagcgcctgggttcttagggggatcccaggtccccaaaaggagtttagaatccaaactgaagagagcagacaagcacatgagaaatgcgaataaaactaaccacatctaagg

SEQ ID NO: 264615 - DNA, 567 bp, Homo sapiens
aaaaaagacccatttgccaaatcagtggcagcctccagtgtgcctgagaccaagctagctggctctaattcagatccaacttctgacccagcagctacaattgaaataacacctttgcaggagtccactatcatcccgcaggatgcatctagactttggaggaggcagatgagagaattaagtggagtcatggtcaagaatcgcgcttttaggcctttaagggtagcactagtctctactgtccccccagggacacagtattaatttagttaaccatgttggctgtcgggaggtggcaatttcaagagctttctcttggtcttacccactacactcgctcttacttcacaaaccaaagaaccaacgtgggtgctcagtgacttgccaagtatacccactcaaattgtacatttggactggagaagtggccactaggttcttctgtggaccccatggaaacatagtgagccagactcgatttattacctggtaactcaggtcccaaatctaccggcaggaacatgtcaacccttcaggtcttaaatatcaatgatatgttggacccta

SEQ ID NO: 264616 - DNA, 481 bp, Homo sapiens
tccaaaaattttaagtggaaaattctagaaataacttaaaagcacaatcccacctggggcaggaatcatctgtttgttcagcatctccacactgtaaatgctacccaccagttagtcacttagtagctgtcttggttatcagattgactgtcaaggtaatcagtattgcggtgcttgtgttcaggtcacccttatttaataacggccccaaagcacaagtgtagtggtgctggcagtttggatatactaaagagaaagtcataaagtgcttcctttaaatgaaaaggtgagagttcttgactttaaggaggaaaaaaatatatgctaaggttgctaagatatatggtaagaaggaatcttcgaaccacaaaattgttaagggaaaaaattcattttagtttttttttttttttatgctgaggttgctaagatacatggtaagaaggaatcttctatccacaaaattgttaagaaggaaaaa

SEQ ID NO: 264617 - DNA, 936 bp, Homo sapiens
cttcatcgtctctcctggaccccctgtgacggttcctgttttcctcccgaccccctctgccggtgttttccgaacacctcgcttgtcccccggggcgtttttttcttggggggaatacccccgccctttgttctggccccgcggtcttcctccggacccccccgcggtgcccccgtttcactttgcctctgtgcggcccgtccgcccaccacgctcagtgtgttctcaaagaactttttttcgaggcccgactgcggcccacacagtggttttttttgtctgtgtatgtctctgtgttttttaaactgatgaggacacttaagaatcccttcttagactccattcaagctgtgagggatatatgccttgtttacttctccccacaataaaagtgacaccaagaactaggttcacagacagctagaagatatacagtttgtttcatatcactgaaaaaaatgaaaaaaaaatgtgggttttggtgctactattaggttaaactatataagactgcctctaacgaattgttcaacctaatacatgtggtacattgcttccctgaggaaggattttatcctttatagactgtttgacctctgatgtcccactagctgagaatctccattgtctaaaaaactgatttgttcctcactggaggatatactgaaccaaagggtctcctatgagaaaactgcatacagcatatttgaactatttatttcagtaggtcttccatgatgaataaaggaaacatttaaaaaaattgagatcataaaaaaattttaataaatgaaacaattataaatagacttgtggactcttttaagtagagagtgaatggtctgccctaaaaaaagtaaataaaaacaaaaaaagacaagaaatgaactgaaatacttcaagaacctcagaagttaattccaatttactttcctc

SEQ ID NO: 264618 - DNA, 674 bp, Homo sapiens
caattatcatgttaacacatgattcatagcatatatgtttgcaaataccctcaatactaatatgttatttcttccgtatgaggtttaacattccaggctaagtgtttaaaaatatataaaagaagtaatagggaaaacatatgttcacacaccttgctttgcatgacaattcattaaagaagaagaaatataaccaaataacgtcaatctggctggtgttaaatattatttgctgtgtaacaatcaaccacaggagaaaaatatttgaatatttagaccggcagttttaatcctgcaagatagatgtgttgttagaaaaacacctgttgctaatgtttccaattaatgtcactttacagtagatctttatgagtccaaacataacacctttctcttgccttatgcttatttaataccacaaaaccaaagataggcaatgttaaccttgatttacaagttcttctctaacgcttgaaatggacattttctgattcttttctttcctttttttctatcacttccctttctttctcttctcttcctctctctactttctctttcttacctccctcctcctttcatctccttccttccctttctcagtttctctctcctcttccttttcttttttttaattattttaaataaatcagccaggtcaacttaaaatttct

SEQ ID NO: 264619 - DNA, 379 bp, Homo sapiens
ctttacctataacctatttcagcccccttatttatagtctactttcccatataaaactaagatttatatataggggtgtttgggggtatgcaaatgaatatataacatatatgcatacacatatatatacattctcttcatttcttttatatgtataggtatatactcatagaattttgataagataataaattttaaccctttgattacatatgaaaaatttgaggaccagagaaaataaatgactttttcaagattatattctttataatcagtactggaggcaaagccagaatgctgccattttaattccaatctgttattttcactaaatcatgtatccttttttataatgaaaattaaaatgcttacataatta

SEQ ID NO: 264620 - DNA, 445 bp, Homo sapiens
atttagctcagagcccagaggggaacagggagtgacaagtcacacctgggctctgaggagggagtcgtcccagagcaggggatgcagggattctggctctccccacccatctccctcccagagacaggggagatgtggggttggtcaagccctcggcccccattgatcccctgtacgactgggattcccaaggtgcccgtctccctcagacactagaggcctggtaccctctaagaagggggccacaagccctcttcccatcatctgactgccctgccttccagctctggggagggttggagccctcttgggggcaggagggacaggggtccaactgaggaagggaagagggcacctgggcacgcgtggtccccggaaagtggccctggggggaaccccgcccgcagacacccctccctgtgaaggatgtaaaaaaaaaaaaaac

SEQ ID NO: 264621 - DNA, 457 bp, Homo sapiens
catggctgcagcttcaggccaagcccaatggacccaggctccaagtctttcccatggacctatgcatcaagttgacctttgtgaacctaggcatcagacctgttcatctgctaacttaggcaccaagccagctcacctgaggacttcagtagcaaacctgtcatggaccttgcatgtcagactgccaagaatctctgcccagtctgactgtaaagggatctccctgccaaaacctgtctctaacaactagaagaggtccttactttttaaaatctgcagacagcagttcaagaccacaagattacaaataatctgggaaatgtgacaccaccaaaggaacagaataaagcaccagtaaaccaacactaaagaaatgaagatctacaaacttcctgaaaaagaatttaaaataattgtcttcaagaagtccagtgagctaaaatagaacacagatagg

SEQ ID NO: 264622 - DNA, 733 bp, Homo sapiens
actttcttttagggtatcaccacttaagactcaaggaaaaataccattcccacttttcagagaaagagctcaatggtcacacagaaaagcagccgggcacggtggctcatgcctgtaatcccagcactttgagaggccaaggcaggcagatcacctgaggtcaggagttcgagaccagcctacccaacatggcgaaaccccgtctctactaaaactacaaaaaattagccaggcgtggcggcgggtgcccgtaatcccagctagtcgggaggctgaggcaggagaattgcttgaacccgggaggtggaggttgcagtgagccgagattgcatcactgcactccagcctgggcgacagagtgagactccatctcaaaaaaagaaaagaaaagcaggctcttgctttcatggtgacccctgagcagcttcgctgaatctcaggtgaggaaggacgtttactcatctctaacatccctggtgccaaacatctagttatccttgtcttataacaaaacccagaacactgaagcagaacaaaccacgcacaaaccacgctaagcctgccgaaccacacacaaccaagaaggaagggcttgccagatgagaggtcttagctttcactttgtaaaatatctactccttcaagtctaacttggacaaaaatctctaagctttcgaaaccactgagccaaaatatcaaagttttctctgaatgaaagttaaactgaaattta

SEQ ID NO: 264623 - DNA, 457 bp, Homo sapiens
aaagttgatgggtgttagttttgagaggacaacatgatgtactaaaagagagcattggagtcagaagacttcgatctttcagaccttcagtaaattctggctactctcggggcttctgtttacttataaaatgagaagtctggactaggtaattttttatgatttgaaaaacacttttttttagaacatcggatattatacacattttactagtgagttaatgtggttatacatcaaggacattatatctattaattttctctaaatatatgcaaagcaaatatgttgatcagtatgtctccgtatttacaaatattattagcattaacacattttacttcacttctaattctaactctatagctagaaaacagtttcagtcatgaagcctatccttctatataatgtaagcctataattacaacaataaaatattgtgttttaaagtgtttcagtt

SEQ ID NO: 264624 - DNA, 511 bp, Homo sapiens
cccagaggtgtgctgttcacagtcaatacccagagcaccaccaccaggaggcctggaagcaactcactgtcccacttgatgtggcctgtggaccaccagaaatttcagagcgtcacagagatgtgtggttcgatcctgagcaggtaagaaactgaggcccagaggaagtgaagggatacctccaaggcttcatacagggacagagcacagcctggtctcaggcctccctaccctggagtgagacagtgtggcttccaaccctagttctgtgactacctggttgcaggacctggagcaagacactttccccctccaagcctggtgttccggctgcaaaatgaaaacagctgtacttacttcacaggcctagcagcagagttcaatggtccatggtaagcgttctgtaaatgttagctgctgctgctgctgttgttattattatcgttattaattgagacgaagtctcactctgtctctgtcgcccaggctggaagagtgaaactccatctca

SEQ ID NO: 264625 - DNA, 446 bp, Homo sapiens
aatcctgcttttaattcttttggatatatatccagaagtaggattcctggatcttgtggtagttctattttcaattgtttgaagaacctccatactgctttccatggtagttgcaccattttatggtctcacctcagctttttaaaacctgtttaattttgaatcctaaccaacctctggtaacagataccaaattacagctagataggaggactgagctctcttattctgcagccctgtagagtgaatgtggttaactgtatttattgtatattttcaaaaagctttctgaaagagaggattttgaatgtttacagcacaaagaaatgataaatgtttgagatgctggatatactaattatcctgatttgatcattgcacattgtatgcatatattgaaatatcactcagaatcccataaacatgtacaattgtcaactaaacat

SEQ ID NO: 264626 - DNA, 380 bp, Homo sapiens
tcttcaatgtgctaagagaatgatttgacttccacacctcaagaaattatcttttgagaatgaggatgaaataagtatatttccagataaatgactcttattaacagatatttaaaagaatgtacatttggcagaataaaaatgatctcaaagaaggaatgatgagatattatattggaagtatgtaggtaaatctaaataaaaactgactgaataaagtaaaaataatatctaaatcatgaggttacaaacagctataactcaaaatactagacaaaaatagtatattagctggaaaaggagtggtgagacttaaagcattctaaggttcttaaatcatttgtaaggaagataaagatactgattaattttagacactg

SEQ ID NO: 264627 - DNA, 494 bp, Homo sapiens
accccacaaccacagtggtggaaaatggcagttctgagggtcacatacagagttcaggccagaagaacagctgcaaatgtaaacggaaaatccaagaagtggagagatatttaggaagaccaagacccaaatccttcgctgacagcagaactacacgtggtgggaggtggcgcaggagcctggtgaaaagcagggggagagcacaggacactactcttgaaacacagagctctgccagaagagatctgtgagtctgaagcttcttaaattgagcacaaccccaaatcatgaacagctattttttggtgtcttaaattttcttgcttattgtgcaagttcccccaatccccgcccccaacaccatagttgagaatgaatgaaaactttttgtttaaggaaaagtaaaacacctggtgttgcagctagtgtaactctccctacgtggtgtattttaatgatactgtgcaattaaaacttaattttatgccctgaag

SEQ ID NO: 264628 - DNA, 239 bp, Homo sapiens
ccatcagggcagagttggccttagaactccatttctccactcctaacgtttccaccagaccaagcagcttgcacaataacagctttgtggtgaatagcagaagtgtggaatccgagaggcctgagtttggttctgggttcttctacatgctagcaaaaggtctagggtaattcttcggtctctcacagtggtccagttgccacctgtataaaataaagatgaaaactcccccctggaag

SEQ ID NO: 264629 - DNA, 416 bp, Homo sapiens
acttagttttccagaattaaaccaggtttttcacacctccatcatttctgcctcatgtgtcctgtggccactttatcccctgattgttcaggatgtggctcctgctcatgattttcactctggaatgtgaattctcatatttggttattcttttttagtgtctgtgctgttctatttacttgcgtgctgttgacacaaatgtccccatgtctttctggccaatctcattgggtgacttaaagattcatcttaaatgactcctagacctacatctcttgtcatagattctttcttttgtacagtctaaatatgtatttcccaccgtctgtaatttgttccatcctgaaggggtttacagttatttcaatatagagtcaaacattaaaggtatttcttctacatgtacaaatttataa

SEQ ID NO: 264630 - DNA, 321 bp, Homo sapiens
agtttccatttatgtcctacatgatgtaggtagtattagtcctgtgattttcaagtaagttacttcctgtcttagtatctcaaattcgatacctataaatgaaggggtgggccgaaatgatcgtcagttcccatcatttccacaattctgtgttttcctaacttttcccccatacctcagagggctctctaagtagaaccattggattagcaatagaagaagaacaatgtattctataaataaagcacaagaagaaaatggcttttgtatttaaatggcaaaaagaaaaaaccagaaatacttatttcttctcctccctga

SEQ ID NO: 264631 - DNA, 602 bp, Homo sapiens
caaaattcagaaatctcattttgtggaaatttttaaatcagaagatgtcacataaaaactggaatttctggcttctctgggaaatccgaatcctaagcctctccgaggtgcctccccatgctggcagccagcgtacagagccccagctcttgctggaggcgcctcctgggccaaagccccacagtcctcactactccttgtcccctggaactgaggctgcctgtcagctgccatttataactgagaagacactaagctattttttgtattggagggtttgttgttgttgttgtttttggttaaatcttctcctcaaccatgtttttatccagcccctgaccacttcactcattagcatcacctgcgcacctcttcaagctgctgggccacgtgtagattgtgattaaactgtccaaactcctctctgcttttataatttgagtttacagtaaatgttgttagtaataattttaaatccaattcagatactaagaaatatttgaaaaccattgtctattccatgcaaaattttatgcatacacagtacaccagaactttcatatttaacggtttcatttgaaatgtctccccaggagacactg

SEQ ID NO: 264632 - DNA, 411 bp, Homo sapiens
ccaatctgagtgtgaaggtctgagaacaaggagagccaagttccagtctgaagacaggagaagaccaaggtcccagctgaaacaggcaggaggagtcgctcttgctcagcctttcattctatccaggtcttcaggtgattggatgcggcccacttacattagtgagggcaatctgttttatgtattcgataggctgaaatactaatctcatccagaaacaccctcacagacacatcaagaatgatgtttgaccaaatgtctgtgtacccgtggcccagtcaagttgacacatacaatccaccatgagcagagccatccatttcctctaaggactgctttcttgacttcccacacattctgaaacactgtgtttacactaccattcagttcaaaatattttcaaatttccct

SEQ ID NO: 264633 - DNA, 563 bp, Homo sapiens
ccttagaagcagctgttcacctctcctttagtagctcagcaagaattcagttcagtaaaaatttatttagcacctaccctgctccaggtactctctaggcactgagaggggttttcctgtactgtgcccagaactctgctcctcaggcctttctcagctcaggatactggcttaagcagctaaactgatcgcaagtgccacccttccatgctgctaaaaacccatgctgttctcctagacaaagttaatgtctggctcaacataccacaccttctctcttaagtccttaagttctgagaaagggatcccaggaggtatgcaggactcttgatgttgaatgagaggcaagaccctccactcctgttgctcgaccctctcccaggtcccctagaggaaaggctcatcctgtggcttctccctcctaaaccaatccctgtgcatccctttctttgtttgtgccacgtccacacactaatctctctgccttgtgttggcagatgctggtgggatggagctgcagtttgtgtctctgaagcagattaaacactgtctgccccagcctg

SEQ ID NO: 264634 - DNA, 420 bp, Homo sapiens
gttagacaagagtaaatgaaaagggtgtgaaatcatgtgtgtatacatccatgtgtgcatgtgtgcatatgtctatgcatgcatctgtgggcgtgtgcagattcagggagcagaggctcagaatggaagctaagaaaggaagggtgggggaaaggtagaggcattggcttccccaaacttcaaaaaccacatcctgtgtgacccagagcaccctgtggccggggctgagctgaagcctgtcaagttcaggtgcaaccgcctccagctagggagctttcttcctgctttctcagcagccgccacacaggcttctgcctctgggctgagccagttcctctggggtgagacacagaattctggggccagagttcagaaggagtcgctaccctacttctcccaggcctgtggggtgtcagccag

SEQ ID NO: 264635 - DNA, 317 bp, Homo sapiens
gcaatccactgtctttccgttcttcagtttccttatctataaaattgagatatcacttcactctgcctatactacatcattactctgagaccctgtggaaataatatgtataaaaatataaaaagaagggggccaggggctgaaaactttctattgggtactatgtccactatctgggtgatgggatcgatagaggcctgaacctccgcatcacacagtatacccttgtaacaaacttgcacatgtacccactgaatttataataaaaatggaaatttaaacaattaaaaataaatatatatgtaataatatacatt

SEQ ID NO: 264636 - DNA, 235 bp, Homo sapiens
ctgagcaatttacatttgtgaaaagggatgtttaccaacccagctgaattattatttggtggaaattgcaagcaatgggaacaggaagatagtgtcagtctaataacagagagatactctctgaaagaaaagatgtttatttgggactgagcattgtaatggaaatacttatgccaaaataaactatagtaaactatgtgcatattcagggaggtaaaggaagacaaaggttttt

SEQ ID NO: 264637 - DNA, 523 bp, Homo sapiens
cagtggtgagtgagagatgattaatcaagtatgaagtaggaaaataatacatatacagtactgctttttgacattaaaaagcataaaaatatgaaatttaattagagtccttttcatataatattagaggagcatatcggaatctctggggaggtctgtgtagtttgaaaaagcctattcagtatgtctgttattttcatagtacaaactaggcaaatacaactaagtcaaactctaattggcttctagcaatacaaaggtgatatagtgagaaagcattgcaggggcatgcattgaaagtgactgagcaacactaccctacagtgttaaaatactgacttaggcagagcaggcattatgttgcttgaatttcatacagagaagggccaataagaaagaattatttgtctagccctctaaaatatgatttgcctgctttcattgtctgggtatttgactgttagcctgtatcttaaggcagccaatttctttatcttaagagtggtatgttggagaaaagaaa

SEQ ID NO: 264638 - DNA, 241 bp, Homo sapiens
cactccagcctgggcaacagagcgagactctgtctcaaaaaaaaaaaaaaaaaaaaaaaagataaatgaacacacacacattaattcctaataagagaaatgtaaacatttacttgttattatttttttcttccagaattggttttatttattttcaatttaataatagagagtattccttctttatatttaaaataaaatatttcaactcaagtggtattcggatcatctataggattaa

SEQ ID NO: 264639 - DNA, 106 bp, Homo sapiens
taatacttagggtatataggattgagtcttcagtgtatggcatatcatcacactatcatctgtgaaggcccctctattgtgtgtgtgtgtgtgtgtgtgtgtgtgt

SEQ ID NO: 264640 - DNA, 2540 bp, Homo sapiens
ctgtgcttcagtgggcttttcactacctttagttagttgcactaggctggttgctgtttaccttgcatggttgactgctctcttctcacattgtgtgccaggaagggcactgcaccttggtataaatgctgctgggcaccgttctgttttctttcttttcttaatcctatccaagtatgcagtacgctcttgggtcgtctcatgagacccaggggcatgttggaaagaactgagagaaagagcaacaaagcggcgagtggtgtgagagggcagcacgcgctgtgggttttttgccattcctccaggacatccaccataaggaaaggagaccctggaccaacattctctaagatgtttatatggaccagtggccggacctcttcatcttatagacatgatgaaaaaagaaatatttaccagaaaatcagggaccatgacctcctggacaaaaggaaaacagtcacagcactgaaggcaggagaggaccgagctattctcctgggactggctatgatggtgtgctccatcatgatgtattttctgctgggaatcacactcctgcgctcatacatgcagagcgtgtggaccgaagagtctcaatgcaccttgctgaatgcgtccatcacggaaacatttaactgctccttcagctgtggtccagactgctggaaactttctcagtacccctgcctccaggtgtacgttaacctgacttcttccggggaaaagctcctcctctaccacacagaagagacaataaaaatcaatcagaagtgctcctatatacctaaatgtggaaaaaattttgaagaatccatgtccctggtgaatgttgtcatggaaaacttcaggaagtatcaacacttctcctgctattctgacccagaaggaaaccagaagagtgttatcctaaccaaactctacagttccaacgtgctgttccattcactcttctggccaacctgtatgatggctgggggtgtggcaattgttgccatggtgaaacttacacagtacctctccctactatgtgagaggatccaacggatcaatagataaatgcaaaaatggataaaataatttttgttaaagctcaaatactgttttctttcattcttcaccaaagaaccttaagtttgtaacgtgcagtctgttatgagttccctaatatattcttatatgtagagcaataatgcaaaagctgttctatatgcaaacatgatgtctttattattcaggagaataaataactgttttgtgttggttggtggttttcataatcttatttctgtactggaactagtactttcttctctcattccgccaaaacagggctcagttattcatttgccaagcttcgtggaggaatgtaggtgacatcaatgtgataaagtctgtgttctgagttgtcagatctcttgaagacaatatttttcatcacttattgtttactaaagctacagccaaaaatatttttttttcttattctaaactgagccctatagcaagtgaagggaccagatttcctaattaaaggaagttaggtacttttcttgtattttttaccatatcactgtaaagaagaggggaaacccagccagctactttttttcatcactttttattcataacttcagatttgtaaaactaatttccaaaatataagctgttttcattagccagttctataatatcttcctgtgatttatgtagaaaatgaacacaccccttttccatttaagaccctgctactgtgtgaagagatgatacttacaaggagtgtcattacctgtgagctgactgaatgttggtaggtgctccattacaatccaggaaagtctgtgttactgatatttgtgtggaaatctttatttcacttcaatttaaccattagatggtaaaattaagatgctacttgttggtaaaaattggtggactggtttcaatgggtaaatgtgttgtggcaaattaatgtgttggaatattgctctttgtgaatttgtgcttaagtcaatgaatgtgtagtatctccttctgacaagcattccctattgggattttaaagctatgtgcacagaatattagtctcttctacatgttttatttttctatttataattcccttttttgttgttatattttatacacagaatagatcttttttctaacacatatttgaactgaataacagacttaaagaaagcctttgttcacattgctatttacttttgtgtttgggggaaaatacgagggattgattttaaataaaaaacattccatctttcatttaatatcaatatcaaaagaagaagacaaacatctatctttctcatctatatttaagtacctttttgtaatgtagtatcaaagtttttttaggtaatgcaaaattttacaaatcatttgtggaatgaatggtaaaactaatctgatgaaatggaaaattattctgcaatattgtaattcatagtttgacttttcataagcaaataaatccctaggatgtaatcaggacttcaaatgtgtaattaaattttttt

SEQ ID NO: 264641 - DNA, 2618 bp, Homo sapiens
ctgtgcttcagtgggcttttcactacctttagttagttgcactaggctggttgctgtttaccttgcatggttgactgctctcttctcacattgtgtgccaggaagggcactgcaccttggtataaatgctgctgggcaccgttctgttttctttcttttcttaatcctatccaagtatgcagtacgctcttgggtcgtctcatgagacccaggggcatgttggaaagaactgagagaaagagcaacaaagcggcgagtggtgtgagagggcagcacgcgctgtggggcccttccagagaaatgtactgaaaaagtctacgcaatgtctgggatttgctaaacaatacctggaaagcagacaggtttttttgccattcctccaggacatccaccataaggaaaggagaccctggaccaacattctctaagatgtttatatggaccagtggccggacctcttcatcttatagacatgatgaaaaaagaaatatttaccagaaaatcagggaccatgacctcctggacaaaaggaaaacagtcacagcactgaaggcaggagaggaccgagctattctcctgggactggctatgatggtgtgctccatcatgatgtattttctgctgggaatcacactcctgcgctcatacatgcagagcgtgtggaccgaagagtctcaatgcaccttgctgaatgcgtccatcacggaaacatttaactgctccttcagctgtggtccagactgctggaaactttctcagtacccctgcctccaggtgtacgttaacctgacttcttccggggaaaagctcctcctctaccacacagaagagacaataaaaatcaatcagaagtgctcctatatacctaaatgtggaaaaaattttgaagaatccatgtccctggtgaatgttgtcatggaaaacttcaggaagtatcaacacttctcctgctattctgacccagaaggaaaccagaagagtgttatcctaaccaaactctacagttccaacgtgctgttccattcactcttctggccaacctgtatgatggctgggggtgtggcaattgttgccatggtgaaacttacacagtacctctccctactatgtgagaggatccaacggatcaatagataaatgcaaaaatggataaaataatttttgttaaagctcaaatactgttttctttcattcttcaccaaagaaccttaagtttgtaacgtgcagtctgttatgagttccctaatatattcttatatgtagagcaataatgcaaaagctgttctatatgcaaacatgatgtctttattattcaggagaataaataactgttttgtgttggttggtggttttcataatcttatttctgtactggaactagtactttcttctctcattccgccaaaacagggctcagttattcatttgccaagcttcgtggaggaatgtaggtgacatcaatgtgataaagtctgtgttctgagttgtcagatctcttgaagacaatatttttcatcacttattgtttactaaagctacagccaaaaatatttttttttcttattctaaactgagccctatagcaagtgaagggaccagatttcctaattaaaggaagttaggtacttttcttgtattttttaccatatcactgtaaagaagaggggaaacccagccagctactttttttcatcactttttattcataacttcagatttgtaaaactaatttccaaaatataagctgttttcattagccagttctataatatcttcctgtgatttatgtagaaaatgaacacaccccttttccatttaagaccctgctactgtgtgaagagatgatacttacaaggagtgtcattacctgtgagctgactgaatgttggtaggtgctccattacaatccaggaaagtctgtgttactgatatttgtgtggaaatctttatttcacttcaatttaaccattagatggtaaaattaagatgctacttgttggtaaaaattggtggactggtttcaatgggtaaatgtgttgtggcaaattaatgtgttggaatattgctctttgtgaatttgtgcttaagtcaatgaatgtgtagtatctccttctgacaagcattccctattgggattttaaagctatgtgcacagaatattagtctcttctacatgttttatttttctatttataattcccttttttgttgttatattttatacacagaatagatcttttttctaacacatatttgaactgaataacagacttaaagaaagcctttgttcacattgctatttacttttgtgtttgggggaaaatacgagggattgattttaaataaaaaacattccatctttcatttaatatcaatatcaaaagaagaagacaaacatctatctttctcatctatatttaagtacctttttgtaatgtagtatcaaagtttttttaggtaatgcaaaattttacaaatcatttgtggaatgaatggtaaaactaatctgatgaaatggaaaattattctgcaatattgtaattcatagtttgacttttcataagcaaataaatccctaggatgtaatcaggacttcaaatgtgtaattaaattttttt

SEQ ID NO: 264642 - DNA, 160 bp, Homo sapiens
ttttacagatgaagaaaccaaagttcaaagaagtgactgattcagagtcatgaaatcggggagctgggccctgaatccagactggtctgacttcaaagccttgctctctttccactgcaatattcaaaatcaaaacaaaggtttttgttagtgattctca

SEQ ID NO: 264643 - DNA, 701 bp, Homo sapiens
agcccaatgggctgggggaaggtctgaacactacagccttcaaggcaaagggaggagatattttgtccagagaataggagccgggggcagcccctggggcagatgtgctgaggcaggggcaggtggtgtcctgaggcaggggcaggtgtcctgaggcaggggcaggcaggtgcatgggccctgatgggtgaggggttgggggaagtgtgtttcttggggttctgccttggctgccactgggattgggaggggctgaggccccaagccttcagggtctagacagaggccatgatgcctgctgtacccagagagaaggccaaggcctcacggcctccgaggccctacatagtgtggcccataccccagacctcatctttgctgtttcttcctctcccacccccgacagctatgctggcctccttgctgctcctcaagcagaaacacccagcacctcctgcctcagggcctttgcacgtgctgtgcccgctgccatctccccagcatccatggggagcctcccctccatcttcacgtctctgctctaaagcccccttctcagagaaaccttccctgacccccacatatacaacagcaccctgatcctggccccctctctccccttcaccctgggtgtgtctccagggcacatatttcaacccaatatgctgtgtaattattatctttattattatttttgagat

SEQ ID NO: 264644 - DNA, 362 bp, Homo sapiens
tctccacacacctgcagggcaggcatcagcctcacccactttcagatgcagaacctggttcagagagctatgctggcctccttgctgctcctcaagcagaaacacccagcacctcctgcctcagggcctttgcacgtgctgtgcccgctgccatctccccagcatccatggggagcctcccctccatcttcacgtctctgctctaaagcccccttctcagagaaaccttccctgacccccacatatacaacagcaccctgatcctggccccctctctccccttcaccctgggtgtgtctccagggcacatatttcaacccaatatgctgtgtaattattatctttattattatttttgagat

SEQ ID NO: 264645 - DNA, 959 bp, Homo sapiens
  misc_feature (854)..(854): n is a, c, g, or t
agctgcagtggcggggagtggggtgcggatcttgtgtttgcgcacgcagtcgccggccacctcaggccggagctagagatacggctcgggataggagggcccggcggctctgaggcaggttcgcctcgagccgcacggcccggagcagcggctccgcggtggtccccggggcttgagaggggtgcgggcctgggagcccctgagggcctgatttacggaactccccctccttcctcctttctgccgttccctgctctgtggcggatgcgcagggatcagtagggacggcagcagtagggccactcgggcctgccccgcttcccgcattgcccggtttggcgcgccgcctccgggccttggcaaagccccagcgcccgattgtcactgaccagtgcttggaagtcctttaccgactgcccgtcagcgtcccgcggagaggattttgcgtctccaaagacgcccctcttccgaaaacaggctcctctgtgttctcagtcgggtatatttttctgtctccaaactagattggcagccgttttttgagagcagggtcttgctctgttgcccagactggagtgcagtggcgccatctcagctgactgcagattcaaccttctgagctcacgaaatcctcccatctcaacctcctgagtagctgggaccacaggctgagcacagggttgctccaggtgggcccaaatgctgaagagcctcatgttagagtttttcacctctgcgatggaactgtggtggactccagtatcatcattccagggaggcatagccgcaccaactgtgttcccaggtttcacatggagaagggttttagaaagtgcagatagccttgaaaccantggtttcctaccactgtttatttcagcataactttttttgtgtggaatgctagctctggaagagcagaaataaatacagcttaagctttgaaccatatcctgctg

SEQ ID NO: 264646 - DNA, 309 bp, Homo sapiens
ggaaatggtctcaaatctccaagaacagaaacttctcttgacagtgcattctgttaccttcagtatgaaaactggcaatgacacagcaagacctgcaactcaggcttcctgtccccagccctccacaatgctaagagcaatggcagagcacctgtccaaggcctcgaatgagctgttggctatacagaagcatctggaaggatgcaagagcaccctagaatgactatcataaaaaacctgccccattcccccacaaccctttcccagcccttctgtaatgtgtggttaaactgagtctcatccattttt

SEQ ID NO: 264647 - DNA, 490 bp, Homo sapiens
atagagaccggcgctcccacagcccgcctgccctctccgcgccgcgtcgctcgggccgctggccttcgcttggcgggctcagggagcgagggaggcggcggctagactggcgggcgagcgggctgcgggagcggagtccgcgcgtcacgctcggagaagcacctccgcgagctgccgcctggtcccccagttcactgtattttttaaattttctttgagacttccttttgacccatggattacttaaaagtgtgttgttttgtttctagtcatttgaatatcttcctgttatctttgttattgatttctcatttgattccattgtcattacaaaacacactctatatgatttcacttatttaaaatttgttgaggcttgtttgatagcccaggatatgacctatcttgggatatatattttgtggtcatttgaaaagaatgtgtattctgatgttgctaagtggagtggaccataaatgttgatttgatt

SEQ ID NO: 264648 - DNA, 1223 bp, Homo sapiens
atctagaggagggccgtctgtgaggccactacccctccagcaactgggaggtgggactgtcagaagctggcccagggtggtggtcagctgggtcagggacctacggcacctgctggaccacctcgccttctccatcgaagcagggaagtgggagcctcgagccctcgggtggaagctgaccccaagccacccttcacctggacaggatgagagtgtcaggtgtgcttcgcctcctggccctcatctttgccatagtcacgacatggatgtttattcgaagctacatgagcttcagcatgaaaaccatccgtctgccacgctggctggcagcctcgcccaccaaggagatccaggttaaaaagtacaagtgtggcctcatcaagccctgcccagccaactactttgcgtttaaaatctgcagtggggccgccaacgtcgtgggccctactatgtgctttgaagaccgcatgatcatgagtcctgtgaaaaacaatgtgggcagaggcctaaacatcgccctggtgaatggaaccacgggagctgtgctgggacagaaggcatttgacatgtactctggagatgttatgcacctagtgaaattccttaaagaaattccggggggtgcactggtgctggtggcctcctacgacgatccagggaccaaaatgaacgatgaaagcaggaaactcttctctgacttggggagttcctacgcaaaacaactgggcttccgggacagctgggtcttcataggagccaaagacctcaggggtaaaagcccctttgagcagttcttaaagaacagcccagacacaaacaaatacgagggatggccagagctgctggagatggagggctgcatgcccccgaagccattttagggtggctgtggctcttcctcagccaggggcctgaagaagctcctgcctgacttaggagtcagagcccggcaggggctgaggaggaggagcagggggtgctgcgtggaaggtgctgcaggtccttgcacgctgtgtcgcgcctctcctcctcggaaacagaaccctcccacagcacatcctacccggaagaccagcctcagagggtccttctggaaccagctgtctgtggagagaatggggtgctttcgtcagggactgctgacggctggtcctgaggaaggacaaactgcccagacttgagcccaattaaattttatttttgctggttttgaaaaaaaaaaa

SEQ ID NO: 264649 - DNA, 450 bp, Homo sapiens
ccccccccccccccttttgcctttctaataacacccctccacacacacatacgcttcttgccagagctgctggagatggagggctgcatgcccccgaagccattttagggtggctgtggctcttcctcagccaggggcctgaagaagctcctgcctgacttaggagtcagagcccggcaggggctgaggaggaggagcagggggtgctgcgtggaaggtgctgcaggtccttgcacgctgtgtcgcgcctctcctcctcggaaacagaaccctcccacagcacatcctacccggaagaccagcctcagagggtccttctggaaccagctgtctgtggagagaatggggtgctttcgtcagggactgctgacggctggtcctgaggaaggacaaactgcccagacttgagcccaattaaattttatttttgctggttttgaaaaaaaaaaa

SEQ ID NO: 264650 - DNA, 1362 bp, Homo sapiens
gattcttgctccaccctgtgtacctgctccgagtgtctttccccctccccaccccagcaggccagtcctgggccccagctccagagcactcacgggctgccagggtgagcaggctagaaactcacgacaccaggtagctctgcaggtgctgggagggcaactcagcccagaggaagagcaggctggggagccctcaccgcccaatggggactgacccctggcccctgcccctctccaccccactgccctgaagccagatttcctgctcagcatggacaggacagcaagaggctaaccctctgcccaggtggaagctgaccccaagccacccttcacctggacaggatgagagtgtcaggtgtgcttcgcctcctggccctcatctttgccatagtcacgacatggatgtttattcgaagctacatgagcttcagcatgaaaaccatccgtctgccacgctggctggcagcctcgcccaccaaggagatccaggttaaaaagtacaagtgtggcctcatcaagccctgcccagccaactactttgcgtttaaaatctgcagtggggccgccaacgtcgtgggccctactatgtgctttgaagaccgcatgatcatgagtcctgtgaaaaacaatgtgggcagaggcctaaacatcgccctggtgaatggaaccacgggagctgtgctgggacagaaggcatttgacatgtactctggagatgttatgcacctagtgaaattccttaaagaaattccggggggtgcactggtgctggtggcctcctacgacgatccagggaccaaaatgaacgatgaaagcaggaaactcttctctgacttggggagttcctacgcaaaacaactgggcttccgggacagctgggtcttcataggagccaaagacctcaggggtaaaagcccctttgagcagttcttaaagaacagcccagacacaaacaaatacgagggatggccagagctgctggagatggagggctgcatgcccccgaagccattttagggtggctgtggctcttcctcagccaggggcctgaagaagctcctgcctgacttaggagtcagagcccggcaggggctgaggaggaggagcagggggtgctgcgtggaaggtgctgcaggtccttgcacgctgtgtcgcgcctctcctcctcggaaacagaaccctcccacagcacatcctacccggaagaccagcctcagagggtccttctggaaccagctgtctgtggagagaatggggtgctttcgtcagggactgctgacggctggtcctgaggaaggacaaactgcccagacttgagcccaattaaattttatttttgctggttttgaaaaaaaaaaa

SEQ ID NO: 264651 - DNA, 1017 bp, Homo sapiens
gattcttgctccaccctgtgtacctgctccgagtgtctttccccctccccaccccagcaggccagtcctgggccccagctccagagcactcacgggctgccagggtgagcaggctagaaactcacgacaccaggtagctctgcagaggttaaaaagtacaagtgtggcctcatcaagccctgcccagccaactactttgcgtttaaaatctgcagtggggccgccaacgtcgtgggccctactatgtgctttgaagaccgcatgatcatgagtcctgtgaaaaacaatgtgggcagaggcctaaacatcgccctggtgaatggaaccacgggagctgtgctgggacagaaggcatttgacatgtactctggagatgttatgcacctagtgaaattccttaaagaaattccggggggtgcactggtgctggtggcctcctacgacgatccagggaccaaaatgaacgatgaaagcaggaaactcttctctgacttggggagttcctacgcaaaacaactgggcttccgggacagctgggtcttcataggagccaaagacctcaggggtaaaagcccctttgagcagttcttaaagaacagcccagacacaaacaaatacgagggatggccagagctgctggagatggagggctgcatgcccccgaagccattttagggtggctgtggctcttcctcagccaggggcctgaagaagctcctgcctgacttaggagtcagagcccggcaggggctgaggaggaggagcagggggtgctgcgtggaaggtgctgcaggtccttgcacgctgtgtcgcgcctctcctcctcggaaacagaaccctcccacagcacatcctacccggaagaccagcctcagagggtccttctggaaccagctgtctgtggagagaatggggtgctttcgtcagggactgctgacggctggtcctgaggaaggacaaactgcccagacttgagcccaattaaattttatttttgctggttttgaaaaaaaaaaa

SEQ ID NO: 264652 - DNA, 1034 bp, Homo sapiens
caccactcctatagatcagtagaattagaattgtgaagatagactgcatcaaaaatgatggtgcggaaagtatttaaggacgtggaaaatcgctcaccctctagtgctaagtgaggggaaaaaaaacactgtatggaaatacatacactgatcacactaaggggaggaggggtgagactgtatttcttagttacttctttgtgatcttccatattttccaaatgaatgtgtattgtatttgtaaatagagcagtactgttttaacacatctccagccccatctgaagcccttttagagaggaagtcttgaagccctttaccctgtccttcctgagtgcagccacgttctctggacacccccagggcagatgctgaatggggagaagagtgggaaccttgccccatgggaatcccaccacctgatgcccctgcgacccacccccgcatcctgaccatcctctctggtcctctgcagaatgaacgatgaaagcaggaaactcttctctgacttggggagttcctacgcaaaacaactgggcttccgggacagctgggtcttcataggagccaaagacctcaggggtaaaagcccctttgagcagttcttaaagaacagcccagacacaaacaaatacgagggatggccagagctgctggagatggagggctgcatgcccccgaagccattttagggtggctgtggctcttcctcagccaggggcctgaagaagctcctgcctgacttaggagtcagagcccggcaggggctgaggaggaggagcagggggtgctgcgtggaaggtgctgcaggtccttgcacgctgtgtcgcgcctctcctcctcggaaacagaaccctcccacagcacatcctacccggaagaccagcctcagagggtccttctggaaccagctgtctgtggagagaatggggtgctttcgtcagggactgctgacggctggtcctgaggaaggacaaactgcccagacttgagcccaattaaattttatttttgctggttttgaaaaaaaaaaa

SEQ ID NO: 264653 - DNA, 414 bp, Homo sapiens
tgccctgctgtggctggagctgtgaagggaagcccaaaaattcattctgggctggtcctgtgtgctctggtgggggctgttggaggcactgtggagcccagaagggcacatctcccagactttgcaatcagcgaaggctcccccagaaagaggctctgagcttcatcccaagctgcgccctggccctagccctggccctcccctccttctcccccaagtacctcctgagcttctgcccaccaaggctggtctctttcctccccagaggttaaaaagtacaagtgtggcctcatcaagccctgcccagccaactactttgcgtttaaaatctgcagtggggccgccaacgtcgtgggccctactatgtgctttgaagaccgcatgtaagtacctaagacacaactatgtttattt

SEQ ID NO: 264654 - DNA, 420 bp, Homo sapiens
ccccagttaggccctggaggtccctaaaaggtctgatgggctgggcctgctttcttccagctctgccagagtggaaacttggccccagctatggcctggtccaggtgtgggctgcagtgggaacttgtcccatgctactgggacaccctgcttccacaaccatcagcttctgccagcgtcatttcactgatctctagttcattgatctctaccctccaccacttacactgacctcgtggcatcttggcctaatactacagggtgcatctcttctgatgaggacacttttttctccacactctccggtcctcagctttgttaaggtacacgtgacaaaaattggatatgtgaatgatgaacagtgtgaaattttgatatatgtatacactgggaaatgattaaatcaagctaatgaacaca

SEQ ID NO: 264655 - DNA, 787 bp, Homo sapiens
tgctccttaacattgtgttatacattgtctgtctccccaactggaatgtaagtggcaccagggcagggacttgggttgttttgttccttgctgtaagcccagggcccagggccagacctggaacaattaggtgctaagttatttgctgaatattctatgaaggaatgacaaaggaatgcataaagaacttcaaagttcaactcctcgaacttcaaacttcaaatccccaactcctcctgcctatgctggacgattagggcagtaacaggagtcaacttgtgctgtgctgtcaccttgcctggatccgcatcagccctgcagctcccactttggaggagacttgcccagggacctacagctctgaagcttctctgacagcctctgcagctcttggaacttatctgggctgctgctgtgcagaccatggatgcgtagctgagttcctgcccctgatttcctagagtctcagaaagacagggaagtgacttacccaaagtcccctttcaccctataaacagttcagcccagggagtgaggctgacacgcaaatgcagctatgtatagactcagagtcatccaaggtcagggctgggtggagccttggtcacatgcaggccaacctgtgtctggagataatgcaagccagtgcaggggttagcgtgtacatggactctggagtctggcagatctaagccccacccaccaacctgtgaccttggagaattatttgaaaagacattatttgaaaagcagatgtaaaatggaaataaaagttcctatttaaaac

SEQ ID NO: 264656 - DNA, 1003 bp, Homo sapiens
aacgagaagagagccaaggagttggaggccacttttggctgccggatgtcaccggacatcaaacaggaattgctgcaatgcaaagcacatcttcatgcaaataagcccttatccgtgaccgacctgaaggaggtcttgggctgcctgtatgagtctcaggaggaggagctggcgaaggtggtggtggccccgttcaaggaaatttctattcacctgacaaatacttctgaagtgatgcattgttccttcagcctgaagcattgtcaagacttgcagaaactctcactgcaggtagcaaagggggtgttcctggagaattacatggattttgaactggacattgaatttgaaaggtgcacttacctaaccattccgaactgggctcggcaggatcttcgctctcttcgcctctggacagatttctgctctctcttcagctcaaacagcaacctcaagtttctggaagtgaaacaaagcttcctgagtgactcttctgtgcggattctttgtgaccacgtaacccgtagcacctgtcatctgcagaaagtggagattaaaaacgtcacccctgacaccgcgtaccgggacttctgtcttgctttcattgggaagaagaccctcacgcacctgaccctggcagggcacatcgagtgggaacgcacgatgatgctgatgctgtgtgacctgctcagaaatcataaatgcaacctgcagtacctgaggttgggaggtcactgtgccaccccggagcagtgggctgaattcttctatgtcctcaaagccaaccagtccctgaagcacctgcgtctctcagccaatgtgctcctggatgagggtgccatgttgctgtacaagaccatgacacgcccaaaacacttcctgcagatgttgtcgttggaaaactgtcgtcttacagaagccagttgcaaggaccttgctgctgtcttggtgtcagcaagaagctgacacacctgtgcttgcactctctgagtggtaccgccga

SEQ ID NO: 264657 - DNA, 942 bp, Homo sapiens
aacgagaagagagccaaggagttggaggccacttttggctgccggatgtcaccggacatcaaacaggaattgctgcaatgcaaagcacatcttcatgcaaataagcccttatccgtgaccgacctgaaggaggtcttgggctgcctgtatgagtctcaggaggaggagctggcgaaggtggtggtggccccgttcaaggaaatttctattcacctgacaaatacttctgaagtgatgcattgttccttcagcctgaagcattgtcaagacttgcagaaactctcactgcaggtagcaaagggggtgttcctggagaattacatggattttgaactggacattgaatttgaaaggtgcacttacctaaccattccgaactgggctcggcaggatcttcgctctcttcgcctctggacagatttctgctctctcttcagctcaaacagcaacctcaagtttctggaagtgaaacaaagcttcctgagtgactcttctgtgcggattctttgtgaccacgtaacccgtagcacctgtcatctgcagaaagtggaaagaccctcacgcacctgaccctggcagggcacatcgagtgggaacgcacgatgatgctgatgctgtgtgacctgctcagaaatcataaatgcaacctgcagtacctgaggttgggaggtcactgtgccaccccggagcagtgggctgaattcttctatgtcctcaaagccaaccagtccctgaagcacctgcgtctctcagccaatgtgctcctggatgagggtgccatgttgctgtacaagaccatgacacgcccaaaacacttcctgcagatgttgtcgttggaaaactgtcgtcttacagaagccagttgcaaggaccttgctgctgtcttggtgtcagcaagaagctgacacacctgtgcttgcactctctgagtggtaccgccga

SEQ ID NO: 264658 - DNA, 947 bp, Homo sapiens
aacgagaagagagccaaggagttggaggccacttttggctgccggatgtcaccggacatcaaacaggaattgctgcaatgcaaagcacatcttcatgcaaataagcccttatccgtgaccgacctgaaggaggtcttgggctgcctgtatgagtctcaggaggaggagctggcgaaggtggtggtggccccgttcaaggaaatttctattcacctgacaaatacttctgaagtgatgcattgttccttcagcctgaagcattgtcaagacttgcagaaactctcactgcaggtagcaaagggggtgttcctggagaattacatggattttgaactggacattgaatttgaaaggtgcacttacctaaccattccgaactgggctcggcaggatcttcgctctcttcgcctctggacagatttctgctctctcttcagctcaaacagcaacctcaagtttctggaagtgaaacaaagcttcctgagtgactcttctgtgcggattctttgtgaccacgtaacccgtagcacctgtcatctgcagaaagtggagattaaaaacgtcacccctgacaccgcgtaccgggacttctgtcttgctttcattgggaagaagaccctcacgcacctgaccctggcagggcacatcgagtgggaacgcacgatgatgctgatgctgtgtgacctgctcagaaatcataaatgcaacctgcagtacctgaggttgggaggtcactgtgccaccccggagcagtgggctgaattcttctatgtcctcaaagccaaccagtccctgaagcacctgcgtctctcagccaatgtgctcctggatgagggtgccatgttgctgtacaagaccatgacacgcccaaaacacttcctgcagatgttgtcgttggaaactgtctcttacagaagccaattgcagactttctggtaccgaccgat

SEQ ID NO: 264659 - DNA, 525 bp, Homo sapiens
ctctatgcccctgagcagctcctattggctgtccctggtcagggttgcatgctggtccaatcatccctggcgcaaaggagaggccgtggacatgaaaggaaggagccactgggtacatgtggtgtcacagatggcctgctctgcacttctacttctaaagcacagatgggaagaaatggatcttgtctacgatctaccctgtacccaactgggcacttacacagaagcctcactcattcaggactgcattagaattctcatggctaggttggccgtcacttcattttaaaaaaaaattatattttacgactgcattggcataaagaataacatctaggctggattcattgttacatattgatttttttatatttatttttttttcctgtttgtaaaggaaaataacaacactatcatgtatccctaacagtatctgggcctctggcactgtgtctactaggcctaatggaaaagtagatcctgcattcacccattcaataaatatgtattgaacatctactatgg

SEQ ID NO: 264660 - DNA, 197 bp, Homo sapiens
tctcaaaaaaaaaaaaaaaaaaggaaagagccttgtcccagtagcagactttcctgtcacttaaagctaggttagaatgagcacacactcagctggatgtttttcactacagatgaaaagtttgctacgtttgtttacacaaataatcaggaattatgaaatgctgtgtcctggcaagaaattttatttcacttaca

SEQ ID NO: 264661 - DNA, 409 bp, Homo sapiens
ctacaaatggataacatacactattttcttctgtctcaaacttcataaatttgattgcattcgttagaaaactttaatacattttttaaaaataatgatttcctaagtcattggctgtaactggactagattcaaaagacacaaaaagatggcaaaattgctcacaatttgaagataataattttctaaatatactaaaacaagtaaattacttagaaagtaaaacatttatgccatagttacatttagaagaggaaagtgcttgccttaaaacttcacaaagaatgaagacgtatgtactactaagtattcatcttcagaacttttaaaacaccaataaaatagaacaaaggaataaaagagatagaaaccaactgaataaaacacaaataaaaataaaaggataaaa

SEQ ID NO: 264662 - DNA, 730 bp, Homo sapiens
  misc_feature (39)..(39): n is a, c, g, or t
  misc_feature (54)..(55): n is a, c, g, or t
  misc_feature (82)..(82): n is a, c, g, or t
cacgtctttggctcaatgtacgctcagaagatagcttanctattccagagctgnngacaaacagttcactaaagcatttagnattcatctgaatgttacagtcctttcacatatgagaatatcaaatcttatttcttcagtaagcaaacacagttttgacacccacaacttaatcttaagtggtaattttgcttaggaaagtggctcatgcctgtaatcccagcacttcgggaggctgaggcaggagaatcacttgaaccagggaggcggagatggcagtgagcctagatcgtgccactgcactctagcctggtgacagagcgagactctgtctcaaaacaacaacaaaacatttactgcattctagattttgtcttggataacctttttctcctttaatctctcagttttgtgggtgagtaaactttaaatgaaactctaaagttttcattgtatttgtattgtaaaataagtccacctctttgtagttacttagtgttttacgtttaaactacaaagtatcttaatctctgacgtttctcattaagctgttctctaggtaacatttcttttgcccttttattattaattatatagtttccatccttcactaggcccttagtttgttaatgttacatgaagcaaaatggtcaacttcaaaatatcttatttgttgccttcaggttgcagcaggagacttaaagcacgtaatttctacccattaattgta

SEQ ID NO: 264663 - DNA, 216 bp, Homo sapiens
atgaacctctgcaaccccctctgagggaaaccctcccgcattctgggatgccggggctcagagggtggagggtagaagagcgccagccgtgagaggcaggatggggcggcccccgagggcagggctgtgcctggaggcagggctcctcggggggtcagctcctgggcggtgggagtgaccgagtgggctcctgagggaagcggctttcaggaagga

SEQ ID NO: 264664 - DNA, 259 bp, Homo sapiens
ggaggaaagccaacgttactgcagaaactaggaaggttgccacacaaatgccagaaattttactacatttctggtagacattgtgcagatagcgccaaacaggaggcagccaccaagtgctttatggcctctacataccaatagcccctaattaggaggtgaaagtgtgagccttgaagccttgagaaagatgggtccacccaatttaggactcctttggggtgctgccatcaacttccggaggcagctgtcctcagat

SEQ ID NO: 264665 - DNA, 498 bp, Homo sapiens
ctgcctaggcctgttcgatgaagcaccaacaagccccacagctttgttgcttttgctatgcccactgggaccagtgagagaagtgcggtcttatccctgggaggagagaaagagccagcatctgcaggcgcccacaggatgtcaagagtttcgcttttgttgcccaggctggagtgcaatggtatgatcttggctcactgcaacctccgcctcctggattcaagcaattctcctgcctcagcttcccaaatagattccagacattgtatggaaaagcatcgtgaaaatccctggcctgttctgctctgttctgattaccggtgcgtgcagcccgcagtcacgtacccgctggttgctcaatcgatcacgaccctctcacacggacccccttagagctgtaagcccttaaaagggacaggaattgctcgctcggggagctcggtttttggagacgtgagtccgccggtgctcccagctgaataaagccctttccttcca

SEQ ID NO: 264666 - DNA, 301 bp, Homo sapiens
ggatgctgagtcctcagacaccacaaggaccagggctcgctgcatcagaaggctggtgatgggaaccggggtagccaggcccggagcccgaggccaactgccctgacctggaggggatggccatgccagggacagaaggacactcactgtgccctgcaggatgtgggcatgtgaacccgaggccagagctggtccagtggtcctcatacatgtccctgaaaaagacttgtaaaaccactgggttctaataacagagttcacacagacaaaactgagaagagtgaggctccaggaggaggcg

SEQ ID NO: 264667 - DNA, 479 bp, Homo sapiens
ctggtttctagtgttttcctagctggacaaatttggcatttgacagatcattcctatactattggcccagtatattttgtgggaaataaactatttgggggttcaatcgatgtaaaaaaaaataggcatttctgatttcatttcagatgttgcagtggtaaagtatattccagtcaggagctggtgaggcctgaggcccaagtgtgcacccacgcggggttgcagagaggccgagaagtgcgttattacctcccttctccttggtcctcgtgggtgggcatgagaggttggatctgtcactctgagacagcagagggggacaaggagaagtgaatgaaatacgtgttgcttctccaggccttcatatcagaaacacctgccgctgccctgaggccacaaggctggccgccggctggtgctcttggctccctctgctgcttgctgggtgaggatgccctgggcttgtggcatttttctta

SEQ ID NO: 264668 - DNA, 427 bp, Homo sapiens
gcaggctcctacaatattatgttcttaatttgcattagtctaatgaaggaatactgggggaagggtattcccctggcctcatgttttaattaggtgtgtactttaccgtctccttttctccgtttaagagtatgaaaacttgtttagaacatgaacttgaagaacttgaagtgaatgtttcacccagctcttcattaagtacttgaactacttaagtttgtggttttagttgtttgacttcttgacattctgaaggaaatggttacatagtctcataaactcagtgattctcaaccctgggcacacattagaatcacttggggatttaaaaaattttaatgctcagggctttctttcaagctaattagtctgtcctgctttaaacccaatctgtagtgtttacctgattccagttcctgggatctgg

SEQ ID NO: 264669 - DNA, 455 bp, Homo sapiens
ttatagattaattgtgatactgataagttaggtaatctgccaaagttctcagagcttgtacatggcagagcagaagacaatcctcagccttctgaggccaccaagcccagtgccagatccattacaccagagctgccttgtgtggatatcacatggacagacgaagcagagaaaagaaggaggaagggggacagaaagaggaaaagagagttgaagtccatgactacagctatccttaaggtccctgaagctgcacagaaacaaaatttgtctccccacacagcatgaccatgggaaaagacatctttagactgaaaaataaaaactacagccaaagttcttctactagattgtttttattctgaatctttatctttaaaagagactaaataattgtgaaaataatttctccacatattcatattttatatcacatctggaaatttcatgttctg

SEQ ID NO: 264670 - DNA, 397 bp, Homo sapiens
ctcttatcgccaacactagatatgaatccattaacacgacatacaatgaccagctgttatagagccattcttgtatccctgaaaggctgaaatgggggaaaagagagaaacagactggctagaatacacagctcctctagtggcattcctgttaaaacaacctcataggtcagagatgccactgatcactcctagatttcagtaaatatataataacattaatcattaatgtctgaacttgggtgttggggataaatagtatgttatccccaacaccagctacctgggatgctgaagtgggaggatcacttgagcccatgaggttgagcctgcagcaaactgtgattgtgccactactctctagcccagaagacagaacaagagcctgtctcagaaa

SEQ ID NO: 264671 - DNA, 372 bp, Homo sapiens
caaatagttgaaggacagagttcagaagtagcaatctgaaaacatattttagctctaaagttttaaaagaaaatgccaccttaaaaatgcttaccactaatggatttttaatcacaaaatgaagcaaatggttaaataatacacttcccaaaattatatcataaatacactaagtgtaatgtggactttttctccctgagtgtaagaaatgtaaaattacaaaatgtttaagcattaaagtgcaaatatcaatctttaggcaatgaaaaacagcgagacaaatgtataaattacatataaaggtcataactatttcagaatttgcagaataataaatgtagaaagttttaaaataataaatgagcaactccc

SEQ ID NO: 264672 - DNA, 667 bp, Homo sapiens
gggccattgatgtaaagcgataatggagacatcagcgcccgtatcaatcattccctcaaacttccttccttgaatatgcacagagcacacaggacgagtgtcagaaatcttgctggctcaataagctgctttgtcctgatagtctgtgctaccaaaacctccagttctggtacaagaactggatcctaaaggaacgtaagggagtataagaagctgagcaatgcggtctccagctgccgtatatcaagggactgcagagctaatgacaatatgaatttcacctgaatagtcagaatcaattacaccagtatgtacttgaacaccttttaaatttaggcttgagagatcaaatagcaaaccgacactgccagtcggcaaggggccaaaaacacctgtgggaacagcaataggtggctctccaggtaacagagaaatatctctggtacaacagagatctactgatgctgagcctgtggtggcaggggacaagcattgtactgagattcgtgttggggcagagccattagatcctgtggcacaaattgctgaagtgggaattgggatgtaggttgaatggattgggctggcaaggcgctcatcttgctggacgccaggggctcggagttgaggaatgccccattgtttggaggggcctagggctggcccc

SEQ ID NO: 264673 - DNA, 638 bp, Homo sapiens
atccacccgcctcggcctcccgaaatgctgggattacaggtgttagccactgtgtcggccaggaaggagattcttgataagtcattgaaatttattttattttgtactaaagaaatatttagtactggccaggtccggtggctcagcactttgggaggttgacgtgtgcagataacctgaggtcaggagttcaagaccagcctggccaacatggtgaaaccctgtctctactaaaaatacaaatgttagccaggtgtggtggcaggcacctgtaatcccacctacttgggaggctggggcaggagaattgcttgaacctgggagggggagcctgcagtaagccgagattgcgctgctgcactcctgcctgggcggcagagtgagatttcgtctcaaaaaaaaaaaagaaagaaaagaaacatttagtactgtgaaagtgttggagtctgcattaaatgataagctaatgtattttattggagttaggaacagaacaacagcctatatttactactatacttatgctagttcactgttttaaagcgatacaaattgaggtagcatctgcaaaatatattctcttgctctgtcgcccaggctggagggcagtggtgtgatctccacttactgcaaccttc

SEQ ID NO: 264674 - DNA, 273 bp, Homo sapiens
aggcttctagagaaaaacagaagaatatcttcatgactgtggggttggcaaagatttttttccatgagaccgaaaagtaccaacctcaaaaaaactaacacattgggtttaatcaaaatgtaaaaccataagagacaccgttaagcaaatgaataaacaagccaggaccaaaagaaaatatttgtaatacatacatctgacaaaggatgtgtatctaggggatggaaagaattcttacaactcagtaataaagataactcagttttaaaattt

SEQ ID NO: 264675 - DNA, 302 bp, Homo sapiens
taaaaaacaaatagaaaatatattatattctacccacaccgcaatggatcaaactactgttaactctgttaacacagcgtgtagatcactgacatcgatactaaaggtttgggctcctttctgaaaagaaggggctagccaccaggactctacgattataacttgcaactcccaaaggtgatgcaggataaaagttataacaaagagtaacttccccccgcctgggggcgagcgggggagtctagaacagattgcccttcgtataacagtaaagattaggagttatttaccgtacaccttaa

SEQ ID NO: 264676 - DNA, 315 bp, Homo sapiens
tcagccctaatgagactacattcaaatgaaggaagacagatactaaaaatgacaaatatataacagtatgttagaggatggaaagtgctattgagaaactacagtatggctaggaggattataactaggagaatcagagagaaggcgacattagaacaaggacttgatgggtacaagaagtgagccatgtgggtatctgagaaacgaatgtttcaaacagagaataatcagtgcaaagacccagagttgggagtgtgcttgatatagtcaagggatactgaggaatccattgtgactggagcagagtgaacaaag

SEQ ID NO: 264677 - DNA, 276 bp, Homo sapiens
tgtaaaaaaaaaaaaaaaaaaaaaaaaaagcatacaacagaaactgtatgtggcctgtgaaacctaaaatatatattctttggctcttaacgaagatgtttgccaacccctggtatatattaaagacagttattttagagactgtgtctggtaaccctattatttgaaacttctttgttagtttctggagtttattccatactttttatcagtgccatcctgtctcgtcatatgtgcctggttttattgggctgagcaatggatgttgtatatgtg

SEQ ID NO: 264678 - DNA, 445 bp, Homo sapiens
cattcctggaattcttgatttaattggtataaggtaaagtctggacatcaaatccagtggtgtcttccaaccagccttgtggccaggtctgacatttacagccatattggccacatgctgcacaattccagaaggcttcattcacataatctatattggaaatagtttgttctaaatttgtgctgtacacaaccttcaaaactgtatacggttggctgatctatccagccttattctgtttgcaaaattcctttttagctttctcaacaccactctctccctcttcccttgctaccactttgactactctttctcatgttctttcaacttgcactctctccttgaggaaattaatcagctcccaatctccagccacctctttccgcactcatgagtcacagctccaaagctcgtaagccttgccacccacgcaaccttcaggcat

SEQ ID NO: 264679 - DNA, 243 bp, Homo sapiens
ggataagggacacagaacccacttctcagcaggaagcgcacgtacatcacacgggaagagtgcgtgggagggacgccacccctgaggccgtcctcggaaatgacatctaccagcaaagccgcctttcattccctgactaggacagaccccgttacaggtggagagagagacaggaagggagaaagaaagacagaggggcctagcaagagaattaaaaacaaagccgccgtctgcgaatctgct

SEQ ID NO: 264680 - DNA, 422 bp, Homo sapiens
tgttttaaacaataaacaaagccaggaaccagtaaacctgacaggcagatttgtcctttctcgttttgagtgatagggaaggccgtgaattatagtcctcaatgacatacacagaggggcattgaaaaggcttatctggctgggcgtggtggctcacacctgtaatcccagcactttgggaggccggggtgggtggatcacctgaggtcaggagttcgtgactagcctggccaacatggtgaaaccctctctctactaaaaatacaaaattagctgggtgtggtgggacatgcctgtgatcccagctacttaggaggctgaggcaggagagtcgcttgaacctgggaggtggagattgcagtgagccgagattgtgccattgcactccagcctgggcaacaagaatgaaattccatctcaaa

SEQ ID NO: 264681 - DNA, 984 bp, Homo sapiens
gcagagaggctggtgggtagggtgaagaattattagattgattaatatgtttactttgagatccctatggttgttcaagtgtagatgttaagtatatagttggaagtactcctttggaatttgggaaagaagaaagggtgagaaatatttggagtccataatatttatgtgataaaaaattaataagattttccattgagtgggtatatagaaagaaacaaaagtcaaaattagaactctgggggaacattagcatttaaggggacaggatagacaaccaagagccaaagggacacattatatgatggagaaatgacattaattttggcagtagatatcatttgcaaatatatattagttaggtgttggtggaagaaagctaggttgcaggaaatgaggaagtaaaagatcagagaagagagacagcaaattcaaatacctttcaagaagtttggtggtgaaggaaagcagagaatccaagtgatagcttaaggatcaaggctggtttgaaaaaaaagataattggtgctttatttttcctctaggttaggacaggcttgagcacacttgtagctagagaggagagttgccagaaggacctgaagactgaaagaatggagattatttccggtcccataaaagtcaagagtgtatatgggatctacagcacagctagaaaggtttgacccaacagggagtagagacatttctttctctgtgacagaagggtaaggaaggagtaaagagaaagacgttgaagaatattatcaaatactgcagagattaatcgtacatttgcagtagacctgggatcccatgtagttctttagttacataatcaaggtagattttaagtatttgagtcaaatgaaccaggtttgtatgtaatcttaaaagttttttgcaaaatcatcaggacagtttcaataaaatattaatgaaaatgttataaaagcgttgactctgatttgggtaagaaaagta

SEQ ID NO: 264682 - DNA, 557 bp, Homo sapiens
ggctgatctacccagtcagcaaggccagattgcagagaaactcagagtctaggaaaatgaatgtctaggaacattcctcaaatagtcctaccagaagacacaaagatgatgcatccggatgaagaatatatcactgagattaatggccctgggttgcagccaaaagcatctcagagggtatgatgcatttcctgactgtggtcggctttccatgggtgaaacagaaaagtcttcaaatatcctcaccaactgctttcctagatttttcagccagttacttgaccatattaggaaaagaaaggtgagcttgggcttcaggacatagaaaacaacattagttatgctggaaagtatcaccaaagaagtgcagctcagacaagctgtattctattttgttcttttgaacataaacacctataaagggaccaaaagaaatctaaatgatcaacgggagcaatcctgaataggcaacaacaatcattattgccaagtgattgtcttatcatttgtcatcagtttttttttcagagtaattacatttaaatgtaaatgtgtct

SEQ ID NO: 264683 - DNA, 753 bp, Homo sapiens
ggctgatctacccagtcagcaaggccagattgcagagaaactcagagtctaggaaaatgaatgtctaggaacattcctcaaatagtcctaccagaagacacaaagatgatgcatccggatgaagaatatatcactgagattaatggccctgggttgcagccaaaagcatctcagaggtagaacactgttgcagatggtgatgttaccatttgaaagtaagaagaaaactagtatctctttacaccaagagtaaaaatagagaagatgcttacaaactgcaacacatagagtttcttgaaatcacagtttgggagtggaggaaaaggctgcttaagtgtttggaaagggagagtaaggatgaaatagagtgggggtatgatgcatttcctgactgtggtcggctttccatgggtgaaacagaaaagtcttcaaatatcctcaccaactgctttcctagatttttcagccagttacttgaccatattaggaaaagaaaggtgagcttgggcttcaggacatagaaaacaacattagttatgctggaaagtatcaccaaagaagtgcagctcagacaagctgtattctattttgttcttttgaacataaacacctataaagggaccaaaagaaatctaaatgatcaacgggagcaatcctgaataggcaacaacaatcattattgccaagtgattgtcttatcatttgtcatcagtttttttttcagagtaattacatttaaatgtaaatgtgtct

SEQ ID NO: 264684 - DNA, 596 bp, Homo sapiens
ggctgatctacccagtcagcaaggccagattgcagagaaactcagagtctaggaaaatgaatgtctaggaacattcctcaaatagtcctaccagaagacacaaagatgatgcatccggatgaagaatatatcactgagattaatggccctgggttgcagccaaaagcatctcagaggtagaacactgttgcagatggtgatgttaccatttgaaaggtatgatgcatttcctgactgtggtcggctttccatgggtgaaacagaaaagtcttcaaatatcctcaccaactgctttcctagatttttcagccagttacttgaccatattaggaaaagaaaggtgagcttgggcttcaggacatagaaaacaacattagttatgctggaaagtatcaccaaagaagtgcagctcagacaagctgtattctattttgttcttttgaacataaacacctataaagggaccaaaagaaatctaaatgatcaacgggagcaatcctgaataggcaacaacaatcattattgccaagtgattgtcttatcatttgtcatcagtttttttttcagagtaattacatttaaatgtaaatgtgtct

SEQ ID NO: 264685 - DNA, 350 bp, Homo sapiens
tgagatgcacgttcataggctgatagttcctaaagggctaactggaattgtttaaaccattatgtcctattgtagtttatttacacatacttttctcagtttgaatatacctttggaaactagagatgatcattattagtatctgaacaatgattaaaattgctttctttctccagtgatagattggtagctcatatagtttgggattatttacttatatgaagactttaggctgggtacagtggctcacacttgtaatcccagcattttgggaagccaaaatgggaggatcacttgagcccaggagtttgagaccagcctgggcaatgtagcgagatcctgtttctaaa

SEQ ID NO: 264686 - DNA, 377 bp, Homo sapiens
acccgaagctactgaatcggcgctctgggcaccttagatgaacccgtgcgcccgccgtctgaaccgtcgaggcgcagcgctagatgcctcagaccgcccgtgggtcacaagtgcaaaggagacgtctgagtgtccctgttaaacagggcccatcgcaggaggcttcctctccacaggagccggctttggtagcagtggattgacccagaggcaagaggagaactgaggccagtcgggggccaggaagggaggttccgggaagcccaggagttgaaggctgcagtgagcgagactgcacccctgcactgtaccctgggtgacacagcaagaccccatctctcaataaataaaaaataataaaataataaaataaagga

SEQ ID NO: 264687 - DNA, 187 bp, Homo sapiens
tgtgtgaggtgaaaatacgaggtgatcctgtgcatgtggtgaccctgtgtgaagtgactctgcacaaggtgactgcatgagatgaccctgcataaggccaccctatacgagctctctgcgctgagctgcacaaccccagtccatgcagtgactcctcccagcaggctcgtatctttgatgatgctgt

SEQ ID NO: 264688 - DNA, 502 bp, Homo sapiens
ttttagaagacagaagaactgttgggatttggttttcagaaaggcgcaggccacaacttcaaaatgatgtaaatgccacagatggctgcctctgtccatgaagacagacggtttgatgtctcatccttgttccagctgtttgatggagcccaggaaagaactctctccccagtgcaactccatccaccacgttgaggccagaggcctctgaaatgtgccacagaagccagattccaaatgggctgcaatttgctaagcattacagctatttcattctgctgtacaagcttcagtacaagaagaaaaactatcaatcactaccataacaaacacatatttctaaaatagaccctcctgtctggaagctgtaggacagacacttgcactcaaagtaaatggagtttagggtcatcattgtggtttagtgctcctgtacctttatgatgcatgataaatgatcaactggaatctgctaaataaatatttttctatgtagatctca

SEQ ID NO: 264689 - DNA, 655 bp, Homo sapiens
atcctgttacccatgcggaattggggtggtgtctgacactgacattcagccaggcactttgggaggccgaggtgggcagatcacctgagtcaggagttagagaccagcctggccaacatggtgaaaccccatctctactaaagatacaaaaattagctgggcgtggtggcaggtgcctataatcccagctactcgggaggctgaggcaggagaatcacttgaacctgggaggtggaggttgcagtgagctgagattgagctactgcactccagcctgggtgacagagcaaaactctgttcccccactctcccccaaaaagagagggtgagactaacaccaggaggtgggcgagcggcattgaacagatctggggagctggccccagaaagcacctccacctccacctccttgagatgttgacggtggtccctgtgaagtttggcttggaaaggtggtgcctggctgctggaggacagacacaggctgggtacctgcggctccatctgaggggtggggtggaggcaccccgaggaatgtgctcactggaagcccagacagccctgcccagcgctactgcagtccctggggcctcctaaagccagacggggcgggggtgagagagggaccctttgcgctcccaagccagctgggtgg

SEQ ID NO: 264690 - DNA, 439 bp, Homo sapiens
aaggtagagaccctggacattgtcctcagggcagtggggaagcacgggaggagtgtaagcacggtgcggactgtgtcaaccatggaggacaggcaagagggggtgagactaacgggccgggtgcagtggctcacacctgtcatcccaaagtgccgccgggattacaggcgtgagccaccatgcctggccttcattatctcttttttaaaaatgaaaaagtttataatttacattcagtaaaatcaccctttttagtgtctagtctgtgaattttgacaaatgcatggttttgtaaccaatcgataggacagttctgccacccaggacattcccctctgttcctctgttcctctcttctcctgccccctagcaaccactggtgttttctgtccctcttgttcattgacatttattttaaaataaaatattttaaaatcta

SEQ ID NO: 264691 - DNA, 744 bp, Homo sapiens
ctgaatcagcactgtaccttccatggtacagtgtgtgtgaaatttatctttttcctaaagctaatttctcaatctattctagggaactgattaatttccattttagattcatcttgacaaccgtttacactatttcccctatatcttcaagactactgggcttggtaaggagccagccaactattaaaaagattacattctcattttctaactatattcaggcttcttgaatgactctgaccctgtccgtaatatggcatgttctttcctaactgggcacaagagtttagattatcttcagctagttttcagtatataaaggaatacacctccatggttcaatcaggaaagaggacttctacaggattctactaaggatcaatctggttctcaaatgttacaggtcttctttttggcacagaaaagatatttaacagtggtgcacaggcctgtcttaaaaatcctactagagatattctcacctccattacccctttgttttcaagataaagagagtttccgggaagatattcacaacagaagaggatatttttgaagtgttactttaaaggaaggtaaaatgggtttaggcaacttattttgaagctaagccaatgtaagaattctaaaataaattgagggcatgtcacatctttaacagatgctcacctggggagaaaatgtctgcaatatctaaaatgtaggggattattagatttttcaaactcttataaatcagcaaga

SEQ ID NO: 264692 - DNA, 132 bp, Homo sapiens
tccagctgcataatagaagattatggtgggccggccatcttcttgcactatgcaaatgacacacctggtctgaccaatctctcataccctatgtaaatcagacaccgcctcctcaagctcctgtataaaatc

SEQ ID NO: 264693 - DNA, 213 bp, Homo sapiens
cctgttcctaaattcctttggtcccattaggtactttgcaacatttccatttcttctgcttctgttagaagggacctttttaaacttgaagggcagaggcccccacgcagctcatgcagatggtggtactaactggagaagcagttacagttttacctagcatgcatttctgttggagctcatttcaagtaaatgacttatactttatgtcca

SEQ ID NO: 264694 - DNA, 494 bp, Homo sapiens
agtttgaagagaaaggatcgtaagaaaattaaaagggaggaattgtaagatgcaataaatctgagtttctcttcaaagggtttagcctattaacttccttatccttgttctcaaactcaactttcttgttcttccttgcccctagttaccgtaaacagcctatcccccttcccatcagctctaatcaataattcacatctgttcccttggttacctgtatcctttgtttccctgaaactgcacatctcacatgctccacctctgtacctcatgtccccctccccttttatatttgggaaaatatgtacaagtagccaatcgggtcagctcagattgtgcggtccagccacagcccatgggggagtgacacagagatagggactgcgttaaagataaacccccccgccccggtctcctttgttctgtgtgctcttgtgatcttgattgacacaagtggcacccttttgcagaagtaaattgccttgctgaaataa

SEQ ID NO: 264695 - DNA, 321 bp, Homo sapiens
ccagtgagcttgctggttggctgtccatgagtgttggctgccagatgtgccatcatccggcacaggatgtacaggaaagagggcaatggcttcccggaccagagtctccacccagaattccagccaaggccccagagctcccaggacctggagaatttgttccccctggttgtgtttggaattggctggttttctgggcaccaggcccagctcagtttaatttttgtttatttttatgtacagattctcttctgtttggggatgagctttgtgtaaattattattatttatatgataaagaataaatcacaccaaataaaa

SEQ ID NO: 264696 - DNA, 445 bp, Homo sapiens
agcaccaaatctcagtacctacaaggacaaatattgatttcttcctcttaaatctgcaagtcagctgtaactccgccggtccctgctaggattggtagggcttgactccaagctgcagatcagattcattcaggggccagtggctccccaggccatattcttcttatggcagatgtgcaagaggccatgttgaaccagtaacattcctttggccaaagcaagtcacacagctaagctcaaagttgaacgcatgggaaagtttgctctacctgtttttctgaaaatgtttgcaatgtcacatggcaaagtgtttttatataagcctattaaaagagtggagtaaagagttgggaagaaggatctaatattccacagttaatatataatttacagtactctgaaactgacttgttttagatcaagataacaagcagagaaatagaca

SEQ ID NO: 264697 - DNA, 271 bp, Homo sapiens
cctgctaccccaggtctatggaaccttggccttttctgaattcctccttttttttttccggtagagatggggttttgccttgttgtcctcgctggtcttgaactcctcgcctcaaatgatctctcctgctgcccaggctggagtgcagtggtgtgatcatagctcactgcagcctccaactcctcggctaaagtgatcctcccgccttagcctcctgagtagctgggaccacaggcgcacgtcatcatgcctggcctgttccttttttctt

SEQ ID NO: 264698 - DNA, 725 bp, Homo sapiens
ggctgccgtaatggctgcggcctgcctgtcagagccaggctagacagggcttgtgggtcgaggaagcatgggacaggggctggggttgtccagggacctggccccagtcccaaagctgaggtttcccacaactgtgagttggccagatagtaaccaaagatactgatgagataggtcagcagaggaatgtatccagccggcctaggtacctctacctgtccgtgttgttgccccaccttgcagaagatgggcctcctcgacagttctcagcgtcctagaaggcaggggacgtcacttcattggacctgaggcatgaaggcagatggaaagctcgaggggcgggcatcctgtggttacacaattgaacactggcttcctttcccaaacatgctctgcaaatgacctctgcccttcctcgacccagtgtctcctgtctcctgacctgacagggcaggatcttcaggccaatgctgcggttttggcacagtaattttcggagctaacacccctgggctctgtctgcctaggctctgcccttggggtcagagacctctggttaaacttggcattgacttaggctcttggattcccagagcaggcacataacacctggactctgacctgactctgcaggcctaggtggcttgggttctaggcgtttaggtctgagaaatgcagctgggcctaggtatctcctcgttccccagggtgttactatagctgtg

SEQ ID NO: 264699 - DNA, 491 bp, Homo sapiens
tgggaggaagggcccacagtaggtgctcaatagatgtgtaaagaaggcagggaagcaagaaggttgctcaaacaagaccatgttcccagcagacagattgcactctgacccagatgccaccacacgaaacttacacctgcctggggaacaatcctgtgcttggctctccttggtggccagggacagttgtgcctcatccctcacttgcaaaccccagtcctgtctgacccagagaccctcacagggcatcagccagtgaaggcggtttggggctggaggatatgttctgatcttgggaagagcttggtaggagccagccacagaaagtttcagggcagaactgaacaggtctcgggaaggacacttcatgccagctagagaggctctgggcacaggaaagaattggacttcgggcagaaaaatgtttgtgctatttagtactatgtaacaaatcactccaaaacttcattgcttaaagcaacaagcatgta

SEQ ID NO: 264700 - DNA, 583 bp, Homo sapiens
aatggtaaattaacaaacagttcccagaaaccatctaggagttcttttgtttgggccgtgccataaaagcacatagaatatattacttaaaataatcttagaagtctactttatcccttttacaaaccaaaagagctttctgtgtgtggagccattgaatgcaatactgaaattaagttctttgatttataacagggccttttttatgtaagttagtacaaagtgaagataaaacatttaccaaaagttttgaatcaaaaaagaacagtgctttattggagagaaaaaaaattggcctggcatggtggctcatgcctgtaatcacagcacattgggaggctaaggtgggcggatcacttgaggtcagaagttcgagaccagcccggccaacacggtgaaaccctgtgtctactaaaaatacaaaaattagccaggcgtagtgactcatgcccgtagtcccagcactctggaggctgagacaggagaattgtttgaatctgggaggcagaggttatagtgagccgagattgtgccactgcactccagcgtgggtgacagagcgagactctgtctcaaacaaaca

SEQ ID NO: 264701 - DNA, 510 bp, Homo sapiens
atttgcatctgtcctattagttctgtccctttagagaaccctaatacagaagggtttcagttagaccacaagagcaaccttctgactgtgacctggaaaaaggcacccagggccttctgaaggaggagcagcttttacccaaggcccctgggcctgctccatggatttccaagtcaatctggttggaggcagagggccgccctagctcacctttagagtccctccccttggggaagaagagcccctaacaaggaagtgggaagcaactggctcttctcacccccgctctgggcctggtttaaatgaggtggtatgggggaggtaatagcacgtacttcacaggagcaagggacataaatgtgtaaataaatcctctaacaaagtaacacgcacatggcagatactaaataaacactagctattattttattttatttatgttttatttattttttaatttttttagacggagttttgctctgttgcccaggctggagtgcaatggcacca

SEQ ID NO: 264702 - DNA, 219 bp, Homo sapiens
ggggtctgtatccagaagggacacccgggagccccactccacacccacgtgggcgcggcacggggtctgtatccagaagggacacccgggagccccactccacaaacacgtgggtgcagcacgcacacacttgcacatgcgcacacatacacacacacaagcagggatccagagagagagcccaggaccagttgggagaggggcctgacaggaggggca

SEQ ID NO: 264703 - DNA, 452 bp, Homo sapiens
gaatgaaagaagaatcccaagttttgggcctgagcatctgcagaatggaggtgccatttactgagactcataagcctgggggaggggtagtttgagggcggagaccaggaattctgctttggatgtgctgattttgagatgatggctgacatgtccaagagtatatatccatcgcctctcagatagtacttcagctcttccaccctagactggagacccctcaagtgcagggactaccaaatccagggcagactgacttttaaccgtttggacacctaaatgctgaaaagatcaaggtgtcttatactacatgtaactcaaaatcaaaacagtattaaacacgaaacccccaaaataacatgttgctgtaatgaaaatggctttactctggattttctgaacgcaaaattctggatgatttaattaaatatgaacttttctctctgctttgc

SEQ ID NO: 264704 - DNA, 132 bp, Homo sapiens
gcagctacctaaccaatcttgctgctcctacggtccagcctccatacccacacctaagggtcctttttaaatcatccatcagaccactcttctgctctgcttaaagccctccccggcaggctgccacactgg

SEQ ID NO: 264705 - DNA, 312 bp, Homo sapiens
gtgaagcagaccattagcagataattgtcataatcttgatactaaatggagaccagaattaagttgaagtcagaaggcaaaggatcctttgatgtagtccattcagagcagaaggagaagaatgcagagtggatctgcagggacaaatagaagatgcagcgcaatggagatactgtttaatgccgcaggggacctgggctcttttcgtctctcctatgtaaagagaatttcctccatccaagtaaaactgatgcgatcggtcagctttctagacaacagaaataaataattctctctgtgaggaatgacaaa

SEQ ID NO: 264706 - DNA, 391 bp, Homo sapiens
aaatttaggatatgcgtggaaatggcctgtgtcagtcccacacaaattgtcctcaatcaggatgtaaaactggacaggatgccaaatattccctcatgtgtgatccatccttgccttgtgtgttaccatttcttttggagtaaagacctgagccactgaagcaaagctctggctttacactgtgttcacagcccccatttgtcctgtccccaatttgaattgttctagtaatgggaggaacagagtagccaagggaatattttccccaaatatggggcaagagaagaagagacaataaaaattccttatagatagagtcatttttgagagaatgaatttgtattctcgtattcttactaatgcataattgttaaagatatcatttatctta

SEQ ID NO: 264707 - DNA, 296 bp, Homo sapiens
gtccactgaattctcagtgagggcgcctgcccctcccagagccctgacactccggctttaggcagccctcggtgcctcctgcctggggtcccagcattgccgatgggagcgggagaaacattttggacagagccagcctggtgtggaagaaaaaagagttcccgacctgggagtcagctactggggtcccatcccaccctaagccattggtttgggtgtgatgacctccgtgccctcttccaccctgacacatgcagagtcagcccacagcagcaggtagtgggaccaccatgctc

SEQ ID NO: 264708 - DNA, 616 bp, Homo sapiens
tcggctcactgcaacctcccactcctgggttcaggcgattctcctgccttagcctcctgagtagctgggattataggtgcccacctccatgccctgctaatttttgtatttttggtagggacagggtttcaccatgttggccaggctgctctcgaactcctgacctcaagtcatctgcctgcctcggccttatataggggtgagtcaccccacccagccgatattctttattagtcatctttttcatatctattacagagttttctattctgaatttaatagtttgtttagctatcttttacctgttttatttaccgtcatatactgtgtgcttgcttgtggttggcactcaataccttctttccttcgtgtgagtggaagatgatgtcattctttgcatatttttgtaacccatggcttattttaccatgaaacaagctcttccttgcaatcatcctcacttcagagaatatttaacaatatactgttgtcttatagatgcagctcagtagtcctacattatcccagaaacacagattccctatgcataaaaaagcagtaatgaaagctaacttttttgagtatttattctgttcactattgtattctttaattt

SEQ ID NO: 264709 - DNA, 712 bp, Homo sapiens
ggaagggaggcaagagatcctgagtcttcaggatcatccatgacccagacaagaaagatataaaataaatcatcagcattatgaatttagtgttttgagatgctagactatgatataagggctggttagcaattctctctttatccagaaatacagtcatgtgctgcataacattcatggaccacatatacaacagtgattctataaattataatggagttgaagaaaacctattaccaagtatttactatactgtttatggttattttagaggttattccttctacttattttttttaagttaattgtgaaacaacctcaggcaggtccttcaggaggtattccagaaggcagcatttttatcatgggcaatgacagccccatgcattgtcattgaagaccttccagtgggagaagaggtagaggtggaagtcagtgatatggatgatcctgaacctgtgtaggcctaggctaatatctgttcatatctttatttttaacaaaaagttttaaaaaataaaaacaaattaatacaaaaaaacttatagaataaggatataaaggaagaaaacatttttgtacagctctacgatgtgttttatactgtgttatttcaagagtcaaaaaggttttttaaaaattagagttacattaaactaaagttaatttactattgaagaaagaaaactttctaataaatttagtgtaggcc

SEQ ID NO: 264710 - DNA, 339 bp, Homo sapiens
gagtctgtaagattttttaaaattttagcttttaatgaggacaagaaacttgaatcatttatttattcatcttgagctctaaactatgctaataactgggtatacatggctgtaaaataagatgaagtttatgtcttcacttaaagtttcattctagtagaggaaacatttaacaatcaaacctataataaatgagtatataattataaattatgataaatgctataaaaaaaactatgtgttccatgagaaagttacaaaagacaccaatttaaattgtttatctcacagagtagggctagtaacagtaagggaaaatagtattggtgaaaaagctgc

SEQ ID NO: 264711 - DNA, 433 bp, Homo sapiens
aaccactgcttgtcacatttttgtggtttttcggagctcccttgccttcatgtctgtatgtcttccacctgtagttcttcagattaagggcattgccatcttaccaggcctaagatggggcatctattagacattgcttctctgtaacccaccccctaagactgcctcttggttttcagtaccttccaggaaggcttcatgtgcaaaataggaatgtttcctccttcttcactttttcttatatttttttgtttgatcaagatggtatcaattcctacttcatcccctttagatgctctcctgtgcctccccactatatatggagttacttacattatcctagttctttttagacatatatgaaagcattattcaaaaacaagatgcctacagtttttaccactgaaaaacactatttcccctctactgctcc

SEQ ID NO: 264712 - DNA, 458 bp, Homo sapiens
cctttctggggatatttgatacattttttatgcattgcatgtattaatgccctaccagacatcttttttttttttaagagaaaagcaaacagaagtttattaacatgattaccttgtgaatacatgggagataactcagaaatgagaaaatctcaagagtagatctcaaagaggtggcttcaacttcagacttacacacttcattccccaacacaaagaatgaagggtgtaggccagacaaccctcattctctgttaagactacctggtgaagaagtgcagggtaaacaaaagtgaggtttgttatgcagattgaacttgtgctttttgtgttgataagagtttccagtgatttaggcctttaatcccagcacttagggaggccaaggcaggtggatcacttcaggtcaggagttcgagaccagcctggccaacatggtgaaaacctcatctctactg

SEQ ID NO: 264713 - DNA, 425 bp, Homo sapiens
cttagctgcgtcagctcataattaaacaataaaaggaggaattgttacttgcttggaatatatacagtcagttttctgtaaggtgggggcagtgtgtattttataagccctgttgctgtcccagttttctgtaagaagggaaatgtgggtattttataaactctcttcttgtctctgtcagttctaaaagactgagagatgacatgatagctgtcacaagaaatttctgcttaataacaatgaacactcagagctctttaggccctgaagaggaatgggaagatgatgagggaggaggaaataaaagcaagaaaatggtaggacaggaagattttttttttccgctctcaatcttgtctttgtttggctgaccatagagcagctatgtagaactatgtgtgtgtgtgtaagggggagagaagaga

SEQ ID NO: 264714 - DNA, 390 bp, Homo sapiens
ctcttacaggcagtctagggtccagaccagacacgatgagcatcccaacagaggcctgagttctgcgatgtaggcagaatgaccagagagacccagtttatctcatccggagatttggaagggaagaaaggagtccacatcaaagaaagaatgtgtacgcctgtgttttcaggattctgtctgcctctggtaaggaagcatctgaccgtgaatgtgccatggaagctttctcttcattaatagaagtatcattacaggagactcagttcacaagacagtatctcaagtgcactttgttctctgtagaaagaggtacccaataacatgatcatatacttctgtcacatagaaatgttgcaaataaatttttaataagttaaacagttaatt

SEQ ID NO: 264715 - DNA, 488 bp, Homo sapiens
caataagtatttgttaagaccaattttgtataatgtctttttctttggatgattttttacctgcatcttcaatggtcatagaaatggtctttcctaggggtttaaaacgtattgcaagtagagtatcatctggaatactcaagagatccaaaaagccatcagacattctttctctccgtattatttggaatcgtccaacttttaacaggctgtacaattgtcctttattttcctttctaattggaatttcaactaggaatgcctgtaggtattgaatgccctcacttcaaatgacttgctgcactaggcaatgataaaggatgcccatacattggcccaaaattgctacactgccatcatttttggtacgataccatattaaaacctatgtcttgagagacagtgacagtgcctaaaaataatggagatgagattttcccagcttttcggaggatcctgaaaataaaatactacttgccttctaaaaa

SEQ ID NO: 264716 - DNA, 671 bp, Homo sapiens
gagaaactctttctgtctaaatcttataggaagtcctctaattcataaaatgaggttctctgctttttttggagaaagtgagggggtacagagggactgggagccccagggcactgggagcctctaagtcacaaaatgcagtttgagagtcagtggactgagggacattggagtctctttcacttgcaacaatctcagacccttggctgagcccagtccagtttactgtggaccagctgtatgtcagctccatggctgtgcagctgagaggtggaccgggacagaggtcctggcccctttactgccagtgtgagagtcacccttggtgataggagggagtgcccacccttactgtacctccatgctactctcagaggttctctgtagcttcctgcccaagcttttaacttgatttgctttattagaatttttagggagatctcaaatggaatctgcgttacttcctaacactaagtgtgatttttattggaatatttgtctgaactaacaagctaaattctgctttgatggttgaatccctggacttaagccagcagccttggtttgaatcctggcatcaccacttgtgtgctgtgaggtcttgtgtgctcaccacttgtgtgctgttacttaacctgtgggccttagtttccccatagataaaaggggat

SEQ ID NO: 264717 - DNA, 433 bp, Homo sapiens
agaaaataagagtggatgttacctttaagcaacatacacatttaattaatgaacacaaggaaaatgattccggttgtagttaaatcgggtacaagcatacaggatttaagagatctgaccttagaaatgaagaaaatattattgtaattactccatttgctaaaaacaaatgatgtggcatttgaatttaagacttctatcaaaagcagttgagtgtctgtaatcagttctcacctttacattttaatggagttgaggttgagccgttgcatttacaattatctaggctgacttcatgcctttgaaatgacttaaaaagattagcattcatggattatttattagctcctcgtgaacgtatttccaagaatggaaacaacgtattgcatcaaagtctagtttccaagtttaactcttttaatgaacagcatga

SEQ ID NO: 264718 - DNA, 309 bp, Homo sapiens
gtcccctcctccagtgctgttggtgactttgctccatcaagcatcgtctttctctctctctgtctctctctctcatattctcccccctcaactagttgcttcctctctgcaaaaggaaaaaaataaaacaaacatagtcgagtttcccttaaatgaaagatgctttttctcaatcctgctattccctcaagctgttattgtatctcatacccttctgccacagttctttaaagtctagtccaaacgggtttctccaactccctacatcccagtacctactttaaataaataaaaagattaaacatacaa

SEQ ID NO: 264719 - DNA, 438 bp, Homo sapiens
atggttgcagctgagtatgtctacttacctcttggactgactcctcaccataaatgggatggccgttcaggaaatcttctgtttgctttgcacgctcctgagtataggacaaagcgctgttgtttaagaacataaataacaaaagctttgttcttccaaaccgagagggaaactgtagatctatccaaaatgacttggtcttaaactgcctaaggatgacaagaatgaaatattattttaggctgcccatcagcatccgtctctcaatctcctgtcttggcttcagaaaacaatgactcaatatggtctttttctgacacattgcagccttaggaaaatactgttccacatatttggaactagagctttccctgcattaaaataagtggaagttattcaaaagcccacttagctttctctctttgaatctgggcatag

SEQ ID NO: 264720 - DNA, 482 bp, Homo sapiens
gcttgagtttatagagcataactttgcaaaaactaaagctaaacgcagaatgaaaattggaattccttatttgtaagacagtttcactgagccttgactccagtccttccagccccatcccgcggcaggtcataggtgagataataaatgctgtgtctgttcaggtggaccaagaagaatttatttttaccatcccgctttaatacgcaggattattatttcacactctaagtaatgtgagaatgacatgaatagttcacatggtgtcaccatctgtcttcttttttaatgtcataagaagagtgaaaagtgtaattgttcttgagatttgttaggagttgactgtggtattgttgggagagggagctgatggttaaactgtctgcccatacataattaagaacaaacttataacaattgtttcatttttaaaacaattttatatactagtgttttctatctagttacggtagtaaaattgc

SEQ ID NO: 264721 - DNA, 1387 bp, Homo sapiens
tattaggactaccgattgtttgggtactccgaaacactcaggattgtggtgaccagttgaacagagatatgccaaaagcaggcagtgatttatatccctgcagaaggagtctcgccctgtcaccaggctggagtgcgatggtgcaatctctgctcactgcaacttccacctcccgggttcaaatttctcctgcctcagcctcctaagtggctgggactacaggtgcctgccgccatgcctggctaattttttgtattttagtagagatggggtttaggctggtctcgaactcctgagctcaggcaatctgccctcctgagctcaggcaatctgcctgcctgggcctcccaaagtgctaggattacaggcatgagccaccgccctcagccactatcttattttttagcctatctgaattaaaaacataaagtcttctctatgtatgttgatgataaactttgggtttcaaggaaaagagtcactcaggcaacttccaagaatgggaggggagaaggggttgttataggatacagtggaaataaatctgggaggaatctcaatcatgttccaagagcttgcaggggcccagagaaattctcacaatgaggcctcacaggaaaagcaagaacaccgacagcaggaaagcttggaggctaagagttcccttggaagttgaactactgcctgagaatattaaaacaaaaacagaaacacgtaatagccagccctgaaacgagcctctcaacttctgataggttatatttacatttatgtactttcctatcacagtttataatcaagctaaggctagtagccttgaatatttttagggctgcaatttgtacatcatctaagctaacagatgaaaagtgcaagtgtagttgcctaagcacaggtacattcgttcaacaacaaatctttacctgaatgtccattgtatgtccgacgctgtcctgtatcctggggtggcagcctggggacctgagaggactttgagtggagctaaagaaacagaaaataacttcaactaataaatgtcttttaatatctcttgcaatggaaattttcagtggcttaatttttttacttgtctacttcgaaggtgaagttactcacaggcaggtttcttagtttacagacttagcttttcttccactcccagcgtattatcatttatcaactattgtcattgaatgtccttacaccaggcatggtagatggcttttcagcttccaggcatcatgttgtgtctttttattcttcaatggtattgctttaaattgtaggcatccttgtaatgggttttcttctttttctgacccataaaaaatttctgataatatttgttgaactctgatcccattaaattaaaattttagttattaaa

SEQ ID NO: 264722 - DNA, 402 bp, Homo sapiens
tgtccttcttactcagtggttagaacaaatgccttgatagatgcccaaaaaacagcaagggacagttcacactcaggagctacaagtttaaaaacatctatactttaaaaatatttagaggccaggcacggtggctcatgcctataatcccagcactttgggagttcaaggcaggcggatcacctgaggtcaggagttccagaccggcctggccaacatgataaaatcttgtctctactaaaaatacaaaattagctgggcgtggtggcaggcatctgtaatcccagctactcaggaggatgaggcaggagaatcacttgaagccaggaggtggaggttgcagtgaggcaagatctcgccatttaactccagcctgggcaacaagggcaaaactccatctca

SEQ ID NO: 264723 - DNA, 97 bp, Homo sapiens
ggcaaattaggtcaaaactgactaaaaatcccatctggtcacctatactggctaagtgactatataattacccacataaacctttacatattgaaga

SEQ ID NO: 264724 - DNA, 389 bp, Homo sapiens
atcagtgtagtcagtcttaaaagtattttagaggtttgagatacaaagtagaacaattagctctttcctcactaacaatctttccaagtaaacaggtacttatttttatgggttggcactagatactgtccctgattggaacctagcttggccagctatccatgggactatataaggtaggtctggtataatcaatagataagaacatttaatttaattaatttatttattttttaagaaacagggtcttgttctgtcgcctaagctggagtacagtgacacaatcatagctcactgcagctttgaactcctggtcttaagtgattctcacacctcagtctcctgagtagttgggattataggtatggaccatcaggcctggataaatt

SEQ ID NO: 264725 - DNA, 335 bp, Homo sapiens
ctgtctgtttaggggacctgagaaaccagttagctttgcctcaaacactatagtaccagtcacagagcaatgatcaaggaaggagagatcagtgaccctctgcccagctcctagtcgaagtcaaagtggccatacaggatcccaacaaaagagggggcaagaaagactcttcccattggttctcttcatttcactttcagcaaacatgttcccaattcttccagctgccccttctgtcctcccctattgggcatccactaaacacccatgactcctggggatttcaaatgagcttataagctagggaatttgctattaaagattcctgaatctat

SEQ ID NO: 264726 - DNA, 1062 bp, Homo sapiens
ttccagcaggcacagacagacaagcatgtgctgacaactagcagaagcatctcatgcacaaagagcacctcgcatgccccaggccctgctctgccctttcatgtgtgaactcagggaattctcataaccaccctatcaggcaaagacaggggctgatattcctgtataaggaaactgaggtaggaaatgattaaattccttgcccaagttcaacttagctactaagtggcagagtttatagttgagccagcatggtctggctctagcatccatgctcttaaccaccactggagggtgtggctggggacttctccagtcattttggggtcatttagagttgttaaaagcatagaaatcatccagtctaatccccacaatttacaaaggaggcctcaggagaagtttctttctgtgattcaactgtttggtgtctgaatgaaggctggaacccaggcctcaggactttaagtcctgttcttttatgactgtgataccccagagtccctccttcctgggagtttcctgcctggggattcccatctctctgacttcacttgctctgggcagttggctctgtgcccttggtaaggcttgacctcttctctcttccttgctttgcctctgtttcactcagttgcctcatgcaggccttctcagggggctctttctgcaaaagcaagactgggttcgagagcagccctgctgggtctgtggcccttacccatgttccatgtcctgtcctggccagggatccaagagccaacagcatatcaggcagaaattaggcaccatgggtgcagtggctcatgcctataatctcagcaactcaggaggctgaggcgggaggattgcttgagcccaggagttcaagaccagccatggcaacatagtgagaccctctctctaaaaaaaatacaaaaattggccgggtgtggtggcacatgcctgtaatcccagctacttgggaggttgaggcaggacaatcgcttgaacctgggaggcggaggttacagtgtgccgagatcgcactccagcctggcaacagagcaagagtccttctca

SEQ ID NO: 264727 - DNA, 755 bp, Homo sapiens
gaatcaggcctgagctggctctgatccctctcccttctcctaatcactgccctggctgcagaactctgggctggcaccagaatagcagccaacatttggctgacacaggacataatttttaatcatgggaaggcagacataagtacaaaaggcctattttcttcacgcaggttcaagtatctgcttttgggttatgtctgtctgtatttggcagggctggtcttggggaagttccgggattcgtgaacaaaaggtcagtctccttccttttccaggatggaagcggcacaaattgttctgatcagggagcaataacatgcaacgatccccagggctcccaggcaggcggagggggcacccagtctcagcagcccgcgatctgcttggcccctgcgagctgcatgcctcacatttccccagctccagcctcctttcaaaggccctttattaaaccaccaactatttgctgtcgagacatttaggatgaaatcattgtgttaaacaaataaacgcagcttcgtccagatttctgctctgggagcagagtaagaaaataatttctgtctgctcgccacaaaagcggctggaaaggtccaaagaaaaatattatttttactccattgtgtgaaatattgtcctggaggatctgacgggctgagcgtttgaagagtttgtgctggcaggtttcaagggtcccctgggtcggccccctgggattgttttctgcattaataaactgagcatgatgtgtgtta

SEQ ID NO: 264728 - DNA, 462 bp, Homo sapiens
cagggcaggtacctggcattagatggggcaaacttggtgaagtagaaggcggtatgactaagggctgctattttggacccagtcttcatgagttctgcaaggttttaaagtcctgtcccctcaggaagccactggattgggcttagcatctccctggcaggataaagtaggcttgcctggagtagcagctggaaagggcattacggtgcatgaacccagccaacccattccttacatggggaacgtgcccaggtctgctctgtgatccagtcttacactggaaagctgtcaccaggatgaggtacttccaacggtgggggcctctgagcacttgcctgagactgtagaggctcaccctgagacagctgctcatttcacaaggccagcctgcctgctgggaagtagtagcagaaaacacgctgcttgccagaccagcagccccaccgctctgaagaacttttt

SEQ ID NO: 264729 - DNA, 443 bp, Homo sapiens
tccccttttctcttagattttccctgttgaatccttaaatactgtgtgagccttgaacttctgccgtaattccgtattattttataggaccccttctgatgagaaggcatcgggaaaagggaaacgttctgtaatcctgtgcttagatctctctagtgagcctgtgccacttggctgtgaccttcacagctgtttctcaacttccccgcatcccctccccgcccccggctaccaaattgagacaggaaggtgtgagcgggctggagttgggtatttccatcagttcctgttggtcaggctctggtaaatcccaggtagcctaggctctgctaaatcatttctctgtttgttaaggagagcagaatgctttgggcttcatggaaggggagaagagcaaccactgtgaaagaagccgtcgacgcggccgcgaatttagtagtagt

SEQ ID NO: 264730 - DNA, 4517 bp, Homo sapiens
ttaaaggtgtctggaactggattacagtttcttctgattgaacgcagcctttgaatactgcctggcctatcgcgaatacatccctgccttggacaagacgcagctgaatctctaagtgatgctactgccactaccaccccagagctccaaacctgtgcctaagaaatctcagtccagcaaaattgtgcccagtcatcatgacccatctgaaaagacgggggagaattgccaaacgaagatatctccatcttcacttcaggagtctccatcttcacttcagggagcactcaaaaagagatcagcttttgaagatctcactaatgcttctcaatgtcaacctgtccagcccaagaaagaagccaataaagagtttgtaaaagttgtttccaagaagataaacaggaacacacatgctcttggactggccaaaaagaataagcggaatctaaaatggcataagctggaagtcacaccagtagtagcctctactaccgtggtaccaaacattatggagaaaccactcattctagacatatccaccacctccaaaacacccaacactgaggaggcatctctcttcagaaagccattagttttaaaggaggaacccactattgaggatgaaacccttatcaataagtcattatctttaaaaaagtgctcaaatcatgaggaggtgtccttactggaaaagctacagcccctgcaggaggagagtgacagtgatgatgcgtttgttatagagccaatgacttttaagaagacacataaaactgaggaggcagccatcaccaagaagacattatccttaaagaagaagatgtgtgcaagtcagcggaagcagtcctgccaggaagagtcgttggctgtgcaggatgtcaatatggaagaggattccttctttatggagtcaatgagttttaagaagaagcctaaaactgaggagtcaatccccacccataagttatcatctttaaagaagaaatgtaccatttatgggaggatatgccactttaggaagccaccagtattgcagacaaccatctgtggagcaatgtcctccattaagaagcctaccactgagaaggagacacttttccaagagctatctgtattgcaagagaaacacaccactgagcatgagatgtccatcttgaagaaatcattggccttgcagaagaccaactttaaagaggattcccttgttaaggagtcgttagcctttaagaagaagcctagcactgaggaggcaatcatgatgccagtaatattgaaggagcagtgcatgactgaggggaagaggccccgtctgaagccattagtattgcaggagatcacctctggagagaagtcgctcattatgaagccattgtccattaaagaaaagccatctactgagaaggagtccttttcccaggaaccatctgcattgcaaaagaagcacaccactcaggaggaggtttccatcttaaaggagccctcgtccttgctaaagtctccaactgaggagtcaccttttgatgaggctttggcttttacaaagaagtgtaccattgaggaggcaccccccaccaagaagcctttaattttaaagaagaagcatgccactcaggggacaatgtcccacttgaagaaaccactaatattacagaccacctctggagaaaagtcacttattaaggagccactgccctttaaagaagaaaaagtgtctttaaagaaaaagtgtaccacacaagagatgatgtccatctgtccagaactgttggactttcaggatatgattggtgaagataagaattccttctttatggagccaatgtcatttaggaagagccctacaactgaggagacagtacttaccaagacatcgttgtctttacaggaaaagaaaattactcagggggagatgtcccacttaaagaagccactggtcttgcagaagatcacttctgaggaggagtcattctataagaagctgttgccctttaagatgaaatctacaacggaagaaaagttcctctcccaggaaccatctgcattgaaagagaagcataccaccttgcaggaagtgtccctctcaaaagagtcattggccatccaagagaaggctaccactgaggaggaattctctcaggaactattttcattgcatgttaagcataccaacaaaagtgggtccctcttccaggaggctttggtcttgcaagagaagactgatgccgaagaggattccttgaagaacttgttggctttgcaggagaaaagcaccatggaagaagagtcccttatcaataagctattggctctgaaggaggagctttctgctgaggcagccacaaacatacagacacaattatctttaaagaagaagtccacttctcatggaaaagtgttcttcctgaagaagcagttggctttgaatgagaccatcaatgaagaggagttccttaataagcagccactggccttggaggggtatcccagcattgcggagggggagaccctcttcaagaagcttttggccatgcaggaggagcccagcattgagaaggaagctgtcctcaaggagcccactattgacacagaagctcactttaaggaacctttggccttgcaggaggagcccagcactgagaaggaggctgtcctcaaggagcccagtgttgacacagaagctcactttaaggaaactttggccttgcaggagaagcccagcattgagcaggaggccctctttaagcgacactcagctttgtgggagaagcccagcactgagaaggagaccatcttcaaggagtctttggacttgcaagagaagcccagcattaagaaagagaccctcctcaaaaagccattagccttgaagatgtctaccatcaatgaggcagtcctcttcgaagatatgatagctctgaatgagaaacccaccactgggaaggagttgtccttcaaggagccattagccttacaagagagtcccacctacaaggaagacacctttctcaaaacattgttggtcccccaagttggaaccagcccaaatgtgtctagcactgcccctgaatccataaccagcaagtccagcattgctaccatgaccagtgtgggcaaatctggtaccatcaatgaggcattcctcttcgaagatatgataactctgaatgagaaacccaccactgggaaggagttgtccttcaaggagccattggccttacaagagagtcccacctgcaaggaagacacctttctggaaacattcttgatcccccaaattggaaccagcccatatgtgtttagcaccacccctgaatccataacagagaagtccagcattgcaaccatgaccagcgtgggcaagtccaggaccaccaccgagtccagtgcatgtgaatctgcttctgataaacctgtctcaccacaggccaagggaacaccaaaggagataaccccacgggaagatattgatgaggacagcagtgatccaagtttcaacccaatgtatgccaaggaaatcttcagttacatgaaagagagagaggaacagtttatacttacagattacatgaacaggcagattgaaatcaccagtgacatgagggccattcttgtggactggttggtggaggtgcaggtgtcctttgagatgacccatgagaccctgtacttggcagtgaagctggtggatctctacctaatgaaggcagtatgcaagaaggataagttacaactccttggtgccactgcctttatgattgcagcaaaatttgaggagcacaactcacctcgtgtggatgactttgtgtacatctgtgatgataattatcagcgatctgaggtactcagcatggaaatcaacatcctgaacgtcctcaaatgtgacattaacattcccatcgcctaccattttctgcgcagatatgctaggtgtatccacaccaacatgaagacactgaccttgtcccgctacatctgcgagatgaccctgcaggaataccactatgtccaggagaaggcttccaagctagctgctgcctccttactcctggccctctacatgaagaagctcggatactgggttcccttcctggagcattacagtggctacagtatctctgagcttcaccccttggtcagacagctgaacaaactgctgactttcagttcttacgatagtctcaaggctgtgtattacaagtattctcacccggtcttctttgaagtcgccaaaatccctgccttggatatgttgaagctggaggagattttgaactgtgattgtgaggctcagggcctggtactctagcagcagccacagggctaagcatgcatgttaacagggtatatttattctatgttcgaatttgtcttttgatcgcttttattcatttttcctttctttgtcttttcccaaactgataatgttataaatatttatgttgcttgtttttatgaaagaaaaaatattgtcatatttgactacaaatttaataaaaaattaatggttattgttaaaa

SEQ ID NO: 264731 - DNA, 1525 bp, Homo sapiens
ttaaaggtgtctggaactggattacagtttcttctgattgaacgcagcctttgaatactgcctggcctatcgcgaatacatccctgccttggacaagacgcagctgaatctctaagtgatgctactgccactaccaccccagagctccaaacctgtgcctaagaaatctcagtccagcaaaattgtgcccagtcatcatgacccatctgaaaagacgggggagaattgccaaacgaagatatctccatcttcacttcaggagtctccatcttcacttcagggagcactcaaaaagagatcagcttttgaagatctcactaatgcttctcaatgtcaacctgtccagcccaagaaagaagccaataaagagtttgtaaaagttgtttccaagaagataaacaggaacacacatgctcttggactggccaaaaagaataagcggaatctaaaatgataaccccacgggaagatattgatgaggacagcagtgatccaagtttcaacccaatgtatgccaaggaaatcttcagttacatgaaagagagagaggaacagtttatacttacagattacatgaacaggcagattgaaatcaccagtgacatgagggccattcttgtggactggttggtggaggtgcaggtgtcctttgagatgacccatgagaccctgtacttggcagtgaagctggtggatctctacctaatgaaggcagtatgcaagaaggataagttacaactccttggtgccactgcctttatgattgcagcaaaatttgaggagcacaactcacctcgtgtggatgactttgtgtacatctgtgatgataattatcagcgatctgaggtactcagcatggaaatcaacatcctgaacgtcctcaaatgtgacattaacattcccatcgcctaccattttctgcgcagatatgctaggtgtatccacaccaacatgaagacactgaccttgtcccgctacatctgcgagatgaccctgcaggaataccactatgtccaggagaaggcttccaagctagctgctgcctccttactcctggccctctacatgaagaagctcggatactgggttcccttcctggagcattacagtggctacagtatctctgagcttcaccccttggtcagacagctgaacaaactgctgactttcagttcttacgatagtctcaaggctgtgtattacaagtattctcacccggtcttctttgaagtcgccaaaatccctgccttggatatgttgaagctggaggagattttgaactgtgattgtgaggctcagggcctggtactctagcagcagccacagggctaagcatgcatgttaacagggtatatttattctatgttcgaatttgtcttttgatcgcttttattcatttttcctttctttgtcttttcccaaactgataatgttataaatatttatgttgcttgtttttatgaaagaaaaaatattgtcatatttgactacaaatttaataaaaaattaatggttattgttaaaa

SEQ ID NO: 264732 - DNA, 1205 bp, Homo sapiens
ttaaaggtgtctggaactggattacagtttcttctgattgaacgcagcctttgaatactgcctggcctatcgcgaatacatccctgccttggacaagacgcagctgaatctctaagtgatgctactgccactaccaccccagagctccaaacctgtgcctaagaaatctcagtccagcaaaattgtgcccagtcatcatgacccatctgaaaagacgggggagaattgccaaacgaagatatctccatcttcacttcaggagtctccatcttcacttcagggagcactcaaaaagagatcagcttttgaagatctcactaatgtgtcctttgagatgacccatgagaccctgtacttggcagtgaagctggtggatctctacctaatgaaggcagtatgcaagaaggataagttacaactccttggtgccactgcctttatgattgcagcaaaatttgaggagcacaactcacctcgtgtggatgactttgtgtacatctgtgatgataattatcagcgatctgaggtactcagcatggaaatcaacatcctgaacgtcctcaaatgtgacattaacattcccatcgcctaccattttctgcgcagatatgctaggtgtatccacaccaacatgaagacactgaccttgtcccgctacatctgcgagatgaccctgcaggaataccactatgtccaggagaaggcttccaagctagctgctgcctccttactcctggccctctacatgaagaagctcggatactgggttcccttcctggagcattacagtggctacagtatctctgagcttcaccccttggtcagacagctgaacaaactgctgactttcagttcttacgatagtctcaaggctgtgtattacaagtattctcacccggtcttctttgaagtcgccaaaatccctgccttggatatgttgaagctggaggagattttgaactgtgattgtgaggctcagggcctggtactctagcagcagccacagggctaagcatgcatgttaacagggtatatttattctatgttcgaatttgtcttttgatcgcttttattcatttttcctttctttgtcttttcccaaactgataatgttataaatatttatgttgcttgtttttatgaaagaaaaaatattgtcatatttgactacaaatttaataaaaaattaatggttattgttaaaa

SEQ ID NO: 264733 - DNA, 4517 bp, Homo sapiens
agcggggtgggattacgcggcgtgagccgccgtgtcgggctccagctcttttaagatcgtctctctgctgggattggtttattgtgtcatgaatgcaattgctggtgaactggagctgtgccatgtagtgaagtgttaatggtacaggtggagaacagagcaaatggtctgatcccagtgtcctgcttcacattataacagctctctgacacggacgggggagaattgccaaacgaagatatctccatcttcacttcaggagtctccatcttcacttcagggagcactcaaaaagagatcagcttttgaagatctcactaatgcttctcaatgtcaacctgtccagcccaagaaagaagccaataaagagtttgtaaaagttgtttccaagaagataaacaggaacacacatgctcttggactggccaaaaagaataagcggaatctaaaatggcataagctggaagtcacaccagtagtagcctctactaccgtggtaccaaacattatggagaaaccactcattctagacatatccaccacctccaaaacacccaacactgaggaggcatctctcttcagaaagccattagttttaaaggaggaacccactattgaggatgaaacccttatcaataagtcattatctttaaaaaagtgctcaaatcatgaggaggtgtccttactggaaaagctacagcccctgcaggaggagagtgacagtgatgatgcgtttgttatagagccaatgacttttaagaagacacataaaactgaggaggcagccatcaccaagaagacattatccttaaagaagaagatgtgtgcaagtcagcggaagcagtcctgccaggaagagtcgttggctgtgcaggatgtcaatatggaagaggattccttctttatggagtcaatgagttttaagaagaagcctaaaactgaggagtcaatccccacccataagttatcatctttaaagaagaaatgtaccatttatgggaggatatgccactttaggaagccaccagtattgcagacaaccatctgtggagcaatgtcctccattaagaagcctaccactgagaaggagacacttttccaagagctatctgtattgcaagagaaacacaccactgagcatgagatgtccatcttgaagaaatcattggccttgcagaagaccaactttaaagaggattcccttgttaaggagtcgttagcctttaagaagaagcctagcactgaggaggcaatcatgatgccagtaatattgaaggagcagtgcatgactgaggggaagaggccccgtctgaagccattagtattgcaggagatcacctctggagagaagtcgctcattatgaagccattgtccattaaagaaaagccatctactgagaaggagtccttttcccaggaaccatctgcattgcaaaagaagcacaccactcaggaggaggtttccatcttaaaggagccctcgtccttgctaaagtctccaactgaggagtcaccttttgatgaggctttggcttttacaaagaagtgtaccattgaggaggcaccccccaccaagaagcctttaattttaaagaagaagcatgccactcaggggacaatgtcccacttgaagaaaccactaatattacagaccacctctggagaaaagtcacttattaaggagccactgccctttaaagaagaaaaagtgtctttaaagaaaaagtgtaccacacaagagatgatgtccatctgtccagaactgttggactttcaggatatgattggtgaagataagaattccttctttatggagccaatgtcatttaggaagagccctacaactgaggagacagtacttaccaagacatcgttgtctttacaggaaaagaaaattactcagggggagatgtcccacttaaagaagccactggtcttgcagaagatcacttctgaggaggagtcattctataagaagctgttgccctttaagatgaaatctacaacggaagaaaagttcctctcccaggaaccatctgcattgaaagagaagcataccaccttgcaggaagtgtccctctcaaaagagtcattggccatccaagagaaggctaccactgaggaggaattctctcaggaactattttcattgcatgttaagcataccaacaaaagtgggtccctcttccaggaggctttggtcttgcaagagaagactgatgccgaagaggattccttgaagaacttgttggctttgcaggagaaaagcaccatggaagaagagtcccttatcaataagctattggctctgaaggaggagctttctgctgaggcagccacaaacatacagacacaattatctttaaagaagaagtccacttctcatggaaaagtgttcttcctgaagaagcagttggctttgaatgagaccatcaatgaagaggagttccttaataagcagccactggccttggaggggtatcccagcattgcggagggggagaccctcttcaagaagcttttggccatgcaggaggagcccagcattgagaaggaagctgtcctcaaggagcccactattgacacagaagctcactttaaggaacctttggccttgcaggaggagcccagcactgagaaggaggctgtcctcaaggagcccagtgttgacacagaagctcactttaaggaaactttggccttgcaggagaagcccagcattgagcaggaggccctctttaagcgacactcagctttgtgggagaagcccagcactgagaaggagaccatcttcaaggagtctttggacttgcaagagaagcccagcattaagaaagagaccctcctcaaaaagccattagccttgaagatgtctaccatcaatgaggcagtcctcttcgaagatatgatagctctgaatgagaaacccaccactgggaaggagttgtccttcaaggagccattagccttacaagagagtcccacctacaaggaagacacctttctcaaaacattgttggtcccccaagttggaaccagcccaaatgtgtctagcactgcccctgaatccataaccagcaagtccagcattgctaccatgaccagtgtgggcaaatctggtaccatcaatgaggcattcctcttcgaagatatgataactctgaatgagaaacccaccactgggaaggagttgtccttcaaggagccattggccttacaagagagtcccacctgcaaggaagacacctttctggaaacattcttgatcccccaaattggaaccagcccatatgtgtttagcaccacccctgaatccataacagagaagtccagcattgcaaccatgaccagcgtgggcaagtccaggaccaccaccgagtccagtgcatgtgaatctgcttctgataaacctgtctcaccacaggccaagggaacaccaaaggagataaccccacgggaagatattgatgaggacagcagtgatccaagtttcaacccaatgtatgccaaggaaatcttcagttacatgaaagagagagaggaacagtttatacttacagattacatgaacaggcagattgaaatcaccagtgacatgagggccattcttgtggactggttggtggaggtgcaggtgtcctttgagatgacccatgagaccctgtacttggcagtgaagctggtggatctctacctaatgaaggcagtatgcaagaaggataagttacaactccttggtgccactgcctttatgattgcagcaaaatttgaggagcacaactcacctcgtgtggatgactttgtgtacatctgtgatgataattatcagcgatctgaggtactcagcatggaaatcaacatcctgaacgtcctcaaatgtgacattaacattcccatcgcctaccattttctgcgcagatatgctaggtgtatccacaccaacatgaagacactgaccttgtcccgctacatctgcgagatgaccctgcaggaataccactatgtccaggagaaggcttccaagctagctgctgcctccttactcctggccctctacatgaagaagctcggatactgggttcccttcctggagcattacagtggctacagtatctctgagcttcaccccttggtcagacagctgaacaaactgctgactttcagttcttacgatagtctcaaggctgtgtattacaagtattctcacccggtcttctttgaagtcgccaaaatccctgccttggatatgttgaagctggaggagattttgaactgtgattgtgaggctcagggcctggtactctagcagcagccacagggctaagcatgcatgttaacagggtatatttattctatgttcgaatttgtcttttgatcgcttttattcatttttcctttctttgtcttttcccaaactgataatgttataaatatttatgttgcttgtttttatgaaagaaaaaatattgtcatatttgactacaaatttaataaaaaattaatggttattgttaaaa

SEQ ID NO: 264734 - DNA, 388 bp, Homo sapiens
ttgtgattctatatacaccaacagcattctctgttttcgcatcttctgtgccatgtttctatgttgtttgaggtatacagaaatccgttccacatgcactcatatacagaccacaaatttagtggagacagtatcactgaacagcaacaccattgcataagtgtcttcgttgttgttgttgtagacaggggatctcactatgttgcccagactggtctcaaactcttgacctcaggtgatcctcctaccttggtctcccaaagcaatggaattacatgagccaccatgcctggtcacataagtgtctttttatccttccatacacataattatttttgaaccagtgagaaacttatctggcttcttcaggcaaatgaagctttaatta

SEQ ID NO: 264735 - DNA, 318 bp, Homo sapiens
caagtggcactgcaggaaatagtagccttgttctctgtcctcaagttgttccaagattgcagcccacaccagtgcttgggcttgtgagaatggagggctctccaacagttcagaaacaagcagtctgccacaggggtgagaggagcaaaagacacccccacctatgcttttccatggaacatcaagtccctcagagtataatctctgctggatttttgcttccttatttttctgtgttcaagtttcttcttgtggtgctctagcactcccgtcaatatagatattggaattaatgattatttatccataactttgctt

SEQ ID NO: 264736 - DNA, 279 bp, Homo sapiens
actttataaagtcaattcacaaagtagagttcaacaattatttaattcaatgatttaatttggtttcatcagatacagagatagagtggtatgtttgatgatattgatgattattactgttgtctagaaatacttaaattgatgtttatgctttaattaactcagaagagtacctttatgtcagttaataaaaataaataatcttaaatgataaatcagaaatattaggaaagcaagactgttttgtacttgggtgtgttgaaagaacatgtatgatga

SEQ ID NO: 264737 - DNA, 730 bp, Homo sapiens
gccattgtaccctgcttgtggcaacttgcatagttggttaaactgcactcagtacttacatgatgctgggaacacagcagggaccaagacagccttgtgccctgcctgactccatgggactcacagtcctgtgtgtgtgtgtgtgtgtgtgtgtgtgtgtgtgtgtaggggtgacagacccatccatcaccagacagtgactgattattaggttaatgcaaaagtaattgtggcttttgccattaaaagcaatggcagaaaccacaattacttttgcaccaacctaatagatttgtctgggctatgaagggggaaacacaggcagaggggtcagggctgggatgagggaagagtaggagctgtgggaccctagaggagatacctgactcaggtcagggaaggtttcctaggggaagcaacagctaagctggatcttgaaggatgagtaggaatcagactattaaacagctaatggaggctgggtgcagtggctcacgcctgtaatcccaacactttgggaggcccaggtgggaggattgtttcagaccagcctaggcaacatgactctacaaaaaaattaaaaaattagccagatgtgatggtacatgcctgtgatcccagctccttgggaggttgaggcgggaggatcactatagcccaggtggtggaggctgcagtaagctatgatcgcaccactgtaccccagcctgggtgacagagcgagatcctg

SEQ ID NO: 264738 - DNA, 466 bp, Homo sapiens
acctccacctccccggttcaagtgaatctcctgcctcagccacccgagtagctggggttacaggcagcactaccacgtggacccagctaatttttgtatttttagtagagacggggtttcaccttgttggccaggctgatcttgaactcctggcatcatgatctgcccgtctccaaaataaaataagtgggaactatgctacacatggacatattgtgtggaataatagacaagagactaggaagggtgaggagggggatgatgagagattacttaatgggtacaatgtatgtgatttgagtaaatgatgccctaaaagtcctggcttcaccactaggcaatctatgcatgtaacaaaattacacttgtaccccataaatttatacaaattaaaaaaaatcaggctgggtacgtggggtaggaggagcaagcgagcaagcagcagttcgtggggtaggaggtggga

SEQ ID NO: 264739 - DNA, 620 bp, Homo sapiens
acctccacctccccggttcaagtgaatctcctgcctcagccacccgagtagctggggttacaggcagcactaccacgtggacccagctaatttttgtatttttagtagagacggggtttcaccttgttggccaggctgatcttgaactcctggcatcatgatctgcccgtctccaaaataaaataagtgggaactatgctacacatggacatattgtgtggaataatagacaagagactaggaagggtgaggagggggatgatgagagattacttaatgggtacaatgtatgtgatttgagtaaatgatgccctaaaagtcctggcttcaccactaggcaatctatgcatgtaacaaaattacacttgtaccccataaatttatacaaattaaaaaaaatcaggctgggtgcaggggctcatgcccataatatcaatactttgagaggctgaggcaggaggactgcttaaagccggaagttaaagactaggctgggcaatatagtgagaccccatcctatgaaaaaaaaataggaaataataaaataatttttacaaaaaacaaaatataaacacaaaaaaagtttttcttctagaaaaaataactaatttacatctcaa

SEQ ID NO: 264740 - DNA, 589 bp, Homo sapiens
ttagtagagacggggtttcaccgtgttagccaggatgttctcgacctcctgacctcgtgatccaaaagtgagacctcggcctcccaaagtgctgggattacaggcgtgagccactgcgcccagcccaaaaaatgttttttaaatttgtctaggattcgctcttgggcactaagtcatttggggagggtttgtgatttttctccctctcagaagaactatcataggaagaaatgaagaaacttaagagttccttcctcatactgtttagattttattcatccaattggcacccaaaatccactacataaagactttgagtgctctgatttaaagaaatctatgagatgtatgagtgagaaatggtccaccgaggctgagctgctctcagtggagctccttatcgtagtgacaaaactcaggacaaaactccatctgtgttacaaccacctcagggacttttggttacacgcagttgtcagaaataacaggactttggtggaactgcctttctagaaaaggagcagtgaagtgttaaaaccagtctgctttctctcagttgcacagctgtgggctgaccaggtgtcacact

SEQ ID NO: 264741 - DNA, 360 bp, Homo sapiens
tttttttgagacggaatcttgctctgtcacccaggctggagtgtaatggcgcgatcttggctcactgcaagctctgcctcctgggttcaagcgattctcctgcctcagcctcccgagtagctgggactacaggtgcctgccaccacccccagctaactttttttttgtatttttagtagagacggggtttcaccacgttagccaggatggtctcgatcttctgacttcgtgatccgcccgcctctgcctcccaaagtgctgggattacaggcgtgagccaccacgcccggccagctccagttatatcattataaaacaaccagaactgaaagtcacacagtaattagtgttgagtttggc

SEQ ID NO: 264742 - DNA, 501 bp, Homo sapiens
cttaccctcttagagtacagctgcaggttataacaaggcttagctgcagcatggcattaacccctcagcaacaaggtgtccacagtgtatgctgtagtcatccagccccttctgttttggtgtcatcattttggtatctgagacaaaagctcatggagagctggcacttgcttttgctttcaatgtctgtgcaaataataatatgtttaaattcaaaaagagtttatttttttaccagccaaattttttaaccttgccttgataccaaacatttgattcattaattaatggtaaaacgaacaaaatgaccagacagatactacctgggtaccagagataatagagatgaataaaatgaagtcatgattccgtctctgtttttccctttaaaagagatgagatctcactttgttgcccaggctggagtgcagtggcataatcacagcttgctgcagcctggaactcgtgggaggatttcttgaacctgaggggttgaggatg

SEQ ID NO: 264743 - DNA, 428 bp, Homo sapiens
ggtggcgagttatgaatgactacagcatcacaaaacaacatacctgctttcttggtcaccagcacttcttccagacaggacctacatcattatatccagaaacattctgtccacaggagagagtggagattctctgccaatgtcttcttgtctcctgttgaaactggttgaagtttgtcccttagagaactaattaattcaccctcacctccaggttctgttactggctctttatggcaactgctagggaacccagatcccccagtgattggaggaacctctgaggatacagactgattgcacctgagcaccaaacttgtgagtctccttctaatgcaatctcagtggaatccagtcactgggagaggctgaggtcactggcacagttgggatatgaggcactggcaatggcaatggtggcttgggct

SEQ ID NO: 264744 - DNA, 378 bp, Homo sapiens
ctgcctggcatctgcctgtaaaggaagcatggcaccagcatctgctcagcttctggtgaaggcctcaggaagctttcaatcatagcggaaggtgaacggggagcaggcagtcacatggcgaaagcaggagtgagacagagagagtggtgtaggaaggtgcagctcactagaactcactgattatcacaaagacagcaacaagccatgagagaaacaagccataggtccccctgacccaaacaactcccatcaggactcacctccaacactggggattgcagttcctcatgacattgggtgggaacatacattcaaactatcacgtgacaatattacttccctcagtttattaaagaacaagtgtttctagctcttcag

SEQ ID NO: 264745 - DNA, 478 bp, Homo sapiens
gaggagaacgatttctatgggattctcaaagtaaatgggcaattttcatgcacatggagaatctacttctgcagactgagttcaggccagacctgctctgtcaaagcccgacagagagacccgagatggtgagggcgggagagggacagcggaggaccgtgctatggcttgagtgtgtttcccaaagttccttgtgttggaaacgtaatccctcatgcaacagtgtggagatgtgtgatctttcagtgattaatggatgaatgtgaaatgaattcatgtcattatggtgggagtgggtctactataaaaacaaagtaagccccttcttaccctctctcacgcactctctcaccatgtgatgccctatgccacattatgacacagcaaaaaggccctcacctagtgcagcccctcagtcttggactccccagcctccagaaccatgaaccgaataaacctctattgtggataaattact

SEQ ID NO: 264746 - DNA, 402 bp, Homo sapiens
tttccactacagatgtatggaagtgccaatttaaccttatgcttggtccacgtgtggtattagtataaaaacatcgccacccagatttttcaaaaacttgattaccccagacacccaatcctcaccgtgcttgtaggatacttactttatctctgaaatctttgaaattctatcaaaatctctttgccttaaatttggctaaaacataaaacgtatacatttattttttccttttcttctcttcctgccccttttcttcatcaacctagttttcttcattcacttctttggttactgcttcagcttcattggttctagaatgtgagcgttttgaagacacattccgtatctcccatattctctgttgtatcatggccatagtatactagatgctcaataaat

SEQ ID NO: 264747 - DNA, 561 bp, Homo sapiens
gaccagttttaaatctcgtgttgagagccggaagatgctggagaaggaatgtggtggaatgactgcctgagaatgaaccattctccagtgagagggggcttcgatattgaaagggcaatttggccttaacttggaaatgctggagattgattgcatacaatctgtcctgctagtgagagaagcaaggactgcatctaagtgcaacatgaagacttttggtcccaagctttcctccaacttcagtgggaggcagcccaaaaccaccgtcggttcaagaatacaagtgacctgcaattcttggaaagactcccccaattcttctcccaatatgtggtcagctcttccagcaggattagggagggaggagtttcagctgtgcttctaagatcttccagaatgaattttctacctcaaaaatcaaggacttttctggaaactgcagtcagaggacagaacatcagcctcaagctggtaaataggatggattttctccctaaacatcccttctgctttctagtttgaattatcaataaaatggtttggcttatctctgaaaaaaac

SEQ ID NO: 264748 - DNA, 551 bp, Homo sapiens
catcttgtaggttacatttgcatgaagattaaagagttggttattctatcatgtagattttattatagtattacaataatgctgccatttattttaaagtaaatataacaagttactacttttttgataaggaaatacaatgtaaaaatgatgtttgatgattacaaatatgattactgtttattaatttatttcagtcagttacagaacaaaacatctagatctctctgtaacttccagtgttacagtctacaaaggaatttgatttctgttgagattaggattctgattattgagtaaaaatattttatttaaaatttcaattggttctgtatttcttggacagggagggaggagtttcagctgtgcttctaagatcttccagaatgaattttctacctcaaaaatcaaggacttttctggaaactgcagtcagaggacagaacatcagcctcaagctggtaaataggatggattttctccctaaacatcccttctgctttctagtttgaattatcaataaaatggtttggcttatctctgaaaaaaac

SEQ ID NO: 264749 - DNA, 841 bp, Homo sapiens
gaccagttttaaatctcgtgttgagagccggaagatgctggagaaggaatgtggtggaatgactgcctgagaatgaaccattctccagtgagagggggcttcgatattgaaagggcaatttggccttaacttggaaatgctggagattgattgcatacaatctgtcctgctagtgagagaagcaaggactgcatctaagtgcaacatgaagacttttggtcccaagctttcctccaacttcagtgggaggcagcccaaaaccaccgtcggttcaagaatacaagtgacctgcaattcttggaaagactcccccaattcttctcccaatatgtggtcagctcttccagcaggattaggttcggtaggaattattgaatataatataatataatgtaaaatatcggaattatttttcttaggtgcttagtaaggagggtattagattttaatcatatatgtgttatttctttaaatcttgccttaatttatattatttaataagtgaagatttgctaggcgaatcttagtgataaattaatacttaatgttagttactatttgtcttacatagagttcatttctatgaagacacgtgtttcaaaacgtatactatatgcctttgtcttggctgttgaaattctgtgatgctttatatgcatatcacatcctagagcctggcatagagtaagtgctttaaaaaatattggttgcttgtctaataagcttacagtagttactatgtcgagagattacagttcaagttgggaggttgataataagtgtgttagcatattttataatactaatattattattaataaagctaccattagtatctaca

SEQ ID NO: 264750 - DNA, 535 bp, Homo sapiens
ttttctagctttaaaacatatttcctttagatgtcctgggataaaaaagacagaggtcatgtacccgttttgctttatatttaataaatctaaatagaatcaactgctaatcatttccttttacacctaatgcttttatatatacaaaattattggatcaaggcaaaggattctataaggtagggagtgattccctaagttgggctgtgtatcagtgtcacttcttcagacatacagatgcctggtataaaagttggtcacatgaattgggtcatttttatcatatccaactaaaacagtcaattggccagggggaaaaagcattcagaacacataacattgatcaaagaatgcaattctatgcaagcctggttgctgaaactgccttctgtaacctgaaattggtttttctaattactgaaacaacctgctgtgactctaagactagttttacccaaggctgtcactcaccaatcagaagttgccagctcccccaaactttactagtgccaataaactttcctacaaaataata

SEQ ID NO: 264751 - DNA, 317 bp, Homo sapiens
ctttatagttaaaacgcttagcaaaattgacatagaagaaacataccttctatgtcaaggtagtaaaaaccatctatgacaaacccacagccaacataatactgaatggggataagttgaaagcattccccctgagaactggaacaagatgaggatgcccatttctaccacttgtcttcataatagtactggaagtcctagccagagccatcagacaagagaaagaataaagagcatccaaattggtagagaggaagtcaaactgtcactgtttgctgatgatatgattgtatacctaaaaaatcctaaagatttct

SEQ ID NO: 264752 - DNA, 439 bp, Homo sapiens
ttccttttgttcttcagaggaaataatgaaatgcattcattttaagggtgacagaaaataatttgttttttcatcatgactatcaatgttattcactcatttatttattcattgattcattgctcaaatatgcattgagtgttcactatgtacaagtcactttgggagctgcaagtttagcttatacatgaatttttcccttggggagcttacaatctatcagaaaaagacaaatgtgaacataagttaattttagtgttgaaactgttaggtgtaataagtacattaagacagagttttagagagaactcacatttggcttaaaaatcatcaaaaacacattatagaagttttctacacttgaatggggtcttgaagaatgcatataatttaaatgtgtagatatggaatagaatctacatattttacatttttcact

SEQ ID NO: 264753 - DNA, 408 bp, Homo sapiens
ctggtgggtgacaggtaagagatggtgtaggacagacaggatgtcacaggctagtacttcccaaattcacacctgtcctaccaagccaatgcagttattcctttttcattccttttctatcctcttaaagaaaactttgatggactttttgtttgatggaatcttagactgccggttgtctatccttgttcagcccctcttgaacccttgctaatttcttttgttgtggatgagagcatttgcttccatctctgatcctttgatagatcgttgcatttcaactagaatttaattataggtctgctgtttattttttgactatcttttatttcatttaattagtaatactgttttttatctattaatgtttagttatataatatttccttttacatttatttttagtaa

SEQ ID NO: 264754 - DNA, 346 bp, Homo sapiens
attacctggattttttcatttcctgtatgtaactacaaactcaatcttatttttaatgagtcatttctgtacagactgtaaaaaaatgatatcctagaatatttttcgtcattcacattttgcagccaattaagttaaagcaggaggattttcaaatggtgataactgttatgcaggggttttgtgaaggaggtaacttgagctgaatattcatctgcgtttttcctgctgatttttgatctttgctttcagcaaggccccacattatttcagtgtcattcttcttatatctaaactgaataatataaattttacaacaaaatgttcaaaacggattggtgctttt

SEQ ID NO: 264755 - DNA, 168 bp, Homo sapiens
tttcagctcctggcgagtttctgacttccctctgccgagatttctttaaggtaataaaagtttttgccagcgtcaacaactaggccaccaacaaaagatctgaaaacaagtccacagcaacaactgtaatagtgattcttagagcagtggcgataacgccagcggaaa

SEQ ID NO: 264756 - DNA, 245 bp, Homo sapiens
gcttttccaaagtgttttctcctgtaaaacctctttataatatcctctgcttattactagatctcatttttaactctatgttatgtaagtaaatatctatgtatatttgaggtataaaacttattctcttaagctttttccatctaattttcttagtgtccagtctgtgcctttgggcatcctttattaaaatgctttaatattcttccaaaagtttctcctcttatgatcattcagttattaat

SEQ ID NO: 264757 - DNA, 732 bp, Homo sapiens
agattttacaatttaattataatatacgtacacttaccgggacctgaaaaagctattaagggtgtggttgtgatggattctgcattggaggcactcccaagtagctacttgttggaaaggttccagaaatatgggccaaacgtcatacccaagccttaagccctggggaagttacatcacagatttcctagcccggttgaactttttacaggactggtataattcaggaaaaccttgtgtgttttggctgtcaggtttctttttcactcaggcctttttaactggagctatgcagaattatgccagaaaatataccacccctattgatttgctaggatatgaatttgaggttatcccatctgatacatctgacacatcaccagaagatggtgtttatatccacggactgtatctcgatggcgcacgctgggaccgagaaagtggattgcttgctgaacaatatcccaaacttctgtttgacctgatgcccatcatatggataaaaccaactcaaaaatctcggattataaagtcggatgcctatgtctgtcccctctacaagacaagtgaacgtaaaggaactctttccactacgggacattctactaactttgtcattgcaatgttgttaaaaacagaccaacctactcggcactggatcaagcgcggggttgctttgctttgtcagttggatgactaaattggacaaatttataaaacatccaaaagttt

SEQ ID NO: 264758 - DNA, 779 bp, Homo sapiens
agattttacaatttaattataatatacgtacacttaccgggacctgaaaaagctattaagggtgtggttgtgatggattctgcattggaggcactcccaagtagctacttgttggaaaggttccagaaatatgggccaaacgtcatacccaagccttaagccctggggaagttacatcacagatttcctagcccggttgaactttttacaggactggtataattcaggaaaaccttgtgtgttttggctgtcaggtttctttttcactcaggcctttttaactggagctatgcagaattatgccagaaaatataccacccctattgatttgctaggatatgaatttgaggttatcccatctgatacatctgacacatcaccagaagatggtgtttatatccacggactgtatctcgatggcgcacgctgggaccgagaaagtggattgcttgctgaacaatatcccaaacttctgtttgacctgatgcccatcatatggataaaaccaactcaaaaatctcggattataaagtcggatgcctatgtctgtcccctctacaagacaagtgaacgtaaaggaactctttccactacgggacattctactaactttgtcattgcaatgttgttaaaaacagaccaacctactcggcactggatcaagcgcggggttgctttgctttgtcagttggatgactaaattggacaaatttataaaacatccaaaagtttaaaaaaaaaaaaacctgtcctacttaaaatatatacattataaaacc

SEQ ID NO: 264759 - DNA, 406 bp, Homo sapiens
atatgtctattttccaaagatcattttggtttctctgtatttgtaaatgcacttgattgtaatcacaaaagaaaagacagtgatgcactgtgttggctctgaagaaaaacattgaccagacagaaagtcttccccatagccaaactgagctgtaatgaccgtgcttttcatttctcccaggaaatagtaatataattggtcactgtattacagtaaacagtttgttcattctttgttcagtagaaaatgtttgggagatatgtctcacataatatgctggcttcacgataataaagactgggaatagatttgtttctaaataaatctcaataaatacattggtaaaatgaacacagtaggaagaataaacaatgcaattaggaatatcttaagtacatttacatgt

SEQ ID NO: 264760 - DNA, 492 bp, Homo sapiens
cagccctgctgactctcatttccttatttccacgatgggctgtgtgtcaatgtggcccttctcaggatagcactatcaatgaccttactcgtgggccttccgctgggaaataggaggaggctgtgtgtcctcaatgtccccttggtatcactgctgattcactgagctaccttgtgaggggatgcactcatctcaagcccatctcctcttttctaaaatggaggtgagttgctcctgtctgagatctcagggggaattgaaaagagtttggagatcctctgtgaatacttataaaaaaagctcttgcttcaaaactagaagcatgagtgtaaaaaagaaaaatatggatgctgaacacactggaaccaatacatccaaaagaacacagtccttgtcaaagtcgtgcctgtaccagccacacctcatcccctgcccttgcttgcttaccaggctttgagaaacaccttttagctagtttatcagcagataggc

SEQ ID NO: 264761 - DNA, 346 bp, Homo sapiens
ctcactaactcataaggaggttgttccaatttgaaaagaaggccctgcactgtgtagatctgaaagtttgactcaggtgccagtccagcagctgggggtcatggagaacccacctaattacatgctctctcatgtgtaacactctgaatggcatggactatatatatatatatataattgttttatatatataattcttatatatatacatacatatataaacatatatgtataattgatgaatatgaatatttatgaaattaatatatataattgttatattacttgaactcaaaattattcttctataaatgtattctacagcaatatttggacaaaaatgtaa

SEQ ID NO: 264762 - DNA, 715 bp, Homo sapiens
aaccgcaggtttttctatgtttagatatgtttaaatacacaaatatttatcattgtgttacagttgcctacagtattcaatacgataaatgctgtacaggtttgtagcctaggagcaataggcaatatcatatagcctaggtgtgtggtaggctatgccatctaggtttgtgtaagaacactcttgtacaacaacaacattgcttgatgcatttctcagaatatatccttgttattaagcaatgcataactgtatttggtaaaatacagagatattccacatattttattatgctattaagcatcgtttaaaataatttatgtcagttataacttgtttattctttcacatgaacattgaaatcattgagtttacttcttaagcatttcattggtatcttcatttaaattgccttatgtttatgttatcatactaataaacaggttttcttttttgggcctcagtgaagtttggtagttttcattatataagatgttttgcatttcttgttaggatgtttcttatgtattgcatgtttctgattattgttaaagatggaacttttttcctgttaaatttcttaagtgattactgttgagatctatgtatatctattttctgtatcgatgtcaatatctatatctatattgctgatttttgtatcttcttaaactaattatcttactgacttctactagtacattttcattttgtt

SEQ ID NO: 264763 - DNA, 465 bp, Homo sapiens
ctccattcttgtgacagaacaggtgtgggcgtgttcattgacttccaacccccttcatgcatggctgacgcatgggatgttgctgtcatgcacgtgtaactgaatggagggttccctcaggtgttctaggcaatggcacgatattagagacgccctgaggcagaaaaaaattgatgcagctgaagtgaagtgctgtcagtttcacctgtgtggagctcgttgccatagcagtggttacagtaaaactgggtccagaggatgtgaacgagggccaggagatgtacaatataaggcagaaaaatggctgaattgttatcatactcttaaataaggaaagccaaaataaactgctttattgggtcttggctaattaaaaaaatagaggtttaaggatatatttcttaagaacataaaaggtaatcattagtagaatccaaaataatatgtacaccccaagctaactgg

SEQ ID NO: 264764 - DNA, 451 bp, Homo sapiens
aaggattgtaataatcaaggaataagcaactgaatagaaaagggtctgttttaaggtaggcaggcctgtgcaaacctatcccctaaatcagaggaagctgaggggctgaaggaagaagctggcaaattcagtttctcagaaagaaacacttaataaggccttgccaacagaagccctgtctgtgtcttggatggtagcgagacaagatggtggatccccagactcagggcttgtatacatagggaaggggcatacatgcttcagaagggatgtgcagaacaattgcttagggtcgggatctatggtaagtaagagaacatcaaggctgtttcaccaaagggcaggatttacgtgatgtacgtgctcttacacaagaaacattagataaaaccagagatcttagaggcttcccccaaaccggagttagtgagaagtcaatatggcagattag

SEQ ID NO: 264765 - DNA, 827 bp, Homo sapiens
ctaggtcattggttaactatgcctattcaagaaagttgtttctattcactaacgtgagagcaccttaaaatgtactgctgtgtgtgtgtgtgtgtgtctgtgtgtgcgcgcgtagctttagaaactatatttcacctgtagaatgcatctattgcttataataacatgttaaagtagtgatacctcagaaggattataacccattgtcctacagattttctaatgtagattagggaaggaaacccagctctacttttgcaaactatttaaagatttgcaacaaaattaattgattaaaatcattaactacagatattctcgggcattttttctggtcagttttatgcacattgagagtgtatgtgccagaaacaggagctgattagaagaggttttcctataggatgaggtttctaaagtccagtaaacttgagcatgtggagtttctccacatactgcttttcaaaactgtagtgatctgtgaagtaaatataattctaatgcccagaagagcattgagcctgtggactttgactctttagaaagggaaccagcgtctggggaatatggtggggtactagcagtaggttagagctttaaaaatcggtgtcactggctggatgtggtggctcacgcctgtaatcccagcactttgggaggccaaggcaggtggatcacctgaggtcgggagttcgagaccagcctgaccaacatggagaaactccatctctactgaagctgaggcaggagaatcacttgaacctgggaggtggaggttgtggtgagccgagatcaagccattggactccagcctgggcaacaagagt

SEQ ID NO: 264766 - DNA, 535 bp, Homo sapiens
gagcggtcatgttggctgcgccgaaagtttgtgatctaggaatgaactctggtttggccgagggagggcgcagggggcttgaaaggcagagtacgtaacacagtaaaggatcagaaccccctagtaatacaacagcccacaaggccatgctgatgaacgaatggcaaaggaggggaagtctttcttcccagcacaaagtcaatccatgatcatcagagtgacagaatgagaagccaccatctggccaccatcacgatcatcatcacaatcacgacgagtcaccaagagactaaaactactgagtaaaagcttagaaacggccgggcgcgctgggattccaggcgtgagctgctgcacctgcccataataactttctcgccaccacctacttcagtttccctcactgctgtaatattcagctacctgagctgggccttgaggtccgagttcatctccagctccagaagaatctaagaaggcagacaccagggtcaccctcagcgcgtgtattccaaagtcctctagatgactcgca

SEQ ID NO: 264767 - DNA, 587 bp, Homo sapiens
gagcggtcatgttggctgcgccgaaagtttgtgatctaggaatgaactctggtttggccgagggagggcgcagggggcttgaaaggcagagtacgtaacacagtaaaggatcagaaccccctagtaatacaacagcccacaaggccatgctgatgaacgaatggcaaaggaggggaagtctttcttcccagcacaaagtcaatccatgatcatcagagtgacagaatgagaagccaccatctggccaccatcacgatcatcatcacaatcacgacgagtcaccaagagactaaaactactgagtaaaagcttagaaacggccgggcgcgctggctcacacctgccatcccagcactttgggaggctgaggtgggcggatcacaaggtcaggacatcgagatcgtcctggccaacacagtcaaaccccatttctaccacaaaaaattagccaggcatgatggcgcgtgcctgtaatcccagctactcaggaggctgagccaggagaatcgcttgaacccaggaggcggaggctgcagtgagcggagatcgcgccattgcactcctgcctgggcggcagagtgaaactc

SEQ ID NO: 264768 - DNA, 902 bp, Homo sapiens
aaagcaaaatcccgggggagcaaaatggacgaaaggcgacccccaggcaggggcgctgggtgccttgggaatccgaggaatcccttctctttgccagtcggaggggactagagggagccgaaggggccggagatgggccgagcgctgccccccgggggtcctcggcgccgggcgcagcttacaagcgcagcgcagcgcagcaggctccattcccggccgccgccgctcagcccattgcgcaaaccaaccccgctctgccgccgctgctggaacccaggaagcgtgcttggaggcttcgggcactacgcggggctggaaataccacgcactgccccttcgcctagacccccgctccggccacgcgggctctgccctcaaagctggtggctgcctcagacttggcggtgggggaggggaaggggagaggctggcgccccctcccccttttggctcccgcgctcgttgcagcagctgttgccaaatgaaccccagaatggggacgtgcaaccctccaccccacccccagccacagacgtcgcggtcagaaaactgggaagggggcgctgggtccgaggttctggaaaagcaagaactcacctgcaaacaggcagtccttctcagctctggacttctggatcacgacgtcgatatccttctgaattcgctcttgccttgaacacatccccacaccgacctccactcgcgccgggagctgagcggtcgtgaagactccctggggctcccagccttccctctccgcgcccctccccccatcacttttatgaattcgactccactttctaaaggaattatagtcttgtggctaacccaaaccggagtggctgggagggggaaaaggggggaaaagaaaatctttaaaaattaaaaaaataataaaacga

SEQ ID NO: 264769 - DNA, 1528 bp, Homo sapiens
  misc_feature (727)..(727): n is a, c, g, or t
  misc_feature (732)..(732): n is a, c, g, or t
  misc_feature (737)..(737): n is a, c, g, or t
aaagcaaaatcccgggggagcaaaatggacgaaaggcgacccccaggcaggggcgctgggtgccttgggaatccgaggaatcccttctctttgccagtcggaggggactagagggagccgaaggggccggagatgggccgagcgctgccccccgggggtcctcggcgccgggcgcagcttacaagcgcagcgcagcgcagcaggctccattcccggccgccgccgctcagcccattgcgcaaaccaaccccgctctgccgccgctgctggaacccaggaagcgtgcttggaggcttcgggcactacgcggggctggaaataccacgcactgccccttcgcctagacccccgctccggccacgcgggctctgccctcaaagctggtggctgcctcagacttggcggtgggggaggggaaggggagaggctggcgccccctcccccttttggctcccgcgctcgttgcagcagctgttgccaaatgaaccccagaatggggacgtgcaaccctccaccccacccccagccacagacgtcgcggtcagaaaactgggaagggggcgctgggtccgaggttctggaaaagcaagaactcacctgcaaacaggcagtccttctcagctctggacttctggatcacgacgtcgatatccttctgaattcgctcttgccttgaacacatccccattaaataaatccctggaaaagaagcagccgctatttccancccancccanccccctcgcacgcttccagctttcgtaaatattcagttaaaaatgaaacctctggccgaggcaggggctgaaggcgaagtggtttcggaagtgatcctgggtgagaaagaggaggaggaggagggggaggaggaggaggagggggaggtcggctttgcattcccagatgtgaccgcccagctgctgctcgccgctgctggattccaatttcctccccttctgacaatggatggtgatgacaccaagtctcactttctccctcacccgcccggaccaacggccgtgggggccgaggtgccggggacagccagagagcaatcaccggctgggcggcgggcgccggcgaggggcgagccccgctccggctcacgcgcgcacacccctcacggctcgcacgccggccttccacacccgcgcacactcgcgcccgcgggcggcggcagccgtgcccaggctgctgcagcgccgcccgcccgccgcagaccctccgcgcccgccgcctagtcaccccgccggccgcgggctgccggggctcgcagagtattagccatcccgggcgggagccgcttctccccacaccgacctccactcgcgccgggagctgagcggtcgtgaagactccctggggctcccagccttccctctccgcgcccctccccccatcacttttatgaattcgactccactttctaaaggaattatagtcttgtggctaacccaaaccggagtggctgggagggggaaaaggggggaaaagaaaatctttaaaaattaaaaaaataataaaacga

SEQ ID NO: 264770 - DNA, 416 bp, Homo sapiens
ttttatctgcttataagatttttaaacattggctgaaattgttggaactgatatggccaaatgaagtccatgaagaatcagattgcatatgttagagcccaaatttccattgtgtgtttcatactaactctccctgaatttgcatgtgacctgagaggaagcaagaagagatgactgtatatgtctcatgactttccatattcctactttccttccagcaatcccttacagaacccacctcttaggccttttctaatcactgtcttaaagccagtataaaaaaacaaatttcagctggactgctatctccttgttggccaacctacaacatgatattttcgtcaaaacccaagggccatactactgtcatcaggcagtaggccattttattcaataaaaaactgagtcactaacca

SEQ ID NO: 264771 - DNA, 534 bp, Homo sapiens
gaaattcaggaataaaggaaaagctacataagtggtagatatttagataaaaatcaaaggcattttttatttttatttctttaaaatatatatgactattgaaaggaaacatttggtgggcttttcagtgtatgtagatgtaatacatattatgattataacaaaagataattggggaaggataaagaggcatatacaataatatatttaaaggtaaaatgatatttgtaaaatctactatttggaaatcatcatactttgaagtaactcatgggtgaaagaggaagtcccaaaggaaataaggaatatttagtatagaatgtacattaaaacataacatgctcaaaattatgggatgcagctaaagcaatacttagaggaatatcgatagattttaatgcttatattaggaaagaataaatgtcttagatcaatgatcagggcttccacctcagaaagctagccaaagaaaaacaaactacaaagaaggaattaataaagataacaaaaattgatgtaagtgaaaagaaatta

SEQ ID NO: 264772 - DNA, 803 bp, Homo sapiens
atgaaatattatgacattattaaatccctattttgtctgtctttggaattcattctggtttacaattcgttataaattgataccagataaagactcataatatagtctgcttaatgactaatcctgtaaaccactgcagtgggatgtgtgaacaagagtaattatgttgttcaacaagaagtacctaattcttatccacagtgtagatataaccttcaataatggaaggtcacagctaatgagacaataaaactggcactttctgtttagttgcaaaagcctgtttgcttgttgacgttgtttgagtattgtctgtatttatctttctcagaacatggcccctgcctctgtgtagttgggacagagtttgcgtacatatatatctgtgtttttgtaaagttttacatatctgaaaaggggattgaataaaatgttattgtcttgaatgtattgaacctcccattctgcactactctgcccttagaacactagaagccagccttataccaccaaagcaggagattgggttgttcctttctgtcaaaagtgatcagacaaaaggaagcaaagggaatccaaacaaaatagccaggttattgcccagtcattctagatcaagtaccctggtctgctcactcacatagattttcccatcatctttttagtatcttactcttaactatgtatgcacagcccaggattgtctctcatttaaggaaagcttcaggcatgaaaggcagataccagtgtagggagaagaagaaaacaacatcaacacccaatttatattctcaaaaaagaaa

SEQ ID NO: 264773 - DNA, 490 bp, Homo sapiens
gttggcattgtaagtgtaagattttaagcagcggggagaaaatttcattcctagcttaaaagctcaaatgttacacgagacactgagctttggttctcagaagtttatcttagtgtaaacttctactgccactaggacacaaaaggaacatctctgcagtcaacaaataagcattttgagtatctactgagcactttttgaactattagcatctgtttcccactttggtctagtgaagattcccatgattaatattttctgcttagttcccagtcgctttctgcccagctgatcttccccgccccatatagcagcactctcacttcactgtcttatctactttagagcctcaccttggagcccttgcttcaagaagtggccttcaagcttcagctacccaaggtccccttgccctgtttatcctttctttttctggcccgagtggaccctggggcagggtgaccttattaaagactctataaaacaaagt

SEQ ID NO: 264774 - DNA, 223 bp, Homo sapiens
tccatctctaagtccctctccctccttgtgcctcctgtgtccctgagtgtccctctccctccttgtccctcctgggtccctctctgagtgtccctcttcctccctgtctctgatctctttggatctctactggcctctcacactgcagccaatgtctctggtctatccactctgtccccaccctgctccctaggtgcccactcagccctggctggcagctttg

SEQ ID NO: 264775 - DNA, 376 bp, Homo sapiens
tgtttttggcatcttcacaaaggagttaaagagatcagactcgttcccaagagagaaaaatcatctttgcaatgtccaaaaagattccctgggcacagctccctctgctgtgacctgccaagaaattttggggctgcttaggacatggggtcattctctagctccagtatactcaccagtggtcagtcaccacctatgcatcgtgagtcactccacaaaccttaaatgaacatcatgttggggaaggccatgcttcgtctcagccctgccctccctgggcttaccatccaaacttggccctgtgtaaattctacaggattcacccctggttttcctgtccactgactcaaatgaccaacatctcaacaccttcctg

SEQ ID NO: 264776 - DNA, 521 bp, Homo sapiens
ttggagacagactctcgctctgttgtccagactggagtgcagtgtcatgatttctgcagccttgacctcccaggttcaagcgattctcctgcctgagcctccccagtagctgagactacaggtgtctgccactgtgcctggctaatttttgtatttttagtagagacaggtttcgccatgttggccaggctggtcttgaactcctaacctcaggcgatctgcccgcctcggcctcccaaagtgctgagattacaggcatgaaccactgcgcccagcctgagttcaaatcttcactccaccacctacagcttgtgagcactggactctgggcaagtgacttcagctctcgggtgccccagctacaatacagagacatcatgccacctatctcagaaggtgccatgaagatacaatgcacagaatcatgtcatcatgtaaatcactgaatcctggtgcaatgtttaggacataaagaaaacaagtatgagtgcaaaaataaataaataaggataaatgaatac

SEQ ID NO: 264777 - DNA, 460 bp, Homo sapiens
ggtcattcttggctagaaggaagcccctgctgaagcagccatcagagcgcctcagcagttaagcttccctgcctccaccctcttactctatgaccctcccctgcctctgtccatggccaccaacgcctttccttttgtggatggcagaccaaaggagacaattattctgcctcaacccaacgctgtgtttccttgtggttctgcactgaggctgggcccagaagcctggttcatgaagagcactcacctggcccctggcccctggcccccgttaaacaggtgagtcactgaccatttccttagagccacctgggactggctgcatgggacttgccatgacacagccggccagactgccacaggcaggttctgggaactgtacacttacatggatgggcaggggctgcctgggattgggagccactagtggtctatgtccccaagagcttgtatatgaccc

SEQ ID NO: 264778 - DNA, 276 bp, Homo sapiens
gggctctgagaggccggcaagtggggcacctgtccccttccttggagcccacttgaggtacccccggggtcagagaagaaagccaggtgtgtggcatctgtactgcttgtcagaacctaggagggccgggcacggtggctcacgcctgtaatcccaggactttgggaggccaaggcgggtggatcacttgaggttaggagtttgagaccagcctggccaacatggagaaaccccgtctctactaaaaatacaaaaaatcagccgggtgtggtggtg

SEQ ID NO: 264779 - DNA, 293 bp, Homo sapiens
cacactgcttctcttctaggacagagttattttatatgtggatataagtaacagtgaactaagatagggtagcatcacttacataatttctcaaggcagatttctgaattgtctctataaattctaacctcaaaatgtcaaattcaaatggatgtcaaaagagtagacccaacaggtgggaaacatgtctagctgtttctttcctggacaagtaaagcacccttgactgttttcttgctctcttgacatgctgctgattgcacagctagagtcttcataccacactctcctag

SEQ ID NO: 264780 - DNA, 641 bp, Homo sapiens
cgacggagctgaggccagaatgtgagagagatctgcattttggggattagggcctagtcaggcaggtaggagatgatgttcaaaaagggaaaagaagcgtgatgaaagactggtttctacagagatagattagaaagctgaagcctgaaaaaacagtgaaggagacccatgcaaatttctaggccctggaggtccaaataaggttttctaagtccctcaggccatgacaggttcagtccagacttgtctcccagagtgtttctctgccatccctactctaactgggacttattggtggtgtttctctcctaaggccagatgctttgcacagaacattaggaaactccagatgtaaaggtaaggcacaactgagaatcacctgcccagggcagcaacacagtgtgaaggaaaacaggccactcaacccaaacttacacctgagacagaggcaacagaaaaatcagaaaaggactttagaacacatataatcaaaatctcagacctaaagacgacttttgaaataaaccataacatatgaagaggcacttatgaaacaagaacaggtagtttataaaaaagaaccagtcagagaccctggaaatttttaaaaaagcaattactaaaataaaaaatgaaaactc

SEQ ID NO: 264781 - DNA, 439 bp, Homo sapiens
agaattataaaatgattctagaagaattccattttaatcctggacatacatttcttaggcccgtgctttaagtgctctgcacagaataatacacccacacttagtcacaatgttattaaatttctgagagggaaaagaacagcgaacacaagtcagagattgctctccagagaagacttgttaaacacaaataattctgctcactgaaagagcccctgttgctattcttcccttctcaaaacactggggtgttttcaatggagagtaatcaaggcaagaatgtaaaacaggtgtcaggttcatatgtttcctttgcaaacagtgatggctttgctaccagggagatcagatgctcacctgtcaactggggtaaaccacacctgtcactatgtcactatcactgtcaaccactatgagcatctgtcagaatcaaaaacca

SEQ ID NO: 264782 - DNA, 422 bp, Homo sapiens
agttgagttcactaataaaattatatttggaatcttatatcattcccagattaatatatacaatgtatatcaaatgtcattgctatggaaacttaagtttttacacatgaggttaaatttttataaagaaattttttctccagaattgactttatgaaacttgacatcctctgtttctggcatgtattaagaaaatgtcaacccaatgtcaaaggataattaatttttttaaaggagaggacaataatggttctcatacaaatgtaaaatgaatatatgttcatgattttatttaactgattaataaataagagtgccataggatgttttgactggttcaaaggagaatacaaagagcagagaatatataggcagacattcatgctgaaatgaatttgcttaataaaggcaaaattagccaa

SEQ ID NO: 264783 - DNA, 785 bp, Homo sapiens
aaagagggcatgatagatgatagtttaaagagggcggcacaacggaagctagcatttggcaggtagcccttgtattccatgcaaatatcagcttcctgcatttgactgtggattgtaggaagagagtattcctgtgccttctagtcaatatggatattaagagcacccttgtcccacctttttaaatactgattcatcccctaagggttttcagatagtctttgatcaatgggattaaattattttgtaacaaagcattttgcaaaacttactattttgagcattttgatgctcaaaatagtaagttggttcttggaacttttctcctacctagcacaccaggatatttgtatttgaagtggcagtgcttcttatgaggggttagaggctgttatgtcagaatctatgaggagccaagtgtggtggctgctcatgcctgtagtcccagctactactcgggaggctgaggtgggaatatcacttaggcccaggagtcaagcctgggaaatatagtatgaccctgtctttaaaaaaaaaacttgggaggaaatacacagtagttagaaaaagcctcctaggtgattttgatgaatcccagtctcaaatttcttcatttggaaatgataatgtaggccacacgtattactggagaaaaatgtgctcccgagactttccagagcagcagagctgggactaggcaggtgaggcagctacgtgcaagtgtagccctgagaatgagcacctctttaaagaatgtaccttgcgttagttctgtgcctgtttaa

SEQ ID NO: 264784 - DNA, 500 bp, Homo sapiens
ctgggcaataagagcaaaactccatctcaaaaaaaaaaaaaaaaagttttgtcctcttccttcttgaggagttgctttgaagcttcacagcaaccaaggaatctatttcactgatgaaacaattcaatctactttaacatatggctggttatttagaatgtccattttgcatactactctcagtcttccagactgctggaatgtacaaataaggtaatagaaaatcaatttacaaagcttacagaaacttttaaccttccgtggcctaaggcttttccaatggtcctgaatgaaggaacctacaaaccagctctccttaatgtgagctcctgggagacaaaaatatcaaagatcaagggctccaacctggagattttgtttatgagaaatgccatctaataaaggactccctacaaccatgttgaagagaactccagcctgggcaacagaacaaagaccctgttaaaaaaaaaaaaccaacttaaatgagtcccaagaaa

SEQ ID NO: 264785 - DNA, 350 bp, Homo sapiens
cattcttaaagtgttcggagatcccagatgaaaacctaaaggaccctcatgcacacaagagctctgttaccagttgtttgtacaacctaggaaagctgtatcatgagcagggacactatgaggtctggccaatgcctctctgtccttttccctcccccttgttctgatccagtctcagtggtttgtaacctacagcctcctttgagcctatgtcctttgaacaactaatatgtatacacgttaaactattgtcctttgagaaactaatacatgatgacattggaatggttttttgatcaaatttgtttagaaaaagcttctgctaaataaaaatttaatagatttaaaaa

SEQ ID NO: 264786 - DNA, 489 bp, Homo sapiens
ggacaccacccaccgtatgatagggtatagaagaggcagggtaacctgtgtagaaaatcagctcccagcctcctgctcggaccttaccctcaaggaatgcagaaccccctgtgtatccctttctcctcctgatatagtttagatatttatccccaccaaatcttcatgttgaattgtaatcccagtgttggagatggggcctggtgggaggagttttggtcatgggggtggacccctcatggcttggtgctgtcctcactgtagtaagttctcacaagatctaattgtttaggtgtgtgccacctaccccctcccactctctctctcttttgctcctgcttttgctatatgaggtacctgatcctgcttcaccgtccaccatgactgtaagcttcttgaggcctccccagaagccaagcagatgccagcaccatgcttgtacagcctgcagaaccatgaaccaattaaagctcttttctttataaatta

SEQ ID NO: 264787 - DNA, 262 bp, Homo sapiens
cagcgtccttgtcccttccaccctttgtactggtcctacctcctgaaacacattcaagtttattcccactttgccctgggtacaaatatttgaacactgctttctgctcccaccatgctgcactccaggataaagagacccagctcgggcctttctctgtgcaggacgttttccttggacacgtacattctgttgccctccgcttacaaccagcaggcatttccactagggaagaggaaggggcgtcggtccagctgaaagt

SEQ ID NO: 264788 - DNA, 770 bp, Homo sapiens
tgcgagctgcccacagctcacgccaagccggcttccgctctgtccatcaattcaggcccactgagcacaggttctcggggaatgctcaagagccccatgccaggtgggtcccattcacagatgtctgctcaccaaccagcaggaagctggaaagtacccccaggacagctagcagcccacagtgagctgtgaggcacacagcaatttggggctaattttctcctgcaaagaagttgatcccataatctggcaaatacactaatcgtcactgcactgctcagagcaggagcttagagctacagagtccggggggaacaggctcggcatagaatgagaccacggactgccggcttgaagaatgtgctgccaggatatgaaacccaaagctggcaatggaccacaagctactcccagtgacagaggacccaggccacagaccagctgctgtgctgggcacaatgcttctattgtcacggaaccctgcatccacgcccggccccgcttgcagatgggaaagctgagggtctggggctgcaggatgtgctcggcgccctgctgatgaccttccctgggccagcctgacccccggctcctctgatcctctctgctttaacggaagcaaagaatgagttgtaacagccgaggaccaaggagcagctcttctgtcaacagatgcaccggaaaatccgcggtggccgaggaagccctattttctttagtctgctcagcatttcttgtacaataataaaaacatctgaatttccaacaaa

SEQ ID NO: 264789 - DNA, 522 bp, Homo sapiens
cattgccctggggggttgtgatgaggtcgagggtctgcccaatctcagtctgataagaattctgctggaagagctccatcaggttcaggtaatagggctgctcccggcaatacagcttcagcaggcagtagatacatgcttccagaaggatagcatcattgatggcatccaaacccatgcccagcttctgataccaggagatctgtccctggcaggtaagggatgaatccataatgtcatctgccaccaggaagaaagcttgcagcagttgcgcataccagcccacagtcggtgcccactggagactatcagcatccagtttcctcggctccaccagctcccggaacgctactagcaccatcaaacctcggtgatacttgcctccaatggcattgtactccaggacctccttgagccgggcagtagcatctcctgtctctgggtgccccatctcatcctcagtcagcaccctaacgatctgggagtagtgctgaacgaaatcctgctttgcttgggcataaa

SEQ ID NO: 264790 - DNA, 1050 bp, Homo sapiens
cgcgagtccatctctgctcagtggctcctggcagggacacctcctcctatcaacccttctcacaggcgggagaaggaagccccgggtcccacgagctggagaaatgaggccaccctgcaggctgtgataagcggggagttggacccgcataggccgacagcccagctcaacaggtggtggtgggcttatcccttcctgcattatccggataataatctgccagccccattcaagtccgtcgtggaaaagtctgccctcagctttggcatgggtaaactgcctagaagcgactgcaaagagggggcgtcatcatctcccccgatacatccttgggacagacagatggacagacagacacacgcacacgcgcatacacacgcccgcgctccccaccacactgccccttccagggtgcgcgatcgctagggctctccagcccctgcccctggctgggctgtcatgggggcgcagcccggcgccgcggcccagcaccggtgggagaccgtcccccagggacccccccaggatggaagaggtggtctctcccggtcttcccggctcttacctcgctggagcggccgcgacccccgaccctggtccaatgtccctcgccggctgggcgcgcggggcgggaggtaccgcgctaggctgcccgggacgcccgccccgtccagtcagccggaaccgctcggcgccaatgaccgtggccgccgccgccgcagctcgcgccccggaccccgagagggaggggcgggcagggggcggggccgagggcggggcctccccaccccggcgctgccagctgcaggcggggtttgggaccggtcagatgcggtctcccagcccgggaggtgagcacctctggggtgagcacccttgtgggggtggcaggtgaagagttgggggccggcgtgggagaggagaggctttcagagtccgcatagggctgggagaccctgcctggagtcagactcaccttcaaattccagcagctggggctgcagcctctgccgttgctgctgcttttaaataaggatgatgatgatgatg

SEQ ID NO: 264791 - DNA, 471 bp, Homo sapiens
tgtacatcacaggtttactgagggtatcacatgtatacgtaaaaacattttgaaaaccattatgtgctagtcaaacataaaatattgaaagaaaaagaaggtatttccattttgtaatataataatttgttaatttttttttcagtagctactatgtactaagcactaatgatacaacaagaaagactcttaccaggccaggcgcagtggctcacacctgtaatcccagcactttgggaggccgaggcgggtggatcacttgaaaccaggagttcgaggccagcctggtcaacatggtgaaaccccatttctactaaaaataccaaaattagctgggtgtggtggcaggcacctgtaatcccactactatagtggctgaggcaggagaatcccttgaacccaggggcagaggctacagtgagctgagatcgtgccactacactccagcctgggcaacagagactctgtctc

SEQ ID NO: 264792 - DNA, 320 bp, Homo sapiens
gagacgtggttttgtcatgttggccaggctggtctcaaactctggacctcaggtgatccacctgcctaggcctcccaaagtgctcggattacaggcctaagccaccctgcccagtgtaaactgggaattttaaagtaaacagaacttcatgggtaaattcctttggggggaaaacacgttaatttttctgcagccctggcagtagcacttcacatctttcccaattattttaagcacgctccattttctttccttctgtgttcaaattatagttagaaggaattagcagcttctatcaaggtgacttaaaacaacctatt

SEQ ID NO: 264793 - DNA, 697 bp, Homo sapiens
cgttaaagggaaatccctgcttagatataaacttcctaaattaatataaatatccttacacagttaaatatgagtttaggaagcaagtgtttaggtagcaagggataattcatttccattatatgccattagctcttggaaggtaggcttccaattatgaaaaacactgatttcattgaaatgagggttttctactccctaaagagaaagccatgggaataggtagttttattcaagtgaccaagtatggcaagaatcacctctcacctccctctctgcattaaccccacagatgcaaacagacttctctctagttctaaagattacacacttcatcttaatactgttgggaaatgaagaataagaagaaacaaattctagattactacagtagcacatctataagatgagactttacagattaatcctctttgctgcaaaactagatttttttttcctctaaaaactttcatctttctttgattggctttacctgtttttttccctctaacaatggtgaagagacaaattgtactcttctggaaccaaatcttgaaatatttaataaatacctaatttatctaaatcatgtatttacacatatttgttcagaatacgtaatatggcataatttgtcattttttagtcataaacctcctctgactccttcacaaagggctcaggtttccttgccttg

SEQ ID NO: 264794 - DNA, 440 bp, Homo sapiens
agcaaataataagtggtctgtctggagaattacatccatgtctgtgttctggttagggcagcattaacactgactgggagccaggaccaaggcagcatgtaaattcaatttccccgtgtctgatccacaacattagggacttgctggatgctataatatcatctattcattcattcaacaaatatttatcaaaaggctttctctagccaggaaccgttctaggtgcttggaatacaataatgtgcaaaacaaacaaaaatccctaccttaaaggagtttacaaactttactttcaactaggcaagacattcggaatagtaagtagtcttacccaccctaactaatcacaaggacttgggagtggcagacaacaagagttgtttcattgtaagacattctaagagcttttgaataaaaacttgaactggaaaaaaaaaaaa

SEQ ID NO: 264795 - DNA, 463 bp, Homo sapiens
aacttgaatataaatattatatgaatatcacatattttcactaaaaagaaagaatatattgttcttattattgtattttaatattagagtgtcttgggctttgaaactcatttactttaggttcctgaatacagaaattctttgtacaaatccctgatgagtgatcaggtagcctgaggtccatctcttagtggaagcaggaattgtcttgaaaatacacatttcagagtcacatgatttgggtttgcatactggctccctaacttacagatgatgcgacttcaagcaaacagcctatttcctcatttttttcatttataaaataggaacaacaatactaacctcacaaggctgttgtacacataaaaagaaatacaaatgcacatgaaagcctgaaatatggtatgaaaatgtatttttaaaagttagtgagcttaatgaggaaagggattgtgtccaatcc

SEQ ID NO: 264796 - DNA, 408 bp, Homo sapiens
caaatggagaggtggtaactctcacccactcactggtgatgtatctgtctgtctggaagacattcaaaaaggctttgcatcttgataggaaaaacatcctggattctctctaactcttcacttctacttttagacctacaatcggatgctttccagaagttgccaagaagtccctggagaactagctgactcatgcccatgtgctatctcaggctaccagagagcacctctttccatctggagcagctgaaaggttagaaatccggtgttcaggcatcatcactgggccccatgtactgtactggcttctgttcccacaggattaatgctgcttcctcaagcaatgactctgaacagcggctaccctatgttgttgcacccagaaagggaatggtggtgggtggctgg

SEQ ID NO: 264797 - DNA, 482 bp, Homo sapiens
cacgaggttttcccatgtcttgtattttctgcagtcattatggccactgtttacaggtcaccttcaaaggtgcctgcaacttcatatttggtctccacgaccaccttggtagtgggtcctattattaggccatttcacagatgagacagttcaggccccagtggtgtggggggctgtgttgggaaccctgctctctgatcagtcattgtttggcctcccgtgagactcctgagtgataaacttgcaggttcagcactttccacagagtctagcaaaacctcagggaagagactttcactttccataaggaatttagaacacacatagctttagtgatcttgttactggctgagctggcatcactactagcaactcagctcatgtctcctgggggccctcgctgtgcctgggcccgccttggcccaggggaccattcatgttcaagtgcggctgccactttatgttttcacggcagcttctct

SEQ ID NO: 264798 - DNA, 350 bp, Homo sapiens
tgttcaaacctttatctcaaatatgatggaacttggagttggagatgggcctttgggaggtaattaagtcatgaggatagagccctgatgataaaattagtgcccttataagaagggacatgaaaaagctttccgtgcttgctctcctctttctctcacctgtcccatctctctctcttctctctctttctctccctctgtctctctccctgcaatgtgaagacagcgagaaggcatccatctccaaaccaaggagagggccctcaccggacatcagatctactggtaccttaatcttggactttccagcctccagagctgtgagaaataaatgtttgttttttaaacca

SEQ ID NO: 264799 - DNA, 510 bp, Homo sapiens
aggcttcggagacttgtcagcagtctgtagcttatttctgtgtgtgtgagggtgtgtgtgtgtgtctctctctctctttctctctctctcaccatttccaggctcaaatcactgtggaggaacaagcaacaaagtcttgtcaggaccttatctcagggtaacgattagttaaaaatgaaaggctaaaatattgattttctttagaagaataattgactgtttgatatagagaacacccagtttcttcctgaggaaagctgaacagggctacattagcagcccgcgtctctctgacagcagcaggggctgggtttaagcagcggctgctttgcctggggagcacccgtaaatggactttggtctcaatgctttgactctttgccgtggttttggatgttggaataccggcggtgatctgtcttttataaactcacctgatttaaaggaaagatgagtgaagaaccaaaggagaaaaatgcaaaacctgctcataggaaaaggaaaggaaaa

SEQ ID NO: 264800 - DNA, 634 bp, Homo sapiens
aaacatctctccagtaaaagtatcaataaattttattggactatttctgattacgcccctcaatgtaggttaacagcataatgccaaaagcattggtcagtaaaaccaattacacaagaggacaaaacactgctcatatacgcagctttctcataatcttgtttaggaagacaaaatgacaatattgaataccacttcacgtgcccattaacattgctactatcaaaaaaacaatagcaacaagtgttggcatggatgtggagaaaatggaacccttgtgcactactagtgagaatgtaaaatggtagagctgctgtgcaaaacagtatggcacttcctaaaataattaaaaacagaattgctgtatattcagtaaatccacttctgggtgtatacccaaaataacagaaagcaaagtctcaaacagatacgtgtacatctacgttcacaatagcattattcctaatagctaaaagattgaagcaacccaagtgtccaccaatggatgaacaggtaaacacaatgtagcatatatttacaatggggtattatttagccttaaaaaggaaagaaattccaacacatgccgcaacataaatgaaccttgaagacattaggctaagtaaaataagcc

SEQ ID NO: 264801 - DNA, 491 bp, Homo sapiens
ccagctagcactgcactctggtgcggttcttatctccattcagaaaacccatggggctgggcacagtggctaatgcccataatcccagcactttgggagggcgaggcaggaggattgcttgagctctggagtttgagaccagactaggcatcacacttggctaactttttgtatttttagtagagacggggtttcgccatgttgcctgggctggtctcaaactccttagctgaggcagtttgctggcctcggcctttgaaagtgctggtattacaggcgtgagctaccgcacccagcctaagatacttcttaatatggaaagccacaaagacaaataatggtggggaaatctaataatactgttagacacgcctcaccttttaaacatctatcacatgttaggcttaggattgttttatggtaaaaacccaagcattcaattctgacacccaaaggaaatactatatattaaagtatgtattagtttcaat

SEQ ID NO: 264802 - DNA, 393 bp, Homo sapiens
ccagctagcactgcactctggtgcggttcttatctccattcagaaaacccatggggctgggcacagtggctaatgcccataatcccagcactttgggagggcgaggcaggaggattgctcaaactccttagctgaggcagtttgctggcctcggcctttgaaagtgctggtattacaggcgtgagctaccgcacccagcctaagatacttcttaatatggaaagccacaaagacaaataatggtggggaaatctaataatactgttagacacgcctcaccttttaaacatctatcacatgttaggcttaggattgttttatggtaaaaacccaagcattcaattctgacacccaaaggaaatactatatattaaagtatgtattagtttcaat

SEQ ID NO: 264803 - DNA, 704 bp, Homo sapiens
gaattattagaattatagtgaaatagaattattagtgataatataatagattagtaatatattaatataatagaactattagtgatatattaataatgtaattagtgatatgttactgaattattagtgaacagttattagtgacttagtgattattagtgaattattagtaatattttagtgaatattagtgaattgtaatagaattaataataattctattattagtgatataagccatatgcattttacagtcttaaaatgttaatgacccattatatgaaaagcatttatttatctgcattcaagatacatgtttggttaaggtccttgtaattaaaataaaaatcagaatcaccatattataccaacattgatacaagtaataattaacaacaacaatgatgatgatgatgattaaaaacctggataaaattttgtctcaggcttagtgtggtttgggtatgcatgtacttatcatatttgattttgattttattttaaaaattttgtctttactttttttcttagcatcttgacccttttgtgacatctagcaggatgtatttttttttcaagatgcatgtttcacaaacaaaatatatgtttatatctgactgtacccaagctgctaattatgggcatctctttctatagctcactattaatcactcatgtctttggggttatatagaaaacaattt

SEQ ID NO: 264804 - DNA, 462 bp, Homo sapiens
tgtccggacattgctgcccacagtggaagctgcttgtgttacatctggtccagccacagcctcacacagagccagcacctgcgccagtgcctggagctgcccatgccaccacagctggcctacaagggtgtgcacagtggctggatcccacattcactcactcacacaccccttggcactctgtgcctggctcaccctttgcagacatgggatccaagcagttagcacaagctgagcgcagcctgcccaaccaagtggacagaacaagcttagcacatgcaagtgaaacacaagcataggtgccaccagccacagaggtttctgcctggtgaagcaacaccctaaggatcctgtgacaaaagggcaacttgtgaaggtggaagtgatctatttccctgtaacatatttcatctctaaacatgttattaatgctcattaaataattatcaataaatgaagaaa

SEQ ID NO: 264805 - DNA, 410 bp, Homo sapiens
cttctccgcacatatttcctccttgacagatctgggttcagattttgactctgtcccttactaagtgattcggggcatgttgcataatctctctaagcctctttttcctcatttgcaaaaggtatgacactcaaacctatgtccatgtccaggggattcccaggatgtgagactttcagtgctaaactctgggctggttaccttagggtataaggaggataatgttgagaaagcatttatcgcaacacccagcacactgcaattgctttataagtaattgttattatcctttcctcttgcctcagatatttttgtttttgtttgtttgcgttgcccaggctgaagtccagtgagctgagatcacgccgcttcactccagcctgggctaaagagcgagactctgtatcaaa

SEQ ID NO: 264806 - DNA, 395 bp, Homo sapiens
tccccaaagatatatcctaatccatggaaactgtaaatattattttatttggaaaggagtctttacagatgtgattaagttagggatcttgaggtgagactatcctgtattctccaggtggaccctaaatgcaagcacttgaatccttataagatgaaggcaaaggaagatcacacatacagacagagagatgatgtgaatatggagatagagattaagggccacaagccaaggaatatgggcagctatcagaaatgggaagagtcaagcaacagattctctccttgacatttaagaggacatgcagccctgttaacacctttattttagcccagtgaaactgacttatgacctccagaattatgagaaaataaaattactatttttaagctaaa

SEQ ID NO: 264807 - DNA, 482 bp, Homo sapiens
tattattctaggccctaagtgcttgataaagctttatcatcagcagaattgaggaggtgatacctctaaaaccatacctacgaaatattagctgtagcccttgtgcagtttcagttaatgttagcccttcctttttcctcaccatgattgaaagcagaaagttaagggcagaatttcacatatacagaatgccagctaatcagcatatcatttcacagaattacattttattcagatagctggtgccattcagtgctcaatttgtataatcttacaacatgcagttataaaaagggaaggccatttaagaatctgtctgaagcagtcaaaagacaaggacatattgggaaagagtattttcagcacttgaaatagacaaggtgttaacatccaaaatgtattttggactcttacaaataaatgggaaaatccagttgaaatataggcaatctatatgaatggtcaagtcacagaaaaaaaaa

SEQ ID NO: 264808 - DNA, 658 bp, Homo sapiens
gcagacttccagtttccacaattctcaggggttaagagtagatgagctaataattgaaggattattttataattttagagagaattaattgcaaagtagtttactcttcttaaagcactaagaattatatgatacaaatattagcttttaatttatttaagcgattaaatatatttccctgtgaattaatatgatattaaatctaatctaagatgtttataattatatgcagtgctttatccctaccttcatcatgaaggacgaattaacaagaagctaactttgttttcactaacttgaaatttcaggatgggcataaaaaatgaaatatatttgaactgaactaagtaattatgactaactgatgttatttgtcattatatgtgtgattgaccaataactactatcattgtgtttaagtacgagagccaattacagaatataattctaaaaagtaaaagaaaaaaatgatattgcgcatatttgattgggtaaagaaagctacatgtggaggcttaagttcattgggttggtgaacagtattaatagtgaccactttatgatatttttaaaaatgttttccaaaagttttaacacaatttattttccacagtaaaaaaataatgttaataatggctgtcttatatgctttgggcta

SEQ ID NO: 264809 - DNA, 526 bp, Homo sapiens
aggtaattaggttatgaggttggagcactcatgaatgggattagcatccttataagagataccaaggggggcttttgccctcttttagccatgtaaggatgtaatgagaaacaagagtctgaaacaaagaagaggaccgtcacctgaacccagcctcgtcagcatcttgatctctgacttccagcctctagagctgtgagaaataaatttttgttgcttaaaagccacccaatgtatgacacttggttgccaaagtctaaactaagatactgagtaactacgttttgtgtaagatgagcgtatcagttttccacagaaaatacatgctttattgaagttgcctctttccaacctctaagtctctgatgtctgttttcatgatggctaaaaattttctgaacttgtttccttatatatcttgtctaatgcagccaacagtttactacctttgctcttaaattcccttttccaacctttgcattcagtaggtcatttgttttggtaaataaaatcttaatagtatgca

SEQ ID NO: 264810 - DNA, 379 bp, Homo sapiens
tcagctacaccgctgtagaatcaccaaacaatgcctccaaatccctcaagaagtcagccatacagccttctaactttaggagcatctcatgttgactttgtcaaatatctcaggatccatcacgaaccacagatgaactagggccccgagcttcaacatcagagagggagatgtttccctgcatttggttctcaaacacacacctctacagacgtggctgaatcccctcttccatccctctagggaagagatggcctgatacggagtctggctagagtactgaaaatttatcataatgtttatacttcatcgtcttctattcttgtgccttctagccttaaaatgtaaccatgatatatacagaagttatccctcaaaa

SEQ ID NO: 264811 - DNA, 720 bp, Homo sapiens
gggttcaatttattcacttgtaagtgatctcaggaagacagtagtcaggagcagagagaataagacaggaaaaggaaggtagtcagtataggacataagaatgaacaggttatcactccaggcaactagagttaaacctctgagaatgagactgaaacacatatctcccagtttttccactgaggggtgaggaggctgggatgcatgttcatctgtttcctactattcccattctcgttagttgggagttcacttccagctttcctatctagatctatagcggtggagcaggcttctgcaactagagagcaccttcaaatagagacacacacaaagctgcctatgtggacaggaactgcctgaaggggccctctggggtgaaccaacagaatatgggcaggaccctgtcacagggtggattctcctggaagcagactctgatattaagagtaatggacagggtattaactaatgagtgccctggcgatcaacactatggatgtgaggagaagggagcagtattgagcagagggtaaagtcaagcttctaagatgcaccagcatgtaacttaggatgagaataaagtctactcagaagagtgaaaaatctaccgtaggatagtcttagaggaatatggccaaggagaggattttctctcctttcattaatgaaaagttataatctatgtgcagcttgccacattatcaagtgagctcagat

SEQ ID NO: 264812 - DNA, 416 bp, Homo sapiens
gggtccgctgggttcgttctgcccactcagcctggcaggctgcactcagcccacgctaccggcctggatcccatgcctccaagggagactgcaagtcagagttggccatgcccagttaaataccagcatacaaggaaacctcacctcgttgggagaatatttcacacccctccaaactatcagcacagtggaaacttggcatgtcccacattaaatctggctgcagctgtctcagggatccaagactgaatgactggtgattttacattgatgttctgctgaaccttcctggtacctgagtggttaaaatctgagaatttctagaagaaaagaaagtacgtctaaagcaatgctagaaaggagctaataaattcttcaggattaacatcaaagtctgatggatgaggcaggcacac

SEQ ID NO: 264813 - DNA, 426 bp, Homo sapiens
aaggttccccaatacctgaacaaattggggttctctgaggaaggaagaagaggagaagcctttagggttcgtttggggcaatcctatctcctccaagcctcaagtagtatatggctgtttttccaaaattaaggccaggagcagtggctcatgcctgtaatcccagcactttgagaaactgaggtgagtggatcacttgaggtcaggagttcaagaccagcctggccaccatggtgaaaccccatctctattagaaatacattagtcgggcttggtggcacatgcctgtaatcctagctacttgggaggctgaggtaggagaatcacttgaacccaggaggtggaggttgcagtgagccgccaagatcgtgccactgcactccagcctgggcaacagagtgagactctgacccaatactcggcgct

SEQ ID NO: 264814 - DNA, 502 bp, Homo sapiens
agcccacagaggtaattccactctgcgcctcaattattcatcgcgctggggctgtctctgcgtggtcacctgcgcgctgcagagtcccccagcgctccggggactgctcgggggctgctggggggcctctgggaggcctgtcgctcgaggggaggccggatcaaggagagtcacgcggctccctggggagaacgggcgccgggccctcacagaccccagagcggccatgagctggtgtgcagccgcccaggaggggaccccactttgccaggaggaagcagctggttgaatagcatttaaaaagagatttgaagattgaggagcagatgttctgagttctggtctggtcctgggagccatgcagccttggtcaagtcagttccatcttcctgaggctacacttcagcatctgtaggatgggagtgttgagcgctagatctatgactggtgggccaaacctgccctgctgcctgtttttgcaaataaagttttattggaacac

SEQ ID NO: 264815 - DNA, 384 bp, Homo sapiens
ctccccagctaattgagcttctttgctgaacaccagtgagatgtgagagatgagtttggattggaattccattatgggttttcaataattaaacattacatgtttggaacctcattcttctgtattactttttaaatattaatctatttacatcagctggacttcctgcagcttgatacgcagtaaacgggagtcacactgagaaagacaactgtgttcttagcttaagacatctttgatgatcaccaacagtaaaggcgacacaaaccctctgttcaacccaaccctgtataataattaccctgccttttagagggtggctggttccacttttttcagcacactcacacattcctcatgactacactgactttccaaattagc

SEQ ID NO: 264816 - DNA, 302 bp, Homo sapiens
aaagctcacggacccgctggtgagggctgcccggactgctgattccactcagccactcaccacccgccctgtctgccaggtgccatgtgcaaggatgctgcattttctgctaatgggggtgggggatggcaggagacataatggggtggggaggggtcattgctattgtcgtcatcactctttgtcaccccaatggcattctataccttcttttgcatctgatctcaaggcatcaagaatatgaaaaacagctcttctgtccccaaaagggagatcttaccttaagcaatgggattaccatt

SEQ ID NO: 264817 - DNA, 391 bp, Homo sapiens
cgtgagccaccgcgcccggccttagagcaagtttttaaataaatgaactttatattgcttttcttttattaccaatctttacgttttcctttattaattaactctgaatattgtcttgaatgtaacactgttcatgaacttttatcttcaatttaagcttatttgagagttggataccatgggatatgaatcaatcaatacagaagcaaagctacattttaaccctagaaatgtaatttatgcagtcttggctgtctatgcaagccataagaaggtctcaattcacattttcagcctttatgatttgggatagaaagaagttgtttttaagcaatatgattaagccctgttactctttgtcttagccatgctgacaggtagcaacatggag

SEQ ID NO: 264818 - DNA, 436 bp, Homo sapiens
ctgggattacagataatttttttaaagttaagattagcatgcaaaaagctggaaagagcttcattttcatacttataattttttgaagccagattatcaaaatcataacttgaatttatcaaagaactgaaatatcaaggcaaccagttaacccaaaatataaagaaagacagactcctcaaaggacagatggaatgcaaacccttgtttacttgggacagatgccagatattatacaagccagtaagaataagaattcagctaaaattttagacaaattagtaaaggctagcatgagtatatagaagccctgggagtcacaaaaacagggaaattcgcatcagtctctaagcctttttctatgaacctcaccagggtcttctgaaacattagggtcagagatgtagaccagataaatcctctctcatgatgcggg

SEQ ID NO: 264819 - DNA, 757 bp, Homo sapiens
agaaggcaaaagaggagcaaagtcacgtcttacatggtggtaggcagaagaatatgtgcagggggaactgccctttatagaaccatcttctgagactcattcacttatcacaagaacagcatgggaaaaacccacccccataattcagttagctcccaccagttcccttccaccacatgtgaggattattacaattcaaggtgagatctgggtggagacacagagccaaaccatatcaattgataattagcagattaaagggaaaaaggcaaatctgttgactaagacagccttcacgtttccctcagcttgactgttacacagttttcctcccgacctccttgtctattttttagttttaatttttttgatacataattgatgcacatatgttgggggtacatgtgattactaaatacactcacaatttgtaaagatcacatcattgtgatcaagatattcatcaccctacatatttgccttttcgttaagctagaaacatttaaattcttatctttagctattttgaaatgtacaatagattactgtaaactacagtcaccctgctgatttattgaacagtaggtcttatttcttttatcaaactctgtatttgcaaggcgggaggattgcttgagcccaggagtttgagaccagcctgggcaatctactgagaccctgtctctacaaaaaatacaaaaatcggcctggcatggtggcacgcacctgtagtcccagctactggggaggctgaggt

SEQ ID NO: 264820 - DNA, 431 bp, Homo sapiens
tcttcttggtgtttttgttccttgtctttaagacctggtctcaaattcagaagttcaataccagcgtcagtttgacttgacacaatctatggttgtagtgtattgatttcacaaattgaacctatggtgagtttgaattatgaattgagagagaaacaactgtggtgaaaactgaagtcatgaggtttatctattcagaacattcaataactaattcaaacacaaagtttttttatatgtttaaggcagataaggtattgaatctgatagctttatgggtgggtaagaagagataataataaaactagctcccaaatagaataacaatttaaaagtaaaataagcatgtgttcatattaaatcactctcgctttcactatcaaaaacaaaactatccatgtaaacagaataaacagatgtaattctactaa

SEQ ID NO: 264821 - DNA, 174 bp, Homo sapiens
atctaagataaggtgtcatttctttaaaataacttgctatatctacaaggtgttttttgtaagccttatggtaaccacaacacaaaaacctgtaatagagtctctgaaaatataaagcaaccaattaaaacatattaccagagaaaattacataaccacaaggtagacagtaag

SEQ ID NO: 264822 - DNA, 399 bp, Homo sapiens
aggggcagggatggcatgagcctctgatctcgcttctacaggacagagattttcttgtagtctagttcaaatctgtgattaaagtttttcccccacatgtaataagattgtacaaaatcatgtttgtttttttcatgaatagaatgaggaaatttctaaagaattgtttaaatgcataaaaatgaagtcttatgtttgtgaatgaacttaaagtttacagcattatgatatctgtgtatatataacagtgtaaatggtattttattttacattcagtcactaataatttttcctgttttaaaaatatgtattttttatttttatttatatttatttatttatttttgagacagagtctcactccagtctgggcgacagagtgagaccctgtctcaaaac

SEQ ID NO: 264823 - DNA, 510 bp, Homo sapiens
ggcaacagagccagactccatctcaaaaaaaaaaaaaaaaaaaaaagcagatgcaaattcccagcacacatactgtaggtctagaatgcagcctggacattcgtgttaagcaagctttccaggtggctctagtacaggaggtccatagaccacattcctaagaaatactgttctgggcatcataacatactggggcaagtccaatacagatttcaaaatcctgtccttcaggagccctttgggctagcaggagagacagacagctaaccagatgtagatactctcaggggtgcctggaacatggagaaaacaggaactaactccgccccagggcaggtcaggagagaagcagagaaatggtgtgtgcactgagcctgggggcccgaggtagacctaaccacgcgtcacggtgggatggtcttgagcatgtaagatgtctcgaacatacagatgcctgtgttgggggcaggcatgtaataggtagcactaggttattttagttgggttttg

SEQ ID NO: 264824 - DNA, 644 bp, Homo sapiens
atttggaagaagaaagacctattaggaagattttgcagtggtgaaaggagatagattacaaaaaccttacaaaatatgagcaaaactgcctgcaaaattaactagtaagagatgatacatgaaggaagaattcaaaggtgattctgacattaaaaatctaaacagttgggacaatagctgtatcatttgcaaacacaatgaaaatgagcaggttgtaaagaaagatcaccattatggttttgaacacattgagtttgaattttgtatgatagaaaggacagccaactggaaatgtcaacttgagatagtttgaactataaatatttgggaatcatctgcatggaagtaatagttggaatcctgggaatgaatcagctcaaagtgtggtggaaaactatttagagcaatgcctagaggaatatgtggctgtatccgtggaagaagggcagacagcaaaagagaaggaaactatagttagagggatagagcagaaaaaatagaactgacatttcttattaaaatttaagaaaatttgcaagttatttgactaggttttctgaaagaaagctattaccattgttaggaagaataactaggtagctttattaccgttcacatgtaatctgctatgttaaacagaaata

SEQ ID NO: 264825 - DNA, 346 bp, Homo sapiens
taaagtgccccctctgcacatgcaacattgagtaaaccttgaaaatatgatgctaagtgaaagaagccagtcacgaaagaccacgttttgtaattccatttaaataaaatgtccaaaatagaccaatacatagaaacaaagtacattggtggtggcccagggttaggggagttggggggaaatggagggatatgcggttttcttcggggtaatgaaaatgatctaaaatttattgtggtgctgtttgcacaactgtgcaaatatactgaaaaccgttgaattttacagtttcaatgggtggcttctgtggtatgttattaatatttctcaataaaacttcaaaaaa

SEQ ID NO: 264826 - DNA, 440 bp, Homo sapiens
agatccttttttctttccctatcaaatctttcttacttaagagaggaattccatttaaaaacaggaaatagtataattagtcttagagactcctcttcccctgatagtgctgcagtgaacatgggtattctcactgcccagatgttttcacttttctctttgttattaagtttttattgcatctacttcatgaggttactagttctagaattatgatttaccctatgttaggaaacgtactcttcaaagtggaaatttccttttaccatgtggtattgtttttttagcttgcatttgggtcacaaactgctttgaaaatgtaaggacaagctatgggttatccctggaaaatgcagctgcccatataatttagcatataatttcagagggttcacaagttactctcttcacatgtcccccacccctagccaaaaatacac

SEQ ID NO: 264827 - DNA, 623 bp, Homo sapiens
tagaaagtccatcccattaatccagagttaattaatatccagagctggtttacaggatattgacatgttctggcatacattaggaatttacacagaatagtaatgactattcaaaaatggggtagttatttaggcagacgactttatcaactaattgtgaaggtagcatattatactatgaagatgaatctctacaatgcagtggctatcaggattgcattaatcatgcaagtatgggcctgattcttatggagaacatttccaaagtgaaaatcctcagaaatagatccgtgacaaggaacaagacaaggatgcccattctcaccacttctattcaatatagtattggaggtccttgctagagcaattgggtaagacaaataaatggcatccaaattggaaaagaagaagtaacattgtctctgcagatgacatgatcgtatattaaaagaaaccccaaagactccaccaaaaagctgttagagctaataaatttagttaaattatggaatacaaaatcatcataccaaagtagtaacatttctatacactaacaacaaactatcccccaaagaaatcaaaacaataatcccatttataatagcatcagcaaaaataatata

SEQ ID NO: 264828 - DNA, 452 bp, Homo sapiens
agaagaaaaaggtaactttaataaccctctgccaactgccagagggaaatgctgaccatctggctcaatatctggccctggagatgctgctagttgacccttgacacccaagtagaagcaggtagttcctcagccacctccatccctgccctcccaagatccaggtgcagattagctgagcttctggcactgctggaatatagagtgtggttcaaccccagcccagagggttcttacaagactggtcctttctagagaggataagaacacaggccgctaagaaaggtatgtaagctcgggagggaggaaagaaaggggaagggggctagaggagattcggacatgagatgcattcaccctatgagttaaaccccagtctccagcatgggagttgacaattccattactgaaccatcagtgttccatgtagtataacctctcatgggtttaaa

SEQ ID NO: 264829 - DNA, 683 bp, Homo sapiens
cccttatcgtgagtttacatctcttggtacaggttaaataagccttagaaactattttaaatttaccactggtctgctgctgtatcacttgccaaatcatgacctaccaccagtgcttctccagccccagaaagaacataggcagaggcagtgttcaagaaggaatcgaccagctaacacagctcctctggttccaaccaataccccagagccacggtcaactgaacacaggttagtctgcacctctgaaattctagaaatagaacttctggtacttcctgatggtcagggtttctcaaatcactatgtacctcttagccagagctcaaagatgcacctcagaacaggtggggctgagctgcagctgaggatactatcaaaatgttacaggagggtggaaatttttgcggtattctcagcaaaggtaacagtgcctggcacatcagcaggtgctcaagaatttgttgaataagtgaatgactatctgggcactcagataaaaaaaaagataccaatcttactcaaaaatagctattatgaagaatctcatttttcttgccttttattccttattctgcccttcattttcaccctaagagggctagaagcatcaaccctctggccccctgacctcaaagagtcctcaagtgtcagcctgacaaacactcagggacaggagtacc

SEQ ID NO: 264830 - DNA, 727 bp, Homo sapiens
cccttatcgtgagtttacatctcttggtacaggttaaataagccttagaaactattttaaatttaccactggtctgctgctgtatcacttgccaaatcatgacctaccaccagtgcttctccagccccagaaagaacataggcagaggcagtgttcaagaaggaatcgaccagctaacacagctcctctggttccaaccaataccccagagccacggtcaactgaacacaggttagtctgcacctctgaaattctagaaatagaacttctggtacttcctgatggtcagggtttctcaaatcactatgtacctcttagccagagctcaaagatgcacctcagaacaggtggggctgagctgcagctgaggatactatcaaaatgttacaggagggtggaaatttttgcggtattctcagcaaaggtaacagtgcctggcacatcagcaggtgctcaagaatttgttgaataagtgaatgactatctgggcactcagataaaaaaaaagataccaatcttactcaaaaatagctattatgaagaatctcatttttcttgccttttattccttattctgcccttcattttcaccctaagagggtagaggagattcggacatgagatgcattcaccctatgagttaaaccccagtctccagcatgggagttgacaattccattactgaaccatcagtgttccatgtagtataacctctcatgggtttaaa

SEQ ID NO: 264831 - DNA, 407 bp, Homo sapiens
ccgaaactcggcaggcaagaagctggtccggcctgacaaggcgaagacacaggacacaggccaccgccgaggaggaggaggaggagcaggtttcagaggtgccgggaagtctgagccttcgccctcctgctctccctccatgtccacctaggaggctgcctacacctgggcaagggcacccgggctcggctggatttccaggaagacccaccctatgacgactgcccccactcccagaccctccccccagcctgggattgagccctggggatgacccggggttggcaagggaagagctgaaatcgccctgtccttggggaccccaccctttgtgccatctgccgtttccctagtgctgggcatccagtcagccctcaataaatgcttatgaatggatcaacaacaaa

SEQ ID NO: 264832 - DNA, 450 bp, Homo sapiens
gggcggattggccactgggccaggatccaggaatcctctctcctggtctgacccagttcaggaatgcagaggccgcccgccccggcaaatgcgttgcagcaagaaggagagttagacgtagagaaacaccgagtttcagaggtgccgggaagtctgagccttcgccctcctgctctccctccatgtccacctaggaggctgcctacacctgggcaagggcacccgggctcggctggatttccaggaagacccaccctatgacgactgcccccactcccagaccctccccccagcctgggattgagccctggggatgacccggggttggcaagggaagagctgaaatcgccctgtccttggggaccccaccctttgtgccatctgccgtttccctagtgctgggcatccagtcagccctcaataaatgcttatgaatggatcaacaacaaa

SEQ ID NO: 264833 - DNA, 505 bp, Homo sapiens
catctggaccctgattttaaggagctactgtagctcagctgttcttggctgtacgtgattagctcagtcaggttgctgttgtagaaccccaaaagttaggttcatgtacccggtgcacagtaagccaaacactgacacattaatgcttagaaaggtttattcaatttggccaaagtatgagggtgggagaagcagattctcaaatatgaccttcctttgcatgtaattgggggctttccctgatgatcaaagctgctcgtgtcccttggccagtcaaatttctggatgccatcagggaggtcagtatgacctaaggatcattgttctttaaaagaaaaacaagtacgttaatcttgcaagcagcccctgggggttaggatataaagttaatcacttgttagtgactgctctctaccaaaatgactacgtgcgagcgatcctgcctggaggaagctaaggacagagaaagaaaaataagtaaaataaacaccttctaaaataaaaa

SEQ ID NO: 264834 - DNA, 330 bp, Homo sapiens
aattacttctaagggctttctaattactgaaatattttgtgaggagatgctttgaaaggctgctggcaagcctggcttcgggagggttccacctgcatagctgcaaagcatcctgactttgaagggtacgaggttcggtttactttttgctcaggaaggaagggggcggggaagggaggaaagaaagaagattgataaaaagggaagaaggaagggagggaaggagaaaggagggaaggaaagaagagagagaaggagaaaggagggaaagaaagaagagagggaaggagtgaggaaggaagaaaggaaggaagaaggaaggaaggaagg

SEQ ID NO: 264835 - DNA, 331 bp, Homo sapiens
ggcccaagacaattcttcttattccaatgtggcccagggaaatcaaaagattggatgcccctggtatagaaaactaatagtgacagtgttcatatttcatgctttcccaaatacaggtattttattttcacattctttttgccatgtttatataataataaagaaaaaccctgttgatttgttggagccattgttatctgacagaaaataattgtttatattttttgcactacactgtctaaaattagcaagctctcttctaatggaactgtaagaaagatgaaatatttttgttttattataaatttatttcaccttaattctggtaata

SEQ ID NO: 264836 - DNA, 148 bp, Homo sapiens
gatggtcaccccacctccatgctgtggccctgttgggctggttttctgatattattagtaatctacatcctgctctgcttctaggaccacaggaggcctggaaatgtctgcagagctcttaatagcacagcaggttgctgcaatgagg

SEQ ID NO: 264837 - DNA, 186 bp, Homo sapiens
attgggttcttgaaatgtgactaatacaaaatgaggtatgttgtaactgtaaagtacacattgtattctaatgacagcgaaagaaaacaatggaaaatttctcattgataatttttatattattgcatattgaaataatatattgactatacagcatatggagtgaaataaaagctgttaatatta

SEQ ID NO: 264838 - DNA, 580 bp, Homo sapiens
tcaagatgaagctgaacatctccttccccgccaccggctgtcagaagctcatcgaggtggatgacgagcgcaagctccgcaccttctatgagaagcgcatggccacggaagtagccgctgatgctcttggtgaagagtggaagggttatgtggtccggatcagcggtgggaatgacaagcaagggtttcccatgaagcaaggtgttctgacccatggcagagtgcgcctgctgttgagtaaggggcattcctgttacaggccaaggagaactggagagaggaagcgcaagtctgttcgtggatgcattgtggacgctaatctcagtgttctcaacttggtcattgtaaagaaaggagagaaggatattcctggactgacagacactactgtgcctcgtcggttgggacctaaaagggctagtagaatccgcaagctttttaatctctccaaagaagatgatgtccgccagtatgttgtcaggaagcccttaaacaaagaaggtaagaagcccaggaccaaagcacccaagattcagcgacttgttactcctcgtgtcctgcaacacaaacgccgacgtat

SEQ ID NO: 264839 - DNA, 336 bp, Homo sapiens
attacccaataataatatttattgaacacctaccatatgttagtccttatcctttccatgcatgatttctaaggtgtatttcttttaaaattctataatactcttacttaaaagactagatgactcaaggaattgggaacaccatagacagcctttaattttttggttcatccattaaattgtgagtctgtaatacactgagaagtagaagacaattatctgatgacttgtactttatattaaatacatgtatggattccaggtcttagagaaaggacagttatcagccctatacaaacagagtcaaagatcagaggacctgtagaaaagaaaaat

SEQ ID NO: 264840 - DNA, 443 bp, Homo sapiens
cagagaaaataaaaggagaaaagaaggcaattttagtctccttgtaaacaggccctcctggtaaatagacaaatgatatttccttggagaaagagaacttgtctataaaatgtccttggcaagatttctctgtatagatgaattatcgtaaagagaacccagagtctatgaagctggttttctggagaatgtcacataagcttttcaacagaatgggatataaaccagagatgttcggtaatagaaatgctccctgctatgtgagggacctcaagactccgcttagagatctcatctatcctgtgccagagaggaatgttcaaggcagaaagagaaaacctgaagaactattcttgatgttcctgaccttcgtctacttcagctgagctcattgttgatcttcttcatatttgaaaatatttaataaagatttaatactaaga

SEQ ID NO: 264841 - DNA, 354 bp, Homo sapiens
ggcctgtctcaaacttctggtcttaaactaatccctctgccttggcctcccaaagtgttgggattacaggtgtgagccactgtgcctgaccacaaggaactctttttaaaatgtatttattgattttgtggtagatagtatattcatctggcccaacaattaaaaatgaagtcacctcctatcttttttttttttttttttgagacggagtcctggcctgcctcctatctttgtttctcaaccactcagttagttcccctgccaagagaaaaacaatagacaatgtttttctctgtttatctttttaaaggcatttgatgcacacacaagccaataagaatatatcctcctttt

SEQ ID NO: 264842 - DNA, 471 bp, Homo sapiens
tgctgagatagggtctcactttgtagcccagactggagtacagtggcccaattttggctcaccacaggctcgacctcccaggctcaaatgatcttcctgcctcagtctttcaagtagctggcgacacaagtgtgcactaccactcctggctaatttgtgtatttttggtagagccagggttttgccatgttgcccaggctggtctcaaactcctgggctcaagtgatctgcccgactaggcctcccaaagtgctaggattacaggtgcgagccactgcacctggcctgggttttgctgattttggtattatttatcatctacgtgctaagtgttttacatacataatgacatttaatcctcataagaactctgtgacaaaatccccatttttcaaatggtttttaagagaggtaaaatgtttccccaattacaaagctacagcatcaggatacgaagctacagcatcagga

SEQ ID NO: 264843 - DNA, 1902 bp, Homo sapiens
gagagccgggatcccgcccagccgatgtcgcctggagaagcgacgcagagtggcgcccggctgccgaccgctatggcctattgaagcacagtcgcgagttcttggacttcttctgggacattgcgaagcctgagcaggagacgcgacttgcggccacggagaagctgctggagtatctgcgtggcaggccgaaggggtccgagatgaaatatgccctgaagcgtctaatcacgggactcggggtcgggcgagaaacagcccggccctgctacagtttggccctggcacagctgttacagtcttttgaagacctccccttgtgcagcatcctgcagcagatacaagaaaaatatgacctgcatcaggtgaagaaggcaatgctgagacctgctctctttgcaaacctgtttggagtgctcgccctctttcagtcaggtcggctggtgaaggaccaggaggcactgatgaagtcggtgaagctgctgcaggccctggcccagtaccaaaaccacttgcaggagcagccccggaaggccctggtggacatcctctccgaggtctcgaaggccacattgcaggagatcctgccggaggtcctcaaagccgacttgaatataatactcagctcccctgaacagctagagctcttcctcctggcccagcagaaggtgccctccaagctcaagaagctggtgggatccgtgaacctattctcagatgagaatgtccccaggctggtgaatgtgctgaagatggccgcctcctctgtgaagaaggaccgcaagctgcccgccattgctctggacctgctccgcctggcgctcaaggaagacaagttcccacggttctggaaggaggtggtggaacaagggctgctgaagatgcagttctggccagccagctacctgtgtttccgcctgctgggcgcggccctgcccctgctgaccaaggagcagctgcacctggtgatgcagggagacgtgatccgccattacggggagcacgtgtgcactgctaagctcccaaagcagttcaagtttgccccagagatggacgattacgtgggcaccttcctagaggggtgccaggatgaccctgagcggcagctggccgtgctagtggccttctcatctgtcaccaaccaaggcctccctgtcacgcctactttctggcgggtcgtgcggttcctgagccctccggccctgcagggctatgtggcctggctgcgggccatgtttctccagccagacctggactccttggttgacttcagcaccaacaaccagaagaaagcccaggattcatcgctccacatgcctgagcgagctgtgttccggctgaggaaatggatcatctttcgattggtgagcattgtggacagcctgcacctggagatggaggaggccttgactgagcaggtggccaggttttgtttgttccactcgttctttgtcacaaagaagcccacatcccagatccctgagacaaagcacccgttctccttccctttggaaaaccaggcccgagaggctgtcagcagtgccttcttcagtctgttgcagaccctcagcacgcagttcaagcaggcaccgggccagacccagggtgggcagccctggacctaccacctggtgcagttcgcagacctcctgttgaatcacagccacaacgtgaccaccgtgacacccttcactgcgcagcagcgccaggcctgggaccggatgctgcagactctgaaggagctggaggcccactccgcagaggccagggctgctgccttccagcaccttctgctcctcgtgggcatccacctcctcaaagtccccctgcagagagctgttgacctgcttgggtgacatccaagacctgcatcaggaaaaagtctgggaagaaaaagcccgc

SEQ ID NO: 264844 - DNA, 985 bp, Homo sapiens
acccacgcgtcgcccacgcgtcggtggaacaaggagcagctgcacctggtgatgcagggagacgtgatccgccattacggggagcacgtgtgcactgctaagctcccaaagcagttcaagtttgccccagagatggacgattacgtgggcaccttcctagaggggtgccaggatgaccctgagcggcagctggccgtgctagtggccttctcatctgtcaccaaccaaggcctccctgtcacgcctactttctggcgggtcgtgcggttcctgagccctccggccctgcagggctatgtggcctggctgcgggccatgtttctccagccagacctggactccttggttgacttcagcaccaacaaccagaagaaagcccaggattcatcgctccacatgcctgagcgagctgtgttccggctgaggaaatggatcatctttcgattggtgagcattgtggacagcctgcacctggagatggaggaggccttgactgagcaggtggccaggttttgtttgttccactcgttctttgtcacaaagaagcccacatcccagatccctgagacaaagcacccgttctccttccctttggaaaaccaggcccgagaggctgtcagcagtgccttcttcagtctgttgcagaccctcagcacgcagttcaagcaggcaccgggccagacccagggtgggcagccctggacctaccacctggtgcagttcgcagacctcctgttgaatcacagccacaacgtgaccaccgtgacacccttcactgcgcagcagcgccaggcctgggaccggatgctgcagactctgaaggagctggaggcccactccgcagaggccagggctgctgccttccagcaccttctgctcctcgtgggcatccacctcctcaaagtccccctgcagagagctgttgacctgcttgggtgacatccaagacctgcatcaggaaaaagtctgggaagaaaaagcccgc

SEQ ID NO: 264845 - DNA, 1230 bp, Homo sapiens
gaaaagctctgggattgggacatgtggatgcggatgcctgaacaacgccggggccgagagtgcatcatccctgacgtttcccgatcctaccactttggcatcgtcggcctcaacatgaatggctactttcacgaggcctactcctggcgctcaaggaagacaagttcccacggttctggaaggaggtggtggaacaagggctgctgaagatgcagttctggccagccagctacctgtgtttccgcctgctgggcgcggccctgcccctgctgaccaaggagcagctgcacctggtgatgcagggagacgtgatccgccattacggggagcacgtgtgcactgctaagctcccaaagcagttcaagtttgccccagagatggacgattacgtgggcaccttcctagaggggtgccaggatgaccctgagcggcagctggccgtgctagtggccttctcatctgtcaccaaccaaggcctccctgtcacgcctactttctggcgggtcgtgcggttcctgagccctccggccctgcagggctatgtggcctggctgcgggccatgtttctccagccagacctggactccttggttgacttcagcaccaacaaccagaagaaagcccaggattcatcgctccacatgcctgagcgagctgtgttccggctgaggaaatggatcatctttcgattggtgagcattgtggacagcctgcacctggagatggaggaggccttgactgagcaggtggccaggttttgtttgttccactcgttctttgtcacaaagaagcccacatcccagatccctgagacaaagcacccgttctccttccctttggaaaaccaggcccgagaggctgtcagcagtgccttcttcagtctgttgcagaccctcagcacgcagttcaagcaggcaccgggccagacccagggtgggcagccctggacctaccacctggtgcagttcgcagacctcctgttgaatcacagccacaacgtgaccaccgtgacacccttcactgcgcagcagcgccaggcctgggaccggatgctgcagactctgaaggagctggaggcccactccgcagaggccagggctgctgccttccagcaccttctgctcctcgtgggcatccacctcctcaaagtccccctgcagagagctgttgacctgcttgggtgacatccaagacctgcatcaggaaaaagtctgggaagaaaaagcccgc

SEQ ID NO: 264846 - DNA, 1141 bp, Homo sapiens
cctaagctggactgcgcgggcaccgatctcgccaagatcctgcctaagtggaacctggcgctcaaggaagacaagttcccacggttctggaaggaggtggtggaacaagggctgctgaagatgcagttctggccagccagctacctgtgtttccgcctgctgggcgcggccctgcccctgctgaccaaggagcagctgcacctggtgatgcagggagacgtgatccgccattacggggagcacgtgtgcactgctaagctcccaaagcagttcaagtttgccccagagatggacgattacgtgggcaccttcctagaggggtgccaggatgaccctgagcggcagctggccgtgctagtggccttctcatctgtcaccaaccaaggcctccctgtcacgcctactttctggcgggtcgtgcggttcctgagccctccggccctgcagggctatgtggcctggctgcgggccatgtttctccagccagacctggactccttggttgacttcagcaccaacaaccagaagaaagcccaggattcatcgctccacatgcctgagcgagctgtgttccggctgaggaaatggatcatctttcgattggtgagcattgtggacagcctgcacctggagatggaggaggccttgactgagcaggtggccaggttttgtttgttccactcgttctttgtcacaaagaagcccacatcccagatccctgagacaaagcacccgttctccttccctttggaaaaccaggcccgagaggctgtcagcagtgccttcttcagtctgttgcagaccctcagcacgcagttcaagcaggcaccgggccagacccagggtgggcagccctggacctaccacctggtgcagttcgcagacctcctgttgaatcacagccacaacgtgaccaccgtgacacccttcactgcgcagcagcgccaggcctgggaccggatgctgcagactctgaaggagctggaggcccactccgcagaggccagggctgctgccttccagcaccttctgctcctcgtgggcatccacctcctcaaagtccccctgcagagagctgttgacctgcttgggtgacatccaagacctgcatcaggaaaaagtctgggaagaaaaagcccgc

SEQ ID NO: 264847 - DNA, 432 bp, Homo sapiens
cctccatgatttctgactttactagcactcctgctaaagtaggatagcaacactcaccttttagagacctacacattacaaaaccgagcttacagaatgcacacaataaattttaaaaaaattttttaaagccaacaggcaaaaatatgtctatcaaataactcacgatgttaggaacaatcaacagttgtaaaaaaaattttttttctctacactaaacaagtgaatgtttgcttttttttttccttttaaataaattatagttactgattgtgttcatattatacatagatgggatcagagttggaggttttttataaattctattgttgtggtacattttaatttactaaactgagtatacatattcttggtaactttctaccacctctaaaaatgagtctttgacagaatatattgtgcaaaaaaaga

SEQ ID NO: 264848 - DNA, 820 bp, Homo sapiens
gtccacagatgaaaaaggaagaaatgaaaccatcctcattcacaaacctcataatcagttacaaaagaaaatcccaagaaactcccaaaaagccacaagaactaacaggcaaatcaagccagggtgtttcaacagcgccaatacaagtaagattctgatggatcccactgatgctgaatgtacacatccttagtgacaggagatcacaactctctgaaatggatagacaaccccaaaagtaattccatccaagagatttcattctttcaatcatcagtgcttcctgaagttaacaagttctccatctcatgttctccactaatagtcttcagaaaaggccgtttaagactttaaaaaaaaaaaaaaaagagtcagacttctgatatccagttccctatggatggagcttgtaagtcatcactccatcataacaataagtaaaaagctgaacagattggaaaaaaaaatttaaaactcttcttttatccatgataaagatggacaacacaggacaaaccacagtcccaacacaggaaagagagaggtgagtacagggatcacagcttacttgagctgagtcatgagcagaaacaactgggggaggcagtgcctgggtgagagaccctcaactgtaattgataaaacctgctggagcctcaatgtggacaagtctgagaaataaaaactccaggaggacccattcataaggcagccccacactcatgagttttactccaggagctcaaccaagttctcacagtaaatatcagaaaaattccctcatgctttcagcaaaacaaggggaaaatgaaccattttg

SEQ ID NO: 264849 - DNA, 467 bp, Homo sapiens
gtccacagatgaaaaaggaagaaatgaaaccatcctcattcacaaacctcataatcagttacaaaagaaaatcccaagaaactcccaaaaagccacaagaactaacaggtcagtttagaatgatcagtctacaaaaaacaaactatttctatatactggcaacaaataattggaaattgaaattttaaaaataccatttatgatagcattaaaaaatatcaaatagtaagagatgactctaacaaaatatgtgcacattacatgtgcttaaagttataaagcaatgctaaaaagacactaaagaaggcctaaataaaaaggtattgttatgatgtcaattctctccagttagatttacagattcaatgcaacctcaatgaagtcatcggcaagctttttatacgaagtaactagctgattcaaaaccttacatgaaaatgccatggtccaaaaataaccaaagcaat

SEQ ID NO: 264850 - DNA, 344 bp, Homo sapiens
ccaccggtccccttgcttgtggaaactcacatctcctttaaggcctgaaactgaagtcactccttccaggaagcctccttctaaaaatgtctttcctcctgtctttttgcttccagagaactttgaagatggatatggaatttctaggacgccgtgttaaattagagttatgagtgcatatgtcttttttcccgctaggcagtgagctctgaatgcaagcctacttatgtttgactttgtactccccacagaacccattccggtaagagttcatgctcttgagctggcatgggggctggccaggcctcggggtgctgtgtgtggccagggaaaaaaagatgact

SEQ ID NO: 264851 - DNA, 417 bp, Homo sapiens
cctttccacagcccctgacaaccatcattctattttctgttgctataaatttgactattttagatacctcatgtaagtaaaatcattttagtcttttttgtgactggcatattttacttagcatcaaggttcatctatgtagcatgtgtcagaatttcctttttaaggcagaatgtatataccacattatgttcattcattaattggtctgtggatttgggttgctttcacctctttactgtcgtaaataatgctatgaacatggatttgcaataaaacattttgtggccgcgtgtggtagctcatgcctataatcccagcactttgggaggctgaagtgggaggattgctttagcccaaaagttcgagaccagcctgggtaacatagtgagagctcgtctctacaaaaaataaatt

SEQ ID NO: 264852 - DNA, 363 bp, Homo sapiens
cagagaacaaaaacacatcagctcatgaaaattaccagcagagccgcccttactcccagttctcatctcccaaaacaacaacaacaaaaaacatatagctgaagaaaacaagcaaaaatccaaacagaattaaacacccctctttgggaaaattaaagaacattctgaattgaaattcaaaaactaagattagaactgaagcaaaaaaaaaaaaaatacaaataatgagacaagagttgactaacctcagacatggcaaacaagaaaaaaattatattacaaatgaagactatattacaagaaagaataaatttgaatggaaacatgataaacattatcggacaaaagcagaaagagaacaaa

SEQ ID NO: 264853 - DNA, 362 bp, Homo sapiens
agagcatccggacagacgtttcaccaaggtggatggaatgaccagttgagcacatggaaagtcgcccagcatctccagtcataggagaaggcagattaaagccacggggagccgacactgtggtcccactggcatggctgaaattcagaagccctgagtgtggcatgaggatgtggaacagctggatctcatccatcgctgtgaagttgtgtagccactccacaaacgtgtggcaaacagccgagccgggagaagggaagacgtgttcaaagattcatatgtggccaggctcagtggctcacgcctgtaatcccagaactttaggggccaaggctgggggatcgcttaagcccagtgcttca

SEQ ID NO: 264854 - DNA, 506 bp, Homo sapiens
tgctcactgtccatcattgccccatccagccacactggtcagctttcagctctgggaacaacctctgtttacagggtctttcctccacctggaataccggcccccagctcttggctatctccttctcctccttctgggattgggcattggatgaaattgcacctgcttagagaagcctgtcctgacacccacctgaagtagattttgtgctgttgtctccaccatccacacttgtcaccattgctcattgcttttgttcacttgtttgtttactttagtgttgataggtccccaagactgtgctctccatatgggcagggaccaaggttgtcttgttcacgattgtgtccatagtgccttgtacggtgcctgttctgtagggatgatagatccttgtgaatgaatgaatgagtgaatgaatgaatgaaaaggcggaggttgcagtgagctgagatgagccattgcactccagcctgggtaacaagagtgaaactccgtctcaaaaa

SEQ ID NO: 264855 - DNA, 615 bp, Homo sapiens
tgctcactgtccatcattgccccatccagccacactggtcagctttcagctctgggaacaacctctgtttacagggtctttcctccacctggaataccggcccccagctcttggctatctccttctcctccttctgggattgggcattggatgaaattgcacctgcttagagaagcctgtcctgacacccacctgaagtagattttgtgctgttgtctccaccatccacacttgtcaccattgctcattgcttttgttcacttgtttgtttactttagtgttgataggtccccaagactgtgctctccatatgggcagggaccaaggttgtcttgttcacgattgtgtccatagtgccttgtacggtgcctgttctgtagggatgatagatccttgtgaatgaatgaatgagtgaatgaatgaatgaaaaggcggagtcacttaaaagaacaaaagcatttgtaatagacttgctattcctgtttattctttgaaatttgaggtaattcttaactagccacttaggatctccattaagaaccctagtcaagacctttgggtattacctcaaagtaaaacaaagtgggagtattttggatctttggaagttaactt

SEQ ID NO: 264856 - DNA, 322 bp, Homo sapiens
ctgcctcagcctcctgagtatctgggactacaggcgcccgccaccatgcctggctaatttttttgtattttttagtagagacggggtttcaccgtgttagccaggatggtctcgatctcctgacctcgtgatccacctgtctcagcctcccagattaaacaacatacgtctaagtaatatatgagtgaaagaaaaagtctgatgaagagagttaaaaatatttgaaataaatgaaaatataacttatcaaaatgtctaagatacagcaaaagcagtgcttagaaatttatagtattgaatacatatattagaaaagaagatt

SEQ ID NO: 264857 - DNA, 401 bp, Homo sapiens
aatagtttctccatttgtttcagggattcagcttataaacaaaagccaaagtaaggaaataatatctagaatgtggaataaattacatatttaaaataaagaaatgtaggctgggtgtggtgggtcatgcctgtaatcccagcactttgggaggctgaggcaggcggataacttgaacccaggagttcaagaccagcctgggcaacatagtgagaccctgtctctccaaaaaatacaaaaattagctgggtgtggtggtgctcacctgttgtcccagctacttgggatactgaggcaggaggattgcttgagcctgggaagccgaggttacagtgagctgagattgtgccactgcacttcagcctgggtgacacagtaagaccctgtctttaaaaaaaaaa

SEQ ID NO: 264858 - DNA, 664 bp, Homo sapiens
aaggttaacataaggctgggcgcagtggttcacacctgtaatcccagcactttgggaggccgaggcaggcggatcacctgaagtcaggagtttgagaccagcctgatggtagtaggaggtggggcctttgggaggtaattaggcttagatgagatcgtgagcatggagccccatgatgggattagtgcccttataggaagaggaagagacacccacagcttcctgtctttctgcttagaacagaataagaagatggctatccatgagctaggaggatagccctcatcagaacccagccatgaaaccaccccgatcttggacctcccagcctctagaactatgagaaataaatgtctcttctttaagtcacctagtctatggtatttagttataccagcctgagctaagacaccagagtaattaggcaagaaaaagaaagaaaaggcattcagattaggaagaagtaaaattgtctctattcacagctgacatgatcttaatgtatagaatatctaaggaatcaactaaaaagcttagaactgattaacaaattcaggatggttgcaagatataagatcaacatacaaaaatctggtgaatttctacacactagcaatgaacaaaccaaaaatgaagttaaggaaatcccacttaaaatagcatc

SEQ ID NO: 264859 - DNA, 372 bp, Homo sapiens
gtacatagccatcatggaatactatgcacccattaaaaataatgaaataatgtctttgcaacaacatgaatgtagctggagggcattatcctaagcaaactaacacagaaacagaaaaccaaatactgcgtgttctcacgcagtgagagtgggagctgaacatcaagtacacatggatgtaaagatggcaacaatagacatgggtctactagaggtggtggtgcggcagggtgggggtgggggttgtgtggcagaggaacagctgaaaaactacctatttgatactatacccagcacctgggaaacgggttcagtcataccccaaacctcagcatcacacagtatacctttctaacaaacttacacatgtat

SEQ ID NO: 264860 - DNA, 369 bp, Homo sapiens
aaataacactattaattttgtttggaccaaaaaaattttctccacattcataagcaaaatttatttcaattaaacacatatttatgaaatacagtgcctggtatttgaaatcatcaccattgttatgtatgccaaatatctggaggaaaagaagagaaagtggtcatagatctgaatatttaaattacatgatgttgaatacatctatttggaaaaatcttattaattctaaattctttactttttacccaaatattgggcatttatatagatatagcttgcatcttgccttactttacaatttaattccccctaccaaattgctcaaaccatacttctccaaagattctatgagttagaccaaatata

SEQ ID NO: 264861 - DNA, 394 bp, Homo sapiens
gtttttcttatctgcaaaatgacaataatgatttttttagggttatattgaagatgaagatactgtatgagatatattgtggacgaggtgactctaatgtctcctctgcctagaatgctcttcccttgtccaccttgacgtggtcacctcttgcccacctttagcttcataacttgctgcctcatgggagcatttactggtgtggcctccagcctagggtagtttccctccaaattccacacttctttttatgcttgtcatacttactcctacttgtcctctgtctgccttctttctaagatgttaagctccatgagggaaatgtctggcttgttaaccactgtttcctaaccttgacacataatgagtattcaataaatattttttgaatgat

SEQ ID NO: 264862 - DNA, 440 bp, Homo sapiens
aagagtacagtatggaaagggggggaaaataataataactttatcatggagaaagctgacaaacaccccctcagccagggggccaaggttgacatgatgtgatgaggacagtgcttaactctgtggtctccctcccgcaaacccacaaccccagtcgaaccgtgagagacacccaaccagtcctctgcaaaactgtcaaggtcgtcaagaaccaagaaagcctaagaaactcacaaccaagaggagtccaaggcaacaggatggctaagtgaaacgcggcaccctggatgggatcctgggacagaaacaggacgcgagggaaatactggggacatctgaatgaaacatgggctctaataataatctatgacaacatgggcccattaattgtggcaaacgtatcatacgaatgtgaaatattaataacgggaaactgggat

SEQ ID NO: 264863 - DNA, 560 bp, Homo sapiens
ccattttagaaatgtgttgtcattagttaagtcctcttaaatagattattattattttcctatagaaaatgcagaggcctgaggtgaacgcaagggtcataggcatccattaagatacataactatatagatatcttaaaactctgtcacattgtttccttaatcccttagacctatttcctcccatgaaaactatcataagctatgcttttgttatggtctatagaattttcaaaggacaaattttttttttttaggataaagatcttgtgattgtccgtgggctcacatggtttcttttgttcaattttttcaaaagatttctttttcaatactgttgtcccaccatgatagttgacatggcatgtaattacagacagaagtgtgactgtaaacatattagtgtttctgttagtgttggcataagcttgcctttttgtttaaacaatggaacatgatttaattttatctcatttgccttttgtttatcttcagtccttgatttattaacattttgccaattgaaaacacaataaaaaatgccttgcaggaaggtttga

SEQ ID NO: 264864 - DNA, 355 bp, Homo sapiens
acacatgtctgtgttttaaaacggagttacccccatcatggataacccagcctccacatccacctcatgttgatgttgaggaaaaacaaagaacactggaaagtgtaaactgcgtctgttctggaacagaaaatacctccaagagggactgatttccacatggagtttagtagctcagcgatgccacccacaaaagcagatcctgtgtttgcttttgtgtcatgagactctggagacagaatgaagacatgcttttatgcatgcagtatgattttgtgattagggttttgttcctgggctgggcttgacaaagttcttctgcaaagagtagtaaatattttaatctttgcaagtc

SEQ ID NO: 264865 - DNA, 303 bp, Homo sapiens
gcggctgtaggggagcagcggcagtggcggcgacggcgaggaggtgttcggtttgcgcagcgtagaaacgcccgcagcttcagagaaggagttcttgtgggaccaaattaggcattctgaacccacgccggcttagctgggccgagtccaggcgctgccgcacgtacagttttggtggcggtgacagacactgttcttgactctaggggcctattaggccgacgtctgaggcgcagatcgctggctctcgacgcattactctttacgccttacatttctgtcttccttcctgggtcagtgatt

SEQ ID NO: 264866 - DNA, 209 bp, Homo sapiens
ctagagggccgtgcaccatggcctcaaggaaccaaaagtgaccaggaggtggcagaaagtctcaggcatcgcagcccccgactgcacgccactagcccttcctgctctgcacatgctcatctcacttgccagccacacggggtgaagaagttgagatcacccgctgcagtctcagcttgtggccctgccacccacaaaggatcaggtac

SEQ ID NO: 264867 - DNA, 210 bp, Homo sapiens
acggtgctttgggttgagtgagctggtgagtgaacacgaggtgaacagtggatgtcgctttttcgttatcattggaaacatctgattgatcacaacaagcttttcttttttttttttttctttttttgagactgagtctccctctgtcaccaggctggagtgcaatggcatgatctcggctcactgcaacctccacctgctgggttcaag

SEQ ID NO: 264868 - DNA, 447 bp, Homo sapiens
tagtttctgttatctctgagctctattagagcacacagtatttactgaataaaatggtctgtcattaatggcacaaatattttcctagctagtcttttaactttatgttttcttacacagtaaaatttagtttcattgagttaaatctatccacgttttcctttaaagcatccacgttgatgcttgttgtacgcttaaggcctttttcacccccaagatcaggaaaatattcacccacactttttatatctcattctagttctctaaaaaattttttggtcttgctgaattgagcagaattacattttttgttttgttttgttttttgagacggagtcgctctgttgcccaggctggagtgcagtggcacaatcttggctcactgcaacctccgcgttcaggtgattctcctgccttagcctcctgagtagctgggattgcaggcat

SEQ ID NO: 264869 - DNA, 403 bp, Homo sapiens
ggctccagcatacctccaccctgagatgtcctcacacatcagacgctgacctagcagagcccacactatcttccagtaaagaagaacctgcccttacagagaactgggcgcgcagcactgcagtagcaccttaaggacagcagcacagtgtcctggacttgccaccagtgtcaactctgagtgtagacacaactgaaactgttccttcatacacatgcagttcagctttcagacactcaacaagagccttgacaccctcaagctggggtgaggacacagtgaggaggtgccatctatgaacgaaaaagctggttctcagcagacaccaaatctgctgccaccttgatttggacttctcaacctctagaacactgaaaaatatatctgttgttcataagcaact

SEQ ID NO: 264870 - DNA, 786 bp, Homo sapiens
tctggaaaaaaagcattcaaagttgagtggaaaagagttggaaatatattttaaaggtaattatagaaaataaggttagtacaaaattgacaatgttgttatgtttctataatatggttatgaataccttcaagttaactctaggttaacaagcttgcatgtttcttacccttactcattcttactccatagacaaaaggtccaaatcactgacactattcactagaaaggagatttcttagtaggcatgtgctttagtattgaatatgctgtaaggttatttgtattttctaaaaagtagaattccaaaattagctttttgttgttaaaaaaaaaaaagaaaactagtaacccatgtatttttacctaaaacaaggccacaacccaacctaactgcaaacttcttttagcttaaattgtacccctctttggttacttcaaaaaaaaaaaaaaaaaaaaaagaaataccaaagcaagttttcccttcctcttatctctcagtgtcttcgtagtttagtgaaaattttttagtgtaagcaacagtaaacacatttactaagtccttttatttacctttttaaggcagttttacttgaaaccctgatagaataaaattgctgtggaaaaaataggattgagatggtttctgcctgtttgtgaattgagatcatacctacatgagtgggagtgaataacatatttgcagtgaggctgtaacatagatacaggttgatcatccctaatccaaaatcccccagaattcaagatgctccagaatctgaaaca

SEQ ID NO: 264871 - DNA, 1187 bp, Homo sapiens
aggcagagagcccgaaaggaccagacgcccaggtcgcccgcatcccgctgccgcagagagagagacagcgcgccccggccctgctccccaggcttcgcccgggcgccctcaactctgtccccagagactgagcacctgtcctccgcctcggcctctgctgagagccctctcctctggagcacacaccacccctgcagcccaagaagagtcccagccccacgccggctaccaccatggcggagaccaacaacgaatgtagcatcaaggtgctctgccgattccggcccctgaaccaggctgagattctgcggggagacaagttcatccccattttccaaggggacgacagcgtcgttattggggggaagccatatgtttttgaccgtgtattccccccaaacacgactcaagagcaagtttatcatgcatgtgccatgcagattgtcaaagatgtccttgctggctacaatggcaccatttttgcttatggacagacatcctcagggaaaacacataccatggagggaaagctgcacgaccctcagctgatgggaatcattcctcgaattgcccgagacatcttcaaccacatctactccatggatgagaaccttgagttccacatcaaggtttcttactttgaaatttacctggacaaaattcgtgaccttctggatgtgaccaagacaaatctgtccgtgcacgaggacaagaaccgggtgccatttgtcaagggttgtactgaacgctttgtgtccagcccggaggagattctggatgtgattgatgaagggaaatcaaatcgtcatgtggctgtcaccaacatgaatgaacacagctctcggagccacagcatcttcctcatcaacatcaagcaggagaacatggaaacggagcagaagctcagtgggaagctgtatctggtggacctggcagggagtgagaaggtcagcaagactggagcagagggagccgtgctggacgaggcaaagaatatcaacaagtcactgtcagctctgggcaatgtgatctccgcactggctgagggcactaaaagctatgttccatatcgtgacagcaaaatgacaaggattctccaggactctctcgggggaaactgccggacgactatgttcatctgttgctcaccatccagttataatgatgcagagaccaagtccaccctg

SEQ ID NO: 264872 - DNA, 1084 bp, Homo sapiens
atctagaggatcccagtccgttcgatgagcacctgtcctccgcctcggcctctgctgagagccctctcctctggagcacacaccacccctgcagcccaagaagagtcccagccccacgccggctaccaccatggcggagaccaacaacgaatgtagcatcaaggtgctctgccgattccggcccctgaaccaggctgagattctgcggggagacaagttcatccccattttccaaggggacgacagcgtcgttattggggggaagccatatgtttttgaccgtgtattccccccaaacacgactcaagagcaagtttatcatgcatgtgccatgcagattgtcaaagatgtccttgctggctacaatggcaccatttttgcttatggacagacatcctcagggaaaacacataccatggagggaaagctgcacgaccctcagctgatgggaatcattcctcgaattgcccgagacatcttcaaccacatctactccatggatgagaaccttgagttccacatcaaggtttcttactttgaaatttacctggacaaaattcgtgaccttctggatgtgaccaagacaaatctgtccgtgcacgaggacaagaaccgggtgccatttgtcaagggttgtactgaacgctttgtgtccagcccggaggagattctggatgtgattgatgaagggaaatcaaatcgtcatgtggctgtcaccaacatgaatgaacacagctctcggagccacagcatcttcctcatcaacatcaagcaggagaacatggaaacggagcagaagctcagtgggaagctgtatctggtggacctggcagggagtgagaaggtcagcaagactggagcagagggagccgtgctggacgaggcaaagaatatcaacaagtcactgtcagctctgggcaatgtgatctccgcactggctgagggcactaaaagctatgttccatatcgtgacagcaaaatgacaaggattctccaggactctctcgggggaaactgccggacgactatgttcatctgttgctcaccatccagttataatgatgcagagaccaagtccaccctg

SEQ ID NO: 264873 - DNA, 722 bp, Homo sapiens
gttgtcagaagccctgagaaatcagcttggaactaataagcccttgacctttcagtattggtgacgtacttgagattccagctgtccccagcttctgcaaaagggaggacattactagcttactaataataatttaatagtgtgtgaagaaatcaggggatgattctctttggtggaattaagtctatttctcagtcaagaagaaagcaatttataagtaaagatactcggcagtgctcagtggtatagtggagtcctggactctgggactgagttgtaaggtcagcgtaaaaagcaacactgaagttcagtcagaagttcccatgaaaattccttagggtttccctggaggtctgtgtgccattccttggtaagtttcatgtagccagtgtttcctctgacagaagttgggaccagtttctgtttctacagctgagcttcaggtaggagggcccgtgtgcagatctgcattctcaagcaccagaggcacccctcagtaccaggagatccagcctcatctcccactgcatgcctgatgtagagcatattctcattccttcagttaaaccaattaacgattgccaacaactttaagtgccagggacttaagtgttcagcagtgaacaagacagagttaatgccctcttggcacctaaggcaggaaacaaacaaatagatatatggtataatgccaaaaagtggtaagcactaagaaaaaaaaa

SEQ ID NO: 264874 - DNA, 388 bp, Homo sapiens
cccagcagagccagtgtgggtgaggctgggaaatgtgtgggcaggacctaggtcctgggaagccccagtctggcccacactcacttccacagacccattttcacacccccgttgtctggcctaactgatcttctgggcagttcccaaacacacccaagcattcgtctgccttttccctccccaccccagcaccctctcagccacctgaagctactgtgtcctttaaggcccagttccagcagcacctccctctttctccagagcctgtcctcagcctctgacctgtcaggcagctggccttggaagcatcacatgttagagccggagaggcttaatcatctgtctattctatggcttctgctggccccagatcttcctctggtaacaa

SEQ ID NO: 264875 - DNA, 444 bp, Homo sapiens
cccaacatataaactacaaaggaccacactgtgggcagttagagtgaagtttggtgtactagtttcatttttcataaaagaaaaagtcaagaggaaggaagcaatgctgtaagtttagagaagagcctgatgaatttgaagtgctggtaagcttagttagtaataatgccacccaattttcagataccttttaacatttgtatagcactttactcatgatgtggcacttataattagaaagacaggataggcaagtggaattagcctcattttttacaggtgaggaagttgatgcagaactttagcttaccatgtacgaatagcttgcaggtggtgagattgggacttgatccatatcttcatactttaagttcaatatttttcctatatcctcccccactcccttccccacctggcttggaggccgcctagcaatcattcaaa

SEQ ID NO: 264876 - DNA, 307 bp, Homo sapiens
tcctttcgcaacttagtggtgctgggacaactggatatccacatggaaaaggatggactgcaccctccctcaccctacacaaaaaaatagctcaaaatggatccagtgtaagagtcgatactgtgagacccattttgtcagtctgctgggtaccgtaacagacaccgcagactgtgaggcttaaacagcatcttatttcctttgttctggaggctggaagcctggggtcaaggtgcaggcagggttcgatcctccgggtcctcaccccattctgtgtagacggcgtcttctctgtgtcctcatgggt

SEQ ID NO: 264877 - DNA, 512 bp, Homo sapiens
tatttaaaagtatatagataaattacctgaaggaaaaaagaaaatattataagtggttaaatgacttacagccatactgacggttaattccaggcttacattcaaacccatatactctggataataggattatggtttactaagaggggttttgtttgtttgttttagcaatttctatatttctataaggagcaagaattttataaaaataattattatatttacatatctagtttattatattaactataaaccatatctcaattctccattttgtggtatgttggagggacccttcccttcctttccctttcccttttccacgtcgttggctcttacattgtcaagtctgataattcttaaattctattctgtaaccagttaggattttatgtttggttattgattgatttcaaaagctgaaaataaacagcatgaacattattacaaccatctgaatattgttgattgcagatcttagcttactgtgtttatatttccttttgggatca

SEQ ID NO: 264878 - DNA, 107 bp, Homo sapiens
tcgctgcttccatccctccgctttgggggaactgcctgctggtgttctgggttctctatcaggggctggggaaggatagaacagagggcggagcgcgcgcagggtgg

SEQ ID NO: 264879 - DNA, 203 bp, Homo sapiens
aaaagcccggaaccccactccaccctcaagtcagcttcctcccagcaggcagggacctcgccacagtcctcacagggccgtctcttgcctcggctgcctccacctccagcctagaggcaggacaggcatcgctggccccttggatggctgagagcagagactcggagagggaaatgagcacagtgtgggggtgaggctgggct

SEQ ID NO: 264880 - DNA, 427 bp, Homo sapiens
ctgttttctaaatttaggtcttcttatagcccttctattccttattttacaatagaatatcatttaagtgacatggaatggaatctataaatattttaacattttaaaatttattcaatatattttcctcaaacctcttatgacagtgaaagatttcatctagacttttaatatgtaactattaactatagcttcattttactagattttaaagctaattaaaatatattctctcaaaaattactatagcttacttagaaataactgtctctgaattcctaaggataattttaattctcgttttaggcttaggtaggcagcactaggattctataattccaagaatactttatttttgaagctagatgcataatttttcttcatatcagggcatcctgaatcaattgatgtctttttctttaatctg

SEQ ID NO: 264881 - DNA, 504 bp, Homo sapiens
aaagagtgagggcctgacaagaataatgtactgttaacccactgaagggtaggagaaaccaatgtgtagactagataccacaagtctgtatgagaaaacactctccttccttcatctcctccctccttttccttccttcctcgctcctttcttcctctttcctttccgtcctctctttcatcctccttccttccttcttttttttctattactttttaagaaaatagaagaaatcttgatgatcctgagtgggtcatacaagaaagcaagtcatgactaaccacttactataatccttgctagaaaatcagaaagggaaatgagcaaaatttagaagttaaacatttattaagttaaaaactgaaactgaatttctcattgtttcctagggacgacaatgtcttgtttgcaagggggagcttgttgcccatgccttactaaattgttcttcctaatcagcttcacagcgtttgaggtgatccttaaatgtttgcgcagaccatc

SEQ ID NO: 264882 - DNA, 387 bp, Homo sapiens
atatatatatgttaataactcaccacagatctataagtggatactattattacacctgtgttacaaatgatgaaataagaggccgggcttggtggctcacacctgtaatcccagcactttgggaggacaaggcgggtggatcacctgaggtcaggagtttgagaccagcctaaccaatatggtgaaaccctgtctctactaaaaatacaaaaaaaattaggcgggcgtggtggcatgtgcctgtagtcccagctactcgggaggctgagaccaggagaattgcttgaacccaggaggtggaggttgcagtgagacaaggtcacgccactgcactccagcctgggcgacaaagcgggactccatctcaaaaaaaaaaaataataaaaa

SEQ ID NO: 264883 - DNA, 143 bp, Homo sapiens
gaccttcctcatttttctctctctcatacacacacacatacatacacaaggacagaagcacaagaatgtgtataggaatccattataaagaggccgaaacgaggccaggcgcagtggctcatgcctgtaaccccagcactttg

SEQ ID NO: 264884 - DNA, 385 bp, Homo sapiens
aagatttttctatctaataatatccagaagtgctctgggtctttaggaaggccccgtcacaatgtcaaaattttaattcttcccataataaaaaaactcattaatattagggcagtaagaatgccaagtagaaattgtacatctttctgagcacagtggcttatgcctgtaatcccagcactttgtggggcccaggtgagcagatcacttgaattgaagagttcaagaccagcctgtacaacatagcaagaccccatctctactgaaagtacaaaaatttgctgggcatattacatgtgcctgtagctccagctacttggcaggctgaggatcgcttgagcctgacaggtcgaggctgctgtgagccgtgattgtgccactgcac

SEQ ID NO: 264885 - DNA, 461 bp, Homo sapiens
ctggcctccttgtttcttcctcctttccttggccagttcttactatttttaaagattcagatcaatctttctctgaaagcctttcccgattcttttctttcagtctgcttttcctccttcccccaccgccttccttccttccttccttccccgattcacgaccttttctcacaacttgcctggttaattacttctctgaacccacatgcttccatatggcatttaacacactggcttgggatttacttttctgtttcctctgagtcccacattgctctctgaagggaacgaatgactcatcatccttgtattgcctgtgtgtgacacatagtaggcattcaaaaaatatttgagtgaaatgaattgttcattcagacatccattaaaacttggtagggaaacagttgattttagtagcataaatgggtttagaagttatttcactcaatttactcatgctt

SEQ ID NO: 264886 - DNA, 409 bp, Homo sapiens
cgactttccaaaaaccctcatttctggcattacagcctgtggcaataacagagttaaggaaaggtaagtgaaactcagagagacacagtgagataattattcctcacgcctgttagaagaacattccaccgtctcagaagaagccctgtctgaatctgattcagctgagaaaacaactcaggccatggtagctgcacccaactctctaaatcaacagtgacctgtgctgaagggattaaggcatcccaacattcctcagagcccaaggcaaggagaatcccttatgaagatgaaattgatcttcaagcaccctctaccttactctgcgtgatgccatattcttcctgaatcccacccaactcaagagcatgatttgcataataaaatctctaatactttgatgaacaaa

SEQ ID NO: 264887 - DNA, 786 bp, Homo sapiens
aggcagagccgggcccaggccagctgcctgtccagccctgggatgagaaaaggcgtcaggagatggaccgggcctggttcgcctttaattggctgacccgtcctgtgggggtaactgatgcgtgaacagccaacaattgggccctctggccgggacaaacacgtgcgtttggggagtagaagaaggctggtattaacctccattttacaatgaggaaacggagtcccaaagacgttcagtcatcttcctgatattcacacacttacaccctggtcaggccggcgccatatgtgttttcaccagcagaagggactgccagggaacagctgaggggaccagagctgggatgggcctggataattatagcggaaagaaaaacacgccgagcgcatggtcctggcagaagcagcgtggaaacagaagtcaaggcagattatttctgccatgaggagatcttgccatgtaggaaaaaagaaagaaagagaggaaagaaagacagagagagagagaggaaagacagaaagacaagaaagaaagagaaagaaagaaaagaaaaaaaaaaagaaaagataaagtttttttgtggcactgtgagtctccctccgccaggttctctagattatgcgatgagctctgtctggctgtgcattccggagaggctcggcaaatttgctgtgagattgctgagcaacagcagaacagatgcaaaggcctgcagaccaaaaattgtccccctggctgtccaaacagggaagaatctggattccagaaactatatacttatta

SEQ ID NO: 264888 - DNA, 446 bp, Homo sapiens
agggagggccaagcagcccccaggcagacccctggaccgttccccagtctgcactgccgcctcagggacctccccatcacctcagcaagcgcccttttctgtaaggagggggtaagaacacctgccctcgggtgatgtgagaagcacactcacgcggggaaacaggtcttagtattttcttagactttgttttgttttgttttaaggcagggtctcactctgccgcctagattggaatgcagttgcatgatcttagctcactgcagacttgacttcctggactcaagcaaccctcttgactcagcctcccaagtagccaggactataggcacacaccaccactcctggctaacttttaaactttgtgtagagatgggggagtctctctgtgttgcccagagagtttgagaccagcctgagcaacatagtgagaacctgtctcaatt

SEQ ID NO: 264889 - DNA, 299 bp, Homo sapiens
gtaaattcaacaacagaaattgaggatgaggaacatggtgttgcagttcaaaccagttccagccaaaatggactctagtcacaaacaaatagtaataacaatccaaacttgtggctgaatagagttctgaagttttgagaaagagccaagagaaaattcagtgtgaagatgatggagtgacacaatagaaggaacctgaatcactgaatcatcacttggaagaaagcagcccagactagttacccaactcccatcagacagtgaccagagtgagaaataagccttgtgtatggtgtgtg

SEQ ID NO: 264890 - DNA, 305 bp, Homo sapiens
aacaagttatcttcagaaaaaagaaattatgaagtaaatgcgtaccatcaggagacatggaaaagaaataaaaccttcaaccttatgaggtttattttcagaactgacccacagtacacaattgaatttgggagacaacagagacctaaagtgggatgttttagtcaaatgatattcaaaaaacataaatcccttcctctacataagagaaataacacaagagagaaatcatatgagtgtaaggaatataagaagggctttagaaaatatttgcaccttactgaacatctgagagaccatactgg

SEQ ID NO: 264891 - DNA, 373 bp, Homo sapiens
actgattactgacttatgttccctttcgctgtgtagacagggacactcagggcagagaggggcaaggtgtgtccagatactcccaggtcggattccaggtacagaactggaactcggaaatacccaggtttcccaactctgggtcctgtgctcatttttgacccatgcaactaccaactgccactgaatcattctgagatgaacccccctgtaaagaacacccccttcccgagacaagcaggagtggtgcctctgtatgtcacctaggaaagccccacgcccagcaagcccaatggcctccactgccacataccgtttcctgcttcagaaacttgcagcaggacatgtaactcagagccaagagggtgcagca

SEQ ID NO: 264892 - DNA, 401 bp, Homo sapiens
gcaagatgggtccccatcctgctccctctgcactgtcctccctctcccacccccagaggtcccagtgaccatcgtgcgggggccacacgacctagaggtgaccgagggcgacacagctacgttcgagtgcgagctttcccaagctttggctgatgttacctgggagaaggtcagatcccagccccagccaagcccacttcagtgtaacaccaacgataataatgccccagacagaaacagctaatattccttgagcggatgtgcctggcactgtgctaagatttgcattatatttaatcccttactccaaggacaactctaggaggtaggtcttgtcactgtaatacctatcaggaaactgatgctcagtgggaaaaattacctacccaagggcagacaac

SEQ ID NO: 264893 - DNA, 496 bp, Homo sapiens
ccactcaaggcacatacaaagctagaatgaagttgagtgtattatccaactatttaacttattgaacatataattgacaatgtctaccaatatagccactattcctgagctagatttccacaaaacattccacgatttcccttaatggtggttgagtgatacattgaataaatattgtactgtaggataaatttctgtaagaaagtgtcttcaaagattttgggtttgaggtatatattctttcatgttttgcagtgaaggtgtgtttttcttccaatagttcttagtttacattttctttcattggaagttcatcactgttaggcgttatcttgagtattataacaaagcaaatccacaagtattcaatataagattaggaaaaaaattcctgcgatactttgttgtcaaacacttgccactgatagacgttattttagcttttaaggcctgtcacattgtttattcagaggaattgtttttcaaattttagtaa

SEQ ID NO: 264894 - DNA, 218 bp, Homo sapiens
aaggaagggaagaaggaagggaggaaagaagggagaaggtaaggagggagggaaggaagaaaaaagggaagagaggaagaagggagtgaaaagctacatctgtccgtccattattaataattcatcacaaatctttcatttcaggataaggaaatgtcattaggccctcaaggaaaaaaatgcctgttttcactctgggcttagaattcttttctctt

SEQ ID NO: 264895 - DNA, 259 bp, Homo sapiens
accaacagacttgctcgacgctgggttgtcacaaaccctcaactcgtaaaaaatgcaatatccgcaaagtacaataaagtgacgcacagtaaaacgaggtgtgcctctatatgtataaggtttaccttgattgtgttgtcgaggttttctacgtacttaatttctgtcctcttgatctgtcttggactgagtgtgtgttaaagtctcactaaagaaacattggtgtgtctctatctatactttcaatccctggactttt

SEQ ID NO: 264896 - DNA, 2160 bp, Homo sapiens
  misc_feature (884)..(885): n is a, c, g, or t
  misc_feature (889)..(889): n is a, c, g, or t
  misc_feature (891)..(891): n is a, c, g, or t
  misc_feature (1105)..(1105): n is a, c, g, or t
acggtgcgcgcacccactgacctgcgcccactgtctggcactccctagtgagatgaacccggtacctcagatggaaatgcagaaatcacccgtcttctgcgttgctcacgctgggagctgtggaccagagctgttcctattcggccatcttggctcctcccccgggtgttggtgtccctctgttgcccaggctggagtgcagtggcaagactggctcactgcaacctccacctcctgggatcaagcgatcctcccatctcatcctccaggagctgggactaaagaaagaaacttataattcacacttttgttgatgaggagaccaggacagaagaagcaagagacagttgaccattaaacaacacaggtttgaactgagtggatccacttatatgcatacgtgcattttctcctgactcggccacccctgagacagcaagaccaatcactcctctttgacttcctcctcattttactcaatgtgaagaccaccaggatgaagacctttatgatgatccacttccacttaatgaatagtaaagatatatttcttattattttctttagaactttttctctagcttactttattgtaaatatacagtatataatacatattcaaaatacatgttaatcaactgtttatgttatcagtacggcttctggtcaacagtagcctattagtagttacattttgggggagtcaaaagttacacacagatttttgagtgtgcatggggttagagtccctaaccttcatgttgtccaagggtcaagtgtataatgtttatttaagcagagacttattttagtgtatttaaatttttggtcacagattttttgacttctgtgggtaggtaatgagccaaggctctaattttttnntttntnttttttgtgggagccttaagcctggatttgggtcacattatataaggatgctattaatttaagtagtagagcggcaggctataattgactttgttgagttccaggtcctgtaagtacatggcttccaacagagtttccattctctttatggtcgatggagatgctcaccttgagcatggccatatattttataatagttttttttttaaaaacntatcattatcattgcaataaattacaaatatagaataaagcaatttccttaacttattctactattttgaaatatgtcaattgtcattatatacacatttaaagaaacacatacacatgcacacacacacatcatagtactgagcttttcaatgttgtatcttttcaagcagacccttaccattgggcatgcaagtgtgtatgtaggcaaagtggtgctaagtggcactactggtcttaaaaagtcttattgaatttttaatacttaaaaaatacctttcatttttgtacaatatatattgaccttcattttactaaatatcacatttcacaaaagatcttagctaattgcaataattgagtaaacaagaatataaagtataatatgcttttaaaggatgacaaggtaatttcaagctcttttagaaacattttacagcagatgtttgcatataatgtgctaatttcaaatggtgcttatttaattcttggaggaagctatgtcaattattctccatttggagaaactatacgtcctttagaatgaccccaagtatctcagagccttttaaaaaataatgtcttctattttaaagatatttcaaccatttttagcagactcagtagctaaactcaaaaagtagcaatgtagtggaaagagaacacattttaatgctaagcaaatctgtgatctgaaacctaccttctattattttctaattgtttgaacttaggcaaaattaacttctctgggtctaatttttaacatattttttaagggaagataacaatggctatctaatttgtagaactctgagtggtttaattgagataatgagtataaatttcattatatgggactggcacagaattgatgttcaatatgtgttagtttcagttctatttatccaacatctgtgagattttatcctaaaatgtaaatgtgacgattatgtgcatctccatccagtcagccttaatgagtaagattatgcttaccagctcttgtatcccttcatgtcagaacaataaaagctggatcaaaaatagatttta

SEQ ID NO: 264897 - DNA, 865 bp, Homo sapiens
ttttatttagattctttcttagaatttccatctgtcttcttacattacccatctgttcttgcatgttatctactttttctagtagattccttagcatattatttgtagttatttcaagttgctagtccgataattccaatgttcctgccatgtctggctctcgttctgatgcttattctgtctgttcaaactgtgttttttgccttttagtaagtcttgtaattttatgttaaaagctggatgtgatatactggataaagggaactgcagtaaataagccttttataatatagtgataaagtaaggtatggaggggaagtgttctgtagtcctatgattaaggggactaggtctcagtcttttagtgagcctgtacccctggacttagaacttcacaagtgcttctcagcccttcccccaccccccaccaccttaggtgggataggatggttacaggttgctgaagttgggtttttcttttcccctaggttaactaagctctaatgaaatcccaatcggttaggctctgggaaaataatttaccttgtggacagtccttgttaagagtaacagaatttggccaggcgcagtggttcatgcctttaatcccagcactttgagaggctgagggagtggggatcactgggtcaggagtttgagatcagcctgccaacatggtgaaaccctgtctctactaaaaatacaaaaattagctgggcatgggggcaggtgcctgtaatcacaggtactcgggaggctgaggcaggagaatcgcttgaacccggaaggcggaagctgcagtgagccaagatcatgtcattgcactccagcctgggcaacagagcgaggagactctgtctccaaa

SEQ ID NO: 264898 - DNA, 710 bp, Homo sapiens
cagcctcccaaattagctgggactataggctcgtgtcaccacatctaattttttatttttatatttgtggagttgaaggtcttgctctgttacccaggctggtcttgaactcctggccccaagcagtccttccaccttggcctcccaaagtgttgggattacaggcgttggccactgtacccagccttacttgaactcttaatacttattcccaagtggtacctaaaatggttttgtgcagtcacaatattaggtagcaatattatattgagctggaggaaaaagaagatttaggagtaaattgccaaggcaagttctgttaaaagctttctgtaatagacatcagggattttttttattcaggtaacctcaacagttttgattgcacatgtaacatagtacttgacaggtaatactgatttttataacttcataaaatattctcaagccatggaggagctcttatgtattttttaatgagtacacacacacacacacacacacacacacacacatatagtaaaagtggaggattcttttcttggaataatgatttctagcatttatctagaaaagattttgctgactaaattttccttttcctccagtggatttttaaacatcagtgcatgcacataaatacagattggatttttcctttaggctttatctatgtaaatgaagtcgattaaatgtgaataatcatgtta

SEQ ID NO: 264899 - DNA, 412 bp, Homo sapiens
ctttttagacatccaagttcttagaaacttcaccaaggcatttgaagctccaaatctgtagttttcttagaagtttacttgagggtattcactatcaaaataagggaataaacccagaaaaaggaagacacaagttccaaaacgaaaacaaggagattcaacatagaagaacatcaaacagaattctcttgatgacagaaaaagaaaaagcctcagaataacagcttcacaataggccaagaaaataaccagtacacaattgaatagaacgactgaaagaaatgtccagaacaaaaaaaattaaaataaaaaatgagagttatagattttctgatgtgtttgtcaagaaatgttcattaagaaacagctaggggacttgattatacagaataaggtacatagaaaactaagc

SEQ ID NO: 264900 - DNA, 417 bp, Homo sapiens
attttaagtgctttcttttttatgtttagaaatgttaatttcataaacagccataaagtaattgaaataaaaagatacattgtaaaagctttttatttctatgaaacaactttgattctaataccaaatagttatatcgggaatgtgctacgtttgctttatctgtaaaatgagagatgtcatttttcaattggaggctatggattccaaatcttccatggagttacttacgagattctgtacccattttattataattgcaattttaagatgcatttcatttatttaaaaatgtatttttaaaaataatatgtacactctaattacctgccagttggacatcacagaataaagtttttccaccatctctgtgtatatatttgtactattaataaatgtacacttgattaaaaacac

SEQ ID NO: 264901 - DNA, 538 bp, Homo sapiens
tgtatattgcccagtctcaggtatatctttatcagtagtgtgaaaatggactaatatacttggtgaatgcctcagggggaggtctgcctgcttatctgacctagagccactcccaagttaccaacttggttggggaggcaacatgacttcctggattgagcactggagcaacaatcatgagacctgggcttcaggccaccaagttccagcactaacgatgagtgaccttggcaaactactttccatttcttcttcccattagaggaaaataattgatcttttggtcataccttacaaagatgttgtgaagatgaatgtagaatatctgaaggagcatcagagggaaatgccaaagtgtacataattagttttacaatctataattaagtatatggatagagatgaggtatccatgtgtgaattatacatttaaaaactaggcttgcttttttttttcctttctaacagtagtgaagagcccaattacacctggtgttatattagtagagacgaagacccattaaaaaagttaaatgag

SEQ ID NO: 264902 - DNA, 287 bp, Homo sapiens
agtggaatgctctggttccagaacattttattcttcctcctcctcgctgtattcagtcatacatcccagaagagatcagcaaaaaattaggaagttagaggtttacatttgtctttaaaacctactcaaaaaaatatgctttttacaattgctcttcagaggcctcccctgctctcattatctactataattacattataccttctgaaattctatatcaaaggtcagagcagaccctttaggcatgaaatgattcccagctcttcacggactagaagttcaaagtg

SEQ ID NO: 264903 - DNA, 449 bp, Homo sapiens
ttaactaatgaattactaaatgcatgagttagatgtgaaccactaacaatacttaatggaatatccatatatataggtgaggcttgtaccttgatgactttatgcagtgctgactgtgcaaggggagactcaaatgtcaatagatggaaacttctccccatggtcttttaggtttttcagacaaggctcctcagacttcccattaggcctgagaaaagagaagtaatctcatgacaaaagctggggatgcaatgtggctatgtgtaaatgtccagttggttgcttaatatcaatcagcctcttcctggtaactgttcagcttgccagtccttattttagaggtctttgtccagaaggggatccctggtgttcaggatacagatcctccattgacattctcaacatttcactcctgcacgtgaccctacctggctcttgagcatcaacct

SEQ ID NO: 264904 - DNA, 522 bp, Homo sapiens
agttcaagaaagtgaaatgtgtaatggctatctttcctttctggtttatttcaaagtcaagttctaatataggtaaacaaatacactaataaagagataatgcttttctcatgaaatgtataatctagtaggaataaagataaacaatttttttaaaaattctatttcattaagcaaaaatgcaactcggaagaataatgtacattagcagtcatttactatttttcaataaaattccgatatatatgtaaagtaaattattactaatatcaaacatagtttaaagaattagtgactatgtgcacttggatctccatatgtaatgtactatcagcatcttcacaaacacagtaaattttaatatgcaaataaaacttattttactaaacgatgattactccttctatattcatattcctaaacacatacagtttcttaatgtaattaagtttttaactaaaaaaagggaaatgcattattgaggcgataggattactgggtggctataaacacatctgctgc

SEQ ID NO: 264905 - DNA, 468 bp, Homo sapiens
ggggagccggctgcgtcccctccagcctggtccatcaggctctgacatggccagggagcgggcctgcgagtccccggaagaggtgaggtggccgtcttgtctgcttcgattgcctcgcctccctggagggttggaagtctcgccctgggttagagaacagggacgcaagacggcttaacaagatctctgtaaggcggaaccggggccgggaagcggagcattgagactaggtcagaaagaacctgctcggcacgcagggctactccacctgctgccgcactgacacttcctaggagcctctcctggtgttaacatttctatttccaaaaacatccgcgggaggacggctgtcactgtctccgccgtggggaccttctgaaagattgttaaggagagtcatcttgtcccttgtagtatgcgaagggctgagtactacagttgaaatgatgtttccagtgaactaagctg

SEQ ID NO: 264906 - DNA, 446 bp, Homo sapiens
aaaacctcatgcattattttttgatatctggagagaaacacgtaccctagaaatgctgtggactaattccatggttactttgtcattaaagaaaccaaaatactgagaggtcaccataaacacaaaaaggcagagagagaaggattaaatggtgtttcatgtaaggatctttaaagggagacagaattctagtctgaaaggagcgcaggcagatctggcattttgcttggggagttcaattctttggagaaaatacagagacaaaaagaccattttgatggtatttaaaatatccctctgcccagtgtatctaagtgagtctaaatatattcagcaattttttaaagggcagatattaggcccgattcaaggtatggaatatagattcgaaagggttagtgataggtgagtgcctttcaggtagctttgcatcacagaccaagccc

SEQ ID NO: 264907 - DNA, 404 bp, Homo sapiens
tactcagaagtcgaaggcgagagtatcccttgaccttagctaagggcttcagggcagtagtgagctatgattgtgccactgcactccagcttgggcaatagagcgagaccctgtctctaaaaaagaaaacaacctgctggggagaaaaaatacattacgtgtaaaggattaacaattaggccaacatcagacttttcagttgccacaacagtagtgagaatatggtagcgtaaaatcttcaaagtttagtgaaaaacattggcaactcagaattctgtaccaagctgaactctcatcattcttcagtaaagatagaagaaagacttttactttcagattaatacaaatgagagtttactacccaggatccctatggaaacaactgttaaaagatgtatgttaga

SEQ ID NO: 264908 - DNA, 503 bp, Homo sapiens
aggcaggtggatcaccaaggttaggagttcgagaacagccagaccaatatggtgaaactccatctctactaaaaataaaaaattagccaggtgtggtggcatgcacctgtagttccagctacttaggaggctgagaaaggagaattgcttgaacccaggaggcgtaggtcgccatgagccaagaatcgtgccactgcactccagcctgggcgacagagtgagactctgtctcaaaaattaattaattaaaattaaataaaaattacttctgaatgtgagcacatgaagtattatattcaaaaacaaagctgactggaacatgcagaacaacggaggaaagggttgaatttccctttacttaggagatccttatttaagagtgattatgcttgcctgtcataggagcaaaaagaaagcctaagtgaacctttactgcaagtgagggaaatggtactagaatagaaggaaaatgctttgaatggaagaaaagactttaaaaaaaa

SEQ ID NO: 264909 - DNA, 413 bp, Homo sapiens
ccccagggttcagcacctgcctgaccacacggcatcaaagccgcctgtcctccccagcccccgcacaacctgccactccctgctcggcagaggaaggagactcgggccacacccagggagggacctcctctggctcgacatggaaacctaggctgtagctccctgcttccccggctgtgtttgtgtggcctggtggctgaatctgcacagagagcaggacgccaggtgcgctcccgggaagctgtcctagagaggggccggaccgcacacctggcgctggaagcctccatgactggatgtttgcaagaaacagaaagaaacttctgtccagtctcagccacaggcacgccaggtcctctgctgccttgccgcaagctcgggggtttcagtgagaccctctcccactcccacgg

SEQ ID NO: 264910 - DNA, 710 bp, Homo sapiens
gctggcagtgagccgagattgcgccactgcactccagcctgggcgacagagcgagactctgtctcaaaaaaaaaaaaaaaaaatagttggaagcaacctaaatgtaaaatatagggaattggttgtacaatttatgcgacattcatgcagtgcatttgcaaaaggtaaggctaccaagaacaattatgtagaagaatatttaataacatggaaaatgtttgcaaagtattttatacacacacaaaaaagcttacaaaatactatttacaaacagagatggtctctgaatctttacccagttataaattttgatcccaaaatggacctaactgaatcaaaatgttaatttgtgtcatagggtaagttacctgtagcgactagcagccttggtttcctttgtgacctcacagccttcattcacctcagctctttacttggtgaacacatattgtaagaatgtgaactgatgattggaaacattacttttgacaagttcccatacttgaaatactacaaaaacatcacctaacaagcagaacaaccatgaatgggtagacattgattagacatttaaaaagaaacaaataaaaaagggagatggcaaaaaaaaaaattgtttacatctgttttcattgattgtgttattcatttatcattttttgtattataaaagcagtgtcttcctatggccccccctccaaatcaaaata

SEQ ID NO: 264911 - DNA, 504 bp, Homo sapiens
gcacatgcagtgacaagaggagaggcccatctcagccttgcagcaaggttgccagaaatcgattctcgcccccatcccgtaaagcctctctgcatcacctgcttcccacagcagcagcctgggcctccaaagggcacattcagatttgagggatttggggagtttgtgggcaagggcagactactatgggcttttgggtgaaccccaagggaatgcaaagaagccccctgccattctccatgaatggagctgaatgccctagccccccattcttccacgtgggagtatcctcttgagagtcctgctggctgttggtcaaggcaggttaaaagctgaggcttaaagtagccaggggtagtggctcccgcctgtaatcctagcaacttgggagactgaggcaagaggatcaattgagctcaagaactggaggctacaatgaggtatgatcacaccactgcactgtactccagccttggggaaagagcaagaccctgtctcaaaaaa

SEQ ID NO: 264912 - DNA, 408 bp, Homo sapiens
cctttagtgtcatttaactttgtcgtctatcccacatatttcctgtaagctagaagttagggctagtagctgaattagattcaggttaaactgttttggtgaaaatactttataggggccaggtgtggtggctcaagcctgtaatctcagcactttgggaggccgaggtgagaggatctcttgaggccaggagttcaagaccagcctgggcatcatagtgagactctgtctctacaaaaaataaaatcattagctaggcatggtggtgtgcacctgtagtcctagcttctcaagagactgaggcaggaggattgcttgagcccagaagtttgaggctgcagtgagctatgatcactccactgtactccagcttgggtgacagaatgagaccccatctcttaaaaaaaa

SEQ ID NO: 264913 - DNA, 417 bp, Homo sapiens
tttttttttttggagacagagtttcactctgttgcccaggctagagtgcaatggctctgtcttggctcactacaacttccacttcccgggttcaagcaattctcctgcctcagcctcctgagtagctaggattacaggtactctacctgtaattacaccaccacacccggctaattttgtgtttttagtagagatggggtttcaccatgttggccaggctggtctcgaactcctgacctcaggtgatccccccaccttggcctcccaaagtgcttgtaattctttatactttgttttcaaccataataactttatatgtatatttttaagaactacttgaaaagaggtaaacttgaatctcagaaatgcaagaggtttggcagggagttagaggtagaatgaatacaagtgaataca

SEQ ID NO: 264914 - DNA, 425 bp, Homo sapiens
gcatattctgcgtgctaggcactgttatgagtgctggaaatgcagcagcaaacaaaaccgataaattccccatcctcaagaagtttaccttctagttgagaagtcaaatagtaaatcagtaactaaatatatatgtgtgcataatatatacattatatatcatataattataacatataacaaatatattatagtctgttaatatacaattaataccatatattattatatgatatatatacaacacaccaatatatacatttaattactaggtcatacatttaacttaataatgtcataacttattgcaacttgatgtatcttaggtcatacatctaatttaattaaattgttattaaattaaattgttaagtgaaagttaactgagtttatttccattcataaactgagctggtattgttggg

SEQ ID NO: 264915 - DNA, 334 bp, Homo sapiens
actctatggaattgacataaagacttgcatgcaaaagcttcattgttggccaggcacagtgactcacacctgtaatcttagcactttgggtggccgaggcgggaggatcgcctgagagcaggagttcagcaccaggctgggcaatatagcaagacatcgtctctactaaaaaaataaaaaattagccaagtatgatggtgtgcacctatagtccccagctactcaggaggctggtaggatcacttgagtccagaagttcaagcttgcaataagctatgatcatgccactgcactccagcctaggtgatagagcaagaccctgtctcaaaaaaaa

SEQ ID NO: 264916 - DNA, 643 bp, Homo sapiens
gtagaaacaggcagtcagaggtatagaactacacagaatccaagagatctttcaagaaaagtgacatgcagcaagagaaactatcaagggggtaaacaacctatagaatgggagaaaatattcacaaagtatacatccaacaaaagtctaatatccaaaatctataaggaacctaacaagcaaaaagcaaataacccccttaaaaagtgggcaaaggacatgaacagatacttctcaaaagacgtacatgtggcccacaaacatgaaaaaacgcccatttctaatcatcagacaaatgcaaattagaaccacaaagagataccatctcacaccagtcagaacagcttttgttaaaatgtcaaaaaatgagaaacgttggtgaggctgcagaggaaagcagacacttgtacactgttggtgaaggtgtaaattaatttagcgtaggcacagtcagtttggagatttctcagagaactaagagtggaactaccattagacccagcaatctgatggctggatatacggccaaaggaaaataaatcattctgccaaaagaacatatgtacctgtatgttcattgtggcaccattcacaatagcaaaaacattgaatcaactcatgtgcccatcagtggcggactaga

SEQ ID NO: 264917 - DNA, 201 bp, Homo sapiens
accagaccagggggcacagacggaagagaccagggtgtggtggcacgcacctgtgtcccagctactcaaaagactgaggtggggggatcacttgagtttaggagattgaggctgcagtgagctgtgatcgcgccactgtactccagcctgggggatgacagagtgagaccctgtctcaaaaaaaaaaaaaatagaagagca

SEQ ID NO: 264918 - DNA, 448 bp, Homo sapiens
gagcaggacgcagctggaaagcgaagggctgagcccgggctcagggcgcacagcgattccgcctccccagggacacgtcgcaagctgctggccccggcggccgaagccagtcctgcgtgggatagcaggggccggggaggcgacaggggctgcactacgagttccgcaggccgggagtcagcatggtgcgcggggcgagttggcgagggcccgcgggaggcgccggcagaggcagttgctggggctgtcgctgccgcccttcgcccggctcatagcgctccccgcgcgaggggcgcgccaaccccccggccacctccctccccactcctcaagggagccatagcgcccggggctgccaactccagcgccgcacagagtcccaacctgtggcgatcgccgggtcccgagaggagccggaggaaaagaatttgttccccacgtgcgagta

SEQ ID NO: 264919 - DNA, 732 bp, Homo sapiens
ctgccattttgtttcgttgaggtggtgttgtttttaggagggggtgttgtttgtttgtttgtttgttttgagacaggatgtcactcagtcacccaggctagagggcagtgacatgatcacagcttattgcagccttgaccttctgggcttgagtgatccttccaccttagcctcccaagtagctgggactacaggtgcacaccaccatgccctccctaatttttttatttttgtagagacggggtctcaccatgttgcccaggctggtctcaaactcctgggcttaagtgatcctcccatctcaccctcccaaactgctgggattacaggtgtgagccaccgcactcggcttatctgccattttgatcatgtgacatgtatgttaccatgattccttactgcatctgcccactctgcattccatcctgcacatgtagtgatgctcacctacctcatgaattatgcatgtcatcctcgttaagacaccgtgatgcagtctcctcagggactcagccagagaaccctttttcctgtgctgtttcccttatgcccaacatttctgggcataaatcttaataaaacttaatctcagaaaagtttgtctggcctgatattaatttctattacattgagagctgaaaatgtcataccaataacatatttcttggcaaccatgaaggggttgtgaggatttttgtacttattctggggggttgagagctagcaggactg

SEQ ID NO: 264920 - DNA, 289 bp, Homo sapiens
aggaaagctgtggagtcacttgtttttttaagattttataaaatatctacatgacttaagaaagctatagacctagacctagagacacccccatgtgattttcgaggagaatgtttcctctgaaaggtagacattgtcatgctctggaatttgtctttttggtagagacagggtcttgctgtgttgcccaggctggtcttgaactcctagcctcaatcaatcctcccaccttggtgtcccaaagtgctgagattaaaggtgtgagccactgcaccaagcctgggaattt

SEQ ID NO: 264921 - DNA, 534 bp, Homo sapiens
actccccgcctgttgctctttcccccaccatgttgtagctccttagtgtgggtctcctcccacctcacttcgcatgggaacccttctgcaagtggcttcacttacacctgtgtcttgttctgtctgggctgctgtaacaaaatatctgaggctgggtaatttataaaccacagagagttatggaggctggaagtccaagaccaaggcacaggcaggtttgatgtctgctgaggccttgaccactgcatcacatggtggaaggcagacgggcagaaagaggacaaacactgtgtcctcacagcagaagagaatgaacctcctccctcgagccctttgataagggccctaaccccatctggaagggctctacctgatgacttaatcacctcctaaaggccctgcctcttaaaactatctcatggggattatgtttcaatatataaattttgtgagacacattcagaccatagcaacctactatgttctttttccttatctgtaatgactggttatgcttataaatgtttgaaagca

SEQ ID NO: 264922 - DNA, 507 bp, Homo sapiens
cacgaggggtatgcacaaatctgtctctgtcccagtgttcccagtgacagtgaatgccccattatccactcagtctcccagatcaggaatctgggagtcatccttggttctactccccttctctttacccctcttcacttccagttaatcaccaagtcctattaactcctacctgtatcttctccagcctcattgccactggcttagttcagacttagcatctcctctctgagctccctggctcagccattcctcttgcagtgcctcatcttcccaaaatgcaaacgggatcacattcaatctgctaaaaaatctgcagtctagccggggatggtggctcatgcctacaatcccagcactttgggaggctgaggcaaaaggattacttgaggccatgagtttcgagatcaggctgggcaacagagtgagaccctgcttctaaaaaaaacaaaactgcaatttgatctctcagcatgattccacgtttaagcttctgagcacagcaca

SEQ ID NO: 264923 - DNA, 424 bp, Homo sapiens
cagatagaaggaaaaatgtttcctccattgttgctgacgtagataaagaatattcccttcaatatgctaacccctaggtggcttttcattcagaaggttcctaataatttgatctttaccctgaaatcaaacacatggaaaagagatggaagaatgtcctggagggattaagtgaagaaacagaccaggattcatttatgaaatatcctcagtgttatttcaattcagctccattcacattttattcttttgtgtctctgcactaatgccctccatattctccattctcctgccttagctagcaccttctcgatcttccctctacaaaactccttcagttcacattgcatttgtgctctatcctgggatatgtgttttctttcccatttcctcagttgctatgtattaaaaattaggactttta

SEQ ID NO: 264924 - DNA, 492 bp, Homo sapiens
taagtagaatgagcagaatgtttaatatttatagagcgctattaccagtggtagatttattacttgttaacaagtaatgagtcagtttttaatagtatatcatatttcttaactattagaaataaattttatcattgtgttgctttgtactttattttgttcttcgcccagtctctgtatttctgcaaatgtgagggggaaaggggcgaatctcattagtgagattctatggtagtaactatgctcatagtgttagtgcttcaggaaggttgttatttccacgtatctcattccagatatagctgctataacacaccctagagggttacttttggaacttacttttacaaaggtttttcgtgatgttcctgggtcctgttatgaaaaagtagtgcttacctgaaattcatattagcttcggtggcaatattttgtcgtgttaatgttatattggcattaaataccctcctttagccagcttagaataaaact

SEQ ID NO: 264925 - DNA, 437 bp, Homo sapiens
gatttacatcctgccaacatgttgagagttcccagtacgttacatctttaacgtgtggtattttcagactttacaattttcacaaacgtgattggtaggtagtggtatttcactgtggtttttaaattaaaaaaattttatgcattacattcgtacatatttatgaggtacatgtggaatgttgtgacatgcatagaatgtgtaatgatcaaattggggtatttagggtaactgtcacctgagtatttatcatttctatgtgttaagtgcatcacctgtatttccttctgtgtaatgaggttgaccccctttcacgtgtttattgtttgtctggattttgtctttggtgaagaacttattcaagttttactcacttttgtaatggattgcttgtctttattttattgctttataaaagtttttattgaaatctggat

SEQ ID NO: 264926 - DNA, 443 bp, Homo sapiens
aaatatcacgtgttcttactcatatgtgggagctaaaaatattgatttcatggaggtagagagtagaatggtggttaccagagctgggaagggtagaggggagaggaggatgaagagaggttggttaatgggtacaaacatacagttagatgaaaggaataagttctagcgtttgatagcacagtagaatgattatagttaacggcaatttattataaatttcaaaatagttagaagagaagatttgaaatgttcccaacacaaagaaatgataactgtttggggtgatggatatgctaattaccctgatttgatcatggtatgcatgatattttgataaatgcaaatatatacgtttatcagaatattacatgcaccccataaatatgtataattaatatgtcaatagaaaaataaaaaatacgaaagacagtaaaaaaaaa

SEQ ID NO: 264927 - DNA, 509 bp, Homo sapiens
gtttattgaggatcgactatataatagttaaatgtcagtgatagattgatttttgacattctgaaatttggataaaattaggaacttatagacttaaagtgggattcagcatgtatttaaagtgcaggatgttttggtgctgattctaagctagtgtttgataataaaatgtttgtgccatggccagtaggtataactaacagatgatatagcttgtaattttgattacactgaactctagtattgattttattgtaatgtaggctatcttagattttatctctttcatggatgtaactatatttgttttgccttcagagcgtttcctaggtggatgattaaagtagtgtgatagatttcggacgggttaccatctttttacatagtgggatttagaggttttgagttgttcttaagaatcaggccaggtgcggtggctcatgcctgtaatcccagcactttgggaggctgaagcaggaggatctcttgagcctaggagtctgctttgg

SEQ ID NO: 264928 - DNA, 310 bp, Homo sapiens
cgctgacgtctgagctaactcagaagtgatgggccagcctctcaagtagtcgaggaggtaagggtgatggagagcaggccaggtgaggaagcagcatgtaccagggcacgcagctatgagacagcaagggttctgtgcctgtcctcgggtgtgcggcgggtgagggtgaggcaggagtgctgggcaagtccgtcaggccagcatggttggcagttattccccaagctgtgtttccaaatatcagccactcaaggacggcctttatggtttatgttactatagtacgtagaaaagcagttcctctaactgt

SEQ ID NO: 264929 - DNA, 307 bp, Homo sapiens
gtgctaagacacacatcaagtatcactcatttaaaaataaaaggcttgttgttcaggagcatttgtgttggttgtgttgctattttattttctaattttcatctccctggagtcaaagtacacagcatcatgcttccataaaaacagtaattaaagcttttaaaatatacatattagcagatcacacactcctatcagtttatcttgtgaatatcataaataccatgcacacaacagatagaaattgcataaacagaaaaattctgcattattcatgaactgtagtttgcttttcccttggctccat

SEQ ID NO: 264930 - DNA, 444 bp, Homo sapiens
gctcctcagtggctctccccagagccacttcctttcctggcggattaaaaacaattctcattcagtatctcgctgtcatcagattttcccatattctgactttcctgggagcattttcacatattatcttagtggctctgttgccctctgattccaacctccctctgttcttttctggaggtagaagtcctgaaacagaaacgcttatccccagtcccaacaattaatccccaaagaaccttcgagacagggcaggttcatggctgcctcgtccacaaaagccctgttttctgggttccttgtcttgggcaacctgcagagtcagagccatcattgaaggatgatttgggcttcagctggaacaaggagaaatactcctgagccatctcctaatggttttctcggtcagggtctggattaagaagacatggcatcttgtagctg

SEQ ID NO: 264931 - DNA, 688 bp, Homo sapiens
ggcagagagagacagagagaaggaaagagagagacagtcagagaaagacagagacggagagagagaaacagaaagagagagagagacagagacagagagaaacatacaacagggatagcaatgacaggtacagggatagcaatgacaaggttcataatatgaccaaggaagcaaaggacaaaacacattgaatagatgagaccacgtaagagagagactagagtgcctgaataactaaaaatagtggcaggaatagtaatggaagagagacagagatacaaacttgcttcaagggatgaggattagggactcagaacttttggtggctgaaagaaggacaggtagcaggaagcttagtttgatggcatgacttcaaaggagttgaagactttaaataggaatagttgtctggagcaacaaggagcccagctacccaacactggcatgtggagtgacagcaaaattctagctaccacttgagtgtcttcagaggagatccaaattccagtcagaggaagaagaaggaaaggttcagagaggaggttgaagactttgatgactctgtgttccagcagggctggagaaaggtttgggagccagaattcacagccatatatgtagtggagatagctttgtttcccctgtggtccatcgtactccctgttatttagtgttcctgtctcctgaa

SEQ ID NO: 264932 - DNA, 421 bp, Homo sapiens
caaatttttttttttttaaattggaatcatcctgaacatctattgtttggcccgccttttcaaatgatttgaatgcttttctacaccacaaaatataattttcaaatgtgttgtctttcaaatgtgatttgtatgtggatgcataatgtttccttatatggatgtcactgtcatttatttgagcaatgtttatgcctagaaatgagacttgttggcaatgtgtatatagttggagcaaaatgtctgagtactttgaaaaatggtgtcagagcccaaatgacttggacatctccactctgagccaactggctcagtgttagtcacaactggaaaagggagatggagagaatgcctcacagactcatgaatgtgtttgtatgatgttattaacagagtaaattataaaatccagactacaaaa

SEQ ID NO: 264933 - DNA, 262 bp, Homo sapiens
ctgtttctgggagacatgggatgcctttgtaagttaactttggctcgatggctttggcaaacctccttatactgcagagcagtttaggatgctttaaccagccttctcttcatcttcacccttttgcaccacagtctgacagccttcccagccttctcttgctccttctctatttccttttacacaatcatttcctcaagtaaaatccttttgcatttcatccagtctgggcgacagagtgagactccgtctcaaaaaaaaa

SEQ ID NO: 264934 - DNA, 687 bp, Homo sapiens
tgtgtaagtcagaaacgtgggtttaaatttgtgtcctccttcttcatcacccctcacattccaacattcatcaagccccctacatatgtatatatgtacacacacacacacacacacacacacacacatatttttcagatttatactatatctttccttcccaattgccacttccatagaaagcagctcttctatctatcgtgaatcaagaccagagccctttaattggtctgcctactatcttactctcttctatttaccttctactatcctatatctacaagcagcagtgccactattttcctctccattatcatctgttggctacaccatccattgtgtacattaaactccagaaatgctgaatttttctcagtttctcaatacactggactctctattttgccttgaggacttgtgatagctattctctcctatgcaaatattcctcagacctacccccattcccctattttacttcacttctgcctagatgtcaacttttaggctagatgtcacttctagttagtgtttatggtcccacaggagcctctcaaatgctcacctagtatttttcccttctccagtatggccaaattgtaattttcttttggaagtgcctgttcaagtattttattcattttttattttacattgtctattttacatggatgtataggagagttt

SEQ ID NO: 264935 - DNA, 1392 bp, Homo sapiens
ggatacagtgagatttgtgttcggaaatgtcactgatagtctgtgaaggatggatcgaaggaggcatacattaggagaatgttgtctggtagtggaggaagatagtccttaaaataaggaagtggcagtaggtaggaagacaagggaataaatattcagaggtaggattgacaagacttaggggcagtctggatgtgtgaggaggaggaggaagagaactcacatagctcttggatctctgccctgagtgatcagtgaacagcggtgccatttacagaaatgaaggtggcaggaaaattggtgtgtgtgaaggcacttgtatgtatgtgtgtgtgcacatgtgcatgtatgtagttacctggccctgcatacaccatcacaggacagctgaactctctacttggccattagcagcccttgatgttgtgattatgttgttagtattgactgctctttcaggaccagccaacaggctcttgtggcaaactttatttttagtaccagacatcttgtattactgtaaatgagagcgagaggctgtaatgatagctctcaagcccaagcacctctgcatttagtggctctaatttcattatagagaaattaccatgaaatagcactgtgaccaattagatacacttctgggaaattttaggtgtaggtgaagcaccttttttcattcattctctgtttctgatagtttggacccagaatcaagctgacagtttatcgtgtagagtagcagcctcctgaggtcagcgcctcatgcattgtctggtgcatgagcatttcatgatgcttcccagagtgagttcttccaactctagccttcctactccttcttggagattcccagtacagccagaggccctgggaagtcttgctgtaaagtcagctgtttaactgcttaacccagcatctcccaaacttatttgaccaaagaacccccttttcacgggacactgttactaatccattaagctagtgttctgtggagcacactttgggaaatgctgaattggagcccaaatattacattcagtgcagagagaatctgctcggagatgtggactccagtgctttattttgccctcattacaaatattgatactttaaatgtttgctgaaacaggctgctttgactcttggtgactcgatacttatttatggtgctcagccagttatgcccacgtacagcaggtgggcagcccacaaataaacttagtccgtctgtttcccgagacacagaatgcttccccttatcttccagcattagcctggccctgaagcccctctttcgagggtctctgcctctcaagctccaggccaacaccagcataaaggacccctctctgaaggaagggaaggaggctcagctggaaataacaaaat

SEQ ID NO: 264936 - DNA, 372 bp, Homo sapiens
cccaggagagggggctggaagagagcgagctgccattgtattttggttgctgtggatctaaggagaagagatgtttaggagtctttccctggcatggttcctcctgccttcacccatcactcttttcctcgagggattccctgtggggtgcacagccccagggtgggccagactgagctcacaggagcatgggctgtgtttcagatgtggcctcagaatccttctcaacacagtgtactagcaccacttggtgctcctgatctactgtatcatctcttgaaaaactactaacatgaaaagacctgccaagtcaactttatattaactgaacccttgacacagtgatggataaaaattaattcaaacagcaaa

SEQ ID NO: 264937 - DNA, 467 bp, Homo sapiens
aggaaaagaaaaaagtacatccaatttatacacattagatctaaagactgggggccaaatcctaaaggagtgttaggttctcttcatttaggcctattatcacgttacaaagtacacaactgcactgctcctaaaggtcagtctttatactaggttatgcttcaatttactaaagccaactcgtgactccaagcaaatattctgttttggagtattgttttacctttttgctttccttttaaattaggcagcactcagattttaaaagagaaaataaagggaagaaaaagcctcaaccaggtctttaatgtgcaagatcaggtaagaccaaaagcactttactaatgcacatttgattatcaactgtacctttaaaatatgatcaggctgagaattaatatctgaattgttggcattccttaaggaaaacatcccagtacgaaatgcattcactttagaggtaaaaa

SEQ ID NO: 264938 - DNA, 520 bp, Homo sapiens
ctgactcattgtgcaacctgtggtttatgggcagggtcacttaactaaatgtctagccctcaatgtgcccatctgcaaaataggcagccgtgttctgctccttccccacccaccacaccaggggcagaattttaatctctacccttccactgactagccagtggagccagggacccgccctcctcaagccccagcgtcctcccctgtgcaatgtaacgttcccagtaatggagcaggtgtgcggggcagccccactcccctgaaggacaacagcaggccactggggaaaggtgaggtgtcaggaagtagcagagacgtgagccccagcatctcatttttggtgagctttccttcccccagagctctcttcttcccccttctcttttttttccctttccctggggctgggaaaagatttgggaagacaaatgtgttccacggggtgtgggtgggggaccctcacgcctcccctggctgaggtggaaagacatctctgaggtctggaagtcagtcacaggac

SEQ ID NO: 264939 - DNA, 452 bp, Homo sapiens
cttaggcagagaacaaagattggtggcttcctcctgagcacactgggatgtggcattacatcggggctgctgagtgcccttaccttcagctgcccagatgcagaggcagttccacaaggtactggcacaagaagagtcgtggaagactgacctggccatggcttctcatgtcccagctcaggacctgccacatcaattctccctttcctctggccgtcacgtgtggagtgaaattctcagaagcggctgtccctgtgcacctctctggctgtgtccagaaaatgaacatctgtttacagcttcaattttctaatgattagaatgccacaaacaagaaaacccagaggaaagctgttgatgctgaaatgtttccttcctctacatattccatgatgcgtcctgtggggttatgcaaacagtaatatctcattaaatattctggtctcttggga

SEQ ID NO: 264940 - DNA, 411 bp, Homo sapiens
ctagaatataaagctacatagaagttatcctgggaagaagatgggcatacccagatggttctctcaccaagagggtcccaggagtgacaacaggatgagaaagtaatcaaggcagaagccaccctgacgtgtgttggggactcaagaggcctaatattactgggaggtggcaggtagaaactgagaggtagggtgtgaggatgaggaagactgtcagcattgcagagggcttggacattaacctcaggagccgtggaccagcagatccagtctgtatgccatgggcacaagagcaacagagctgctgccagcactatcaccccacgccatatcttcaaacacacaggaaccatgattctgttcctcacagactctctcataatgaataaaaattttatttcaatgcactac

SEQ ID NO: 264941 - DNA, 280 bp, Homo sapiens
catctagaggatagaggccagggatgcctcttaacattctataatgcacaggacagcccctcacaacaaggaattatctggctacaaatgtcaatactgccactgttgagaaaccctgcaaaaaggaagcaatggatattttgagttattttcaataacttttaaaagcttaataaaatgtgtacttatctaaaatcacaacatacaagctaaataaaatttaaattatctttgtttttggttgatttcaaaataaattggtttagtgttgcctcttatt

SEQ ID NO: 264942 - DNA, 352 bp, Homo sapiens
gcactttctcaggactccttgagagtgggtttcctggcctgcagtcactcgtatcagtcagagtcaacttctttaaaatactttacagagtttggtttttctgtcaacattgcttagaagatatttcttattgtggttgaggaaaagtctgaaagccactgccctagcctatggctcttgcctataatcccagctaactgggaggctgaggtgggaggttcgcttcagcccaggaatttgaggccagcctgggcaatataacgaaaccctgtctctaaataaaaataaaaaacaacttatacagtttgttctcaactaccacccctgcaaaaaataaaaaatcagttttact

SEQ ID NO: 264943 - DNA, 413 bp, Homo sapiens
gcagacttgcccaaccccggcctacagagaaaccacaatccccatttttcaaaaacatctaattgtacaatgtattttagtgcagggtctggttgggcaagataaacatcgcctcctgattgtagtttcacaaaggatgactaacttggcctgaattcctctggctcccaagatatttcgacaaaaccatcaaaggatctattttctacaactgtacaccagaactcgggtaaacactgcgagagtacagcagtagcaagagagaattgggaaacagtcgccgagtgaaacgaggcaatttatcgcccacttccattctcactctctcacaaggaacctttaccagtttgggagcctgtttttaagggagggggagggaaacggatctgtacggagtaaatcctgtttcgcca

SEQ ID NO: 264944 - DNA, 746 bp, Homo sapiens
gggcaccgctgagccccaggcagggcaaggacaggggagcagtgtgtttatgtgggggaaaggtgacatgcctttcatcacccatcatcgggctcacgaccgacactcttgcaacaagacaggtcagcaagagaaaagcatcacaaagttattgaatcaaagttttatgtgacatgtagctttcaggaatgaagaccgaaagaccccaggaaatggtctgtctggtgtttaggtttgatggagcagggatagctgcgtaaaaatgggattgggatgaaagggtgtgatctactgagctagacggaggcggggtcccagcaaggcctgcttgctcccattcctcttggcctctgcatggtgttccttcctcccagtgtagggcaggacctctctggaacttacaacctgcctccctcagacaaggtaggttggagaatttctctgtggatggctcctacccaggaaggtaggggaaggttagagttatatttctaggttttatggctggctttcagggagaggggttctagattctatgacccaccttgaggaagaattctggttccgtttttcttttatctttttttttttttttttgttaggagggatggggatttgctatgttgcccaggctggcctcaaactcctggccctaagtgatcctgctgcctcggcctcccagtgttgggattacaggcgtgagccactgtgcccagccgcctagtttctatgactcacttcagggg

SEQ ID NO: 264945 - DNA, 124 bp, Homo sapiens
ggaagtgaaagacatacttagagaaatacaaaatacactggcaagtttcaacaatagactagaacaagtagaagaatgaactacagaactcgaagacaaggctctggaattaacccaatccaac

SEQ ID NO: 264946 - DNA, 382 bp, Homo sapiens
tttttttttttgagatggagtctcgctctgtcgcccaggctggagtgcaatggcgccatctcagctcactgcaacctccacctcccaggttcaagtgattctcttgcctcagcctcccaagtagctgggattacaggtgcatgccactatgcctgactaatttttgtatttttagtagagacggggtttcaccatgttggccaggatggtctcgatctcttgacctcgtgatctgcccacctcggcctcccaaagtgctgggattacaggcgtgagccatcatgcccagcctatgcagttacatattaagccttttccacactgaagacagatgtgaggcaccagagatagatccactaggatccccagaaatttattctgg

SEQ ID NO: 264947 - DNA, 4408 bp, Homo sapiens
  misc_feature (1)..(1): n is a, c, g, or t
ntacagccccaaggtcgctccctctgggccctttcttccccattcttcccagcagcccaaagctctggtgggacaggggcagcccctggggagggaggagaggacccaggaacccggctaggagggtggcccacccatttccagtgtgacctgttcccattcccccatgtctcctcccatccctcccgccactcagctcaggctgatgagaagcagagcaacgggtgtatcggtgttttctttcctggtggggtagtggggtggggctgaggagagaaaagggtgattagcgtggggccccgccctcttttgtcctcttcccaggttccctggccccttcggagaaacgcacttggttcgggccagccgcctgaggggacgggctcacgtctgctcctcacactgcagctgctgggccgtggagcttccccgggagccagggggacttttgccgcagccatgaagggggcacgctggaggagggtcccctgggtgtccctgagctgcctgtgtctctgcctccttccgcatgtggtcccagggaatgacaacaccgtcactgaagacagacggtgggagacgcacagccacatcaccaccccccacaacctcccagaccatcatttccaccattcccagcactgccatgcacacccgctccacagctgcccccatccccatcctgcctgagagaggagtttccctcttcccctatggggcagacgccggggacctggagttcgtcaggaggaccgtggacttcacctccccactcttcaagccggcgactggcttcccccttggctcctctctccgtgattccctctacttcacagacaatggccagatcatcttcccagagtcagactaccagattttctcctaccccaacccactcccaacaggcttcacaggccgggaccctgtggccctggtggctccgttctgggacgatgctgacttctccactggtcgggggaccacattttatcaggaatacgagacgttctatggtgaacacagcctgctagtccagcaggccgagtcttggattagaaagatcacaaacaacgggggctacaaggccaggtgggccctaaaggtcacgtgggtcaatgcccacgcctatcctgcccagtggaccctcgggagcaacacctaccaagccatcctctccacggacgggagcaggtcctatgccctgtttctctaccagagcggtgggatgcagtgggacgtggcccagcgctcaggcaagccggtgctcatgggcttctctagtggagatggctttttcgaaaacagcccactgatgtcccagccagtgtgggagaggtatcgccctgatagattcctgaattccaactcaggcctccaagggctgcagttctacgggctacaccgggaagaaaggcccaactaccgtctcgagtgcctgcagtggctgaagagccagcctcggtggcccagctggggctggaaccaggtctcctgcccttgttcctggcagcagggacgacgggacttacgattccaacccgtcagcataggtcgctggggcctcggcagtaggcagctgtgcagcttcacctcttggcgaggaggcgtgtgctgcagctacgggccctggggagagtttcgtgaaggctggcacgtgcagcgtccttggcagttggcccaggaactggagccacagagctggtgctgccgctggaatgacaagccctacctctgtgccctgtaccagcagaggcggccccacgtgggctgtgctacatacaggcccccacagcccgcctggatgttcggggacccccacatcaccaccttggatggtgtcagttacaccttcaatgggctgggggacttcctgctggtcggggcccaagacgggaactcctccttcctgcttcagggccgcaccgcccagactggctcagcccaggccaccaacttcatcgcctttgcggctcagtaccgctccagcagcctgggccccgtcacggtccaatggctccttgagcctcacgacgcaatccgtgtcctgctggataaccagactgtgacatttcagcctgaccatgaagacggcggaggccaggagacgttcaacgccaccggagtcctcctgagccgcaacggctctgaggtctccgccagcttcgacggctgggccaccgtctcggtgatcgcgctctccaacatcctccactcctccgccagcctcccgcccgagtaccagaaccgcacggaggggctcctgggggtctggaataacaatccagaggacgacttcaggatgcccaatggctccaccattcccccagggagccctgaggagatgcttttccactttggaatgacctggcagatcaacgggacaggcctccttggcaagaggaatgaccagctgccttccaacttcacccctgttttctactcacaactgcaaaaaaacagctcctgggctgaacatttgatctccaactgtgacggagatagctcatgcatctatgacaccctggccctgcgcaacgcaagcatcggacttcacacgagggaagtcagtaaaaactacgagcaggcgaacgccaccctcaatcagtacccgccctccatcaatggtggtcgtgtgattgaagcctacaaggggcagaccacgctgattcagtacaccagcaatgctgaggatgccaacttcacgctcagagacagctgcaccgacttggagctctttgagaatgggacgttgctgtggacacccaagtcgctggagccattcactctggagattctagcaagaagtgccaagattggcttggcatctgcactccagcccaggactgtggtctgccattgcaatgcagagagccagtgtttgtacaatcagaccagcagggtgggcaactcctccctggaggtggctggctgcaagtgtgacgggggcaccttcggccgctactgcgagggctccgaggatgcctgtgaggagccgtgcttcccgagtgtccactgcgttcctgggaagggctgcgaggcctgccctccaaacctgactggggatgggcggcactgtgcggctctggggagctctttcctgtgtcagaaccagtcctgccctgtgaattactgctacaatcaaggccactgctacatctcccagactctgggctgtcagcccatgtgcacctgccccccagccttcactgacagccgctgcttcctggctgggaacaacttcagtccaactgtcaacctagaacttcccttaagagtcatccagctcttgctcagtgaagaggaaaatgcctccatggcagaggtcaacgcctcggtggcatacagactggggaccctggacatgcgggcctttctccgcaacagccaagtggaacgaatcgattctgcagcaccggcctcgggaagccccatccaacactggatggtcatctcggagttccagtaccgccctcggggcccggtcattgacttcctgaacaaccagctgctggccgcggtggtggaggcgttcttataccacgttccacggaggagtgaggagcccaggaacgacgtggtcttccagcccatttccggggaagacgtgcgcgatgtgacagccctgaacgtgagcacgctgaaggcttacttcagatgcgatggctacaagggctacgacctggtctacagcccccagagcggcttcacctgcgtgtccccgtgcagtaggggctactgtgaccatggaggccagtgccagcacctgcccagtgggccccgctgcagctgtgtgtccttctccatctacacggcctggggcgagcactgtgagcacctgagcatgaaactcgacgcgttcttcggcatcttctttggggccctgggcggcctcttgctgctgggggtcgggacgttcgtggtcctgcgcttctggggttgctccggggccaggttctcctatttcctgaactcagctgaggccttgccttgaaggggcagctgtggcctaggctacctcaagactcacctcatccttaccgcacatttaaggcgccattgcttttgggagactggaaaagggaaggtgactgaaggctgtcaggattcttcaaggagaatgaatactgggaatcaagacaagactataccttatccataggcgcaggtgcacagggggaggccataaagatcaaacatgcatggatgggtcctcacgcagacacacccacagaaggacactagcctgtgcacgcgcgcgtgcacacacacacacacacacacgagttcataatgtggtgatggccctaagttaagcaaaatgcttctgcacacaaaactctctggtttacttcaaattaactctatttaaataaagtctctctgactttttgtgtctccaaaaaaaaaa

SEQ ID NO: 264948 - DNA, 4255 bp, Homo sapiens
  misc_feature (1)..(1): n is a, c, g, or t
ntacagccccaaggtcgctccctctgggccctttcttccccattcttcccagcagcccaaagctctggtgggacaggggcagcccctggggagggaggagaggacccaggaacccggctaggagggtggcccacccatttccagtgtgacctgttcccattcccccatgtctcctcccatccctcccgccactcagctcaggctgatgagaagcagagcaacgggtgtatcggtgttttctttcctggtggggtagtggggtggggctgaggagagaaaagggtgattagcgtggggccccgccctcttttgtcctcttcccaggttccctggccccttcggagaaacgcacttggttcgggccagccgcctgaggggacgggctcacgtctgctcctcacactgcagctgctgggccgtggagcttccccgggagccagggggacttttgccgcagccatgaagggggcacgctggaggagggtcccctgggtgtccctgagctgcctgtgtctctgcctccttccgcatgtggtcccagggagtttccctcttcccctatggggcagacgccggggacctggagttcgtcaggaggaccgtggacttcacctccccactcttcaagccggcgactggcttcccccttggctcctctctccgtgattccctctacttcacagacaatggccagatcatcttcccagagtcagactaccagattttctcctaccccaacccactcccaacaggcttcacaggccgggaccctgtggccctggtggctccgttctgggacgatgctgacttctccactggtcgggggaccacattttatcaggaatacgagacgttctatggtgaacacagcctgctagtccagcaggccgagtcttggattagaaagatcacaaacaacgggggctacaaggccaggtgggccctaaaggtcacgtgggtcaatgcccacgcctatcctgcccagtggaccctcgggagcaacacctaccaagccatcctctccacggacgggagcaggtcctatgccctgtttctctaccagagcggtgggatgcagtgggacgtggcccagcgctcaggcaagccggtgctcatgggcttctctagtggagatggctttttcgaaaacagcccactgatgtcccagccagtgtgggagaggtatcgccctgatagattcctgaattccaactcaggcctccaagggctgcagttctacgggctacaccgggaagaaaggcccaactaccgtctcgagtgcctgcagtggctgaagagccagcctcggtggcccagctggggctggaaccaggtctcctgcccttgttcctggcagcagggacgacgggacttacgattccaacccgtcagcataggtcgctggggcctcggcagtaggcagctgtgcagcttcacctcttggcgaggaggcgtgtgctgcagctacgggccctggggagagtttcgtgaaggctggcacgtgcagcgtccttggcagttggcccaggaactggagccacagagctggtgctgccgctggaatgacaagccctacctctgtgccctgtaccagcagaggcggccccacgtgggctgtgctacatacaggcccccacagcccgcctggatgttcggggacccccacatcaccaccttggatggtgtcagttacaccttcaatgggctgggggacttcctgctggtcggggcccaagacgggaactcctccttcctgcttcagggccgcaccgcccagactggctcagcccaggccaccaacttcatcgcctttgcggctcagtaccgctccagcagcctgggccccgtcacggtccaatggctccttgagcctcacgacgcaatccgtgtcctgctggataaccagactgtgacatttcagcctgaccatgaagacggcggaggccaggagacgttcaacgccaccggagtcctcctgagccgcaacggctctgaggtctccgccagcttcgacggctgggccaccgtctcggtgatcgcgctctccaacatcctccactcctccgccagcctcccgcccgagtaccagaaccgcacggaggggctcctgggggtctggaataacaatccagaggacgacttcaggatgcccaatggctccaccattcccccagggagccctgaggagatgcttttccactttggaatgacctggcagatcaacgggacaggcctccttggcaagaggaatgaccagctgccttccaacttcacccctgttttctactcacaactgcaaaaaaacagctcctgggctgaacatttgatctccaactgtgacggagatagctcatgcatctatgacaccctggccctgcgcaacgcaagcatcggacttcacacgagggaagtcagtaaaaactacgagcaggcgaacgccaccctcaatcagtacccgccctccatcaatggtggtcgtgtgattgaagcctacaaggggcagaccacgctgattcagtacaccagcaatgctgaggatgccaacttcacgctcagagacagctgcaccgacttggagctctttgagaatgggacgttgctgtggacacccaagtcgctggagccattcactctggagattctagcaagaagtgccaagattggcttggcatctgcactccagcccaggactgtggtctgccattgcaatgcagagagccagtgtttgtacaatcagaccagcagggtgggcaactcctccctggaggtggctggctgcaagtgtgacgggggcaccttcggccgctactgcgagggctccgaggatgcctgtgaggagccgtgcttcccgagtgtccactgcgttcctgggaagggctgcgaggcctgccctccaaacctgactggggatgggcggcactgtgcggctctggggagctctttcctgtgtcagaaccagtcctgccctgtgaattactgctacaatcaaggccactgctacatctcccagactctgggctgtcagcccatgtgcacctgccccccagccttcactgacagccgctgcttcctggctgggaacaacttcagtccaactgtcaacctagaacttcccttaagagtcatccagctcttgctcagtgaagaggaaaatgcctccatggcagaggtcaacgcctcggtggcatacagactggggaccctggacatgcgggcctttctccgcaacagccaagtggaacgaatcgattctgcagcaccggcctcgggaagccccatccaacactggatggtcatctcggagttccagtaccgccctcggggcccggtcattgacttcctgaacaaccagctgctggccgcggtggtggaggcgttcttataccacgttccacggaggagtgaggagcccaggaacgacgtggtcttccagcccatttccggggaagacgtgcgcgatgtgacagccctgaacgtgagcacgctgaaggcttacttcagatgcgatggctacaagggctacgacctggtctacagcccccagagcggcttcacctgcgtgtccccgtgcagtaggggctactgtgaccatggaggccagtgccagcacctgcccagtgggccccgctgcagctgtgtgtccttctccatctacacggcctggggcgagcactgtgagcacctgagcatgaaactcgacgcgttcttcggcatcttctttggggccctgggcggcctcttgctgctgggggtcgggacgttcgtggtcctgcgcttctggggttgctccggggccaggttctcctatttcctgaactcagctgaggccttgccttgaaggggcagctgtggcctaggctacctcaagactcacctcatccttaccgcacatttaaggcgccattgcttttgggagactggaaaagggaaggtgactgaaggctgtcaggattcttcaaggagaatgaatactgggaatcaagacaagactataccttatccataggcgcaggtgcacagggggaggccataaagatcaaacatgcatggatgggtcctcacgcagacacacccacagaaggacactagcctgtgcacgcgcgcgtgcacacacacacacacacacacgagttcataatgtggtgatggccctaagttaagcaaaatgcttctgcacacaaaactctctggtttacttcaaattaactctatttaaataaagtctctctgactttttgtgtctccaaaaaaaaaa

SEQ ID NO: 264949 - DNA, 411 bp, Homo sapiens
actacagcgatcccccctggctgctcaggtctcgaggaggcgtgtgctgcagctacgggccctggggagagtttcgtgaaggctggcacgtgcagcgtccttggcagttgggtgcgtgagtccgtgatctcaaccccaccttcccggccaagtaggggaccctcagcatgaagcctctcgtcctcattccttcccagacccttcccctctctgggcctccacttcctgatcgggtaacgttaggaagcttccaacatccccaccagcggacattcggggatgtatgagctgagagcctctttcctcatctctatacctggctccacatccccaggccagagtggggccatttctccaggcaagaagagagcgcctaggctgaccccgtccctgtagacccagatgagcagg

SEQ ID NO: 264950 - DNA, 7386 bp, Homo sapiens
  misc_feature (1)..(1): n is a, c, g, or t
ntacagccccaaggtcgctccctctgggccctttcttccccattcttcccagcagcccaaagctctggtgggacaggggcagcccctggggagggaggagaggacccaggaacccggctaggagggtggcccacccatttccagtgtgacctgttcccattcccccatgtctcctcccatccctcccgccactcagctcaggctgatgagaagcagagcaacgggtgtatcggtgttttctttcctggtggggtagtggggtggggctgaggagagaaaagggtgattagcgtggggccccgccctcttttgtcctcttcccaggttccctggccccttcggagaaacgcacttggttcgggccagccgcctgaggggacgggctcacgtctgctcctcacactgcagctgctgggccgtggagcttccccgggagccagggggacttttgccgcagccatgaagggggcacgctggaggagggtcccctgggtgtccctgagctgcctgtgtctctgcctccttccgcatgtggtcccaggaaccacagaggacacattaataactggaagtaaaactcctgccccagtcacctcaacaggctcaacaacagcgacactagagggacaatcaactgcagcttcttcaaggacctctaatcaggacatatcagcttcatctcagaaccaccagactaagagcacggagaccaccagcaaagctcaaaccgacaccctcacgcagatgatgacatcaactcttttttcttccccaagtgtacacaatgtgatggagactgttacgcaggagacagctcctccagatgaaatgaccacatcatttccctccagtgtcaccaacacactcatgatgacatcaaagactataacaatgacaacctccacagactccactcttggaaacacagaagagacatcaacagcaggaactgaaagttctaccccagtgacctcagcagtctcaataacagctggacaggaaggacaatcacgaacaacttcctggaggacctctatccaagacacatcagcttcttctcagaaccactggactcggagcacgcagaccaccagggaatctcaaaccagcaccctaacacacagaaccacttcaactccttctttctctccaagtgtacacaatgtgacagggactgtttctcagaagacatctccttcaggtgaaacagctacctcatccctctgtagtgtcacaaacacatccatgatgacatcagagaagataacagtgacaacctccacaggctccactcttggaaacccaggggagacatcatcagtacctgttactggaagtcttatgccagtcacctcagcagccttagtaacagttgatccagaaggacaatcaccagcaactttctcaaggacttctactcaggacacaacagctttttctaagaaccaccagactcagagcgtggagaccaccagagtatctcaaatcaacaccctcaacaccctcacaccggttacaacatcaactgttttatcctcaccaagtggattcaacccaagtggaacagtttctcaggagacattcccttctggtgaaacaaccatctcatccccttccagtgtcagcaatacattcctggtaacatcaaaggtgttcagaatgccaatctccagagactctactcttggaaacacagaggagacatcactatctgtaagtggaaccatttctgcaatcacttccaaagtttcaaccatatggtggtcagacactctgtcaacagcactctcccccagttctctacctccaaaaatatccacagctttccacacccagcagagtgaaggtgcagagaccacaggacggcctcatgagaggagctcattctctccaggtgtgtctcaagaaatatttactctacatgaaacaacaacatggccttcctcattctccagcaaaggccacacaacttggtcacaaacagaactgccctcaacatcaacaggtgctgccactaggcttgtcacaggaaatccatctacaagggcagctggcactattccaagggtcccctctaaggtctcagcaataggggaaccaggagagcccaccacatactcctcccacagcacaactctcccaaaaacaacaggggcaggcgcccagacacaatggacacaagaaacggggaccactggagaggctcttctcagcagcccaagctatagtgtgattcagatgataaaaacggccacatccccatcttcttcacctatgctggatagacacacatcacaacaaattacaacggcaccatcaacaaatcattcaacaatacattccacaagcacctctcctcaggaatcaccagctgtttcccaaaggggtcacactcgagccccgcagaccacacaagaatcacaaaccacgaggtccgtctcccccatgactgacaccaagacagtcaccaccccaggttcttccttcacagccagtgggcactcgccctcagaaattgttcctcaggacgcacccaccataagtgcagcaacaacctttgccccagctcccaccgggaatggtcacacaacccaggccccgaccacagcactgcaggcagcacccagcagccatgatgccaccctggggccctcaggaggcacgtcactttccaaaacaggtgcccttactctggccaactctgtagtgtcaacaccagggggcccagaaggacaatggacatcagcctctgccagcacctcacctgacacagcagcagccatgacccatacccaccaggctgagagcacagaggcctctggacaaacacagaccagcgaaccggcctcctcagggtcacgaaccacctcagcgggcacagctaccccttcctcatccggggcgagtggcacaacaccttcaggaagcgaaggaatatccacctcaggagagacgacaaggttttcatcaaacccctccagggacagtcacacaacccagtcaacaaccgaattgctgtccgcctcagccagtcatggtgccatcccagtaagcacaggaatggcgtcttcgatcgtccccggcacctttcatcccaccctctctgaggcctccactgcagggagaccgacaggacagtcaagcccaacttctcccagtgcctctcctcaggagacagccgccatttcccggatggcccagactcagaggacaggaaccagcagagggtctgacactatcagcctggcgtcccaggcaaccgacaccttctcaacagtcccacccacacctccatcgatcacatccagtgggcttacatctccacaaacccagacccacactctgtcaccttcagggtctggtaaaaccttcaccacggccctcatcagcaacgccacccctcttcctgtcaccagcacctcctcagcctccacaggtcacgccacccctcttgctgtcagcagtgctacctcagcttccacagtatcctcggactcccctctgaagatggaaacatcaggaatgacaacaccgtcactgaagacagacggtgggagacgcacagccacatcaccaccccccacaacctcccagaccatcatttccaccattcccagcactgccatgcacacccgctccacagctgcccccatccccatcctgcctgagagaggagtttccctcttcccctatggggcagacgccggggacctggagttcgtcaggaggaccgtggacttcacctccccactcttcaagccggcgactggcttcccccttggctcctctctccgtgattccctctacttcacagacaatggccagatcatcttcccagagtcagactaccagattttctcctaccccaacccactcccaacaggcttcacaggccgggaccctgtggccctggtggctccgttctgggacgatgctgacttctccactggtcgggggaccacattttatcaggaatacgagacgttctatggtgaacacagcctgctagtccagcaggccgagtcttggattagaaagatcacaaacaacgggggctacaaggccaggtgggccctaaaggtcacgtgggtcaatgcccacgcctatcctgcccagtggaccctcgggagcaacacctaccaagccatcctctccacggacgggagcaggtcctatgccctgtttctctaccagagcggtgggatgcagtgggacgtggcccagcgctcaggcaagccggtgctcatgggcttctctagtggagatggctttttcgaaaacagcccactgatgtcccagccagtgtgggagaggtatcgccctgatagattcctgaattccaactcaggcctccaagggctgcagttctacgggctacaccgggaagaaaggcccaactaccgtctcgagtgcctgcagtggctgaagagccagcctcggtggcccagctggggctggaaccaggtctcctgcccttgttcctggcagcagggacgacgggacttacgattccaacccgtcagcataggtcgctggggcctcggcagtaggcagctgtgcagcttcacctcttggcgaggaggcgtgtgctgcagctacgggccctggggagagtttcgtgaaggctggcacgtgcagcgtccttggcagttggcccaggaactggagccacagagctggtgctgccgctggaatgacaagccctacctctgtgccctgtaccagcagaggcggccccacgtgggctgtgctacatacaggcccccacagcccgcctggatgttcggggacccccacatcaccaccttggatggtgtcagttacaccttcaatgggctgggggacttcctgctggtcggggcccaagacgggaactcctccttcctgcttcagggccgcaccgcccagactggctcagcccaggccaccaacttcatcgcctttgcggctcagtaccgctccagcagcctgggccccgtcacggtccaatggctccttgagcctcacgacgcaatccgtgtcctgctggataaccagactgtgacatttcagcctgaccatgaagacggcggaggccaggagacgttcaacgccaccggagtcctcctgagccgcaacggctctgaggtctccgccagcttcgacggctgggccaccgtctcggtgatcgcgctctccaacatcctccactcctccgccagcctcccgcccgagtaccagaaccgcacggaggggctcctgggggtctggaataacaatccagaggacgacttcaggatgcccaatggctccaccattcccccagggagccctgaggagatgcttttccactttggaatgacctggcagatcaacgggacaggcctccttggcaagaggaatgaccagctgccttccaacttcacccctgttttctactcacaactgcaaaaaaacagctcctgggctgaacatttgatctccaactgtgacggagatagctcatgcatctatgacaccctggccctgcgcaacgcaagcatcggacttcacacgagggaagtcagtaaaaactacgagcaggcgaacgccaccctcaatcagtacccgccctccatcaatggtggtcgtgtgattgaagcctacaaggggcagaccacgctgattcagtacaccagcaatgctgaggatgccaacttcacgctcagagacagctgcaccgacttggagctctttgagaatgggacgttgctgtggacacccaagtcgctggagccattcactctggagattctagcaagaagtgccaagattggcttggcatctgcactccagcccaggactgtggtctgccattgcaatgcagagagccagtgtttgtacaatcagaccagcagggtgggcaactcctccctggaggtggctggctgcaagtgtgacgggggcaccttcggccgctactgcgagggctccgaggatgcctgtgaggagccgtgcttcccgagtgtccactgcgttcctgggaagggctgcgaggcctgccctccaaacctgactggggatgggcggcactgtgcggctctggggagctctttcctgtgtcagaaccagtcctgccctgtgaattactgctacaatcaaggccactgctacatctcccagactctgggctgtcagcccatgtgcacctgccccccagccttcactgacagccgctgcttcctggctgggaacaacttcagtccaactgtcaacctagaacttcccttaagagtcatccagctcttgctcagtgaagaggaaaatgcctccatggcagaggtcaacgcctcggtggcatacagactggggaccctggacatgcgggcctttctccgcaacagccaagtggaacgaatcgattctgcagcaccggcctcgggaagccccatccaacactggatggtcatctcggagttccagtaccgccctcggggcccggtcattgacttcctgaacaaccagctgctggccgcggtggtggaggcgttcttataccacgttccacggaggagtgaggagcccaggaacgacgtggtcttccagcccatttccggggaagacgtgcgcgatgtgacagccctgaacgtgagcacgctgaaggcttacttcagatgcgatggctacaagggctacgacctggtctacagcccccagagcggcttcacctgcgtgtccccgtgcagtaggggctactgtgaccatggaggccagtgccagcacctgcccagtgggccccgctgcagctgtgtgtccttctccatctacacggcctggggcgagcactgtgagcacctgagcatgaaactcgacgcgttcttcggcatcttctttggggccctgggcggcctcttgctgctgggggtcgggacgttcgtggtcctgcgcttctggggttgctccggggccaggttctcctatttcctgaactcagctgaggccttgccttgaaggggcagctgtggcctaggctacctcaagactcacctcatccttaccgcacatttaaggcgccattgcttttgggagactggaaaagggaaggtgactgaaggctgtcaggattcttcaaggagaatgaatactgggaatcaagacaagactataccttatccataggcgcaggtgcacagggggaggccataaagatcaaacatgcatggatgggtcctcacgcagacacacccacagaaggacactagcctgtgcacgcgcgcgtgcacacacacacacacacacacgagttcataatgtggtgatggccctaagttaagcaaaatgcttctgcacacaaaactctctggtttacttcaaattaactctatttaaataaagtctctctgactttttgtgtctccaaaaaaaaaa

SEQ ID NO: 264951 - DNA, 7230 bp, Homo sapiens
  misc_feature (1)..(1): n is a, c, g, or t
ntacagccccaaggtcgctccctctgggccctttcttccccattcttcccagcagcccaaagctctggtgggacaggggcagcccctggggagggaggagaggacccaggaacccggctaggagggtggcccacccatttccagtgtgacctgttcccattcccccatgtctcctcccatccctcccgccactcagctcaggctgatgagaagcagagcaacgggtgtatcggtgttttctttcctggtggggtagtggggtggggctgaggagagaaaagggtgattagcgtggggccccgccctcttttgtcctcttcccaggttccctggccccttcggagaaacgcacttggttcgggccagccgcctgaggggacgggctcacgtctgctcctcacactgcagctgctgggccgtggagcttccccgggagccagggggacttttgccgcagccatgaagggggcacgctggaggagggtcccctgggtgtccctgagctgcctgtgtctctgcctccttccgcatgtggtcccaggaaccacagaggacacattaataactggaagtaaaactcctgccccagtcacctcaacaggctcaacaacagcgacactagagggacaatcaactgcagcttcttcaaggacctctaatcaggacatatcagcttcatctcagaaccaccagactaagagcacggagaccaccagcaaagctcaaaccgacaccctcacgcagatgatgacatcaactcttttttcttccccaagtgtacacaatgtgatggagactgttacgcaggagacagctcctccagatgaaatgaccacatcatttccctccagtgtcaccaacacactcatgatgacatcaaagactataacaatgacaacctccacagactccactcttggaaacacagaagagacatcaacagcaggaactgaaagttctaccccagtgacctcagcagtctcaataacagctggacaggaaggacaatcacgaacaacttcctggaggacctctatccaagacacatcagcttcttctcagaaccactggactcggagcacgcagaccaccagggaatctcaaaccagcaccctaacacacagaaccacttcaactccttctttctctccaagtgtacacaatgtgacagggactgtttctcagaagacatctccttcaggtgaaacagctacctcatccctctgtagtgtcacaaacacatccatgatgacatcagagaagataacagtgacaacctccacaggctccactcttggaaacccaggggagacatcatcagtacctgttactggaagtcttatgccagtcacctcagcagccttagtaacagttgatccagaaggacaatcaccagcaactttctcaaggacttctactcaggacacaacagctttttctaagaaccaccagactcagagcgtggagaccaccagagtatctcaaatcaacaccctcaacaccctcacaccggttacaacatcaactgttttatcctcaccaagtggattcaacccaagtggaacagtttctcaggagacattcccttctggtgaaacaaccatctcatccccttccagtgtcagcaatacattcctggtaacatcaaaggtgttcagaatgccaatctccagagactctactcttggaaacacagaggagacatcactatctgtaagtggaaccatttctgcaatcacttccaaagtttcaaccatatggtggtcagacactctgtcaacagcactctcccccagttctctacctccaaaaatatccacagctttccacacccagcagagtgaaggtgcagagaccacaggacggcctcatgagaggagctcattctctccaggtgtgtctcaagaaatatttactctacatgaaacaacaacatggccttcctcattctccagcaaaggccacacaacttggtcacaaacagaactgccctcaacatcaacaggtgctgccactaggcttgtcacaggaaatccatctacaagggcagctggcactattccaagggtcccctctaaggtctcagcaataggggaaccaggagagcccaccacatactcctcccacagcacaactctcccaaaaacaacaggggcaggcgcccagacacaatggacacaagaaacggggaccactggagaggctcttctcagcagcccaagctatagtgtgattcagatgataaaaacggccacatccccatcttcttcacctatgctggatagacacacatcacaacaaattacaacggcaccatcaacaaatcattcaacaatacattccacaagcacctctcctcaggaatcaccagctgtttcccaaaggggtcacactcgagccccgcagaccacacaagaatcacaaaccacgaggtccgtctcccccatgactgacaccaagacagtcaccaccccaggttcttccttcacagccagtgggcactcgccctcagaaattgttcctcaggacgcacccaccataagtgcagcaacaacctttgccccagctcccaccgggaatggtcacacaacccaggccccgaccacagcactgcaggcagcacccagcagccatgatgccaccctggggccctcaggaggcacgtcactttccaaaacaggtgcccttactctggccaactctgtagtgtcaacaccagggggcccagaaggacaatggacatcagcctctgccagcacctcacctgacacagcagcagccatgacccatacccaccaggctgagagcacagaggcctctggacaaacacagaccagcgaaccggcctcctcagggtcacgaaccacctcagcgggcacagctaccccttcctcatccggggcgagtggcacaacaccttcaggaagcgaaggaatatccacctcaggagagacgacaaggttttcatcaaacccctccagggacagtcacacaacccagtcaacaaccgaattgctgtccgcctcagccagtcatggtgccatcccagtaagcacaggaatggcgtcttcgatcgtccccggcacctttcatcccaccctctctgaggcctccactgcagggagaccgacaggacagtcaagcccaacttctcccagtgcctctcctcaggagacagccgccatttcccggatggcccagactcagaggacaggaaccagcagagggtctgacactatcagcctggcgtcccaggcaaccgacaccttctcaacagtcccacccacacctccatcgatcacatccagtgggcttacatctccacaaacccagacccacactctgtcaccttcagggtctggtaaaaccttcaccacggccctcatcagcaacgccacccctcttcctgtcaccagcacctcctcagcctccacaggtcacgccacccctcttgctgtcagcagtgctacctcagcttccacagtatcctcggactcccctctgaagatggaaacatcaggaatgacaacaccgtcactgaagacagacggtgggagacgcacagccacatcaccaccccccacaacctcccagaccatcatttccaccattcccagcactgccatgcacacccgctccacagctgcccccatccccatcctgcctgagagaggagtttccctcttcccctatggggcagacgccggggacctggagttcgtcaggaggaccgtggacttcacctccccactcttcaagccggcgactggcttcccccttggctcctctctccgtgattccctctacttcacagacaatggccagatcatcttcccagagtcagactaccagattttctcctaccccaacccactcccaacaggcttcacaggccgggaccctgtggccctggtggctccgttctgggacgatgctgacttctccactggtcgggggaccacattttatcagagcaacacctaccaagccatcctctccacggacgggagcaggtcctatgccctgtttctctaccagagcggtgggatgcagtgggacgtggcccagcgctcaggcaagccggtgctcatgggcttctctagtggagatggctttttcgaaaacagcccactgatgtcccagccagtgtgggagaggtatcgccctgatagattcctgaattccaactcaggcctccaagggctgcagttctacgggctacaccgggaagaaaggcccaactaccgtctcgagtgcctgcagtggctgaagagccagcctcggtggcccagctggggctggaaccaggtctcctgcccttgttcctggcagcagggacgacgggacttacgattccaacccgtcagcataggtcgctggggcctcggcagtaggcagctgtgcagcttcacctcttggcgaggaggcgtgtgctgcagctacgggccctggggagagtttcgtgaaggctggcacgtgcagcgtccttggcagttggcccaggaactggagccacagagctggtgctgccgctggaatgacaagccctacctctgtgccctgtaccagcagaggcggccccacgtgggctgtgctacatacaggcccccacagcccgcctggatgttcggggacccccacatcaccaccttggatggtgtcagttacaccttcaatgggctgggggacttcctgctggtcggggcccaagacgggaactcctccttcctgcttcagggccgcaccgcccagactggctcagcccaggccaccaacttcatcgcctttgcggctcagtaccgctccagcagcctgggccccgtcacggtccaatggctccttgagcctcacgacgcaatccgtgtcctgctggataaccagactgtgacatttcagcctgaccatgaagacggcggaggccaggagacgttcaacgccaccggagtcctcctgagccgcaacggctctgaggtctccgccagcttcgacggctgggccaccgtctcggtgatcgcgctctccaacatcctccactcctccgccagcctcccgcccgagtaccagaaccgcacggaggggctcctgggggtctggaataacaatccagaggacgacttcaggatgcccaatggctccaccattcccccagggagccctgaggagatgcttttccactttggaatgacctggcagatcaacgggacaggcctccttggcaagaggaatgaccagctgccttccaacttcacccctgttttctactcacaactgcaaaaaaacagctcctgggctgaacatttgatctccaactgtgacggagatagctcatgcatctatgacaccctggccctgcgcaacgcaagcatcggacttcacacgagggaagtcagtaaaaactacgagcaggcgaacgccaccctcaatcagtacccgccctccatcaatggtggtcgtgtgattgaagcctacaaggggcagaccacgctgattcagtacaccagcaatgctgaggatgccaacttcacgctcagagacagctgcaccgacttggagctctttgagaatgggacgttgctgtggacacccaagtcgctggagccattcactctggagattctagcaagaagtgccaagattggcttggcatctgcactccagcccaggactgtggtctgccattgcaatgcagagagccagtgtttgtacaatcagaccagcagggtgggcaactcctccctggaggtggctggctgcaagtgtgacgggggcaccttcggccgctactgcgagggctccgaggatgcctgtgaggagccgtgcttcccgagtgtccactgcgttcctgggaagggctgcgaggcctgccctccaaacctgactggggatgggcggcactgtgcggctctggggagctctttcctgtgtcagaaccagtcctgccctgtgaattactgctacaatcaaggccactgctacatctcccagactctgggctgtcagcccatgtgcacctgccccccagccttcactgacagccgctgcttcctggctgggaacaacttcagtccaactgtcaacctagaacttcccttaagagtcatccagctcttgctcagtgaagaggaaaatgcctccatggcagaggtcaacgcctcggtggcatacagactggggaccctggacatgcgggcctttctccgcaacagccaagtggaacgaatcgattctgcagcaccggcctcgggaagccccatccaacactggatggtcatctcggagttccagtaccgccctcggggcccggtcattgacttcctgaacaaccagctgctggccgcggtggtggaggcgttcttataccacgttccacggaggagtgaggagcccaggaacgacgtggtcttccagcccatttccggggaagacgtgcgcgatgtgacagccctgaacgtgagcacgctgaaggcttacttcagatgcgatggctacaagggctacgacctggtctacagcccccagagcggcttcacctgcgtgtccccgtgcagtaggggctactgtgaccatggaggccagtgccagcacctgcccagtgggccccgctgcagctgtgtgtccttctccatctacacggcctggggcgagcactgtgagcacctgagcatgaaactcgacgcgttcttcggcatcttctttggggccctgggcggcctcttgctgctgggggtcgggacgttcgtggtcctgcgcttctggggttgctccggggccaggttctcctatttcctgaactcagctgaggccttgccttgaaggggcagctgtggcctaggctacctcaagactcacctcatccttaccgcacatttaaggcgccattgcttttgggagactggaaaagggaaggtgactgaaggctgtcaggattcttcaaggagaatgaatactgggaatcaagacaagactataccttatccataggcgcaggtgcacagggggaggccataaagatcaaacatgcatggatgggtcctcacgcagacacacccacagaaggacactagcctgtgcacgcgcgcgtgcacacacacacacacacacacgagttcataatgtggtgatggccctaagttaagcaaaatgcttctgcacacaaaactctctggtttacttcaaattaactctatttaaataaagtctctctgactttttgtgtctccaaaaaaaaaa

SEQ ID NO: 264952 - DNA, 7226 bp, Homo sapiens
  misc_feature (1)..(1): n is a, c, g, or t
ntacagccccaaggtcgctccctctgggccctttcttccccattcttcccagcagcccaaagctctggtgggacaggggcagcccctggggagggaggagaggacccaggaacccggctaggagggtggcccacccatttccagtgtgacctgttcccattcccccatgtctcctcccatccctcccgccactcagctcaggctgatgagaagcagagcaacgggtgtatcggtgttttctttcctggtggggtagtggggtggggctgaggagagaaaagggtgattagcgtggggccccgccctcttttgtcctcttcccaggttccctggccccttcggagaaacgcacttggttcgggccagccgcctgaggggacgggctcacgtctgctcctcacactgcagctgctgggccgtggagcttccccgggagccagggggacttttgccgcagccatgaagggggcacgctggaggagggtcccctgggtgtccctgagctgcctgtgtctctgcctccttccgcatgtggtcccaggaaccacagaggacacattaataactggaagtaaaactcctgccccagtcacctcaacaggctcaacaacagcgacactagagggacaatcaactgcagcttcttcaaggacctctaatcaggacatatcagcttcatctcagaaccaccagactaagagcacggagaccaccagcaaagctcaaaccgacaccctcacgcagatgatgacatcaactcttttttcttccccaagtgtacacaatgtgatggagactgttacgcaggagacagctcctccagatgaaatgaccacatcatttccctccagtgtcaccaacacactcatgatgacatcaaagactataacaatgacaacctccacagactccactcttggaaacacagaagagacatcaacagcaggaactgaaagttctaccccagtgacctcagcagtctcaataacagctggacaggaaggacaatcacgaacaacttcctggaggacctctatccaagacacatcagcttcttctcagaaccactggactcggagcacgcagaccaccagggaatctcaaaccagcaccctaacacacagaaccacttcaactccttctttctctccaagtgtacacaatgtgacagggactgtttctcagaagacatctccttcaggtgaaacagctacctcatccctctgtagtgtcacaaacacatccatgatgacatcagagaagataacagtgacaacctccacaggctccactcttggaaacccaggggagacatcatcagtacctgttactggaagtcttatgccagtcacctcagcagccttagtaacagttgatccagaaggacaatcaccagcaactttctcaaggacttctactcaggacacaacagctttttctaagaaccaccagactcagagcgtggagaccaccagagtatctcaaatcaacaccctcaacaccctcacaccggttacaacatcaactgttttatcctcaccaagtggattcaacccaagtggaacagtttctcaggagacattcccttctggtgaaacaaccatctcatccccttccagtgtcagcaatacattcctggtaacatcaaaggtgttcagaatgccaatctccagagactctactcttggaaacacagaggagacatcactatctgtaagtggaaccatttctgcaatcacttccaaagtttcaaccatatggtggtcagacactctgtcaacagcactctcccccagttctctacctccaaaaatatccacagctttccacacccagcagagtgaaggtgcagagaccacaggacggcctcatgagaggagctcattctctccaggtgtgtctcaagaaatatttactctacatgaaacaacaacatggccttcctcattctccagcaaaggccacacaacttggtcacaaacagaactgccctcaacatcaacaggtgctgccactaggcttgtcacaggaaatccatctacaagggcagctggcactattccaagggtcccctctaaggtctcagcaataggggaaccaggagagcccaccacatactcctcccacagcacaactctcccaaaaacaacaggggcaggcgcccagacacaatggacacaagaaacggggaccactggagaggctcttctcagcagcccaagctatagtgtgattcagatgataaaaacggccacatccccatcttcttcacctatgctggatagacacacatcacaacaaattacaacggcaccatcaacaaatcattcaacaatacattccacaagcacctctcctcaggaatcaccagctgtttcccaaaggggtcacactcgagccccgcagaccacacaagaatcacaaaccacgaggtccgtctcccccatgactgacaccaagacagtcaccaccccaggttcttccttcacagccagtgggcactcgccctcagaaattgttcctcaggacgcacccaccataagtgcagcaacaacctttgccccagctcccaccgggaatggtcacacaacccaggccccgaccacagcactgcaggcagcacccagcagccatgatgccaccctggggccctcaggaggcacgtcactttccaaaacaggtgcccttactctggccaactctgtagtgtcaacaccagggggcccagaaggacaatggacatcagcctctgccagcacctcacctgacacagcagcagccatgacccatacccaccaggctgagagcacagaggcctctggacaaacacagaccagcgaaccggcctcctcagggtcacgaaccacctcagcgggcacagctaccccttcctcatccggggcgagtggcacaacaccttcaggaagcgaaggaatatccacctcaggagagacgacaaggttttcatcaaacccctccagggacagtcacacaacccagtcaacaaccgaattgctgtccgcctcagccagtcatggtgccatcccagtaagcacaggaatggcgtcttcgatcgtccccggcacctttcatcccaccctctctgaggcctccactgcagggagaccgacaggacagtcaagcccaacttctcccagtgcctctcctcaggagacagccgccatttcccggatggcccagactcagaggacaggaaccagcagagggtctgacactatcagcctggcgtcccaggcaaccgacaccttctcaacagtcccacccacacctccatcgatcacatccagtgggcttacatctccacaaacccagacccacactctgtcaccttcagggtctggtaaaaccttcaccacggccctcatcagcaacgccacccctcttcctgtcaccagcacctcctcagcctccacaggtcacgccacccctcttgctgtcagcagtgctacctcagcttccacagtatcctcggactcccctctgaagatggaaacatcaggaatgacaacaccgtcactgaagacagacggtgggagacgcacagccacatcaccaccccccacaacctcccagaccatcatttccaccattcccagcactgccatgcacacccgctccacagctgcccccatccccatcctgcctgagagaggagtttccctcttcccctatggggcagacgccggggacctggagttcgtcaggaggaccgtggacttcacctccccactcttcaagccggcgactggcttcccccttggctcctctctccgtgattccctctacttcacagacaatggccagatcatcttcccagagtcagactaccagattttctcctaccccaacccactcccaacaggcttcacaggccgggaccctgtggccctggtggctccgttctgggacgatgctgacttctccactggtcgggggaccacattttatcaggaatacgagacgttctatggtgaacacagcctgctagtccagcaggccgagtcttggattagaaagatcacaaacaacgggggctacaaggccaggtgggccctaaaggtcacgtgggtcaatgcccacgcctatcctgcccagtggaccctcgggagcaacacctaccaagccatcctctccacggacgggagcaggtcctatgccctgtttctctaccagagcggtgggatgcagtgggacgtggcccagcgctcaggcaagccggtgctcatgggcttctctagtggagatggctttttcgaaaacagcccactgatgtcccagccagtgtgggagaggtatcgccctgatagattcctgaattccaactcaggcctccaagggctgcagttctacgggctacaccgggaagaaaggcccaactaccgtctcgagtgcctgcagtggctgaagagccagcctcggtggcccagctggggctggaaccaggtctcctgcccttgttcctggcagcagggacgacgggacttacgattccaacccgtcagcataggtcgctggggcctcggcagtaggcagctgtgcagcttcacctcttggcgaggaggcgtgtgctgcagctacgggccctggggagagtttcgtgaaggctggcacgtgcagcgtccttggcagttggcccaggaactggagccacagagctggtgctgccgctggaatgacaagccctacctctgtgccctgtaccagcagaggcggccccacgtgggctgtgctacatacaggcccccacagcccgcctggatgttcggggacccccacatcaccaccttggatggtgtcagttacaccttcaatgggctgggggacttcctgctggtcggggcccaagacgggaactcctccttcctgcttcagggccgcaccgcccagactggctcagcccaggccaccaacttcatcgcctttgcggctcagtaccgctccagcagcctgggccccgtcacggtccaatggctccttgagcctcacgacgcaatccgtgtcctgctggataaccagactgtgacatttcagcctgaccatgaagacggcggaggccaggagacgttcaacgccaccggagtcctcctgagccgcaacggctctgaggtctccgccagcttcgacggctgggccaccgtctcggtgatcgcgctctccaacatcctccactcctccgccagcctcccgcccgagtaccagaaccgcacggaggggctcctgggggtctggaataacaatccagaggacgacttcaggatgcccaatggctccaccattcccccagggagccctgaggagatgcttttccactttggaatgacctggcagatcaacgggacaggcctccttggcaagaggaatgaccagctgccttccaacttcacccctgttttctactcacaactgcaaaaaaacagctcctgggctgaacatttgatctccaactgtgacggagatagctcatgcatctatgacaccctggccctgcgcaacgcaagcatcggacttcacacgagggaagtcagtaaaaactacgagcaggcgaacgccaccctcaatcagtacccgccctccatcaatggtggtcgtgtgattgaagcctacaaggggcagaccacgctgattcagtacaccagcaatgctgaggatgccaacttcacgctcagagacagctgcaccgacttggagctctttgagaatgggacgttgctgtggacacccaagtcgctggagccattcactctggagattctagcaagaagtgccaagattggcttggcatctgcactccagcccaggactgtggtctgccattgcaatgcagagagccagtgtttgtacaatcagaccagcagggtgggcaactcctccctggagctctggggagctctttcctgtgtcagaaccagtcctgccctgtgaattactgctacaatcaaggccactgctacatctcccagactctgggctgtcagcccatgtgcacctgccccccagccttcactgacagccgctgcttcctggctgggaacaacttcagtccaactgtcaacctagaacttcccttaagagtcatccagctcttgctcagtgaagaggaaaatgcctccatggcagaggtcaacgcctcggtggcatacagactggggaccctggacatgcgggcctttctccgcaacagccaagtggaacgaatcgattctgcagcaccggcctcgggaagccccatccaacactggatggtcatctcggagttccagtaccgccctcggggcccggtcattgacttcctgaacaaccagctgctggccgcggtggtggaggcgttcttataccacgttccacggaggagtgaggagcccaggaacgacgtggtcttccagcccatttccggggaagacgtgcgcgatgtgacagccctgaacgtgagcacgctgaaggcttacttcagatgcgatggctacaagggctacgacctggtctacagcccccagagcggcttcacctgcgtgtccccgtgcagtaggggctactgtgaccatggaggccagtgccagcacctgcccagtgggccccgctgcagctgtgtgtccttctccatctacacggcctggggcgagcactgtgagcacctgagcatgaaactcgacgcgttcttcggcatcttctttggggccctgggcggcctcttgctgctgggggtcgggacgttcgtggtcctgcgcttctggggttgctccggggccaggttctcctatttcctgaactcagctgaggccttgccttgaaggggcagctgtggcctaggctacctcaagactcacctcatccttaccgcacatttaaggcgccattgcttttgggagactggaaaagggaaggtgactgaaggctgtcaggattcttcaaggagaatgaatactgggaatcaagacaagactataccttatccataggcgcaggtgcacagggggaggccataaagatcaaacatgcatggatgggtcctcacgcagacacacccacagaaggacactagcctgtgcacgcgcgcgtgcacacacacacacacacacacgagttcataatgtggtgatggccctaagttaagcaaaatgcttctgcacacaaaactctctggtttacttcaaattaactctatttaaataaagtctctctgactttttgtgtctccaaaaaaaaaa

SEQ ID NO: 264953 - DNA, 7578 bp, Homo sapiens
  misc_feature (1)..(1): n is a, c, g, or t
  misc_feature (3415)..(3416): n is a, c, g, or t
  misc_feature (3418)..(3418): n is a, c, g, or t
  misc_feature (3426)..(3426): n is a, c, g, or t
  misc_feature (3442)..(3442): n is a, c, g, or t
  misc_feature (3455)..(3455): n is a, c, g, or t
  misc_feature (3465)..(3465): n is a, c, g, or t
  misc_feature (3477)..(3477): n is a, c, g, or t
  misc_feature (3495)..(3495): n is a, c, g, or t
  misc_feature (3511)..(3512): n is a, c, g, or t
  misc_feature (3514)..(3514): n is a, c, g, or t
  misc_feature (3524)..(3524): n is a, c, g, or t
  misc_feature (3535)..(3535): n is a, c, g, or t
  misc_feature (3562)..(3562): n is a, c, g, or t
  misc_feature (3572)..(3572): n is a, c, g, or t
  misc_feature (3582)..(3582): n is a, c, g, or t
  misc_feature (3585)..(3585): n is a, c, g, or t
ntacagccccaaggtcgctccctctgggccctttcttccccattcttcccagcagcccaaagctctggtgggacaggggcagcccctggggagggaggagaggacccaggaacccggctaggagggtggcccacccatttccagtgtgacctgttcccattcccccatgtctcctcccatccctcccgccactcagctcaggctgatgagaagcagagcaacgggtgtatcggtgttttctttcctggtggggtagtggggtggggctgaggagagaaaagggtgattagcgtggggccccgccctcttttgtcctcttcccaggttccctggccccttcggagaaacgcacttggttcgggccagccgcctgaggggacgggctcacgtctgctcctcacactgcagctgctgggccgtggagcttccccgggagccagggggacttttgccgcagccatgaagggggcacgctggaggagggtcccctgggtgtccctgagctgcctgtgtctctgcctccttccgcatgtggtcccaggaaccacagaggacacattaataactggaagtaaaactcctgccccagtcacctcaacaggctcaacaacagcgacactagagggacaatcaactgcagcttcttcaaggacctctaatcaggacatatcagcttcatctcagaaccaccagactaagagcacggagaccaccagcaaagctcaaaccgacaccctcacgcagatgatgacatcaactcttttttcttccccaagtgtacacaatgtgatggagactgttacgcaggagacagctcctccagatgaaatgaccacatcatttccctccagtgtcaccaacacactcatgatgacatcaaagactataacaatgacaacctccacagactccactcttggaaacacagaagagacatcaacagcaggaactgaaagttctaccccagtgacctcagcagtctcaataacagctggacaggaaggacaatcacgaacaacttcctggaggacctctatccaagacacatcagcttcttctcagaaccactggactcggagcacgcagaccaccagggaatctcaaaccagcaccctaacacacagaaccacttcaactccttctttctctccaagtgtacacaatgtgacagggactgtttctcagaagacatctccttcaggtgaaacagctacctcatccctctgtagtgtcacaaacacatccatgatgacatcagagaagataacagtgacaacctccacaggctccactcttggaaacccaggggagacatcatcagtacctgttactggaagtcttatgccagtcacctcagcagccttagtaacagttgatccagaaggacaatcaccagcaactttctcaaggacttctactcaggacacaacagctttttctaagaaccaccagactcagagcgtggagaccaccagagtatctcaaatcaacaccctcaacaccctcacaccggttacaacatcaactgttttatcctcaccaagtggattcaacccaagtggaacagtttctcaggagacattcccttctggtgaaacaaccatctcatccccttccagtgtcagcaatacattcctggtaacatcaaaggtgttcagaatgccaatctccagagactctactcttggaaacacagaggagacatcactatctgtaagtggaaccatttctgcaatcacttccaaagtttcaaccatatggtggtcagacactctgtcaacagcactctcccccagttctctacctccaaaaatatccacagctttccacacccagcagagtgaaggtgcagagaccacaggacggcctcatgagaggagctcattctctccaggtgtgtctcaagaaatatttactctacatgaaacaacaacatggccttcctcattctccagcaaaggccacacaacttggtcacaaacagaactgccctcaacatcaacaggtgctgccactaggcttgtcacaggaaatccatctacaagggcagctggcactattccaagggtcccctctaaggtctcagcaataggggaaccaggagagcccaccacatactcctcccacagcacaactctcccaaaaacaacaggggcaggcgcccagacacaatggacacaagaaacggggaccactggagaggctcttctcagcagcccaagctatagtgtgattcagatgataaaaacggccacatccccatcttcttcacctatgctggatagacacacatcacaacaaattacaacggcaccatcaacaaatcattcaacaatacattccacaagcacctctcctcaggaatcaccagctgtttcccaaaggggtcacactcgagccccgcagaccacacaagaatcacaaaccacgaggtccgtctcccccatgactgacaccaagacagtcaccaccccaggttcttccttcacagccagtgggcactcgccctcagaaattgttcctcaggacgcacccaccataagtgcagcaacaacctttgccccagctcccaccgggaatggtcacacaacccaggccccgaccacagcactgcaggcagcacccagcagccatgatgccaccctggggccctcaggaggcacgtcactttccaaaacaggtgcccttactctggccaactctgtagtgtcaacaccagggggcccagaaggacaatggacatcagcctctgccagcacctcacctgacacagcagcagccatgacccatacccaccaggctgagagcacagaggcctctggacaaacacagaccagcgaaccggcctcctcagggtcacgaaccacctcagcgggcacagctaccccttcctcatccggggcgagtggcacaacaccttcaggaagcgaaggaatatccacctcaggagagacgacaaggttttcatcaaacccctccagggacagtcacacaacccagtcaacaaccgaattgctgtccgcctcagccagtcatggtgccatcccagtaagcacaggaatggcgtcttcgatcgtccccggcacctttcatcccaccctctctgaggcctccactgcagggagaccgacaggacagtcaagcccaacttctcccagtgcctctcctcaggagacagccgccatttcccggatggcccagactcagaggacaggaaccagcagagggtctgacactatcagcctggcgtcccaggcaaccgacaccttctcaacagtcccacccacacctccatcgatcacatccagtgggcttacatctccacaaacccagacccacactctgtcaccttcagggtctggtaaaaccttcaccacggccctcatcagcaacgccacccctcttcctgtcaccnncncttcctcngcatccacaggtcacnccacccctcttcntgtcaccgangcttcctcagtntccacaggtcacgccacncctcttcctgtcaccnncncttcctcagnatccacaggtnacaccacccctcttcctgtcaccgacncttcctcagnatccacaggncangccacccctcttcctgtcaccagcacctcctcagcctccacaggtcacgccacccctcttgctgtcagcagtgctacctcagcttccacagtatcctcggactcccctctgaagatggaaacatcaggaatgacaacaccgtcactgaagacagacggtgggagacgcacagccacatcaccaccccccacaacctcccagaccatcatttccaccattcccagcactgccatgcacacccgctccacagctgcccccatccccatcctgcctgagagaggagtttccctcttcccctatggggcagacgccggggacctggagttcgtcaggaggaccgtggacttcacctccccactcttcaagccggcgactggcttcccccttggctcctctctccgtgattccctctacttcacagacaatggccagatcatcttcccagagtcagactaccagattttctcctaccccaacccactcccaacaggcttcacaggccgggaccctgtggccctggtggctccgttctgggacgatgctgacttctccactggtcgggggaccacattttatcaggaatacgagacgttctatggtgaacacagcctgctagtccagcaggccgagtcttggattagaaagatcacaaacaacgggggctacaaggccaggtgggccctaaaggtcacgtgggtcaatgcccacgcctatcctgcccagtggaccctcgggagcaacacctaccaagccatcctctccacggacgggagcaggtcctatgccctgtttctctaccagagcggtgggatgcagtgggacgtggcccagcgctcaggcaagccggtgctcatgggcttctctagtggagatggctttttcgaaaacagcccactgatgtcccagccagtgtgggagaggtatcgccctgatagattcctgaattccaactcaggcctccaagggctgcagttctacgggctacaccgggaagaaaggcccaactaccgtctcgagtgcctgcagtggctgaagagccagcctcggtggcccagctggggctggaaccaggtctcctgcccttgttcctggcagcagggacgacgggacttacgattccaacccgtcagcataggtcgctggggcctcggcagtaggcagctgtgcagcttcacctcttggcgaggaggcgtgtgctgcagctacgggccctggggagagtttcgtgaaggctggcacgtgcagcgtccttggcagttggcccaggaactggagccacagagctggtgctgccgctggaatgacaagccctacctctgtgccctgtaccagcagaggcggccccacgtgggctgtgctacatacaggcccccacagcccgcctggatgttcggggacccccacatcaccaccttggatggtgtcagttacaccttcaatgggctgggggacttcctgctggtcggggcccaagacgggaactcctccttcctgcttcagggccgcaccgcccagactggctcagcccaggccaccaacttcatcgcctttgcggctcagtaccgctccagcagcctgggccccgtcacggtccaatggctccttgagcctcacgacgcaatccgtgtcctgctggataaccagactgtgacatttcagcctgaccatgaagacggcggaggccaggagacgttcaacgccaccggagtcctcctgagccgcaacggctctgaggtctccgccagcttcgacggctgggccaccgtctcggtgatcgcgctctccaacatcctccactcctccgccagcctcccgcccgagtaccagaaccgcacggaggggctcctgggggtctggaataacaatccagaggacgacttcaggatgcccaatggctccaccattcccccagggagccctgaggagatgcttttccactttggaatgacctggcagatcaacgggacaggcctccttggcaagaggaatgaccagctgccttccaacttcacccctgttttctactcacaactgcaaaaaaacagctcctgggctgaacatttgatctccaactgtgacggagatagctcatgcatctatgacaccctggccctgcgcaacgcaagcatcggacttcacacgagggaagtcagtaaaaactacgagcaggcgaacgccaccctcaatcagtacccgccctccatcaatggtggtcgtgtgattgaagcctacaaggggcagaccacgctgattcagtacaccagcaatgctgaggatgccaacttcacgctcagagacagctgcaccgacttggagctctttgagaatgggacgttgctgtggacacccaagtcgctggagccattcactctggagattctagcaagaagtgccaagattggcttggcatctgcactccagcccaggactgtggtctgccattgcaatgcagagagccagtgtttgtacaatcagaccagcagggtgggcaactcctccctggaggtggctggctgcaagtgtgacgggggcaccttcggccgctactgcgagggctccgaggatgcctgtgaggagccgtgcttcccgagtgtccactgcgttcctgggaagggctgcgaggcctgccctccaaacctgactggggatgggcggcactgtgcggctctggggagctctttcctgtgtcagaaccagtcctgccctgtgaattactgctacaatcaaggccactgctacatctcccagactctgggctgtcagcccatgtgcacctgccccccagccttcactgacagccgctgcttcctggctgggaacaacttcagtccaactgtcaacctagaacttcccttaagagtcatccagctcttgctcagtgaagaggaaaatgcctccatggcagaggtcaacgcctcggtggcatacagactggggaccctggacatgcgggcctttctccgcaacagccaagtggaacgaatcgattctgcagcaccggcctcgggaagccccatccaacactggatggtcatctcggagttccagtaccgccctcggggcccggtcattgacttcctgaacaaccagctgctggccgcggtggtggaggcgttcttataccacgttccacggaggagtgaggagcccaggaacgacgtggtcttccagcccatttccggggaagacgtgcgcgatgtgacagccctgaacgtgagcacgctgaaggcttacttcagatgcgatggctacaagggctacgacctggtctacagcccccagagcggcttcacctgcgtgtccccgtgcagtaggggctactgtgaccatggaggccagtgccagcacctgcccagtgggccccgctgcagctgtgtgtccttctccatctacacggcctggggcgagcactgtgagcacctgagcatgaaactcgacgcgttcttcggcatcttctttggggccctgggcggcctcttgctgctgggggtcgggacgttcgtggtcctgcgcttctggggttgctccggggccaggttctcctatttcctgaactcagctgaggccttgccttgaaggggcagctgtggcctaggctacctcaagactcacctcatccttaccgcacatttaaggcgccattgcttttgggagactggaaaagggaaggtgactgaaggctgtcaggattcttcaaggagaatgaatactgggaatcaagacaagactataccttatccataggcgcaggtgcacagggggaggccataaagatcaaacatgcatggatgggtcctcacgcagacacacccacagaaggacactagcctgtgcacgcgcgcgtgcacacacacacacacacacacgagttcataatgtggtgatggccctaagttaagcaaaatgcttctgcacacaaaactctctggtttacttcaaattaactctatttaaataaagtctctctgactttttgtgtctccaaaaaaaaaa

SEQ ID NO: 264954 - DNA, 7627 bp, Homo sapiens
  misc_feature (1)..(1): n is a, c, g, or t
  misc_feature (3415)..(3416): n is a, c, g, or t
  misc_feature (3418)..(3418): n is a, c, g, or t
  misc_feature (3426)..(3426): n is a, c, g, or t
  misc_feature (3442)..(3442): n is a, c, g, or t
  misc_feature (3455)..(3455): n is a, c, g, or t
  misc_feature (3465)..(3465): n is a, c, g, or t
  misc_feature (3477)..(3477): n is a, c, g, or t
  misc_feature (3495)..(3495): n is a, c, g, or t
  misc_feature (3511)..(3512): n is a, c, g, or t
  misc_feature (3514)..(3514): n is a, c, g, or t
  misc_feature (3524)..(3524): n is a, c, g, or t
  misc_feature (3535)..(3535): n is a, c, g, or t
  misc_feature (3562)..(3562): n is a, c, g, or t
  misc_feature (3572)..(3572): n is a, c, g, or t
  misc_feature (3582)..(3582): n is a, c, g, or t
  misc_feature (3585)..(3585): n is a, c, g, or t
  misc_feature (4179)..(4179): n is a, c, g, or t
  misc_feature (4333)..(4333): n is a, c, g, or t
ntacagccccaaggtcgctccctctgggccctttcttccccattcttcccagcagcccaaagctctggtgggacaggggcagcccctggggagggaggagaggacccaggaacccggctaggagggtggcccacccatttccagtgtgacctgttcccattcccccatgtctcctcccatccctcccgccactcagctcaggctgatgagaagcagagcaacgggtgtatcggtgttttctttcctggtggggtagtggggtggggctgaggagagaaaagggtgattagcgtggggccccgccctcttttgtcctcttcccaggttccctggccccttcggagaaacgcacttggttcgggccagccgcctgaggggacgggctcacgtctgctcctcacactgcagctgctgggccgtggagcttccccgggagccagggggacttttgccgcagccatgaagggggcacgctggaggagggtcccctgggtgtccctgagctgcctgtgtctctgcctccttccgcatgtggtcccaggaaccacagaggacacattaataactggaagtaaaactcctgccccagtcacctcaacaggctcaacaacagcgacactagagggacaatcaactgcagcttcttcaaggacctctaatcaggacatatcagcttcatctcagaaccaccagactaagagcacggagaccaccagcaaagctcaaaccgacaccctcacgcagatgatgacatcaactcttttttcttccccaagtgtacacaatgtgatggagactgttacgcaggagacagctcctccagatgaaatgaccacatcatttccctccagtgtcaccaacacactcatgatgacatcaaagactataacaatgacaacctccacagactccactcttggaaacacagaagagacatcaacagcaggaactgaaagttctaccccagtgacctcagcagtctcaataacagctggacaggaaggacaatcacgaacaacttcctggaggacctctatccaagacacatcagcttcttctcagaaccactggactcggagcacgcagaccaccagggaatctcaaaccagcaccctaacacacagaaccacttcaactccttctttctctccaagtgtacacaatgtgacagggactgtttctcagaagacatctccttcaggtgaaacagctacctcatccctctgtagtgtcacaaacacatccatgatgacatcagagaagataacagtgacaacctccacaggctccactcttggaaacccaggggagacatcatcagtacctgttactggaagtcttatgccagtcacctcagcagccttagtaacagttgatccagaaggacaatcaccagcaactttctcaaggacttctactcaggacacaacagctttttctaagaaccaccagactcagagcgtggagaccaccagagtatctcaaatcaacaccctcaacaccctcacaccggttacaacatcaactgttttatcctcaccaagtggattcaacccaagtggaacagtttctcaggagacattcccttctggtgaaacaaccatctcatccccttccagtgtcagcaatacattcctggtaacatcaaaggtgttcagaatgccaatctccagagactctactcttggaaacacagaggagacatcactatctgtaagtggaaccatttctgcaatcacttccaaagtttcaaccatatggtggtcagacactctgtcaacagcactctcccccagttctctacctccaaaaatatccacagctttccacacccagcagagtgaaggtgcagagaccacaggacggcctcatgagaggagctcattctctccaggtgtgtctcaagaaatatttactctacatgaaacaacaacatggccttcctcattctccagcaaaggccacacaacttggtcacaaacagaactgccctcaacatcaacaggtgctgccactaggcttgtcacaggaaatccatctacaagggcagctggcactattccaagggtcccctctaaggtctcagcaataggggaaccaggagagcccaccacatactcctcccacagcacaactctcccaaaaacaacaggggcaggcgcccagacacaatggacacaagaaacggggaccactggagaggctcttctcagcagcccaagctatagtgtgattcagatgataaaaacggccacatccccatcttcttcacctatgctggatagacacacatcacaacaaattacaacggcaccatcaacaaatcattcaacaatacattccacaagcacctctcctcaggaatcaccagctgtttcccaaaggggtcacactcgagccccgcagaccacacaagaatcacaaaccacgaggtccgtctcccccatgactgacaccaagacagtcaccaccccaggttcttccttcacagccagtgggcactcgccctcagaaattgttcctcaggacgcacccaccataagtgcagcaacaacctttgccccagctcccaccgggaatggtcacacaacccaggccccgaccacagcactgcaggcagcacccagcagccatgatgccaccctggggccctcaggaggcacgtcactttccaaaacaggtgcccttactctggccaactctgtagtgtcaacaccagggggcccagaaggacaatggacatcagcctctgccagcacctcacctgacacagcagcagccatgacccatacccaccaggctgagagcacagaggcctctggacaaacacagaccagcgaaccggcctcctcagggtcacgaaccacctcagcgggcacagctaccccttcctcatccggggcgagtggcacaacaccttcaggaagcgaaggaatatccacctcaggagagacgacaaggttttcatcaaacccctccagggacagtcacacaacccagtcaacaaccgaattgctgtccgcctcagccagtcatggtgccatcccagtaagcacaggaatggcgtcttcgatcgtccccggcacctttcatcccaccctctctgaggcctccactgcagggagaccgacaggacagtcaagcccaacttctcccagtgcctctcctcaggagacagccgccatttcccggatggcccagactcagaggacaggaaccagcagagggtctgacactatcagcctggcgtcccaggcaaccgacaccttctcaacagtcccacccacacctccatcgatcacatccagtgggcttacatctccacaaacccagacccacactctgtcaccttcagggtctggtaaaaccttcaccacggccctcatcagcaacgccacccctcttcctgtcaccnncncttcctcngcatccacaggtcacnccacccctcttcntgtcaccgangcttcctcagtntccacaggtcacgccacncctcttcctgtcaccnncncttcctcagnatccacaggtnacaccacccctcttcctgtcaccgacncttcctcagnatccacaggncangccacccctcttcctgtcaccagcacctcctcagcctccacaggtcacgccacccctcttgctgtcagcagtgctacctcagcttccacagtatcctcggactcccctctgaagatggaaacatcaggaatgacaacaccgtcactgaagacagacggtgggagacgcacagccacatcaccaccccccacaacctcccagaccatcatttccaccattcccagcactgccatgcacacccgctccacagctgcccccatccccatcctgcctgagagaggagtttccctcttcccctatggggcagacgccggggacctggagttcgtcaggaggaccgtggacttcacctccccactcttcaagccggcgactggcttcccccttggctcctctctccgtgattccctctacttcacagacaatggccagatcatcttcccagagtcagactaccagattttctcctaccccaacccactcccaacaggcttcacaggccgggaccctgtggccctggtggctccgttctgggacgatgctgacttctccactggtcgggggaccacattttatcaggctgtagggggtctntcctaacaagagtgagtcaagagggcccgtcctgtgctcctggactgggtgaataactccaatcagaggaaatgtgatgaaagctactgcaggaagtgtggaccgtgcccctgccacggacagggcagtgtggaggctccaagaggaagagacncacgcctgttctcaagaagctgcagattaggcatggggaggaatacgagacgttctatggtgaacacagcctgctagtccagcaggccgagtcttggattagaaagatcacaaacaacgggggctacaaggccaggtgggccctaaaggtcacgtgggtcaatgcccacgcctatcctgcccagtggaccctcgggagcaacacctaccaagccatcctctccacggacgggagcaggtcctatgccctgtttctctaccagagcggtgggatgcagtgggacgtggcccagcgctcaggcaagccggtgctcatgggcttctctagtggagatggctttttcgaaaacagcccactgatgtcccagccagtgtgggagaggtatcgccctgatagattcctgaattccaactcaggcctccaagggctgcagttctacgggctacaccgggaagaaaggcccaactaccgtctcgagtgcctgcagtggctgaagagccagcctcggtggcccagctggggctggaaccaggtctcctgcccttgttcctggcagcagggacgacgggacttacgattccaacccgtcagcataggtcgctggggcctcggcagtaggcagctgtgcagcttcacctcttggcgaggaggcgtgtgctgcagctacgggccctggggagagtttcgtgaaggctggcacgtgcagcgtccttggcagttggcccaggaactggagccacagagctggtgctgccgctggaatgacaagccctacctctgtgccctgtaccagcagaggcggccccacgtgggctgtgctacatacaggcccccacagcccgcctggatgttcggggacccccacatcaccaccttggatggtgtcagttacaccttcaatgggctgggggacttcctgctggtcggggcccaagacgggaactcctccttcctgcttcagggccgcaccgcccagactggctcagcccaggccaccaacttcatcgcctttgcggctcagtaccgctccagcagcctgggccccgtcacggtccaatggctccttgagcctcacgacgcaatccgtgtcctgctggataaccagactgtgacatttcagcctgaccatgaagacggcggaggccaggagacgttcaacgccaccggagtcctcctgagccgcaacggctctgaggtctccgccagcttcgacggctgggccaccgtctcggtgatcgcgctctccaacatcctccactcctccgccagcctcccgcccgagtaccagaaccgcacggaggggctcctgggggtctggaataacaatccagaggacgacttcaggatgcccaatggctccaccattcccccagggagccctgaggagatgcttttccactttggaatgacctggcagatcaacgggacaggcctccttggcaagaggaatgaccagctgccttccaacttcacccctgttttctactcacaactgcaaaaaaacagctcctgggctgaacatttgatctccaactgtgacggagatagctcatgcatctatgacaccctggccctgcgcaacgcaagcatcggacttcacacgagggaagtcagtaaaaactacgagcaggcgaacgccaccctcaatcagtacccgccctccatcaatggtggtcgtgtgattgaagcctacaaggggcagaccacgctgattcagtacaccagcaatgctgaggatgccaacttcacgctcagagacagctgcaccgacttggagctctttgagaatgggacgttgctgtggacacccaagtcgctggagccattcactctggagattctagcaagaagtgccaagattggcttggcatctgcactccagcccaggactgtggtctgccattgcaatgcagagagccagtgtttgtacaatcagaccagcagggtgggcaactcctccctggagctctggggagctctttcctgtgtcagaaccagtcctgccctgtgaattactgctacaatcaaggccactgctacatctcccagactctgggctgtcagcccatgtgcacctgccccccagccttcactgacagccgctgcttcctggctgggaacaacttcagtccaactgtcaacctagaacttcccttaagagtcatccagctcttgctcagtgaagaggaaaatgcctccatggcagaggtcaacgcctcggtggcatacagactggggaccctggacatgcgggcctttctccgcaacagccaagtggaacgaatcgattctgcagcaccggcctcgggaagccccatccaacactggatggtcatctcggagttccagtaccgccctcggggcccggtcattgacttcctgaacaaccagctgctggccgcggtggtggaggcgttcttataccacgttccacggaggagtgaggagcccaggaacgacgtggtcttccagcccatttccggggaagacgtgcgcgatgtgacagccctgaacgtgagcacgctgaaggcttacttcagatgcgatggctacaagggctacgacctggtctacagcccccagagcggcttcacctgcgtgtccccgtgcagtaggggctactgtgaccatggaggccagtgccagcacctgcccagtgggccccgctgcagctgtgtgtccttctccatctacacggcctggggcgagcactgtgagcacctgagcatgaaactcgacgcgttcttcggcatcttctttggggccctgggcggcctcttgctgctgggggtcgggacgttcgtggtcctgcgcttctggggttgctccggggccaggttctcctatttcctgaactcagctgaggccttgccttgaaggggcagctgtggcctaggctacctcaagactcacctcatccttaccgcacatttaaggcgccattgcttttgggagactggaaaagggaaggtgactgaaggctgtcaggattcttcaaggagaatgaatactgggaatcaagacaagactataccttatccataggcgcaggtgcacagggggaggccataaagatcaaacatgcatggatgggtcctcacgcagacacacccacagaaggacactagcctgtgcacgcgcgcgtgcacacacacacacacacacacgagttcataatgtggtgatggccctaagttaagcaaaatgcttctgcacacaaaactctctggtttacttcaaattaactctatttaaataaagtctctctgactttttgtgtctccaaaaaaaaaa

SEQ ID NO: 264955 - DNA, 7489 bp, Homo sapiens
  misc_feature (1)..(1): n is a, c, g, or t
  misc_feature (3415)..(3416): n is a, c, g, or t
  misc_feature (3418)..(3418): n is a, c, g, or t
  misc_feature (3426)..(3426): n is a, c, g, or t
  misc_feature (3442)..(3442): n is a, c, g, or t
  misc_feature (3455)..(3455): n is a, c, g, or t
  misc_feature (3465)..(3465): n is a, c, g, or t
  misc_feature (3477)..(3477): n is a, c, g, or t
  misc_feature (3495)..(3495): n is a, c, g, or t
  misc_feature (3511)..(3512): n is a, c, g, or t
  misc_feature (3514)..(3514): n is a, c, g, or t
  misc_feature (3524)..(3524): n is a, c, g, or t
  misc_feature (3535)..(3535): n is a, c, g, or t
  misc_feature (3562)..(3562): n is a, c, g, or t
  misc_feature (3572)..(3572): n is a, c, g, or t
  misc_feature (3582)..(3582): n is a, c, g, or t
  misc_feature (3585)..(3585): n is a, c, g, or t
ntacagccccaaggtcgctccctctgggccctttcttccccattcttcccagcagcccaaagctctggtgggacaggggcagcccctggggagggaggagaggacccaggaacccggctaggagggtggcccacccatttccagtgtgacctgttcccattcccccatgtctcctcccatccctcccgccactcagctcaggctgatgagaagcagagcaacgggtgtatcggtgttttctttcctggtggggtagtggggtggggctgaggagagaaaagggtgattagcgtggggccccgccctcttttgtcctcttcccaggttccctggccccttcggagaaacgcacttggttcgggccagccgcctgaggggacgggctcacgtctgctcctcacactgcagctgctgggccgtggagcttccccgggagccagggggacttttgccgcagccatgaagggggcacgctggaggagggtcccctgggtgtccctgagctgcctgtgtctctgcctccttccgcatgtggtcccaggaaccacagaggacacattaataactggaagtaaaactcctgccccagtcacctcaacaggctcaacaacagcgacactagagggacaatcaactgcagcttcttcaaggacctctaatcaggacatatcagcttcatctcagaaccaccagactaagagcacggagaccaccagcaaagctcaaaccgacaccctcacgcagatgatgacatcaactcttttttcttccccaagtgtacacaatgtgatggagactgttacgcaggagacagctcctccagatgaaatgaccacatcatttccctccagtgtcaccaacacactcatgatgacatcaaagactataacaatgacaacctccacagactccactcttggaaacacagaagagacatcaacagcaggaactgaaagttctaccccagtgacctcagcagtctcaataacagctggacaggaaggacaatcacgaacaacttcctggaggacctctatccaagacacatcagcttcttctcagaaccactggactcggagcacgcagaccaccagggaatctcaaaccagcaccctaacacacagaaccacttcaactccttctttctctccaagtgtacacaatgtgacagggactgtttctcagaagacatctccttcaggtgaaacagctacctcatccctctgtagtgtcacaaacacatccatgatgacatcagagaagataacagtgacaacctccacaggctccactcttggaaacccaggggagacatcatcagtacctgttactggaagtcttatgccagtcacctcagcagccttagtaacagttgatccagaaggacaatcaccagcaactttctcaaggacttctactcaggacacaacagctttttctaagaaccaccagactcagagcgtggagaccaccagagtatctcaaatcaacaccctcaacaccctcacaccggttacaacatcaactgttttatcctcaccaagtggattcaacccaagtggaacagtttctcaggagacattcccttctggtgaaacaaccatctcatccccttccagtgtcagcaatacattcctggtaacatcaaaggtgttcagaatgccaatctccagagactctactcttggaaacacagaggagacatcactatctgtaagtggaaccatttctgcaatcacttccaaagtttcaaccatatggtggtcagacactctgtcaacagcactctcccccagttctctacctccaaaaatatccacagctttccacacccagcagagtgaaggtgcagagaccacaggacggcctcatgagaggagctcattctctccaggtgtgtctcaagaaatatttactctacatgaaacaacaacatggccttcctcattctccagcaaaggccacacaacttggtcacaaacagaactgccctcaacatcaacaggtgctgccactaggcttgtcacaggaaatccatctacaagggcagctggcactattccaagggtcccctctaaggtctcagcaataggggaaccaggagagcccaccacatactcctcccacagcacaactctcccaaaaacaacaggggcaggcgcccagacacaatggacacaagaaacggggaccactggagaggctcttctcagcagcccaagctatagtgtgattcagatgataaaaacggccacatccccatcttcttcacctatgctggatagacacacatcacaacaaattacaacggcaccatcaacaaatcattcaacaatacattccacaagcacctctcctcaggaatcaccagctgtttcccaaaggggtcacactcgagccccgcagaccacacaagaatcacaaaccacgaggtccgtctcccccatgactgacaccaagacagtcaccaccccaggttcttccttcacagccagtgggcactcgccctcagaaattgttcctcaggacgcacccaccataagtgcagcaacaacctttgccccagctcccaccgggaatggtcacacaacccaggccccgaccacagcactgcaggcagcacccagcagccatgatgccaccctggggccctcaggaggcacgtcactttccaaaacaggtgcccttactctggccaactctgtagtgtcaacaccagggggcccagaaggacaatggacatcagcctctgccagcacctcacctgacacagcagcagccatgacccatacccaccaggctgagagcacagaggcctctggacaaacacagaccagcgaaccggcctcctcagggtcacgaaccacctcagcgggcacagctaccccttcctcatccggggcgagtggcacaacaccttcaggaagcgaaggaatatccacctcaggagagacgacaaggttttcatcaaacccctccagggacagtcacacaacccagtcaacaaccgaattgctgtccgcctcagccagtcatggtgccatcccagtaagcacaggaatggcgtcttcgatcgtccccggcacctttcatcccaccctctctgaggcctccactgcagggagaccgacaggacagtcaagcccaacttctcccagtgcctctcctcaggagacagccgccatttcccggatggcccagactcagaggacaggaaccagcagagggtctgacactatcagcctggcgtcccaggcaaccgacaccttctcaacagtcccacccacacctccatcgatcacatccagtgggcttacatctccacaaacccagacccacactctgtcaccttcagggtctggtaaaaccttcaccacggccctcatcagcaacgccacccctcttcctgtcaccnncncttcctcngcatccacaggtcacnccacccctcttcntgtcaccgangcttcctcagtntccacaggtcacgccacncctcttcctgtcaccnncncttcctcagnatccacaggtnacaccacccctcttcctgtcaccgacncttcctcagnatccacaggncangccacccctcttcctgtcaccagcacctcctcagcctccacaggtcacgccacccctcttgctgtcagcagtgctacctcagcttccacagtatcctcggactcccctctgaagatggaaacatcaggaatgacaacaccgtcactgaagacagacggtgggagacgcacagccacatcaccaccccccacaacctcccagaccatcatttccaccattcccagcactgccatgcacacccgctccacagctgcccccatccccatcctgcctgagagaggagtttccctcttcccctatggggcagacgccggggacctggagttcgtcaggaggaccgtggacttcacctccccactcttcaagccggcgactggcttcccccttggctcctctctccgtgattccctctacttcacagacaatggccagatcatcttcccagagtcagactaccagattttctcctaccccaacccactcccaacaggcttcacaggccgggaccctgtggccctggtggctccgttctgggacgatgctgacttctccactggtcgggggaccacattttatcaggaatacgagacgttctatggtgaacacagcctgctagtccagcaggccgagtcttggattagaaagatcacaaacaacgggggctacaaggccaggtgggccctaaaggtcacgtgggtcaatgcccacgcctatcctgcccagtggaccctcgggagcaacacctaccaagccatcctctccacggacgggagcaggtcctatgccctgtttctctaccagagcggtgggatgcagtgggacgtggcccagcgctcaggcaagccggtgctcatgggcttctctaggcctccaagggctgcagttctacgggctacaccgggaagaaaggcccaactaccgtctcgagtgcctgcagtggctgaagagccagcctcggtggcccagctggggctggaaccaggtctcctgcccttgttcctggcagcagggacgacgggacttacgattccaacccgtcagcataggtcgctggggcctcggcagtaggcagctgtgcagcttcacctcttggcgaggaggcgtgtgctgcagctacgggccctggggagagtttcgtgaaggctggcacgtgcagcgtccttggcagttggcccaggaactggagccacagagctggtgctgccgctggaatgacaagccctacctctgtgccctgtaccagcagaggcggccccacgtgggctgtgctacatacaggcccccacagcccgcctggatgttcggggacccccacatcaccaccttggatggtgtcagttacaccttcaatgggctgggggacttcctgctggtcggggcccaagacgggaactcctccttcctgcttcagggccgcaccgcccagactggctcagcccaggccaccaacttcatcgcctttgcggctcagtaccgctccagcagcctgggccccgtcacggtccaatggctccttgagcctcacgacgcaatccgtgtcctgctggataaccagactgtgacatttcagcctgaccatgaagacggcggaggccaggagacgttcaacgccaccggagtcctcctgagccgcaacggctctgaggtctccgccagcttcgacggctgggccaccgtctcggtgatcgcgctctccaacatcctccactcctccgccagcctcccgcccgagtaccagaaccgcacggaggggctcctgggggtctggaataacaatccagaggacgacttcaggatgcccaatggctccaccattcccccagggagccctgaggagatgcttttccactttggaatgacctggcagatcaacgggacaggcctccttggcaagaggaatgaccagctgccttccaacttcacccctgttttctactcacaactgcaaaaaaacagctcctgggctgaacatttgatctccaactgtgacggagatagctcatgcatctatgacaccctggccctgcgcaacgcaagcatcggacttcacacgagggaagtcagtaaaaactacgagcaggcgaacgccaccctcaatcagtacccgccctccatcaatggtggtcgtgtgattgaagcctacaaggggcagaccacgctgattcagtacaccagcaatgctgaggatgccaacttcacgctcagagacagctgcaccgacttggagctctttgagaatgggacgttgctgtggacacccaagtcgctggagccattcactctggagattctagcaagaagtgccaagattggcttggcatctgcactccagcccaggactgtggtctgccattgcaatgcagagagccagtgtttgtacaatcagaccagcagggtgggcaactcctccctggaggtggctggctgcaagtgtgacgggggcaccttcggccgctactgcgagggctccgaggatgcctgtgaggagccgtgcttcccgagtgtccactgcgttcctgggaagggctgcgaggcctgccctccaaacctgactggggatgggcggcactgtgcggctctggggagctctttcctgtgtcagaaccagtcctgccctgtgaattactgctacaatcaaggccactgctacatctcccagactctgggctgtcagcccatgtgcacctgccccccagccttcactgacagccgctgcttcctggctgggaacaacttcagtccaactgtcaacctagaacttcccttaagagtcatccagctcttgctcagtgaagaggaaaatgcctccatggcagaggtcaacgcctcggtggcatacagactggggaccctggacatgcgggcctttctccgcaacagccaagtggaacgaatcgattctgcagcaccggcctcgggaagccccatccaacactggatggtcatctcggagttccagtaccgccctcggggcccggtcattgacttcctgaacaaccagctgctggccgcggtggtggaggcgttcttataccacgttccacggaggagtgaggagcccaggaacgacgtggtcttccagcccatttccggggaagacgtgcgcgatgtgacagccctgaacgtgagcacgctgaaggcttacttcagatgcgatggctacaagggctacgacctggtctacagcccccagagcggcttcacctgcgtgtccccgtgcagtaggggctactgtgaccatggaggccagtgccagcacctgcccagtgggccccgctgcagctgtgtgtccttctccatctacacggcctggggcgagcactgtgagcacctgagcatgaaactcgacgcgttcttcggcatcttctttggggccctgggcggcctcttgctgctgggggtcgggacgttcgtggtcctgcgcttctggggttgctccggggccaggttctcctatttcctgaactcagctgaggccttgccttgaaggggcagctgtggcctaggctacctcaagactcacctcatccttaccgcacatttaaggcgccattgcttttgggagactggaaaagggaaggtgactgaaggctgtcaggattcttcaaggagaatgaatactgggaatcaagacaagactataccttatccataggcgcaggtgcacagggggaggccataaagatcaaacatgcatggatgggtcctcacgcagacacacccacagaaggacactagcctgtgcacgcgcgcgtgcacacacacacacacacacacgagttcataatgtggtgatggccctaagttaagcaaaatgcttctgcacacaaaactctctggtttacttcaaattaactctatttaaataaagtctctctgactttttgtgtctccaaaaaaaaaa

SEQ ID NO: 264956 - DNA, 7474 bp, Homo sapiens
  misc_feature (1)..(1): n is a, c, g, or t
  misc_feature (3415)..(3416): n is a, c, g, or t
  misc_feature (3418)..(3418): n is a, c, g, or t
  misc_feature (3426)..(3426): n is a, c, g, or t
  misc_feature (3442)..(3442): n is a, c, g, or t
  misc_feature (3455)..(3455): n is a, c, g, or t
  misc_feature (3465)..(3465): n is a, c, g, or t
  misc_feature (3477)..(3477): n is a, c, g, or t
  misc_feature (3495)..(3495): n is a, c, g, or t
  misc_feature (3511)..(3512): n is a, c, g, or t
  misc_feature (3514)..(3514): n is a, c, g, or t
  misc_feature (3524)..(3524): n is a, c, g, or t
  misc_feature (3535)..(3535): n is a, c, g, or t
  misc_feature (3562)..(3562): n is a, c, g, or t
  misc_feature (3572)..(3572): n is a, c, g, or t
  misc_feature (3582)..(3582): n is a, c, g, or t
  misc_feature (3585)..(3585): n is a, c, g, or t
ntacagccccaaggtcgctccctctgggccctttcttccccattcttcccagcagcccaaagctctggtgggacaggggcagcccctggggagggaggagaggacccaggaacccggctaggagggtggcccacccatttccagtgtgacctgttcccattcccccatgtctcctcccatccctcccgccactcagctcaggctgatgagaagcagagcaacgggtgtatcggtgttttctttcctggtggggtagtggggtggggctgaggagagaaaagggtgattagcgtggggccccgccctcttttgtcctcttcccaggttccctggccccttcggagaaacgcacttggttcgggccagccgcctgaggggacgggctcacgtctgctcctcacactgcagctgctgggccgtggagcttccccgggagccagggggacttttgccgcagccatgaagggggcacgctggaggagggtcccctgggtgtccctgagctgcctgtgtctctgcctccttccgcatgtggtcccaggaaccacagaggacacattaataactggaagtaaaactcctgccccagtcacctcaacaggctcaacaacagcgacactagagggacaatcaactgcagcttcttcaaggacctctaatcaggacatatcagcttcatctcagaaccaccagactaagagcacggagaccaccagcaaagctcaaaccgacaccctcacgcagatgatgacatcaactcttttttcttccccaagtgtacacaatgtgatggagactgttacgcaggagacagctcctccagatgaaatgaccacatcatttccctccagtgtcaccaacacactcatgatgacatcaaagactataacaatgacaacctccacagactccactcttggaaacacagaagagacatcaacagcaggaactgaaagttctaccccagtgacctcagcagtctcaataacagctggacaggaaggacaatcacgaacaacttcctggaggacctctatccaagacacatcagcttcttctcagaaccactggactcggagcacgcagaccaccagggaatctcaaaccagcaccctaacacacagaaccacttcaactccttctttctctccaagtgtacacaatgtgacagggactgtttctcagaagacatctccttcaggtgaaacagctacctcatccctctgtagtgtcacaaacacatccatgatgacatcagagaagataacagtgacaacctccacaggctccactcttggaaacccaggggagacatcatcagtacctgttactggaagtcttatgccagtcacctcagcagccttagtaacagttgatccagaaggacaatcaccagcaactttctcaaggacttctactcaggacacaacagctttttctaagaaccaccagactcagagcgtggagaccaccagagtatctcaaatcaacaccctcaacaccctcacaccggttacaacatcaactgttttatcctcaccaagtggattcaacccaagtggaacagtttctcaggagacattcccttctggtgaaacaaccatctcatccccttccagtgtcagcaatacattcctggtaacatcaaaggtgttcagaatgccaatctccagagactctactcttggaaacacagaggagacatcactatctgtaagtggaaccatttctgcaatcacttccaaagtttcaaccatatggtggtcagacactctgtcaacagcactctcccccagttctctacctccaaaaatatccacagctttccacacccagcagagtgaaggtgcagagaccacaggacggcctcatgagaggagctcattctctccaggtgtgtctcaagaaatatttactctacatgaaacaacaacatggccttcctcattctccagcaaaggccacacaacttggtcacaaacagaactgccctcaacatcaacaggtgctgccactaggcttgtcacaggaaatccatctacaagggcagctggcactattccaagggtcccctctaaggtctcagcaataggggaaccaggagagcccaccacatactcctcccacagcacaactctcccaaaaacaacaggggcaggcgcccagacacaatggacacaagaaacggggaccactggagaggctcttctcagcagcccaagctatagtgtgattcagatgataaaaacggccacatccccatcttcttcacctatgctggatagacacacatcacaacaaattacaacggcaccatcaacaaatcattcaacaatacattccacaagcacctctcctcaggaatcaccagctgtttcccaaaggggtcacactcgagccccgcagaccacacaagaatcacaaaccacgaggtccgtctcccccatgactgacaccaagacagtcaccaccccaggttcttccttcacagccagtgggcactcgccctcagaaattgttcctcaggacgcacccaccataagtgcagcaacaacctttgccccagctcccaccgggaatggtcacacaacccaggccccgaccacagcactgcaggcagcacccagcagccatgatgccaccctggggccctcaggaggcacgtcactttccaaaacaggtgcccttactctggccaactctgtagtgtcaacaccagggggcccagaaggacaatggacatcagcctctgccagcacctcacctgacacagcagcagccatgacccatacccaccaggctgagagcacagaggcctctggacaaacacagaccagcgaaccggcctcctcagggtcacgaaccacctcagcgggcacagctaccccttcctcatccggggcgagtggcacaacaccttcaggaagcgaaggaatatccacctcaggagagacgacaaggttttcatcaaacccctccagggacagtcacacaacccagtcaacaaccgaattgctgtccgcctcagccagtcatggtgccatcccagtaagcacaggaatggcgtcttcgatcgtccccggcacctttcatcccaccctctctgaggcctccactgcagggagaccgacaggacagtcaagcccaacttctcccagtgcctctcctcaggagacagccgccatttcccggatggcccagactcagaggacaggaaccagcagagggtctgacactatcagcctggcgtcccaggcaaccgacaccttctcaacagtcccacccacacctccatcgatcacatccagtgggcttacatctccacaaacccagacccacactctgtcaccttcagggtctggtaaaaccttcaccacggccctcatcagcaacgccacccctcttcctgtcaccnncncttcctcngcatccacaggtcacnccacccctcttcntgtcaccgangcttcctcagtntccacaggtcacgccacncctcttcctgtcaccnncncttcctcagnatccacaggtnacaccacccctcttcctgtcaccgacncttcctcagnatccacaggncangccacccctcttcctgtcaccagcacctcctcagcctccacaggtcacgccacccctcttgctgtcagcagtgctacctcagcttccacagtatcctcggactcccctctgaagatggaaacatcaggaatgacaacaccgtcactgaagacagacggtgggagacgcacagccacatcaccaccccccacaacctcccagaccatcatttccaccattcccagcactgccatgcacacccgctccacagctgcccccatccccatcctgcctgagagaggagtttccctcttcccctatggggcagacgccggggacctggagttcgtcaggaggaccgtggacttcacctccccactcttcaagccggcgactggcttcccccttggctcctctctccgtgattccctctacgcttcacaggccgggaccctgtggccctggtggctccgttctgggacgatgctgacttctccactggtcgggggaccacattttatcaggaatacgagacgttctatggtgaacacagcctgctagtccagcaggccgagtcttggattagaaagatcacaaacaacgggggctacaaggccaggtgggccctaaaggtcacgtgggtcaatgcccacgcctatcctgcccagtggaccctcgggagcaacacctaccaagccatcctctccacggacgggagcaggtcctatgccctgtttctctaccagagcggtgggatgcagtgggacgtggcccagcgctcagtggagatggctttttcgaaaacagcccactgatgtcccagccagtgtgggagaggtatcgccctgatagattcctgaattccaactcaggcctccaagggctgcagttctacgggctacaccgggaagaaaggcccaactaccgtctcgagtgcctgcagtggctgaagagccagcctcggtggcccagctggggctggaaccaggtctcctgcccttgttcctggcagcagggacgacgggacttacgattccaacccgtcagcataggtcgctggggcctcggcagtaggcagctgtgcagcttcacctcttggcgaggaggcgtgtgctgcagctacgggccctggggagagtttcgtgaaggctggcacgtgcagcgtccttggcagttggcccaggaactggagccacagagctggtgctgccgctggaatgacaagccctacctctgtgccctgtaccagcagaggcggccccacgtgggctgtgctacatacaggcccccacagcccgcctggatgttcggggacccccacatcaccaccttggatggtgtcagttacaccttcaatgggctgggggacttcctgctggtcggggcccaagacgggaactcctccttcctgcttcagggccgcaccgcccagactggctcagcccaggccaccaacttcatcgcctttgcggctcagtaccgctccagcagcctgggccccgtcacggtccaatggctccttgagcctcacgacgcaatccgtgtcctgctggataaccagactgtgacatttcagcctgaccatgaagacggcggaggccaggagacgttcaacgccaccggagtcctcctgagccgcaacggctctgaggtctccgccagcttcgacggctgggccaccgtctcggtgatcgcgctctccaacatcctccactcctccgccagcctcccgcccgagtaccagaaccgcacggaggggctcctgggggtctggaataacaatccagaggacgacttcaggatgcccaatggctccaccattcccccagggagccctgaggagatgcttttccactttggaatgacctggcagatcaacgggacaggcctccttggcaagaggaatgaccagctgccttccaacttcacccctgttttctactcacaactgcaaaaaaacagctcctgggctgaacatttgatctccaactgtgacggagatagctcatgcatctatgacaccctggccctgcgcaacgcaagcatcggacttcacacgagggaagtcagtaaaaactacgagcaggcgaacgccaccctcaatcagtacccgccctccatcaatggtggtcgtgtgattgaagcctacaaggggcagaccacgctgattcagtacaccagcaatgctgaggatgccaacttcacgctcagagacagctgcaccgacttggagctctttgagaatgggacgttgctgtggacacccaagtcgctggagccattcactctggagattctagcaagaagtgccaagattggcttggcatctgcactccagcccaggactgtggtctgccattgcaatgcagagagccagtgtttgtacaatcagaccagcagggtgggcaactcctccctggaggtggctggctgcaagtgtgacgggggcaccttcggccgctactgcgagggctccgaggatgcctgtgaggagccgtgcttcccgagtgtccactgcgttcctgggaagggctgcgaggcctgccctccaaacctgactggggatgggcggcactgtgcggctctggggagctctttcctgtgtcagaaccagtcctgccctgtgaattactgctacaatcaaggccactgctacatctcccagactctgggctgtcagcccatgtgcacctgccccccagccttcactgacagccgctgcttcctggctgggaacaacttcagtccaactgtcaacctagaacttcccttaagagtcatccagctcttgctcagtgaagaggaaaatgcctccatggcagaggtcaacgcctcggtggcatacagactggggaccctggacatgcgggcctttctccgcaacagccaagtggaacgaatcgattctgcagcaccggcctcgggaagccccatccaacactggatggtcatctcggagttccagtaccgccctcggggcccggtcattgacttcctgaacaaccagctgctggccgcggtggtggaggcgttcttataccacgttccacggaggagtgaggagcccaggaacgacgtggtcttccagcccatttccggggaagacgtgcgcgatgtgacagccctgaacgtgagcacgctgaaggcttacttcagatgcgatggctacaagggctacgacctggtctacagcccccagagcggcttcacctgcgtgtccccgtgcagtaggggctactgtgaccatggaggccagtgccagcacctgcccagtgggccccgctgcagctgtgtgtccttctccatctacacggcctggggcgagcactgtgagcacctgagcatgaaactcgacgcgttcttcggcatcttctttggggccctgggcggcctcttgctgctgggggtcgggacgttcgtggtcctgcgcttctggggttgctccggggccaggttctcctatttcctgaactcagctgaggccttgccttgaaggggcagctgtggcctaggctacctcaagactcacctcatccttaccgcacatttaaggcgccattgcttttgggagactggaaaagggaaggtgactgaaggctgtcaggattcttcaaggagaatgaatactgggaatcaagacaagactataccttatccataggcgcaggtgcacagggggaggccataaagatcaaacatgcatggatgggtcctcacgcagacacacccacagaaggacactagcctgtgcacgcgcgcgtgcacacacacacacacacacacgagttcataatgtggtgatggccctaagttaagcaaaatgcttctgcacacaaaactctctggtttacttcaaattaactctatttaaataaagtctctctgactttttgtgtctccaaaaaaaaaa

SEQ ID NO: 264957 - DNA, 7413 bp, Homo sapiens
  misc_feature (1)..(1): n is a, c, g, or t
  misc_feature (3415)..(3416): n is a, c, g, or t
  misc_feature (3418)..(3418): n is a, c, g, or t
  misc_feature (3426)..(3426): n is a, c, g, or t
  misc_feature (3442)..(3442): n is a, c, g, or t
  misc_feature (3455)..(3455): n is a, c, g, or t
  misc_feature (3465)..(3465): n is a, c, g, or t
  misc_feature (3477)..(3477): n is a, c, g, or t
  misc_feature (3495)..(3495): n is a, c, g, or t
  misc_feature (3511)..(3512): n is a, c, g, or t
  misc_feature (3514)..(3514): n is a, c, g, or t
  misc_feature (3524)..(3524): n is a, c, g, or t
  misc_feature (3535)..(3535): n is a, c, g, or t
  misc_feature (3562)..(3562): n is a, c, g, or t
  misc_feature (3572)..(3572): n is a, c, g, or t
  misc_feature (3582)..(3582): n is a, c, g, or t
  misc_feature (3585)..(3585): n is a, c, g, or t
ntacagccccaaggtcgctccctctgggccctttcttccccattcttcccagcagcccaaagctctggtgggacaggggcagcccctggggagggaggagaggacccaggaacccggctaggagggtggcccacccatttccagtgtgacctgttcccattcccccatgtctcctcccatccctcccgccactcagctcaggctgatgagaagcagagcaacgggtgtatcggtgttttctttcctggtggggtagtggggtggggctgaggagagaaaagggtgattagcgtggggccccgccctcttttgtcctcttcccaggttccctggccccttcggagaaacgcacttggttcgggccagccgcctgaggggacgggctcacgtctgctcctcacactgcagctgctgggccgtggagcttccccgggagccagggggacttttgccgcagccatgaagggggcacgctggaggagggtcccctgggtgtccctgagctgcctgtgtctctgcctccttccgcatgtggtcccaggaaccacagaggacacattaataactggaagtaaaactcctgccccagtcacctcaacaggctcaacaacagcgacactagagggacaatcaactgcagcttcttcaaggacctctaatcaggacatatcagcttcatctcagaaccaccagactaagagcacggagaccaccagcaaagctcaaaccgacaccctcacgcagatgatgacatcaactcttttttcttccccaagtgtacacaatgtgatggagactgttacgcaggagacagctcctccagatgaaatgaccacatcatttccctccagtgtcaccaacacactcatgatgacatcaaagactataacaatgacaacctccacagactccactcttggaaacacagaagagacatcaacagcaggaactgaaagttctaccccagtgacctcagcagtctcaataacagctggacaggaaggacaatcacgaacaacttcctggaggacctctatccaagacacatcagcttcttctcagaaccactggactcggagcacgcagaccaccagggaatctcaaaccagcaccctaacacacagaaccacttcaactccttctttctctccaagtgtacacaatgtgacagggactgtttctcagaagacatctccttcaggtgaaacagctacctcatccctctgtagtgtcacaaacacatccatgatgacatcagagaagataacagtgacaacctccacaggctccactcttggaaacccaggggagacatcatcagtacctgttactggaagtcttatgccagtcacctcagcagccttagtaacagttgatccagaaggacaatcaccagcaactttctcaaggacttctactcaggacacaacagctttttctaagaaccaccagactcagagcgtggagaccaccagagtatctcaaatcaacaccctcaacaccctcacaccggttacaacatcaactgttttatcctcaccaagtggattcaacccaagtggaacagtttctcaggagacattcccttctggtgaaacaaccatctcatccccttccagtgtcagcaatacattcctggtaacatcaaaggtgttcagaatgccaatctccagagactctactcttggaaacacagaggagacatcactatctgtaagtggaaccatttctgcaatcacttccaaagtttcaaccatatggtggtcagacactctgtcaacagcactctcccccagttctctacctccaaaaatatccacagctttccacacccagcagagtgaaggtgcagagaccacaggacggcctcatgagaggagctcattctctccaggtgtgtctcaagaaatatttactctacatgaaacaacaacatggccttcctcattctccagcaaaggccacacaacttggtcacaaacagaactgccctcaacatcaacaggtgctgccactaggcttgtcacaggaaatccatctacaagggcagctggcactattccaagggtcccctctaaggtctcagcaataggggaaccaggagagcccaccacatactcctcccacagcacaactctcccaaaaacaacaggggcaggcgcccagacacaatggacacaagaaacggggaccactggagaggctcttctcagcagcccaagctatagtgtgattcagatgataaaaacggccacatccccatcttcttcacctatgctggatagacacacatcacaacaaattacaacggcaccatcaacaaatcattcaacaatacattccacaagcacctctcctcaggaatcaccagctgtttcccaaaggggtcacactcgagccccgcagaccacacaagaatcacaaaccacgaggtccgtctcccccatgactgacaccaagacagtcaccaccccaggttcttccttcacagccagtgggcactcgccctcagaaattgttcctcaggacgcacccaccataagtgcagcaacaacctttgccccagctcccaccgggaatggtcacacaacccaggccccgaccacagcactgcaggcagcacccagcagccatgatgccaccctggggccctcaggaggcacgtcactttccaaaacaggtgcccttactctggccaactctgtagtgtcaacaccagggggcccagaaggacaatggacatcagcctctgccagcacctcacctgacacagcagcagccatgacccatacccaccaggctgagagcacagaggcctctggacaaacacagaccagcgaaccggcctcctcagggtcacgaaccacctcagcgggcacagctaccccttcctcatccggggcgagtggcacaacaccttcaggaagcgaaggaatatccacctcaggagagacgacaaggttttcatcaaacccctccagggacagtcacacaacccagtcaacaaccgaattgctgtccgcctcagccagtcatggtgccatcccagtaagcacaggaatggcgtcttcgatcgtccccggcacctttcatcccaccctctctgaggcctccactgcagggagaccgacaggacagtcaagcccaacttctcccagtgcctctcctcaggagacagccgccatttcccggatggcccagactcagaggacaggaaccagcagagggtctgacactatcagcctggcgtcccaggcaaccgacaccttctcaacagtcccacccacacctccatcgatcacatccagtgggcttacatctccacaaacccagacccacactctgtcaccttcagggtctggtaaaaccttcaccacggccctcatcagcaacgccacccctcttcctgtcaccnncncttcctcngcatccacaggtcacnccacccctcttcntgtcaccgangcttcctcagtntccacaggtcacgccacncctcttcctgtcaccnncncttcctcagnatccacaggtnacaccacccctcttcctgtcaccgacncttcctcagnatccacaggncangccacccctcttcctgtcaccagcacctcctcagcctccacaggtcacgccacccctcttgctgtcagcagtgctacctcagcttccacagtatcctcggactcccctctgaagatggaaacatcaggaatgacaacaccgtcactgaagacagacggtgggagacgcacagccacatcaccaccccccacaacctcccagaccatcatttccaccattcccagcactgccatgcacacccgctccacagctgcccccatccccatcctgcctgagagaggagtttccctcttcccctatggggcagacgccggggacctggagttcgtcaggaggaccgtggacttcacctccccactcttcaagccggcgactggcttcccccttggctcctctctccgtgattccctctacgcttcacaggccgggaccctgtggccctggtggctccgttctgggacgatgctgacttctccactggtcgggggaccacattttatcaggaatacgagacgttctatggtgaacacagcctgctagtccagcaggccgagtcttggattagaaagatcacaaacaacgggggctacaaggccaggtgggccctaaaggtcacgtgggtcaatgcccacgcctatcctgcccagtggaccctcgggagcaacacctaccaagccatcctctccacggacgggagcaggtcctatgccctgtttctctaccagagcggtgggatgcagtgggacgtggcccagcgctcaggcaagccggtgctcatgggcttctctaggcctccaagggctgcagttctacgggctacaccgggaagaaaggcccaactaccgtctcgagtgcctgcagtggctgaagagccagcctcggtggcccagctggggctggaaccaggtctcctgcccttgttcctggcagcagggacgacgggacttacgattccaacccgtcagcataggtcgctggggcctcggcagtaggcagctgtgcagcttcacctcttggcgaggaggcgtgtgctgcagctacgggccctggggagagtttcgtgaaggctggcacgtgcagcgtccttggcagttggcccaggaactggagccacagagctggtgctgccgctggaatgacaagccctacctctgtgccctgtaccagcagaggcggccccacgtgggctgtgctacatacaggcccccacagcccgcctggatgttcggggacccccacatcaccaccttggatggtgtcagttacaccttcaatgggctgggggacttcctgctggtcggggcccaagacgggaactcctccttcctgcttcagggccgcaccgcccagactggctcagcccaggccaccaacttcatcgcctttgcggctcagtaccgctccagcagcctgggccccgtcacggtccaatggctccttgagcctcacgacgcaatccgtgtcctgctggataaccagactgtgacatttcagcctgaccatgaagacggcggaggccaggagacgttcaacgccaccggagtcctcctgagccgcaacggctctgaggtctccgccagcttcgacggctgggccaccgtctcggtgatcgcgctctccaacatcctccactcctccgccagcctcccgcccgagtaccagaaccgcacggaggggctcctgggggtctggaataacaatccagaggacgacttcaggatgcccaatggctccaccattcccccagggagccctgaggagatgcttttccactttggaatgacctggcagatcaacgggacaggcctccttggcaagaggaatgaccagctgccttccaacttcacccctgttttctactcacaactgcaaaaaaacagctcctgggctgaacatttgatctccaactgtgacggagatagctcatgcatctatgacaccctggccctgcgcaacgcaagcatcggacttcacacgagggaagtcagtaaaaactacgagcaggcgaacgccaccctcaatcagtacccgccctccatcaatggtggtcgtgtgattgaagcctacaaggggcagaccacgctgattcagtacaccagcaatgctgaggatgccaacttcacgctcagagacagctgcaccgacttggagctctttgagaatgggacgttgctgtggacacccaagtcgctggagccattcactctggagattctagcaagaagtgccaagattggcttggcatctgcactccagcccaggactgtggtctgccattgcaatgcagagagccagtgtttgtacaatcagaccagcagggtgggcaactcctccctggaggtggctggctgcaagtgtgacgggggcaccttcggccgctactgcgagggctccgaggatgcctgtgaggagccgtgcttcccgagtgtccactgcgttcctgggaagggctgcgaggcctgccctccaaacctgactggggatgggcggcactgtgcggctctggggagctctttcctgtgtcagaaccagtcctgccctgtgaattactgctacaatcaaggccactgctacatctcccagactctgggctgtcagcccatgtgcacctgccccccagccttcactgacagccgctgcttcctggctgggaacaacttcagtccaactgtcaacctagaacttcccttaagagtcatccagctcttgctcagtgaagaggaaaatgcctccatggcagaggtcaacgcctcggtggcatacagactggggaccctggacatgcgggcctttctccgcaacagccaagtggaacgaatcgattctgcagcaccggcctcgggaagccccatccaacactggatggtcatctcggagttccagtaccgccctcggggcccggtcattgacttcctgaacaaccagctgctggccgcggtggtggaggcgttcttataccacgttccacggaggagtgaggagcccaggaacgacgtggtcttccagcccatttccggggaagacgtgcgcgatgtgacagccctgaacgtgagcacgctgaaggcttacttcagatgcgatggctacaagggctacgacctggtctacagcccccagagcggcttcacctgcgtgtccccgtgcagtaggggctactgtgaccatggaggccagtgccagcacctgcccagtgggccccgctgcagctgtgtgtccttctccatctacacggcctggggcgagcactgtgagcacctgagcatgaaactcgacgcgttcttcggcatcttctttggggccctgggcggcctcttgctgctgggggtcgggacgttcgtggtcctgcgcttctggggttgctccggggccaggttctcctatttcctgaactcagctgaggccttgccttgaaggggcagctgtggcctaggctacctcaagactcacctcatccttaccgcacatttaaggcgccattgcttttgggagactggaaaagggaaggtgactgaaggctgtcaggattcttcaaggagaatgaatactgggaatcaagacaagactataccttatccataggcgcaggtgcacagggggaggccataaagatcaaacatgcatggatgggtcctcacgcagacacacccacagaaggacactagcctgtgcacgcgcgcgtgcacacacacacacacacacacgagttcataatgtggtgatggccctaagttaagcaaaatgcttctgcacacaaaactctctggtttacttcaaattaactctatttaaataaagtctctctgactttttgtgtctccaaaaaaaaaa

SEQ ID NO: 264958 - DNA, 7342 bp, Homo sapiens
  misc_feature (1)..(1): n is a, c, g, or t
  misc_feature (3415)..(3416): n is a, c, g, or t
  misc_feature (3418)..(3418): n is a, c, g, or t
  misc_feature (3426)..(3426): n is a, c, g, or t
  misc_feature (3442)..(3442): n is a, c, g, or t
  misc_feature (3455)..(3455): n is a, c, g, or t
  misc_feature (3465)..(3465): n is a, c, g, or t
  misc_feature (3477)..(3477): n is a, c, g, or t
  misc_feature (3495)..(3495): n is a, c, g, or t
  misc_feature (3511)..(3512): n is a, c, g, or t
  misc_feature (3514)..(3514): n is a, c, g, or t
  misc_feature (3524)..(3524): n is a, c, g, or t
  misc_feature (3535)..(3535): n is a, c, g, or t
  misc_feature (3562)..(3562): n is a, c, g, or t
  misc_feature (3572)..(3572): n is a, c, g, or t
  misc_feature (3582)..(3582): n is a, c, g, or t
  misc_feature (3585)..(3585): n is a, c, g, or t
ntacagccccaaggtcgctccctctgggccctttcttccccattcttcccagcagcccaaagctctggtgggacaggggcagcccctggggagggaggagaggacccaggaacccggctaggagggtggcccacccatttccagtgtgacctgttcccattcccccatgtctcctcccatccctcccgccactcagctcaggctgatgagaagcagagcaacgggtgtatcggtgttttctttcctggtggggtagtggggtggggctgaggagagaaaagggtgattagcgtggggccccgccctcttttgtcctcttcccaggttccctggccccttcggagaaacgcacttggttcgggccagccgcctgaggggacgggctcacgtctgctcctcacactgcagctgctgggccgtggagcttccccgggagccagggggacttttgccgcagccatgaagggggcacgctggaggagggtcccctgggtgtccctgagctgcctgtgtctctgcctccttccgcatgtggtcccaggaaccacagaggacacattaataactggaagtaaaactcctgccccagtcacctcaacaggctcaacaacagcgacactagagggacaatcaactgcagcttcttcaaggacctctaatcaggacatatcagcttcatctcagaaccaccagactaagagcacggagaccaccagcaaagctcaaaccgacaccctcacgcagatgatgacatcaactcttttttcttccccaagtgtacacaatgtgatggagactgttacgcaggagacagctcctccagatgaaatgaccacatcatttccctccagtgtcaccaacacactcatgatgacatcaaagactataacaatgacaacctccacagactccactcttggaaacacagaagagacatcaacagcaggaactgaaagttctaccccagtgacctcagcagtctcaataacagctggacaggaaggacaatcacgaacaacttcctggaggacctctatccaagacacatcagcttcttctcagaaccactggactcggagcacgcagaccaccagggaatctcaaaccagcaccctaacacacagaaccacttcaactccttctttctctccaagtgtacacaatgtgacagggactgtttctcagaagacatctccttcaggtgaaacagctacctcatccctctgtagtgtcacaaacacatccatgatgacatcagagaagataacagtgacaacctccacaggctccactcttggaaacccaggggagacatcatcagtacctgttactggaagtcttatgccagtcacctcagcagccttagtaacagttgatccagaaggacaatcaccagcaactttctcaaggacttctactcaggacacaacagctttttctaagaaccaccagactcagagcgtggagaccaccagagtatctcaaatcaacaccctcaacaccctcacaccggttacaacatcaactgttttatcctcaccaagtggattcaacccaagtggaacagtttctcaggagacattcccttctggtgaaacaaccatctcatccccttccagtgtcagcaatacattcctggtaacatcaaaggtgttcagaatgccaatctccagagactctactcttggaaacacagaggagacatcactatctgtaagtggaaccatttctgcaatcacttccaaagtttcaaccatatggtggtcagacactctgtcaacagcactctcccccagttctctacctccaaaaatatccacagctttccacacccagcagagtgaaggtgcagagaccacaggacggcctcatgagaggagctcattctctccaggtgtgtctcaagaaatatttactctacatgaaacaacaacatggccttcctcattctccagcaaaggccacacaacttggtcacaaacagaactgccctcaacatcaacaggtgctgccactaggcttgtcacaggaaatccatctacaagggcagctggcactattccaagggtcccctctaaggtctcagcaataggggaaccaggagagcccaccacatactcctcccacagcacaactctcccaaaaacaacaggggcaggcgcccagacacaatggacacaagaaacggggaccactggagaggctcttctcagcagcccaagctatagtgtgattcagatgataaaaacggccacatccccatcttcttcacctatgctggatagacacacatcacaacaaattacaacggcaccatcaacaaatcattcaacaatacattccacaagcacctctcctcaggaatcaccagctgtttcccaaaggggtcacactcgagccccgcagaccacacaagaatcacaaaccacgaggtccgtctcccccatgactgacaccaagacagtcaccaccccaggttcttccttcacagccagtgggcactcgccctcagaaattgttcctcaggacgcacccaccataagtgcagcaacaacctttgccccagctcccaccgggaatggtcacacaacccaggccccgaccacagcactgcaggcagcacccagcagccatgatgccaccctggggccctcaggaggcacgtcactttccaaaacaggtgcccttactctggccaactctgtagtgtcaacaccagggggcccagaaggacaatggacatcagcctctgccagcacctcacctgacacagcagcagccatgacccatacccaccaggctgagagcacagaggcctctggacaaacacagaccagcgaaccggcctcctcagggtcacgaaccacctcagcgggcacagctaccccttcctcatccggggcgagtggcacaacaccttcaggaagcgaaggaatatccacctcaggagagacgacaaggttttcatcaaacccctccagggacagtcacacaacccagtcaacaaccgaattgctgtccgcctcagccagtcatggtgccatcccagtaagcacaggaatggcgtcttcgatcgtccccggcacctttcatcccaccctctctgaggcctccactgcagggagaccgacaggacagtcaagcccaacttctcccagtgcctctcctcaggagacagccgccatttcccggatggcccagactcagaggacaggaaccagcagagggtctgacactatcagcctggcgtcccaggcaaccgacaccttctcaacagtcccacccacacctccatcgatcacatccagtgggcttacatctccacaaacccagacccacactctgtcaccttcagggtctggtaaaaccttcaccacggccctcatcagcaacgccacccctcttcctgtcaccnncncttcctcngcatccacaggtcacnccacccctcttcntgtcaccgangcttcctcagtntccacaggtcacgccacncctcttcctgtcaccnncncttcctcagnatccacaggtnacaccacccctcttcctgtcaccgacncttcctcagnatccacaggncangccacccctcttcctgtcaccagcacctcctcagcctccacaggtcacgccacccctcttgctgtcagcagtgctacctcagcttccacagtatcctcggactcccctctgaagatggaaacatcaggaatgacaacaccgtcactgaagacagacggtgggagacgcacagccacatcaccaccccccacaacctcccagaccatcatttccaccattcccagcactgccatgcacacccgctccacagctgcccccatccccatcctgcctgagagaggagtttccctcttcccctatggggcagacgccggggacctggagttcgtcaggaggaccgtggacttcacctccccactcttcaagccggcgactggcttcccccttggctcctctctccgtgattccctctacgcttcacaggccgggaccctgtggccctggtggctccgttctgggacgatgctgacttctccactggtcgggggaccacattttatcaggaatacgagacgttctatggtgaacacagcctgctagtccagcaggccgagtcttggattagaaagatcacaaacaacgggggctacaaggccaggtgggccctaaaggtcacgtgggtcaatgcccacgcctatcctgcccagtggaccctcgggagcaacacctaccaagccatcctctccacggacgggagcaggtcctatgccctgtttctctaccagagcggtgggatgcagtgggacgtggcccagcgctcaggcaagccggtgctcatgggcttctctagtggagatggctttttcgaaaacagcccactgatgtcccagccagtgtgggagaggtatcgccctgatagattcctgaattccaactcaggcctccaagggctgcagttctacgggctacaccgggaagaaaggcccaactaccgtctcgagtgcctgcagtggctgaagagccagcctcggtggcccagctggggctggaaccaggtctcctgcccttgttcctggcagcagggacgacgggacttacgattccaacccgtcagcataggtcgctggggcctcggcagtaggcagctgtgcagcttcacctcttggcgaggaggcgtgtgctgcagctacgggccctggggagagtttcgtgaaggctggcacgtgcagcgtccttggcagttggcccaggaactggagccacagagctggtgctgccgctggaatgacaagccctacctctgtgccctgtaccagcagaggcggccccacgtgggctgtgctacatacaggcccccacagcccgcctggatgttcggggacccccacatcaccaccttggatggtgtcagttacaccttcaatgggctgggggacttcctgctggtcggggcccaagacgggaactcctccttcctgcttcagggccgcaccgcccagactggctcagcccaggccaccaacttcatcgcctttgcggctcagtaccgctccagcagcctgggccccgtcacggtccaatggctccttgagcctcacgacgcaatccgtgtcctgctggataaccagactgtgacatttcagcctgaccatgaagacggcggaggccaggagacgttcaacgccaccggagtcctcctgagccgcaacggctctgaggtctccgccagcttcgacggctgggccaccgtctcggtgatcgcgctctccaacatcctccactcctccgccagcctcccgcccgagtaccagaaccgcacggaggggctcctgggggtctggaataacaatccagaggacgacttcaggatgcccaatggctccaccattcccccagggagccctgaggagatgcttttccactttggaatgacctggcagatcaacgggacaggcctccttggcaagaggaatgaccagctgccttccaacttcacccctgttttctactcacaactgcaaaaaaacagctcctgggctgaacatttgatctccaactgtgacggagatagctcatgcatctatgacaccctggccctgcgcaacgcaagcatcggacttcacacgagggaagtcagtaaaaactacgagcaggcgaacgccaccctcaatcagtacccgccctccatcaatggtggtcgtgtgattgaagcctacaaggggcagaccacgctgattcagtacaccagcaatgctgaggatgccaacttcacgctcagagacagctgcaccgacttggagctctttgagaatgggacgttgctgtggacacccaagtcgctggagccattcactctggagattctagcaagaagtgccaagattggcttggcatctgcactccagcccaggactgtggtctgccattgcaatgcagagagccagtgtttgtacaatcagaccagcagggtgggcaactcctccctggagctctggggagctctttcctgtgtcagaaccagtcctgccctgtgaattactgctacaatcaaggccactgctacatctcccagactctgggctgtcagcccatgtgcacctgccccccagccttcactgacagccgctgcttcctggctgggaacaacttcagtccaactgtcaacctagaacttcccttaagagtcatccagctcttgctcagtgaagaggaaaatgcctccatggcagaggtcaacgcctcggtggcatacagactggggaccctggacatgcgggcctttctccgcaacagccaagtggaacgaatcgattctgcagcaccggcctcgggaagccccatccaacactggatggtcatctcggagttccagtaccgccctcggggcccggtcattgacttcctgaacaaccagctgctggccgcggtggtggaggcgttcttataccacgttccacggaggagtgaggagcccaggaacgacgtggtcttccagcccatttccggggaagacgtgcgcgatgtgacagccctgaacgtgagcacgctgaaggcttacttcagatgcgatggctacaagggctacgacctggtctacagcccccagagcggcttcacctgcgtgtccccgtgcagtaggggctactgtgaccatggaggccagtgccagcacctgcccagtgggccccgctgcagctgtgtgtccttctccatctacacggcctggggcgagcactgtgagcacctgagcatgaaactcgacgcgttcttcggcatcttctttggggccctgggcggcctcttgctgctgggggtcgggacgttcgtggtcctgcgcttctggggttgctccggggccaggttctcctatttcctgaactcagctgaggccttgccttgaaggggcagctgtggcctaggctacctcaagactcacctcatccttaccgcacatttaaggcgccattgcttttgggagactggaaaagggaaggtgactgaaggctgtcaggattcttcaaggagaatgaatactgggaatcaagacaagactataccttatccataggcgcaggtgcacagggggaggccataaagatcaaacatgcatggatgggtcctcacgcagacacacccacagaaggacactagcctgtgcacgcgcgcgtgcacacacacacacacacacacgagttcataatgtggtgatggccctaagttaagcaaaatgcttctgcacacaaaactctctggtttacttcaaattaactctatttaaataaagtctctctgactttttgtgtctccaaaaaaaaaa

SEQ ID NO: 264959 - DNA, 7310 bp, Homo sapiens
  misc_feature (1)..(1): n is a, c, g, or t
ntacagccccaaggtcgctccctctgggccctttcttccccattcttcccagcagcccaaagctctggtgggacaggggcagcccctggggagggaggagaggacccaggaacccggctaggagggtggcccacccatttccagtgtgacctgttcccattcccccatgtctcctcccatccctcccgccactcagctcaggctgatgagaagcagagcaacgggtgtatcggtgttttctttcctggtggggtagtggggtggggctgaggagagaaaagggtgattagcgtggggccccgccctcttttgtcctcttcccaggttccctggccccttcggagaaacgcacttggttcgggccagccgcctgaggggacgggctcacgtctgctcctcacactgcagctgctgggccgtggagcttccccgggagccagggggacttttgccgcagccatgaagggggcacgctggaggagggtcccctgggtgtccctgagctgcctgtgtctctgcctccttccgcatgtggtcccaggaaccacagaggacacattaataactggaagtaaaactcctgccccagtcacctcaacaggctcaacaacagcgacactagagggacaatcaactgcagcttcttcaaggacctctaatcaggacatatcagcttcatctcagaaccaccagactaagagcacggagaccaccagcaaagctcaaaccgacaccctcacgcagatgatgacatcaactcttttttcttccccaagtgtacacaatgtgatggagactgttacgcaggagacagctcctccagatgaaatgaccacatcatttccctccagtgtcaccaacacactcatgatgacatcaaagactataacaatgacaacctccacagactccactcttggaaacacagaagagacatcaacagcaggaactgaaagttctaccccagtgacctcagcagtctcaataacagctggacaggaaggacaatcacgaacaacttcctggaggacctctatccaagacacatcagcttcttctcagaaccactggactcggagcacgcagaccaccagggaatctcaaaccagcaccctaacacacagaaccacttcaactccttctttctctccaagtgtacacaatgtgacagggactgtttctcagaagacatctccttcaggtgaaacagctacctcatccctctgtagtgtcacaaacacatccatgatgacatcagagaagataacagtgacaacctccacaggctccactcttggaaacccaggggagacatcatcagtacctgttactggaagtcttatgccagtcacctcagcagccttagtaacagttgatccagaaggacaatcaccagcaactttctcaaggacttctactcaggacacaacagctttttctaagaaccaccagactcagagcgtggagaccaccagagtatctcaaatcaacaccctcaacaccctcacaccggttacaacatcaactgttttatcctcaccaagtggattcaacccaagtggaacagtttctcaggagacattcccttctggtgaaacaaccatctcatccccttccagtgtcagcaatacattcctggtaacatcaaaggtgttcagaatgccaatctccagagactctactcttggaaacacagaggagacatcactatctgtaagtggaaccatttctgcaatcacttccaaagtttcaaccatatggtggtcagacactctgtcaacagcactctcccccagttctctacctccaaaaatatccacagctttccacacccagcagagtgaaggtgcagagaccacaggacggcctcatgagaggagctcattctctccaggtgtgtctcaagaaatatttactctacatgaaacaacaacatggccttcctcattctccagcaaaggccacacaacttggtcacaaacagaactgccctcaacatcaacaggtgctgccactaggcttgtcacaggaaatccatctacaagggcagctggcactattccaagggtcccctctaaggtctcagcaataggggaaccaggagagcccaccacatactcctcccacagcacaactctcccaaaaacaacaggggcaggcgcccagacacaatggacacaagaaacggggaccactggagaggctcttctcagcagcccaagctatagtgtgattcagatgataaaaacggccacatccccatcttcttcacctatgctggatagacacacatcacaacaaattacaacggcaccatcaacaaatcattcaacaatacattccacaagcacctctcctcaggaatcaccagctgtttcccaaaggggtcacactcgagccccgcagaccacacaagaatcacaaaccacgaggtccgtctcccccatgactgacaccaagacagtcaccaccccaggttcttccttcacagccagtgggcactcgccctcagaaattgttcctcaggacgcacccaccataagtgcagcaacaacctttgccccagctcccaccgggaatggtcacacaacccaggccccgaccacagcactgcaggcagcacccagcagccatgatgccaccctggggccctcaggaggcacgtcactttccaaaacaggtgcccttactctggccaactctgtagtgtcaacaccagggggcccagaaggacaatggacatcagcctctgccagcacctcacctgacacagcagcagccatgacccatacccaccaggctgagagcacagaggcctctggacaaacacagaccagcgaaccggcctcctcagggtcacgaaccacctcagcgggcacagctaccccttcctcatccggggcgagtggcacaacaccttcaggaagcgaaggaatatccacctcaggagagacgacaaggttttcatcaaacccctccagggacagtcacacaacccagtcaacaaccgaattgctgtccgcctcagccagtcatggtgccatcccagtaagcacaggaatggcgtcttcgatcgtccccggcacctttcatcccaccctctctgaggcctccactgcagggagaccgacaggacagtcaagcccaacttctcccagtgcctctcctcaggagacagccgccatttcccggatggcccagactcagaggacaggaaccagcagagggtctgacactatcagcctggcgtcccaggcaaccgacaccttctcaacagtcccacccacacctccatcgatcacatccagtgggcttacatctccacaaacccagacccacactctgtcaccttcagggtctggtaaaaccttcaccacggccctcatcagcaacgccacccctcttcctgtcaccagcacctcctcagcctccacaggtcacgccacccctcttgctgtcagcagtgctacctcagcttccacagtatcctcggactcccctctgaagatggaaacatcaggaatgacaacaccgtcactgaagacagacggtgggagacgcacagccacatcaccaccccccacaacctcccagaccatcatttccaccattcccagcactgccatgcacacccgctccacagctgcccccatccccatcctgcctgagagaggagtttccctcttcccctatggggcagacgccggggacctggagttcgtcaggaggaccgtggacttcacctccccactcttcaagccggcgactggcttcccccttggctcctctctccgtgattccctctacgcttcacaggccgggaccctgtggccctggtggctccgttctgggacgatgctgacttctccactggtcgggggaccacattttatcaggaatacgagacgttctatggtgaacacagcctgctagtccagcaggccgagtcttggattagaaagatcacaaacaacgggggctacaaggccaggtgggccctaaaggtcacgtgggtcaatgcccacgcctatcctgcccagtggaccctcgggagcaacacctaccaagccatcctctccacggacgggagcaggtcctatgccctgtttctctaccagagcggtgggatgcagtgggacgtggcccagcgctcaggcaagccggtgctcatgggcttctctagtggagatggctttttcgaaaacagcccactgatgtcccagccagtgtgggagaggtatcgccctgatagattcctgaattccaactcaggcctccaagggctgcagttctacgggctacaccgggaagaaaggcccaactaccgtctcgagtgcctgcagtggctgaagagccagcctcggtggcccagctggggctggaaccaggtctcctgcccttgttcctggcagcagggacgacgggacttacgattccaacccgtcagcataggtcgctggggcctcggcagtaggcagctgtgcagcttcacctcttggcgaggaggcgtgtgctgcagctacgggccctggggagagtttcgtgaaggctggcacgtgcagcgtccttggcagttggcccaggaactggagccacagagctggtgctgccgctggaatgacaagccctacctctgtgccctgtaccagcagaggcggccccacgtgggctgtgctacatacaggcccccacagcccgcctggatgttcggggacccccacatcaccaccttggatggtgtcagttacaccttcaatgggctgggggacttcctgctggtcggggcccaagacgggaactcctccttcctgcttcagggccgcaccgcccagactggctcagcccaggccaccaacttcatcgcctttgcggctcagtaccgctccagcagcctgggccccgtcacggtccaatggctccttgagcctcacgacgcaatccgtgtcctgctggataaccagactgtgacatttcagcctgaccatgaagacggcggaggccaggagacgttcaacgccaccggagtcctcctgagccgcaacggctctgaggtctccgccagcttcgacggctgggccaccgtctcggtgatcgcgctctccaacatcctccactcctccgccagcctcccgcccgagtaccagaaccgcacggaggggctcctgggggtctggaataacaatccagaggacgacttcaggatgcccaatggctccaccattcccccagggagccctgaggagatgcttttccactttggaatgacctggcagatcaacgggacaggcctccttggcaagaggaatgaccagctgccttccaacttcacccctgttttctactcacaactgcaaaaaaacagctcctgggctgaacatttgatctccaactgtgacggagatagctcatgcatctatgacaccctggccctgcgcaacgcaagcatcggacttcacacgagggaagtcagtaaaaactacgagcaggcgaacgccaccctcaatcagtacccgccctccatcaatggtggtcgtgtgattgaagcctacaaggggcagaccacgctgattcagtacaccagcaatgctgaggatgccaacttcacgctcagagacagctgcaccgacttggagctctttgagaatgggacgttgctgtggacacccaagtcgctggagccattcactctggagattctagcaagaagtgccaagattggcttggcatctgcactccagcccaggactgtggtctgccattgcaatgcagagagccagtgtttgtacaatcagaccagcagggtgggcaactcctccctggaggtggctggctgcaagtgtgacgggggcaccttcggccgctactgcgagggctccgaggatgcctgtgaggagccgtgcttcccgagtgtccactgcgttcctgggaagggctgcgaggcctgccctccaaacctgactggggatgggcggcactgtgcggctctggggagctctttcctgtgtcagaaccagtcctgccctgtgaattactgctacaatcaaggccactgctacatctcccagactctgggctgtcagcccatgtgcacctgccccccagccttcactgacagccgctgcttcctggctgggaacaacttcagtccaactgtcaacctagaacttcccttaagagtcatccagctcttgctcagtgaagaggaaaatgcctccatggcagaggtcaacgcctcggtggcatacagactggggaccctggacatgcgggcctttctccgcaacagccaagtggaacgaatcgattctgcagcaccggcctcgggaagccccatccaacactggatggtcatctcggagttccagtaccgccctcggggcccggtcattgacttcctgaacaaccagctgctggccgcggtggtggaggcgttcttataccacgttccacggaggagtgaggagcccaggaacgacgtggtcttccagcccatttccggggaagacgtgcgcgatgtgacagccctgaacgtgagcacgctgaaggcttacttcagatgcgatggctacaagggctacgacctggtctacagcccccagagcggcttcacctgcgtgtccccgtgcagtaggggctactgtgaccatggaggccagtgccagcacctgcccagtgggccccgctgcagctgtgtgtccttctccatctacacggcctggggcgagcactgtgagcacctgagcatgaaactcgacgcgttcttcggcatcttctttggggccctgggcggcctcttgctgctgggggtcgggacgttcgtggtcctgcgcttctggggttgctccggggccaggttctcctatttcctgaactcagctgaggccttgccttgaaggggcagctgtggcctaggctacctcaagactcacctcatccttaccgcacatttaaggcgccattgcttttgggagactggaaaagggaaggtgactgaaggctgtcaggattcttcaaggagaatgaatactgggaatcaagacaagactataccttatccataggcgcaggtgcacagggggaggccataaagatcaaacatgcatggatgggtcctcacgcagacacacccacagaaggacactagcctgtgcacgcgcgcgtgcacacacacacacacacacacgagttcataatgtggtgatggccctaagttaagcaaaatgcttctgcacacaaaactctctggtttacttcaaattaactctatttaaataaagtctctctgactttttgtgtctccaaaaaaaaaa

SEQ ID NO: 264960 - DNA, 7358 bp, Homo sapiens
  misc_feature (1)..(1): n is a, c, g, or t
ntacagccccaaggtcgctccctctgggccctttcttccccattcttcccagcagcccaaagctctggtgggacaggggcagcccctggggagggaggagaggacccaggaacccggctaggagggtggcccacccatttccagtgtgacctgttcccattcccccatgtctcctcccatccctcccgccactcagctcaggctgatgagaagcagagcaacgggtgtatcggtgttttctttcctggtggggtagtggggtggggctgaggagagaaaagggtgattagcgtggggccccgccctcttttgtcctcttcccaggttccctggccccttcggagaaacgcacttggttcgggccagccgcctgaggggacgggctcacgtctgctcctcacactgcagctgctgggccgtggagcttccccgggagccagggggacttttgccgcagccatgaagggggcacgctggaggagggtcccctgggtgtccctgagctgcctgtgtctctgcctccttccgcatgtggtcccaggaaccacagaggacacattaataactggaagtaaaactcctgccccagtcacctcaacaggctcaacaacagcgacactagagggacaatcaactgcagcttcttcaaggacctctaatcaggacatatcagcttcatctcagaaccaccagactaagagcacggagaccaccagcaaagctcaaaccgacaccctcacgcagatgatgacatcaactcttttttcttccccaagtgtacacaatgtgatggagactgttacgcaggagacagctcctccagatgaaatgaccacatcatttccctccagtgtcaccaacacactcatgatgacatcaaagactataacaatgacaacctccacagactccactcttggaaacacagaagagacatcaacagcaggaactgaaagttctaccccagtgacctcagcagtctcaataacagctggacaggaaggacaatcacgaacaacttcctggaggacctctatccaagacacatcagcttcttctcagaaccactggactcggagcacgcagaccaccagggaatctcaaaccagcaccctaacacacagaaccacttcaactccttctttctctccaagtgtacacaatgtgacagggactgtttctcagaagacatctccttcaggtgaaacagctacctcatccctctgtagtgtcacaaacacatccatgatgacatcagagaagataacagtgacaacctccacaggctccactcttggaaacccaggggagacatcatcagtacctgttactggaagtcttatgccagtcacctcagcagccttagtaacagttgatccagaaggacaatcaccagcaactttctcaaggacttctactcaggacacaacagctttttctaagaaccaccagactcagagcgtggagaccaccagagtatctcaaatcaacaccctcaacaccctcacaccggttacaacatcaactgttttatcctcaccaagtggattcaacccaagtggaacagtttctcaggagacattcccttctggtgaaacaaccatctcatccccttccagtgtcagcaatacattcctggtaacatcaaaggtgttcagaatgccaatctccagagactctactcttggaaacacagaggagacatcactatctgtaagtggaaccatttctgcaatcacttccaaagtttcaaccatatggtggtcagacactctgtcaacagcactctcccccagttctctacctccaaaaatatccacagctttccacacccagcagagtgaaggtgcagagaccacaggacggcctcatgagaggagctcattctctccaggtgtgtctcaagaaatatttactctacatgaaacaacaacatggccttcctcattctccagcaaaggccacacaacttggtcacaaacagaactgccctcaacatcaacaggtgctgccactaggcttgtcacaggaaatccatctacaagggcagctggcactattccaagggtcccctctaaggtctcagcaataggggaaccaggagagcccaccacatactcctcccacagcacaactctcccaaaaacaacaggggcaggcgcccagacacaatggacacaagaaacggggaccactggagaggctcttctcagcagcccaagctatagtgtgattcagatgataaaaacggccacatccccatcttcttcacctatgctggatagacacacatcacaacaaattacaacggcaccatcaacaaatcattcaacaatacattccacaagcacctctcctcaggaatcaccagctgtttcccaaaggggtcacactcgagccccgcagaccacacaagaatcacaaaccacgaggtccgtctcccccatgactgacaccaagacagtcaccaccccaggttcttccttcacagccagtgggcactcgccctcagaaattgttcctcaggacgcacccaccataagtgcagcaacaacctttgccccagctcccaccgggaatggtcacacaacccaggccccgaccacagcactgcaggcagcacccagcagccatgatgccaccctggggccctcaggaggcacgtcactttccaaaacaggtgcccttactctggccaactctgtagtgtcaacaccagggggcccagaaggacaatggacatcagcctctgccagcacctcacctgacacagcagcagccatgacccatacccaccaggctgagagcacagaggcctctggacaaacacagaccagcgaaccggcctcctcagggtcacgaaccacctcagcgggcacagctaccccttcctcatccggggcgagtggcacaacaccttcaggaagcgaaggaatatccacctcaggagagacgacaaggttttcatcaaacccctccagggacagtcacacaacccagtcaacaaccgaattgctgtccgcctcagccagtcatggtgccatcccagtaagcacaggaatggcgtcttcgatcgtccccggcacctttcatcccaccctctctgaggcctccactgcagggagaccgacaggacagtcaagcccaacttctcccagtgcctctcctcaggagacagccgccatttcccggatggcccagactcagaggacaggaaccagcagagggtctgacactatcagcctggcgtcccaggcaaccgacaccttctcaacagtcccacccacacctccatcgatcacatccagtgggcttacatctccacaaacccagacccacactctgtcaccttcagggtctggtaaaaccttcaccacggccctcatcagcaacgccacccctcttcctgtcaccagcacctcctcagcctccacaggtcacgccacccctcttgctgtcagcagtgctacctcagcttccacagtatcctcggactcccctctgaagatggaaacatcaggaatgacaacaccgtcactgaagacagacggtgggagacgcacagccacatcaccaccccccacaacctcccagaccatcatttccaccattcccagcactgccatgcacacccgctccacagctgcccccatccccatcctgcctgagagaggagtttccctcttcccctatggggcagacgccggggacctggagttcgtcaggaggaccgtggacttcacctccccactcttcaagccggcgactggcttcccccttggctcctctctccgtgattccctctacttcacagacaatggccagatcatcttcccagagtcagactaccagattttctcctaccccaacccactcccaacaggcttcacaggccgggaccctgtggccctggtggctccgttctgggacgatgctgacttctccactggtcgggggaccacattttatcaggaatacgagacgttctatggtgaacacagcctgctagtccagcaggccgagtcttggattagaaagatcacaaacaacgggggctacaaggccaggtgggccctaaaggtcacgtgggtcaatgcccacgcctatcctgcccagtggaccctcgggagcaacacctaccaagccatcctctccacggacgggagcaggtcctatgccctgtttctctaccagagcggtgggatgcagtgggacgtggcccagcgctcagtggagatggctttttcgaaaacagcccactgatgtcccagccagtgtgggagaggtatcgccctgatagattcctgaattccaactcaggcctccaagggctgcagttctacgggctacaccgggaagaaaggcccaactaccgtctcgagtgcctgcagtggctgaagagccagcctcggtggcccagctggggctggaaccaggtctcctgcccttgttcctggcagcagggacgacgggacttacgattccaacccgtcagcataggtcgctggggcctcggcagtaggcagctgtgcagcttcacctcttggcgaggaggcgtgtgctgcagctacgggccctggggagagtttcgtgaaggctggcacgtgcagcgtccttggcagttggcccaggaactggagccacagagctggtgctgccgctggaatgacaagccctacctctgtgccctgtaccagcagaggcggccccacgtgggctgtgctacatacaggcccccacagcccgcctggatgttcggggacccccacatcaccaccttggatggtgtcagttacaccttcaatgggctgggggacttcctgctggtcggggcccaagacgggaactcctccttcctgcttcagggccgcaccgcccagactggctcagcccaggccaccaacttcatcgcctttgcggctcagtaccgctccagcagcctgggccccgtcacggtccaatggctccttgagcctcacgacgcaatccgtgtcctgctggataaccagactgtgacatttcagcctgaccatgaagacggcggaggccaggagacgttcaacgccaccggagtcctcctgagccgcaacggctctgaggtctccgccagcttcgacggctgggccaccgtctcggtgatcgcgctctccaacatcctccactcctccgccagcctcccgcccgagtaccagaaccgcacggaggggctcctgggggtctggaataacaatccagaggacgacttcaggatgcccaatggctccaccattcccccagggagccctgaggagatgcttttccactttggaatgacctggcagatcaacgggacaggcctccttggcaagaggaatgaccagctgccttccaacttcacccctgttttctactcacaactgcaaaaaaacagctcctgggctgaacatttgatctccaactgtgacggagatagctcatgcatctatgacaccctggccctgcgcaacgcaagcatcggacttcacacgagggaagtcagtaaaaactacgagcaggcgaacgccaccctcaatcagtacccgccctccatcaatggtggtcgtgtgattgaagcctacaaggggcagaccacgctgattcagtacaccagcaatgctgaggatgccaacttcacgctcagagacagctgcaccgacttggagctctttgagaatgggacgttgctgtggacacccaagtcgctggagccattcactctggagattctagcaagaagtgccaagattggcttggcatctgcactccagcccaggactgtggtctgccattgcaatgcagagagccagtgtttgtacaatcagaccagcagggtgggcaactcctccctggaggtggctggctgcaagtgtgacgggggcaccttcggccgctactgcgagggctccgaggatgcctgtgaggagccgtgcttcccgagtgtccactgcgttcctgggaagggctgcgaggcctgccctccaaacctgactggggatgggcggcactgtgcggctctggggagctctttcctgtgtcagaaccagtcctgccctgtgaattactgctacaatcaaggccactgctacatctcccagactctgggctgtcagcccatgtgcacctgccccccagccttcactgacagccgctgcttcctggctgggaacaacttcagtccaactgtcaacctagaacttcccttaagagtcatccagctcttgctcagtgaagaggaaaatgcctccatggcagaggtcaacgcctcggtggcatacagactggggaccctggacatgcgggcctttctccgcaacagccaagtggaacgaatcgattctgcagcaccggcctcgggaagccccatccaacactggatggtcatctcggagttccagtaccgccctcggggcccggtcattgacttcctgaacaaccagctgctggccgcggtggtggaggcgttcttataccacgttccacggaggagtgaggagcccaggaacgacgtggtcttccagcccatttccggggaagacgtgcgcgatgtgacagccctgaacgtgagcacgctgaaggcttacttcagatgcgatggctacaagggctacgacctggtctacagcccccagagcggcttcacctgcgtgtccccgtgcagtaggggctactgtgaccatggaggccagtgccagcacctgcccagtgggccccgctgcagctgtgtgtccttctccatctacacggcctggggcgagcactgtgagcacctgagcatgaaactcgacgcgttcttcggcatcttctttggggccctgggcggcctcttgctgctgggggtcgggacgttcgtggtcctgcgcttctggggttgctccggggccaggttctcctatttcctgaactcagctgaggccttgccttgaaggggcagctgtggcctaggctacctcaagactcacctcatccttaccgcacatttaaggcgccattgcttttgggagactggaaaagggaaggtgactgaaggctgtcaggattcttcaaggagaatgaatactgggaatcaagacaagactataccttatccataggcgcaggtgcacagggggaggccataaagatcaaacatgcatggatgggtcctcacgcagacacacccacagaaggacactagcctgtgcacgcgcgcgtgcacacacacacacacacacacgagttcataatgtggtgatggccctaagttaagcaaaatgcttctgcacacaaaactctctggtttacttcaaattaactctatttaaataaagtctctctgactttttgtgtctccaaaaaaaaaa

SEQ ID NO: 264961 - DNA, 6989 bp, Homo sapiens
  misc_feature (1)..(1): n is a, c, g, or t
  misc_feature (3415)..(3416): n is a, c, g, or t
  misc_feature (3418)..(3418): n is a, c, g, or t
  misc_feature (3426)..(3426): n is a, c, g, or t
  misc_feature (3442)..(3442): n is a, c, g, or t
  misc_feature (3455)..(3455): n is a, c, g, or t
  misc_feature (3465)..(3465): n is a, c, g, or t
  misc_feature (3477)..(3477): n is a, c, g, or t
  misc_feature (3495)..(3495): n is a, c, g, or t
  misc_feature (3511)..(3512): n is a, c, g, or t
  misc_feature (3514)..(3514): n is a, c, g, or t
  misc_feature (3524)..(3524): n is a, c, g, or t
  misc_feature (3535)..(3535): n is a, c, g, or t
  misc_feature (3562)..(3562): n is a, c, g, or t
  misc_feature (3572)..(3572): n is a, c, g, or t
  misc_feature (3582)..(3582): n is a, c, g, or t
  misc_feature (3585)..(3585): n is a, c, g, or t
ntacagccccaaggtcgctccctctgggccctttcttccccattcttcccagcagcccaaagctctggtgggacaggggcagcccctggggagggaggagaggacccaggaacccggctaggagggtggcccacccatttccagtgtgacctgttcccattcccccatgtctcctcccatccctcccgccactcagctcaggctgatgagaagcagagcaacgggtgtatcggtgttttctttcctggtggggtagtggggtggggctgaggagagaaaagggtgattagcgtggggccccgccctcttttgtcctcttcccaggttccctggccccttcggagaaacgcacttggttcgggccagccgcctgaggggacgggctcacgtctgctcctcacactgcagctgctgggccgtggagcttccccgggagccagggggacttttgccgcagccatgaagggggcacgctggaggagggtcccctgggtgtccctgagctgcctgtgtctctgcctccttccgcatgtggtcccaggaaccacagaggacacattaataactggaagtaaaactcctgccccagtcacctcaacaggctcaacaacagcgacactagagggacaatcaactgcagcttcttcaaggacctctaatcaggacatatcagcttcatctcagaaccaccagactaagagcacggagaccaccagcaaagctcaaaccgacaccctcacgcagatgatgacatcaactcttttttcttccccaagtgtacacaatgtgatggagactgttacgcaggagacagctcctccagatgaaatgaccacatcatttccctccagtgtcaccaacacactcatgatgacatcaaagactataacaatgacaacctccacagactccactcttggaaacacagaagagacatcaacagcaggaactgaaagttctaccccagtgacctcagcagtctcaataacagctggacaggaaggacaatcacgaacaacttcctggaggacctctatccaagacacatcagcttcttctcagaaccactggactcggagcacgcagaccaccagggaatctcaaaccagcaccctaacacacagaaccacttcaactccttctttctctccaagtgtacacaatgtgacagggactgtttctcagaagacatctccttcaggtgaaacagctacctcatccctctgtagtgtcacaaacacatccatgatgacatcagagaagataacagtgacaacctccacaggctccactcttggaaacccaggggagacatcatcagtacctgttactggaagtcttatgccagtcacctcagcagccttagtaacagttgatccagaaggacaatcaccagcaactttctcaaggacttctactcaggacacaacagctttttctaagaaccaccagactcagagcgtggagaccaccagagtatctcaaatcaacaccctcaacaccctcacaccggttacaacatcaactgttttatcctcaccaagtggattcaacccaagtggaacagtttctcaggagacattcccttctggtgaaacaaccatctcatccccttccagtgtcagcaatacattcctggtaacatcaaaggtgttcagaatgccaatctccagagactctactcttggaaacacagaggagacatcactatctgtaagtggaaccatttctgcaatcacttccaaagtttcaaccatatggtggtcagacactctgtcaacagcactctcccccagttctctacctccaaaaatatccacagctttccacacccagcagagtgaaggtgcagagaccacaggacggcctcatgagaggagctcattctctccaggtgtgtctcaagaaatatttactctacatgaaacaacaacatggccttcctcattctccagcaaaggccacacaacttggtcacaaacagaactgccctcaacatcaacaggtgctgccactaggcttgtcacaggaaatccatctacaagggcagctggcactattccaagggtcccctctaaggtctcagcaataggggaaccaggagagcccaccacatactcctcccacagcacaactctcccaaaaacaacaggggcaggcgcccagacacaatggacacaagaaacggggaccactggagaggctcttctcagcagcccaagctatagtgtgattcagatgataaaaacggccacatccccatcttcttcacctatgctggatagacacacatcacaacaaattacaacggcaccatcaacaaatcattcaacaatacattccacaagcacctctcctcaggaatcaccagctgtttcccaaaggggtcacactcgagccccgcagaccacacaagaatcacaaaccacgaggtccgtctcccccatgactgacaccaagacagtcaccaccccaggttcttccttcacagccagtgggcactcgccctcagaaattgttcctcaggacgcacccaccataagtgcagcaacaacctttgccccagctcccaccgggaatggtcacacaacccaggccccgaccacagcactgcaggcagcacccagcagccatgatgccaccctggggccctcaggaggcacgtcactttccaaaacaggtgcccttactctggccaactctgtagtgtcaacaccagggggcccagaaggacaatggacatcagcctctgccagcacctcacctgacacagcagcagccatgacccatacccaccaggctgagagcacagaggcctctggacaaacacagaccagcgaaccggcctcctcagggtcacgaaccacctcagcgggcacagctaccccttcctcatccggggcgagtggcacaacaccttcaggaagcgaaggaatatccacctcaggagagacgacaaggttttcatcaaacccctccagggacagtcacacaacccagtcaacaaccgaattgctgtccgcctcagccagtcatggtgccatcccagtaagcacaggaatggcgtcttcgatcgtccccggcacctttcatcccaccctctctgaggcctccactgcagggagaccgacaggacagtcaagcccaacttctcccagtgcctctcctcaggagacagccgccatttcccggatggcccagactcagaggacaggaaccagcagagggtctgacactatcagcctggcgtcccaggcaaccgacaccttctcaacagtcccacccacacctccatcgatcacatccagtgggcttacatctccacaaacccagacccacactctgtcaccttcagggtctggtaaaaccttcaccacggccctcatcagcaacgccacccctcttcctgtcaccnncncttcctcngcatccacaggtcacnccacccctcttcntgtcaccgangcttcctcagtntccacaggtcacgccacncctcttcctgtcaccnncncttcctcagnatccacaggtnacaccacccctcttcctgtcaccgacncttcctcagnatccacaggncangccacccctcttcctgtcaccagcacctcctcagcctccacaggtcacgccacccctcttgctgtcagcagtgctacctcagcttccacagtatcctcggactcccctctgaagatggaaacatcaggaatgacaacaccgtcactgaagacagacggtgggagacgcacagccacatcaccaccccccacaacctcccagaccatcatttccaccattcccagcactgccatgcacacccgctccacagctgcccccatccccatcctgcctgagagaggagtttccctcttcccctatggggcagacgccggggacctggagttcgtcaggaggaccgtggacttcacctccccactcttcaagccggcgactggcttcccccttggctcctctctccgtgattccctctacttcacagacaatggccagatcatcttcccagagtcagactaccagattttctcctaccccaacccactcccaacaggcttcacaggccgggaccctgtggccctggtggctccgttctgggacgatgctgacttctccactggtcgggggaccacattttatcaggaatacgagacgttctatggtgaacacagcctgctagtccagcaggccgagtcttggattagaaagatcacaaacaacgggggctacaaggccaggtgggccctaaaggtcacgtgggtcaatgcccacgcctatcctgcccagtggaccctcgggagcaacacctaccaagccatcctctccacggacgggagcaggtcctatgccctgtttctctaccagagcggtgggatgcagtgggacgtggcccagcgctcaggcaagccggtgctcatgggcttctctagtggagatggctttttcgaaaacagcccactgatgtcccagccagtgtgggagaggtatcgccctgatagattcctgaattccaactcaggcctccaagggctgcagttctacgggctacaccgggaagaaaggcccaactaccgtctcgagtgcctgcagtggctgaagagccagcctcggtggcccagctggggctggaaccagggccgcaccgcccagactggctcagcccaggccaccaacttcatcgcctttgcggctcagtaccgctccagcagcctgggccccgtcacggtccaatggctccttgagcctcacgacgcaatccgtgtcctgctggataaccagactgtgacatttcagcctgaccatgaagacggcggaggccaggagacgttcaacgccaccggagtcctcctgagccgcaacggctctgaggtctccgccagcttcgacggctgggccaccgtctcggtgatcgcgctctccaacatcctccactcctccgccagcctcccgcccgagtaccagaaccgcacggaggggctcctgggggtctggaataacaatccagaggacgacttcaggatgcccaatggctccaccattcccccagggagccctgaggagatgcttttccactttggaatgacctggcagatcaacgggacaggcctccttggcaagaggaatgaccagctgccttccaacttcacccctgttttctactcacaactgcaaaaaaacagctcctgggctgaacatttgatctccaactgtgacggagatagctcatgcatctatgacaccctggccctgcgcaacgcaagcatcggacttcacacgagggaagtcagtaaaaactacgagcaggcgaacgccaccctcaatcagtacccgccctccatcaatggtggtcgtgtgattgaagcctacaaggggcagaccacgctgattcagtacaccagcaatgctgaggatgccaacttcacgctcagagacagctgcaccgacttggagctctttgagaatgggacgttgctgtggacacccaagtcgctggagccattcactctggagattctagcaagaagtgccaagattggcttggcatctgcactccagcccaggactgtggtctgccattgcaatgcagagagccagtgtttgtacaatcagaccagcagggtgggcaactcctccctggagctctggggagctctttcctgtgtcagaaccagtcctgccctgtgaattactgctacaatcaaggccactgctacatctcccagactctgggctgtcagcccatgtgcacctgccccccagccttcactgacagccgctgcttcctggctgggaacaacttcagtccaactgtcaacctagaacttcccttaagagtcatccagctcttgctcagtgaagaggaaaatgcctccatggcagaggtcaacgcctcggtggcatacagactggggaccctggacatgcgggcctttctccgcaacagccaagtggaacgaatcgattctgcagcaccggcctcgggaagccccatccaacactggatggtcatctcggagttccagtaccgccctcggggcccggtcattgacttcctgaacaaccagctgctggccgcggtggtggaggcgttcttataccacgttccacggaggagtgaggagcccaggaacgacgtggtcttccagcccatttccggggaagacgtgcgcgatgtgacagccctgaacgtgagcacgctgaaggcttacttcagatgcgatggctacaagggctacgacctggtctacagcccccagagcggcttcacctgcgtgtccccgtgcagtaggggctactgtgaccatggaggccagtgccagcacctgcccagtgggccccgctgcagctgtgtgtccttctccatctacacggcctggggcgagcactgtgagcacctgagcatgaaactcgacgcgttcttcggcatcttctttggggccctgggcggcctcttgctgctgggggtcgggacgttcgtggtcctgcgcttctggggttgctccggggccaggttctcctatttcctgaactcagctgaggccttgccttgaaggggcagctgtggcctaggctacctcaagactcacctcatccttaccgcacatttaaggcgccattgcttttgggagactggaaaagggaaggtgactgaaggctgtcaggattcttcaaggagaatgaatactgggaatcaagacaagactataccttatccataggcgcaggtgcacagggggaggccataaagatcaaacatgcatggatgggtcctcacgcagacacacccacagaaggacactagcctgtgcacgcgcgcgtgcacacacacacacacacacacgagttcataatgtggtgatggccctaagttaagcaaaatgcttctgcacacaaaactctctggtttacttcaaattaactctatttaaataaagtctctctgactttttgtgtctccaaaaaaaaaa

SEQ ID NO: 264962 - DNA, 7202 bp, Homo sapiens
  misc_feature (1)..(1): n is a, c, g, or t
ntacagccccaaggtcgctccctctgggccctttcttccccattcttcccagcagcccaaagctctggtgggacaggggcagcccctggggagggaggagaggacccaggaacccggctaggagggtggcccacccatttccagtgtgacctgttcccattcccccatgtctcctcccatccctcccgccactcagctcaggctgatgagaagcagagcaacgggtgtatcggtgttttctttcctggtggggtagtggggtggggctgaggagagaaaagggtgattagcgtggggccccgccctcttttgtcctcttcccaggttccctggccccttcggagaaacgcacttggttcgggccagccgcctgaggggacgggctcacgtctgctcctcacactgcagctgctgggccgtggagcttccccgggagccagggggacttttgccgcagccatgaagggggcacgctggaggagggtcccctgggtgtccctgagctgcctgtgtctctgcctccttccgcatgtggtcccaggaaccacagaggacacattaataactggaagtaaaactcctgccccagtcacctcaacaggctcaacaacagcgacactagagggacaatcaactgcagcttcttcaaggacctctaatcaggacatatcagcttcatctcagaaccaccagactaagagcacggagaccaccagcaaagctcaaaccgacaccctcacgcagatgatgacatcaactcttttttcttccccaagtgtacacaatgtgatggagactgttacgcaggagacagctcctccagatgaaatgaccacatcatttccctccagtgtcaccaacacactcatgatgacatcaaagactataacaatgacaacctccacagactccactcttggaaacacagaagagacatcaacagcaggaactgaaagttctaccccagtgacctcagcagtctcaataacagctggacaggaaggacaatcacgaacaacttcctggaggacctctatccaagacacatcagcttcttctcagaaccactggactcggagcacgcagaccaccagggaatctcaaaccagcaccctaacacacagaaccacttcaactccttctttctctccaagtgtacacaatgtgacagggactgtttctcagaagacatctccttcaggtgaaacagctacctcatccctctgtagtgtcacaaacacatccatgatgacatcagagaagataacagtgacaacctccacaggctccactcttggaaacccaggggagacatcatcagtacctgttactggaagtcttatgccagtcacctcagcagccttagtaacagttgatccagaaggacaatcaccagcaactttctcaaggacttctactcaggacacaacagctttttctaagaaccaccagactcagagcgtggagaccaccagagtatctcaaatcaacaccctcaacaccctcacaccggttacaacatcaactgttttatcctcaccaagtggattcaacccaagtggaacagtttctcaggagacattcccttctggtgaaacaaccatctcatccccttccagtgtcagcaatacattcctggtaacatcaaaggtgttcagaatgccaatctccagagactctactcttggaaacacagaggagacatcactatctgtaagtggaaccatttctgcaatcacttccaaagtttcaaccatatggtggtcagacactctgtcaacagcactctcccccagttctctacctccaaaaatatccacagctttccacacccagcagagtgaaggtgcagagaccacaggacggcctcatgagaggagctcattctctccaggtgtgtctcaagaaatatttactctacatgaaacaacaacatggccttcctcattctccagcaaaggccacacaacttggtcacaaacagaactgccctcaacatcaacaggtgctgccactaggcttgtcacaggaaatccatctacaagggcagctggcactattccaagggtcccctctaaggtctcagcaataggggaaccaggagagcccaccacatactcctcccacagcacaactctcccaaaaacaacaggggcaggcgcccagacacaatggacacaagaaacggggaccactggagaggctcttctcagcagcccaagctatagtgtgattcagatgataaaaacggccacatccccatcttcttcacctatgctggatagacacacatcacaacaaattacaacggcaccatcaacaaatcattcaacaatacattccacaagcacctctcctcaggaatcaccagctgtttcccaaaggggtcacactcgagccccgcagaccacacaagaatcacaaaccacgaggtccgtctcccccatgactgacaccaagacagtcaccaccccaggttcttccttcacagccagtgggcactcgccctcagaaattgttcctcaggacgcacccaccataagtgcagcaacaacctttgccccagctcccaccgggaatggtcacacaacccaggccccgaccacagcactgcaggcagcacccagcagccatgatgccaccctggggccctcaggaggcacgtcactttccaaaacaggtgcccttactctggccaactctgtagtgtcaacaccagggggcccagaaggacaatggacatcagcctctgccagcacctcacctgacacagcagcagccatgacccatacccaccaggctgagagcacagaggcctctggacaaacacagaccagcgaaccggcctcctcagggtcacgaaccacctcagcgggcacagctaccccttcctcatccggggcgagtggcacaacaccttcaggaagcgaaggaatatccacctcaggagagacgacaaggttttcatcaaacccctccagggacagtcacacaacccagtcaacaaccgaattgctgtccgcctcagccagtcatggtgccatcccagtaagcacaggaatggcgtcttcgatcgtccccggcacctttcatcccaccctctctgaggcctccactgcagggagaccgacaggacagtcaagcccaacttctcccagtgcctctcctcaggagacagccgccatttcccggatggcccagactcagaggacaggaaccagcagagggtctgacactatcagcctggcgtcccaggcaaccgacaccttctcaacagtcccacccacacctccatcgatcacatccagtgggcttacatctccacaaacccagacccacactctgtcaccttcagggtctggtaaaaccttcaccacggccctcatcagcaacgccacccctcttcctgtcaccagcacctcctcagcctccacaggtcacgccacccctcttgctgtcagcagtgctacctcagcttccacagtatcctcggactcccctctgaagatggaaacatcaggaatgacaacaccgtcactgaagacagacggtgggagacgcacagccacatcaccaccccccacaacctcccagaccatcatttccaccattcccagcactgccatgcacacccgctccacagctgcccccatccccatcctgcctgagagaggagtttccctcttcccctatggggcagacgccggggacctggagttcgtcaggaggaccgtggacttcacctccccactcttcaagccggcgactggcttcccccttggctcctctctccgtgattccctctacttcacagacaatggccagatcatcttcccagagtcagactaccagattttctcctaccccaacccactcccaacaggcttcacaggccgggaccctgtggccctggtggctccgttctgggacgatgctgacttctccactggtcgggggaccacattttatcagagcaacacctaccaagccatcctctccacggacgggagcaggtcctatgccctgtttctctaccagagcggtgggatgcagtgggacgtggcccagcgctcagtggagatggctttttcgaaaacagcccactgatgtcccagccagtgtgggagaggtatcgccctgatagattcctgaattccaactcaggcctccaagggctgcagttctacgggctacaccgggaagaaaggcccaactaccgtctcgagtgcctgcagtggctgaagagccagcctcggtggcccagctggggctggaaccaggtctcctgcccttgttcctggcagcagggacgacgggacttacgattccaacccgtcagcataggtcgctggggcctcggcagtaggcagctgtgcagcttcacctcttggcgaggaggcgtgtgctgcagctacgggccctggggagagtttcgtgaaggctggcacgtgcagcgtccttggcagttggcccaggaactggagccacagagctggtgctgccgctggaatgacaagccctacctctgtgccctgtaccagcagaggcggccccacgtgggctgtgctacatacaggcccccacagcccgcctggatgttcggggacccccacatcaccaccttggatggtgtcagttacaccttcaatgggctgggggacttcctgctggtcggggcccaagacgggaactcctccttcctgcttcagggccgcaccgcccagactggctcagcccaggccaccaacttcatcgcctttgcggctcagtaccgctccagcagcctgggccccgtcacggtccaatggctccttgagcctcacgacgcaatccgtgtcctgctggataaccagactgtgacatttcagcctgaccatgaagacggcggaggccaggagacgttcaacgccaccggagtcctcctgagccgcaacggctctgaggtctccgccagcttcgacggctgggccaccgtctcggtgatcgcgctctccaacatcctccactcctccgccagcctcccgcccgagtaccagaaccgcacggaggggctcctgggggtctggaataacaatccagaggacgacttcaggatgcccaatggctccaccattcccccagggagccctgaggagatgcttttccactttggaatgacctggcagatcaacgggacaggcctccttggcaagaggaatgaccagctgccttccaacttcacccctgttttctactcacaactgcaaaaaaacagctcctgggctgaacatttgatctccaactgtgacggagatagctcatgcatctatgacaccctggccctgcgcaacgcaagcatcggacttcacacgagggaagtcagtaaaaactacgagcaggcgaacgccaccctcaatcagtacccgccctccatcaatggtggtcgtgtgattgaagcctacaaggggcagaccacgctgattcagtacaccagcaatgctgaggatgccaacttcacgctcagagacagctgcaccgacttggagctctttgagaatgggacgttgctgtggacacccaagtcgctggagccattcactctggagattctagcaagaagtgccaagattggcttggcatctgcactccagcccaggactgtggtctgccattgcaatgcagagagccagtgtttgtacaatcagaccagcagggtgggcaactcctccctggaggtggctggctgcaagtgtgacgggggcaccttcggccgctactgcgagggctccgaggatgcctgtgaggagccgtgcttcccgagtgtccactgcgttcctgggaagggctgcgaggcctgccctccaaacctgactggggatgggcggcactgtgcggctctggggagctctttcctgtgtcagaaccagtcctgccctgtgaattactgctacaatcaaggccactgctacatctcccagactctgggctgtcagcccatgtgcacctgccccccagccttcactgacagccgctgcttcctggctgggaacaacttcagtccaactgtcaacctagaacttcccttaagagtcatccagctcttgctcagtgaagaggaaaatgcctccatggcagaggtcaacgcctcggtggcatacagactggggaccctggacatgcgggcctttctccgcaacagccaagtggaacgaatcgattctgcagcaccggcctcgggaagccccatccaacactggatggtcatctcggagttccagtaccgccctcggggcccggtcattgacttcctgaacaaccagctgctggccgcggtggtggaggcgttcttataccacgttccacggaggagtgaggagcccaggaacgacgtggtcttccagcccatttccggggaagacgtgcgcgatgtgacagccctgaacgtgagcacgctgaaggcttacttcagatgcgatggctacaagggctacgacctggtctacagcccccagagcggcttcacctgcgtgtccccgtgcagtaggggctactgtgaccatggaggccagtgccagcacctgcccagtgggccccgctgcagctgtgtgtccttctccatctacacggcctggggcgagcactgtgagcacctgagcatgaaactcgacgcgttcttcggcatcttctttggggccctgggcggcctcttgctgctgggggtcgggacgttcgtggtcctgcgcttctggggttgctccggggccaggttctcctatttcctgaactcagctgaggccttgccttgaaggggcagctgtggcctaggctacctcaagactcacctcatccttaccgcacatttaaggcgccattgcttttgggagactggaaaagggaaggtgactgaaggctgtcaggattcttcaaggagaatgaatactgggaatcaagacaagactataccttatccataggcgcaggtgcacagggggaggccataaagatcaaacatgcatggatgggtcctcacgcagacacacccacagaaggacactagcctgtgcacgcgcgcgtgcacacacacacacacacacacgagttcataatgtggtgatggccctaagttaagcaaaatgcttctgcacacaaaactctctggtttacttcaaattaactctatttaaataaagtctctctgactttttgtgtctccaaaaaaaaaa

SEQ ID NO: 264963 - DNA, 7154 bp, Homo sapiens
  misc_feature (1)..(1): n is a, c, g, or t
ntacagccccaaggtcgctccctctgggccctttcttccccattcttcccagcagcccaaagctctggtgggacaggggcagcccctggggagggaggagaggacccaggaacccggctaggagggtggcccacccatttccagtgtgacctgttcccattcccccatgtctcctcccatccctcccgccactcagctcaggctgatgagaagcagagcaacgggtgtatcggtgttttctttcctggtggggtagtggggtggggctgaggagagaaaagggtgattagcgtggggccccgccctcttttgtcctcttcccaggttccctggccccttcggagaaacgcacttggttcgggccagccgcctgaggggacgggctcacgtctgctcctcacactgcagctgctgggccgtggagcttccccgggagccagggggacttttgccgcagccatgaagggggcacgctggaggagggtcccctgggtgtccctgagctgcctgtgtctctgcctccttccgcatgtggtcccaggaaccacagaggacacattaataactggaagtaaaactcctgccccagtcacctcaacaggctcaacaacagcgacactagagggacaatcaactgcagcttcttcaaggacctctaatcaggacatatcagcttcatctcagaaccaccagactaagagcacggagaccaccagcaaagctcaaaccgacaccctcacgcagatgatgacatcaactcttttttcttccccaagtgtacacaatgtgatggagactgttacgcaggagacagctcctccagatgaaatgaccacatcatttccctccagtgtcaccaacacactcatgatgacatcaaagactataacaatgacaacctccacagactccactcttggaaacacagaagagacatcaacagcaggaactgaaagttctaccccagtgacctcagcagtctcaataacagctggacaggaaggacaatcacgaacaacttcctggaggacctctatccaagacacatcagcttcttctcagaaccactggactcggagcacgcagaccaccagggaatctcaaaccagcaccctaacacacagaaccacttcaactccttctttctctccaagtgtacacaatgtgacagggactgtttctcagaagacatctccttcaggtgaaacagctacctcatccctctgtagtgtcacaaacacatccatgatgacatcagagaagataacagtgacaacctccacaggctccactcttggaaacccaggggagacatcatcagtacctgttactggaagtcttatgccagtcacctcagcagccttagtaacagttgatccagaaggacaatcaccagcaactttctcaaggacttctactcaggacacaacagctttttctaagaaccaccagactcagagcgtggagaccaccagagtatctcaaatcaacaccctcaacaccctcacaccggttacaacatcaactgttttatcctcaccaagtggattcaacccaagtggaacagtttctcaggagacattcccttctggtgaaacaaccatctcatccccttccagtgtcagcaatacattcctggtaacatcaaaggtgttcagaatgccaatctccagagactctactcttggaaacacagaggagacatcactatctgtaagtggaaccatttctgcaatcacttccaaagtttcaaccatatggtggtcagacactctgtcaacagcactctcccccagttctctacctccaaaaatatccacagctttccacacccagcagagtgaaggtgcagagaccacaggacggcctcatgagaggagctcattctctccaggtgtgtctcaagaaatatttactctacatgaaacaacaacatggccttcctcattctccagcaaaggccacacaacttggtcacaaacagaactgccctcaacatcaacaggtgctgccactaggcttgtcacaggaaatccatctacaagggcagctggcactattccaagggtcccctctaaggtctcagcaataggggaaccaggagagcccaccacatactcctcccacagcacaactctcccaaaaacaacaggggcaggcgcccagacacaatggacacaagaaacggggaccactggagaggctcttctcagcagcccaagctatagtgtgattcagatgataaaaacggccacatccccatcttcttcacctatgctggatagacacacatcacaacaaattacaacggcaccatcaacaaatcattcaacaatacattccacaagcacctctcctcaggaatcaccagctgtttcccaaaggggtcacactcgagccccgcagaccacacaagaatcacaaaccacgaggtccgtctcccccatgactgacaccaagacagtcaccaccccaggttcttccttcacagccagtgggcactcgccctcagaaattgttcctcaggacgcacccaccataagtgcagcaacaacctttgccccagctcccaccgggaatggtcacacaacccaggccccgaccacagcactgcaggcagcacccagcagccatgatgccaccctggggccctcaggaggcacgtcactttccaaaacaggtgcccttactctggccaactctgtagtgtcaacaccagggggcccagaaggacaatggacatcagcctctgccagcacctcacctgacacagcagcagccatgacccatacccaccaggctgagagcacagaggcctctggacaaacacagaccagcgaaccggcctcctcagggtcacgaaccacctcagcgggcacagctaccccttcctcatccggggcgagtggcacaacaccttcaggaagcgaaggaatatccacctcaggagagacgacaaggttttcatcaaacccctccagggacagtcacacaacccagtcaacaaccgaattgctgtccgcctcagccagtcatggtgccatcccagtaagcacaggaatggcgtcttcgatcgtccccggcacctttcatcccaccctctctgaggcctccactgcagggagaccgacaggacagtcaagcccaacttctcccagtgcctctcctcaggagacagccgccatttcccggatggcccagactcagaggacaggaaccagcagagggtctgacactatcagcctggcgtcccaggcaaccgacaccttctcaacagtcccacccacacctccatcgatcacatccagtgggcttacatctccacaaacccagacccacactctgtcaccttcagggtctggtaaaaccttcaccacggccctcatcagcaacgccacccctcttcctgtcaccagcacctcctcagcctccacaggtcacgccacccctcttgctgtcagcagtgctacctcagcttccacagtatcctcggactcccctctgaagatggaaacatcaggaatgacaacaccgtcactgaagacagacggtgggagacgcacagccacatcaccaccccccacaacctcccagaccatcatttccaccattcccagcactgccatgcacacccgctccacagctgcccccatccccatcctgcctgagagaggagtttccctcttcccctatggggcagacgccggggacctggagttcgtcaggaggaccgtggacttcacctccccactcttcaagccggcgactggcttcccccttggctcctctctccgtgattccctctacgcttcacaggccgggaccctgtggccctggtggctccgttctgggacgatgctgacttctccactggtcgggggaccacattttatcagagcaacacctaccaagccatcctctccacggacgggagcaggtcctatgccctgtttctctaccagagcggtgggatgcagtgggacgtggcccagcgctcaggcaagccggtgctcatgggcttctctagtggagatggctttttcgaaaacagcccactgatgtcccagccagtgtgggagaggtatcgccctgatagattcctgaattccaactcaggcctccaagggctgcagttctacgggctacaccgggaagaaaggcccaactaccgtctcgagtgcctgcagtggctgaagagccagcctcggtggcccagctggggctggaaccaggtctcctgcccttgttcctggcagcagggacgacgggacttacgattccaacccgtcagcataggtcgctggggcctcggcagtaggcagctgtgcagcttcacctcttggcgaggaggcgtgtgctgcagctacgggccctggggagagtttcgtgaaggctggcacgtgcagcgtccttggcagttggcccaggaactggagccacagagctggtgctgccgctggaatgacaagccctacctctgtgccctgtaccagcagaggcggccccacgtgggctgtgctacatacaggcccccacagcccgcctggatgttcggggacccccacatcaccaccttggatggtgtcagttacaccttcaatgggctgggggacttcctgctggtcggggcccaagacgggaactcctccttcctgcttcagggccgcaccgcccagactggctcagcccaggccaccaacttcatcgcctttgcggctcagtaccgctccagcagcctgggccccgtcacggtccaatggctccttgagcctcacgacgcaatccgtgtcctgctggataaccagactgtgacatttcagcctgaccatgaagacggcggaggccaggagacgttcaacgccaccggagtcctcctgagccgcaacggctctgaggtctccgccagcttcgacggctgggccaccgtctcggtgatcgcgctctccaacatcctccactcctccgccagcctcccgcccgagtaccagaaccgcacggaggggctcctgggggtctggaataacaatccagaggacgacttcaggatgcccaatggctccaccattcccccagggagccctgaggagatgcttttccactttggaatgacctggcagatcaacgggacaggcctccttggcaagaggaatgaccagctgccttccaacttcacccctgttttctactcacaactgcaaaaaaacagctcctgggctgaacatttgatctccaactgtgacggagatagctcatgcatctatgacaccctggccctgcgcaacgcaagcatcggacttcacacgagggaagtcagtaaaaactacgagcaggcgaacgccaccctcaatcagtacccgccctccatcaatggtggtcgtgtgattgaagcctacaaggggcagaccacgctgattcagtacaccagcaatgctgaggatgccaacttcacgctcagagacagctgcaccgacttggagctctttgagaatgggacgttgctgtggacacccaagtcgctggagccattcactctggagattctagcaagaagtgccaagattggcttggcatctgcactccagcccaggactgtggtctgccattgcaatgcagagagccagtgtttgtacaatcagaccagcagggtgggcaactcctccctggaggtggctggctgcaagtgtgacgggggcaccttcggccgctactgcgagggctccgaggatgcctgtgaggagccgtgcttcccgagtgtccactgcgttcctgggaagggctgcgaggcctgccctccaaacctgactggggatgggcggcactgtgcggctctggggagctctttcctgtgtcagaaccagtcctgccctgtgaattactgctacaatcaaggccactgctacatctcccagactctgggctgtcagcccatgtgcacctgccccccagccttcactgacagccgctgcttcctggctgggaacaacttcagtccaactgtcaacctagaacttcccttaagagtcatccagctcttgctcagtgaagaggaaaatgcctccatggcagaggtcaacgcctcggtggcatacagactggggaccctggacatgcgggcctttctccgcaacagccaagtggaacgaatcgattctgcagcaccggcctcgggaagccccatccaacactggatggtcatctcggagttccagtaccgccctcggggcccggtcattgacttcctgaacaaccagctgctggccgcggtggtggaggcgttcttataccacgttccacggaggagtgaggagcccaggaacgacgtggtcttccagcccatttccggggaagacgtgcgcgatgtgacagccctgaacgtgagcacgctgaaggcttacttcagatgcgatggctacaagggctacgacctggtctacagcccccagagcggcttcacctgcgtgtccccgtgcagtaggggctactgtgaccatggaggccagtgccagcacctgcccagtgggccccgctgcagctgtgtgtccttctccatctacacggcctggggcgagcactgtgagcacctgagcatgaaactcgacgcgttcttcggcatcttctttggggccctgggcggcctcttgctgctgggggtcgggacgttcgtggtcctgcgcttctggggttgctccggggccaggttctcctatttcctgaactcagctgaggccttgccttgaaggggcagctgtggcctaggctacctcaagactcacctcatccttaccgcacatttaaggcgccattgcttttgggagactggaaaagggaaggtgactgaaggctgtcaggattcttcaaggagaatgaatactgggaatcaagacaagactataccttatccataggcgcaggtgcacagggggaggccataaagatcaaacatgcatggatgggtcctcacgcagacacacccacagaaggacactagcctgtgcacgcgcgcgtgcacacacacacacacacacacgagttcataatgtggtgatggccctaagttaagcaaaatgcttctgcacacaaaactctctggtttacttcaaattaactctatttaaataaagtctctctgactttttgtgtctccaaaaaaaaaa

SEQ ID NO: 264964 - DNA, 7141 bp, Homo sapiens
  misc_feature (1)..(1): n is a, c, g, or t
ntacagccccaaggtcgctccctctgggccctttcttccccattcttcccagcagcccaaagctctggtgggacaggggcagcccctggggagggaggagaggacccaggaacccggctaggagggtggcccacccatttccagtgtgacctgttcccattcccccatgtctcctcccatccctcccgccactcagctcaggctgatgagaagcagagcaacgggtgtatcggtgttttctttcctggtggggtagtggggtggggctgaggagagaaaagggtgattagcgtggggccccgccctcttttgtcctcttcccaggttccctggccccttcggagaaacgcacttggttcgggccagccgcctgaggggacgggctcacgtctgctcctcacactgcagctgctgggccgtggagcttccccgggagccagggggacttttgccgcagccatgaagggggcacgctggaggagggtcccctgggtgtccctgagctgcctgtgtctctgcctccttccgcatgtggtcccaggaaccacagaggacacattaataactggaagtaaaactcctgccccagtcacctcaacaggctcaacaacagcgacactagagggacaatcaactgcagcttcttcaaggacctctaatcaggacatatcagcttcatctcagaaccaccagactaagagcacggagaccaccagcaaagctcaaaccgacaccctcacgcagatgatgacatcaactcttttttcttccccaagtgtacacaatgtgatggagactgttacgcaggagacagctcctccagatgaaatgaccacatcatttccctccagtgtcaccaacacactcatgatgacatcaaagactataacaatgacaacctccacagactccactcttggaaacacagaagagacatcaacagcaggaactgaaagttctaccccagtgacctcagcagtctcaataacagctggacaggaaggacaatcacgaacaacttcctggaggacctctatccaagacacatcagcttcttctcagaaccactggactcggagcacgcagaccaccagggaatctcaaaccagcaccctaacacacagaaccacttcaactccttctttctctccaagtgtacacaatgtgacagggactgtttctcagaagacatctccttcaggtgaaacagctacctcatccctctgtagtgtcacaaacacatccatgatgacatcagagaagataacagtgacaacctccacaggctccactcttggaaacccaggggagacatcatcagtacctgttactggaagtcttatgccagtcacctcagcagccttagtaacagttgatccagaaggacaatcaccagcaactttctcaaggacttctactcaggacacaacagctttttctaagaaccaccagactcagagcgtggagaccaccagagtatctcaaatcaacaccctcaacaccctcacaccggttacaacatcaactgttttatcctcaccaagtggattcaacccaagtggaacagtttctcaggagacattcccttctggtgaaacaaccatctcatccccttccagtgtcagcaatacattcctggtaacatcaaaggtgttcagaatgccaatctccagagactctactcttggaaacacagaggagacatcactatctgtaagtggaaccatttctgcaatcacttccaaagtttcaaccatatggtggtcagacactctgtcaacagcactctcccccagttctctacctccaaaaatatccacagctttccacacccagcagagtgaaggtgcagagaccacaggacggcctcatgagaggagctcattctctccaggtgtgtctcaagaaatatttactctacatgaaacaacaacatggccttcctcattctccagcaaaggccacacaacttggtcacaaacagaactgccctcaacatcaacaggtgctgccactaggcttgtcacaggaaatccatctacaagggcagctggcactattccaagggtcccctctaaggtctcagcaataggggaaccaggagagcccaccacatactcctcccacagcacaactctcccaaaaacaacaggggcaggcgcccagacacaatggacacaagaaacggggaccactggagaggctcttctcagcagcccaagctatagtgtgattcagatgataaaaacggccacatccccatcttcttcacctatgctggatagacacacatcacaacaaattacaacggcaccatcaacaaatcattcaacaatacattccacaagcacctctcctcaggaatcaccagctgtttcccaaaggggtcacactcgagccccgcagaccacacaagaatcacaaaccacgaggtccgtctcccccatgactgacaccaagacagtcaccaccccaggttcttccttcacagccagtgggcactcgccctcagaaattgttcctcaggacgcacccaccataagtgcagcaacaacctttgccccagctcccaccgggaatggtcacacaacccaggccccgaccacagcactgcaggcagcacccagcagccatgatgccaccctggggccctcaggaggcacgtcactttccaaaacaggtgcccttactctggccaactctgtagtgtcaacaccagggggcccagaaggacaatggacatcagcctctgccagcacctcacctgacacagcagcagccatgacccatacccaccaggctgagagcacagaggcctctggacaaacacagaccagcgaaccggcctcctcagggtcacgaaccacctcagcgggcacagctaccccttcctcatccggggcgagtggcacaacaccttcaggaagcgaaggaatatccacctcaggagagacgacaaggttttcatcaaacccctccagggacagtcacacaacccagtcaacaaccgaattgctgtccgcctcagccagtcatggtgccatcccagtaagcacaggaatggcgtcttcgatcgtccccggcacctttcatcccaccctctctgaggcctccactgcagggagaccgacaggacagtcaagcccaacttctcccagtgcctctcctcaggagacagccgccatttcccggatggcccagactcagaggacaggaaccagcagagggtctgacactatcagcctggcgtcccaggcaaccgacaccttctcaacagtcccacccacacctccatcgatcacatccagtgggcttacatctccacaaacccagacccacactctgtcaccttcagggtctggtaaaaccttcaccacggccctcatcagcaacgccacccctcttcctgtcaccagcacctcctcagcctccacaggtcacgccacccctcttgctgtcagcagtgctacctcagcttccacagtatcctcggactcccctctgaagatggaaacatcaggaatgacaacaccgtcactgaagacagacggtgggagacgcacagccacatcaccaccccccacaacctcccagaccatcatttccaccattcccagcactgccatgcacacccgctccacagctgcccccatccccatcctgcctgagagaggagtttccctcttcccctatggggcagacgccggggacctggagttcgtcaggaggaccgtggacttcacctccccactcttcaagccggcgactggcttcccccttggctcctctctccgtgattccctctacttcacagacaatggccagatcatcttcccagagtcagactaccagattttctcctaccccaacccactcccaacaggcttcacaggccgggaccctgtggccctggtggctccgttctgggacgatgctgacttctccactggtcgggggaccacattttatcagagcaacacctaccaagccatcctctccacggacgggagcaggtcctatgccctgtttctctaccagagcggtgggatgcagtgggacgtggcccagcgctcaggcaagccggtgctcatgggcttctctaggcctccaagggctgcagttctacgggctacaccgggaagaaaggcccaactaccgtctcgagtgcctgcagtggctgaagagccagcctcggtggcccagctggggctggaaccaggtctcctgcccttgttcctggcagcagggacgacgggacttacgattccaacccgtcagcataggtcgctggggcctcggcagtaggcagctgtgcagcttcacctcttggcgaggaggcgtgtgctgcagctacgggccctggggagagtttcgtgaaggctggcacgtgcagcgtccttggcagttggcccaggaactggagccacagagctggtgctgccgctggaatgacaagccctacctctgtgccctgtaccagcagaggcggccccacgtgggctgtgctacatacaggcccccacagcccgcctggatgttcggggacccccacatcaccaccttggatggtgtcagttacaccttcaatgggctgggggacttcctgctggtcggggcccaagacgggaactcctccttcctgcttcagggccgcaccgcccagactggctcagcccaggccaccaacttcatcgcctttgcggctcagtaccgctccagcagcctgggccccgtcacggtccaatggctccttgagcctcacgacgcaatccgtgtcctgctggataaccagactgtgacatttcagcctgaccatgaagacggcggaggccaggagacgttcaacgccaccggagtcctcctgagccgcaacggctctgaggtctccgccagcttcgacggctgggccaccgtctcggtgatcgcgctctccaacatcctccactcctccgccagcctcccgcccgagtaccagaaccgcacggaggggctcctgggggtctggaataacaatccagaggacgacttcaggatgcccaatggctccaccattcccccagggagccctgaggagatgcttttccactttggaatgacctggcagatcaacgggacaggcctccttggcaagaggaatgaccagctgccttccaacttcacccctgttttctactcacaactgcaaaaaaacagctcctgggctgaacatttgatctccaactgtgacggagatagctcatgcatctatgacaccctggccctgcgcaacgcaagcatcggacttcacacgagggaagtcagtaaaaactacgagcaggcgaacgccaccctcaatcagtacccgccctccatcaatggtggtcgtgtgattgaagcctacaaggggcagaccacgctgattcagtacaccagcaatgctgaggatgccaacttcacgctcagagacagctgcaccgacttggagctctttgagaatgggacgttgctgtggacacccaagtcgctggagccattcactctggagattctagcaagaagtgccaagattggcttggcatctgcactccagcccaggactgtggtctgccattgcaatgcagagagccagtgtttgtacaatcagaccagcagggtgggcaactcctccctggaggtggctggctgcaagtgtgacgggggcaccttcggccgctactgcgagggctccgaggatgcctgtgaggagccgtgcttcccgagtgtccactgcgttcctgggaagggctgcgaggcctgccctccaaacctgactggggatgggcggcactgtgcggctctggggagctctttcctgtgtcagaaccagtcctgccctgtgaattactgctacaatcaaggccactgctacatctcccagactctgggctgtcagcccatgtgcacctgccccccagccttcactgacagccgctgcttcctggctgggaacaacttcagtccaactgtcaacctagaacttcccttaagagtcatccagctcttgctcagtgaagaggaaaatgcctccatggcagaggtcaacgcctcggtggcatacagactggggaccctggacatgcgggcctttctccgcaacagccaagtggaacgaatcgattctgcagcaccggcctcgggaagccccatccaacactggatggtcatctcggagttccagtaccgccctcggggcccggtcattgacttcctgaacaaccagctgctggccgcggtggtggaggcgttcttataccacgttccacggaggagtgaggagcccaggaacgacgtggtcttccagcccatttccggggaagacgtgcgcgatgtgacagccctgaacgtgagcacgctgaaggcttacttcagatgcgatggctacaagggctacgacctggtctacagcccccagagcggcttcacctgcgtgtccccgtgcagtaggggctactgtgaccatggaggccagtgccagcacctgcccagtgggccccgctgcagctgtgtgtccttctccatctacacggcctggggcgagcactgtgagcacctgagcatgaaactcgacgcgttcttcggcatcttctttggggccctgggcggcctcttgctgctgggggtcgggacgttcgtggtcctgcgcttctggggttgctccggggccaggttctcctatttcctgaactcagctgaggccttgccttgaaggggcagctgtggcctaggctacctcaagactcacctcatccttaccgcacatttaaggcgccattgcttttgggagactggaaaagggaaggtgactgaaggctgtcaggattcttcaaggagaatgaatactgggaatcaagacaagactataccttatccataggcgcaggtgcacagggggaggccataaagatcaaacatgcatggatgggtcctcacgcagacacacccacagaaggacactagcctgtgcacgcgcgcgtgcacacacacacacacacacacgagttcataatgtggtgatggccctaagttaagcaaaatgcttctgcacacaaaactctctggtttacttcaaattaactctatttaaataaagtctctctgactttttgtgtctccaaaaaaaaaa

SEQ ID NO: 264965 - DNA, 7126 bp, Homo sapiens
  misc_feature (1)..(1): n is a, c, g, or t
ntacagccccaaggtcgctccctctgggccctttcttccccattcttcccagcagcccaaagctctggtgggacaggggcagcccctggggagggaggagaggacccaggaacccggctaggagggtggcccacccatttccagtgtgacctgttcccattcccccatgtctcctcccatccctcccgccactcagctcaggctgatgagaagcagagcaacgggtgtatcggtgttttctttcctggtggggtagtggggtggggctgaggagagaaaagggtgattagcgtggggccccgccctcttttgtcctcttcccaggttccctggccccttcggagaaacgcacttggttcgggccagccgcctgaggggacgggctcacgtctgctcctcacactgcagctgctgggccgtggagcttccccgggagccagggggacttttgccgcagccatgaagggggcacgctggaggagggtcccctgggtgtccctgagctgcctgtgtctctgcctccttccgcatgtggtcccaggaaccacagaggacacattaataactggaagtaaaactcctgccccagtcacctcaacaggctcaacaacagcgacactagagggacaatcaactgcagcttcttcaaggacctctaatcaggacatatcagcttcatctcagaaccaccagactaagagcacggagaccaccagcaaagctcaaaccgacaccctcacgcagatgatgacatcaactcttttttcttccccaagtgtacacaatgtgatggagactgttacgcaggagacagctcctccagatgaaatgaccacatcatttccctccagtgtcaccaacacactcatgatgacatcaaagactataacaatgacaacctccacagactccactcttggaaacacagaagagacatcaacagcaggaactgaaagttctaccccagtgacctcagcagtctcaataacagctggacaggaaggacaatcacgaacaacttcctggaggacctctatccaagacacatcagcttcttctcagaaccactggactcggagcacgcagaccaccagggaatctcaaaccagcaccctaacacacagaaccacttcaactccttctttctctccaagtgtacacaatgtgacagggactgtttctcagaagacatctccttcaggtgaaacagctacctcatccctctgtagtgtcacaaacacatccatgatgacatcagagaagataacagtgacaacctccacaggctccactcttggaaacccaggggagacatcatcagtacctgttactggaagtcttatgccagtcacctcagcagccttagtaacagttgatccagaaggacaatcaccagcaactttctcaaggacttctactcaggacacaacagctttttctaagaaccaccagactcagagcgtggagaccaccagagtatctcaaatcaacaccctcaacaccctcacaccggttacaacatcaactgttttatcctcaccaagtggattcaacccaagtggaacagtttctcaggagacattcccttctggtgaaacaaccatctcatccccttccagtgtcagcaatacattcctggtaacatcaaaggtgttcagaatgccaatctccagagactctactcttggaaacacagaggagacatcactatctgtaagtggaaccatttctgcaatcacttccaaagtttcaaccatatggtggtcagacactctgtcaacagcactctcccccagttctctacctccaaaaatatccacagctttccacacccagcagagtgaaggtgcagagaccacaggacggcctcatgagaggagctcattctctccaggtgtgtctcaagaaatatttactctacatgaaacaacaacatggccttcctcattctccagcaaaggccacacaacttggtcacaaacagaactgccctcaacatcaacaggtgctgccactaggcttgtcacaggaaatccatctacaagggcagctggcactattccaagggtcccctctaaggtctcagcaataggggaaccaggagagcccaccacatactcctcccacagcacaactctcccaaaaacaacaggggcaggcgcccagacacaatggacacaagaaacggggaccactggagaggctcttctcagcagcccaagctatagtgtgattcagatgataaaaacggccacatccccatcttcttcacctatgctggatagacacacatcacaacaaattacaacggcaccatcaacaaatcattcaacaatacattccacaagcacctctcctcaggaatcaccagctgtttcccaaaggggtcacactcgagccccgcagaccacacaagaatcacaaaccacgaggtccgtctcccccatgactgacaccaagacagtcaccaccccaggttcttccttcacagccagtgggcactcgccctcagaaattgttcctcaggacgcacccaccataagtgcagcaacaacctttgccccagctcccaccgggaatggtcacacaacccaggccccgaccacagcactgcaggcagcacccagcagccatgatgccaccctggggccctcaggaggcacgtcactttccaaaacaggtgcccttactctggccaactctgtagtgtcaacaccagggggcccagaaggacaatggacatcagcctctgccagcacctcacctgacacagcagcagccatgacccatacccaccaggctgagagcacagaggcctctggacaaacacagaccagcgaaccggcctcctcagggtcacgaaccacctcagcgggcacagctaccccttcctcatccggggcgagtggcacaacaccttcaggaagcgaaggaatatccacctcaggagagacgacaaggttttcatcaaacccctccagggacagtcacacaacccagtcaacaaccgaattgctgtccgcctcagccagtcatggtgccatcccagtaagcacaggaatggcgtcttcgatcgtccccggcacctttcatcccaccctctctgaggcctccactgcagggagaccgacaggacagtcaagcccaacttctcccagtgcctctcctcaggagacagccgccatttcccggatggcccagactcagaggacaggaaccagcagagggtctgacactatcagcctggcgtcccaggcaaccgacaccttctcaacagtcccacccacacctccatcgatcacatccagtgggcttacatctccacaaacccagacccacactctgtcaccttcagggtctggtaaaaccttcaccacggccctcatcagcaacgccacccctcttcctgtcaccagcacctcctcagcctccacaggtcacgccacccctcttgctgtcagcagtgctacctcagcttccacagtatcctcggactcccctctgaagatggaaacatcaggaatgacaacaccgtcactgaagacagacggtgggagacgcacagccacatcaccaccccccacaacctcccagaccatcatttccaccattcccagcactgccatgcacacccgctccacagctgcccccatccccatcctgcctgagagaggagtttccctcttcccctatggggcagacgccggggacctggagttcgtcaggaggaccgtggacttcacctccccactcttcaagccggcgactggcttcccccttggctcctctctccgtgattccctctacgcttcacaggccgggaccctgtggccctggtggctccgttctgggacgatgctgacttctccactggtcgggggaccacattttatcagagcaacacctaccaagccatcctctccacggacgggagcaggtcctatgccctgtttctctaccagagcggtgggatgcagtgggacgtggcccagcgctcagtggagatggctttttcgaaaacagcccactgatgtcccagccagtgtgggagaggtatcgccctgatagattcctgaattccaactcaggcctccaagggctgcagttctacgggctacaccgggaagaaaggcccaactaccgtctcgagtgcctgcagtggctgaagagccagcctcggtggcccagctggggctggaaccaggtctcctgcccttgttcctggcagcagggacgacgggacttacgattccaacccgtcagcataggtcgctggggcctcggcagtaggcagctgtgcagcttcacctcttggcgaggaggcgtgtgctgcagctacgggccctggggagagtttcgtgaaggctggcacgtgcagcgtccttggcagttggcccaggaactggagccacagagctggtgctgccgctggaatgacaagccctacctctgtgccctgtaccagcagaggcggccccacgtgggctgtgctacatacaggcccccacagcccgcctggatgttcggggacccccacatcaccaccttggatggtgtcagttacaccttcaatgggctgggggacttcctgctggtcggggcccaagacgggaactcctccttcctgcttcagggccgcaccgcccagactggctcagcccaggccaccaacttcatcgcctttgcggctcagtaccgctccagcagcctgggccccgtcacggtccaatggctccttgagcctcacgacgcaatccgtgtcctgctggataaccagactgtgacatttcagcctgaccatgaagacggcggaggccaggagacgttcaacgccaccggagtcctcctgagccgcaacggctctgaggtctccgccagcttcgacggctgggccaccgtctcggtgatcgcgctctccaacatcctccactcctccgccagcctcccgcccgagtaccagaaccgcacggaggggctcctgggggtctggaataacaatccagaggacgacttcaggatgcccaatggctccaccattcccccagggagccctgaggagatgcttttccactttggaatgacctggcagatcaacgggacaggcctccttggcaagaggaatgaccagctgccttccaacttcacccctgttttctactcacaactgcaaaaaaacagctcctgggctgaacatttgatctccaactgtgacggagatagctcatgcatctatgacaccctggccctgcgcaacgcaagcatcggacttcacacgagggaagtcagtaaaaactacgagcaggcgaacgccaccctcaatcagtacccgccctccatcaatggtggtcgtgtgattgaagcctacaaggggcagaccacgctgattcagtacaccagcaatgctgaggatgccaacttcacgctcagagacagctgcaccgacttggagctctttgagaatgggacgttgctgtggacacccaagtcgctggagccattcactctggagattctagcaagaagtgccaagattggcttggcatctgcactccagcccaggactgtggtctgccattgcaatgcagagagccagtgtttgtacaatcagaccagcagggtgggcaactcctccctggaggtggctggctgcaagtgtgacgggggcaccttcggccgctactgcgagggctccgaggatgcctgtgaggagccgtgcttcccgagtgtccactgcgttcctgggaagggctgcgaggcctgccctccaaacctgactggggatgggcggcactgtgcggctctggggagctctttcctgtgtcagaaccagtcctgccctgtgaattactgctacaatcaaggccactgctacatctcccagactctgggctgtcagcccatgtgcacctgccccccagccttcactgacagccgctgcttcctggctgggaacaacttcagtccaactgtcaacctagaacttcccttaagagtcatccagctcttgctcagtgaagaggaaaatgcctccatggcagaggtcaacgcctcggtggcatacagactggggaccctggacatgcgggcctttctccgcaacagccaagtggaacgaatcgattctgcagcaccggcctcgggaagccccatccaacactggatggtcatctcggagttccagtaccgccctcggggcccggtcattgacttcctgaacaaccagctgctggccgcggtggtggaggcgttcttataccacgttccacggaggagtgaggagcccaggaacgacgtggtcttccagcccatttccggggaagacgtgcgcgatgtgacagccctgaacgtgagcacgctgaaggcttacttcagatgcgatggctacaagggctacgacctggtctacagcccccagagcggcttcacctgcgtgtccccgtgcagtaggggctactgtgaccatggaggccagtgccagcacctgcccagtgggccccgctgcagctgtgtgtccttctccatctacacggcctggggcgagcactgtgagcacctgagcatgaaactcgacgcgttcttcggcatcttctttggggccctgggcggcctcttgctgctgggggtcgggacgttcgtggtcctgcgcttctggggttgctccggggccaggttctcctatttcctgaactcagctgaggccttgccttgaaggggcagctgtggcctaggctacctcaagactcacctcatccttaccgcacatttaaggcgccattgcttttgggagactggaaaagggaaggtgactgaaggctgtcaggattcttcaaggagaatgaatactgggaatcaagacaagactataccttatccataggcgcaggtgcacagggggaggccataaagatcaaacatgcatggatgggtcctcacgcagacacacccacagaaggacactagcctgtgcacgcgcgcgtgcacacacacacacacacacacgagttcataatgtggtgatggccctaagttaagcaaaatgcttctgcacacaaaactctctggtttacttcaaattaactctatttaaataaagtctctctgactttttgtgtctccaaaaaaaaaa

SEQ ID NO: 264966 - DNA, 7018 bp, Homo sapiens
  misc_feature (1)..(1): n is a, c, g, or t
ntacagccccaaggtcgctccctctgggccctttcttccccattcttcccagcagcccaaagctctggtgggacaggggcagcccctggggagggaggagaggacccaggaacccggctaggagggtggcccacccatttccagtgtgacctgttcccattcccccatgtctcctcccatccctcccgccactcagctcaggctgatgagaagcagagcaacgggtgtatcggtgttttctttcctggtggggtagtggggtggggctgaggagagaaaagggtgattagcgtggggccccgccctcttttgtcctcttcccaggttccctggccccttcggagaaacgcacttggttcgggccagccgcctgaggggacgggctcacgtctgctcctcacactgcagctgctgggccgtggagcttccccgggagccagggggacttttgccgcagccatgaagggggcacgctggaggagggtcccctgggtgtccctgagctgcctgtgtctctgcctccttccgcatgtggtcccaggaaccacagaggacacattaataactggaagtaaaactcctgccccagtcacctcaacaggctcaacaacagcgacactagagggacaatcaactgcagcttcttcaaggacctctaatcaggacatatcagcttcatctcagaaccaccagactaagagcacggagaccaccagcaaagctcaaaccgacaccctcacgcagatgatgacatcaactcttttttcttccccaagtgtacacaatgtgatggagactgttacgcaggagacagctcctccagatgaaatgaccacatcatttccctccagtgtcaccaacacactcatgatgacatcaaagactataacaatgacaacctccacagactccactcttggaaacacagaagagacatcaacagcaggaactgaaagttctaccccagtgacctcagcagtctcaataacagctggacaggaaggacaatcacgaacaacttcctggaggacctctatccaagacacatcagcttcttctcagaaccactggactcggagcacgcagaccaccagggaatctcaaaccagcaccctaacacacagaaccacttcaactccttctttctctccaagtgtacacaatgtgacagggactgtttctcagaagacatctccttcaggtgaaacagctacctcatccctctgtagtgtcacaaacacatccatgatgacatcagagaagataacagtgacaacctccacaggctccactcttggaaacccaggggagacatcatcagtacctgttactggaagtcttatgccagtcacctcagcagccttagtaacagttgatccagaaggacaatcaccagcaactttctcaaggacttctactcaggacacaacagctttttctaagaaccaccagactcagagcgtggagaccaccagagtatctcaaatcaacaccctcaacaccctcacaccggttacaacatcaactgttttatcctcaccaagtggattcaacccaagtggaacagtttctcaggagacattcccttctggtgaaacaaccatctcatccccttccagtgtcagcaatacattcctggtaacatcaaaggtgttcagaatgccaatctccagagactctactcttggaaacacagaggagacatcactatctgtaagtggaaccatttctgcaatcacttccaaagtttcaaccatatggtggtcagacactctgtcaacagcactctcccccagttctctacctccaaaaatatccacagctttccacacccagcagagtgaaggtgcagagaccacaggacggcctcatgagaggagctcattctctccaggtgtgtctcaagaaatatttactctacatgaaacaacaacatggccttcctcattctccagcaaaggccacacaacttggtcacaaacagaactgccctcaacatcaacaggtgctgccactaggcttgtcacaggaaatccatctacaagggcagctggcactattccaagggtcccctctaaggtctcagcaataggggaaccaggagagcccaccacatactcctcccacagcacaactctcccaaaaacaacaggggcaggcgcccagacacaatggacacaagaaacggggaccactggagaggctcttctcagcagcccaagctatagtgtgattcagatgataaaaacggccacatccccatcttcttcacctatgctggatagacacacatcacaacaaattacaacggcaccatcaacaaatcattcaacaatacattccacaagcacctctcctcaggaatcaccagctgtttcccaaaggggtcacactcgagccccgcagaccacacaagaatcacaaaccacgaggtccgtctcccccatgactgacaccaagacagtcaccaccccaggttcttccttcacagccagtgggcactcgccctcagaaattgttcctcaggacgcacccaccataagtgcagcaacaacctttgccccagctcccaccgggaatggtcacacaacccaggccccgaccacagcactgcaggcagcacccagcagccatgatgccaccctggggccctcaggaggcacgtcactttccaaaacaggtgcccttactctggccaactctgtagtgtcaacaccagggggcccagaaggacaatggacatcagcctctgccagcacctcacctgacacagcagcagccatgacccatacccaccaggctgagagcacagaggcctctggacaaacacagaccagcgaaccggcctcctcagggtcacgaaccacctcagcgggcacagctaccccttcctcatccggggcgagtggcacaacaccttcaggaagcgaaggaatatccacctcaggagagacgacaaggttttcatcaaacccctccagggacagtcacacaacccagtcaacaaccgaattgctgtccgcctcagccagtcatggtgccatcccagtaagcacaggaatggcgtcttcgatcgtccccggcacctttcatcccaccctctctgaggcctccactgcagggagaccgacaggacagtcaagcccaacttctcccagtgcctctcctcaggagacagccgccatttcccggatggcccagactcagaggacaggaaccagcagagggtctgacactatcagcctggcgtcccaggcaaccgacaccttctcaacagtcccacccacacctccatcgatcacatccagtgggcttacatctccacaaacccagacccacactctgtcaccttcagggtctggtaaaaccttcaccacggccctcatcagcaacgccacccctcttcctgtcaccagcacctcctcagcctccacaggtcacgccacccctcttgctgtcagcagtgctacctcagcttccacagtatcctcggactcccctctgaagatggaaacatcaggaatgacaacaccgtcactgaagacagacggtgggagacgcacagccacatcaccaccccccacaacctcccagaccatcatttccaccattcccagcactgccatgcacacccgctccacagctgcccccatccccatcctgcctgagagaggagtttccctcttcccctatggggcagacgccggggacctggagttcgtcaggaggaccgtggacttcacctccccactcttcaagccggcgactggcttcccccttggctcctctctccgtgattccctctacttcacagacaatggccagatcatcttcccagagtcagactaccagattttctcctaccccaacccactcccaacaggcttcacaggccgggaccctgtggccctggtggctccgttctgggacgatgctgacttctccactggtcgggggaccacattttatcaggaatacgagacgttctatggtgaacacagcctgctagtccagcaggccgagtcttggattagaaagatcacaaacaacgggggctacaaggccaggtgggccctaaaggtcacgtgggtcaatgcccacgcctatcctgcccagtggaccctcgggagcaacacctaccaagccatcctctccacggacgggagcaggtcctatgccctgtttctctaccagagcggtgggatgcagtgggacgtggcccagcgctcaggcaagccggtgctcatgggcttctctagtggagatggctttttcgaaaacagcccactgatgtcccagccagtgtgggagaggtatcgccctgatagattcctgaattccaactcaggcctccaagggctgcagttctacgggctacaccgggaagaaaggcccaactaccgtctcgagtgcctgcagtggctgaagagccagcctcggtggcccagctggggctggaaccaggtctcctgcccttgttcctggcagcagggacgacgggacttacgattccaacccgtcagcataggtcgctggggcctcggcagtaggcagctgtgcagcttcacctcttggcgaggaggcgtgtgctgcagctacgggccctggggagagtttcgtgaaggctggcacgtgcagcgtccttggcagttggcccaggaactggagccacagagctggtgctgccgctggaatgacaagccctacctctgtgccctgtaccagcagaggcggccccacgtgggctgtgctacatacaggcccccacagcccgcctggatgttcggggacccccacatcaccaccttggatggtgtcagttacaccttcaatgggctgggggacttcctgctggtcggggcccaagacgggaactcctccttcctgcttcagggccgcaccgcccagactggctcagcccaggccaccaacttcatcgcctttgcggctcagtaccgctccagcagcctgggccccgtcacggtccaatggctccttgagcctcacgacgcaatccgtgtcctgctggataaccagactgtgacatttcagcctgaccatgaagacggcggaggccaggagacgttcaacgccaccggagtcctcctgagccgcaacggctctgaggtctccgccagcttcgacggctgggccaccgtctcggtgatcgcgctctccaacatcctccactcctccgccagcctcccgcccgagtaccagaaccgcacggaggggctcctgggggtctggaataacaatccagaggacgacttcaggatgcccaatggctccaccattcccccagggagccctgaggagatgcttttccactttggaatgacctggcagatcaacgggacaggcctccttggcaagaggaatgaccagctgccttccaacttcacccctgttttctactcacaactgcaaaaaaacagctcctgggctgaacatttgatctccaactgtgacggagatagctcatgcatctatgacaccctggccctgcgcaacgcaagcatcggacttcacacgagggaagtcagtaaaaactacgagcaggcgaacgccaccctcaatcagtacccgccctccatcaatggtggtcgtgtgattgaagcctacaaggggcagaccacgctgattcagtacaccagcaatgctgaggatgccaacttcacgctcagagacagctgcaccgacttggagctctttgaaccagtcctgccctgtgaattactgctacaatcaaggccactgctacatctcccagactctgggctgtcagcccatgtgcacctgccccccagccttcactgacagccgctgcttcctggctgggaacaacttcagtccaactgtcaacctagaacttcccttaagagtcatccagctcttgctcagtgaagaggaaaatgcctccatggcagaggtcaacgcctcggtggcatacagactggggaccctggacatgcgggcctttctccgcaacagccaagtggaacgaatcgattctgcagcaccggcctcgggaagccccatccaacactggatggtcatctcggagttccagtaccgccctcggggcccggtcattgacttcctgaacaaccagctgctggccgcggtggtggaggcgttcttataccacgttccacggaggagtgaggagcccaggaacgacgtggtcttccagcccatttccggggaagacgtgcgcgatgtgacagccctgaacgtgagcacgctgaaggcttacttcagatgcgatggctacaagggctacgacctggtctacagcccccagagcggcttcacctgcgtgtccccgtgcagtaggggctactgtgaccatggaggccagtgccagcacctgcccagtgggccccgctgcagctgtgtgtccttctccatctacacggcctggggcgagcactgtgagcacctgagcatgaaactcgacgcgttcttcggcatcttctttggggccctgggcggcctcttgctgctgggggtcgggacgttcgtggtcctgcgcttctggggttgctccggggccaggttctcctatttcctgaactcagctgaggccttgccttgaaggggcagctgtggcctaggctacctcaagactcacctcatccttaccgcacatttaaggcgccattgcttttgggagactggaaaagggaaggtgactgaaggctgtcaggattcttcaaggagaatgaatactgggaatcaagacaagactataccttatccataggcgcaggtgcacagggggaggccataaagatcaaacatgcatggatgggtcctcacgcagacacacccacagaaggacactagcctgtgcacgcgcgcgtgcacacacacacacacacacacgagttcataatgtggtgatggccctaagttaagcaaaatgcttctgcacacaaaactctctggtttacttcaaattaactctatttaaataaagtctctctgactttttgtgtctccaaaaaaaaaa

SEQ ID NO: 264967 - DNA, 7261 bp, Homo sapiens
  misc_feature (1)..(1): n is a, c, g, or t
ntacagccccaaggtcgctccctctgggccctttcttccccattcttcccagcagcccaaagctctggtgggacaggggcagcccctggggagggaggagaggacccaggaacccggctaggagggtggcccacccatttccagtgtgacctgttcccattcccccatgtctcctcccatccctcccgccactcagctcaggctgatgagaagcagagcaacgggtgtatcggtgttttctttcctggtggggtagtggggtggggctgaggagagaaaagggtgattagcgtggggccccgccctcttttgtcctcttcccaggttccctggccccttcggagaaacgcacttggttcgggccagccgcctgaggggacgggctcacgtctgctcctcacactgcagctgctgggccgtggagcttccccgggagccagggggacttttgccgcagccatgaagggggcacgctggaggagggtcccctgggtgtccctgagctgcctgtgtctctgcctccttccgcatgtggtcccaggaaccacagaggacacattaataactggaagtaaaactcctgccccagtcacctcaacaggctcaacaacagcgacactagagggacaatcaactgcagcttcttcaaggacctctaatcaggacatatcagcttcatctcagaaccaccagactaagagcacggagaccaccagcaaagctcaaaccgacaccctcacgcagatgatgacatcaactcttttttcttccccaagtgtacacaatgtgatggagactgttacgcaggagacagctcctccagatgaaatgaccacatcatttccctccagtgtcaccaacacactcatgatgacatcaaagactataacaatgacaacctccacagactccactcttggaaacacagaagagacatcaacagcaggaactgaaagttctaccccagtgacctcagcagtctcaataacagctggacaggaaggacaatcacgaacaacttcctggaggacctctatccaagacacatcagcttcttctcagaaccactggactcggagcacgcagaccaccagggaatctcaaaccagcaccctaacacacagaaccacttcaactccttctttctctccaagtgtacacaatgtgacagggactgtttctcagaagacatctccttcaggtgaaacagctacctcatccctctgtagtgtcacaaacacatccatgatgacatcagagaagataacagtgacaacctccacaggctccactcttggaaacccaggggagacatcatcagtacctgttactggaagtcttatgccagtcacctcagcagccttagtaacagttgatccagaaggacaatcaccagcaactttctcaaggacttctactcaggacacaacagctttttctaagaaccaccagactcagagcgtggagaccaccagagtatctcaaatcaacaccctcaacaccctcacaccggttacaacatcaactgttttatcctcaccaagtggattcaacccaagtggaacagtttctcaggagacattcccttctggtgaaacaaccatctcatccccttccagtgtcagcaatacattcctggtaacatcaaaggtgttcagaatgccaatctccagagactctactcttggaaacacagaggagacatcactatctgtaagtggaaccatttctgcaatcacttccaaagtttcaaccatatggtggtcagacactctgtcaacagcactctcccccagttctctacctccaaaaatatccacagctttccacacccagcagagtgaaggtgcagagaccacaggacggcctcatgagaggagctcattctctccaggtgtgtctcaagaaatatttactctacatgaaacaacaacatggccttcctcattctccagcaaaggccacacaacttggtcacaaacagaactgccctcaacatcaacaggtgctgccactaggcttgtcacaggaaatccatctacaagggcagctggcactattccaagggtcccctctaaggtctcagcaataggggaaccaggagagcccaccacatactcctcccacagcacaactctcccaaaaacaacaggggcaggcgcccagacacaatggacacaagaaacggggaccactggagaggctcttctcagcagcccaagctatagtgtgattcagatgataaaaacggccacatccccatcttcttcacctatgctggatagacacacatcacaacaaattacaacggcaccatcaacaaatcattcaacaatacattccacaagcacctctcctcaggaatcaccagctgtttcccaaaggggtcacactcgagccccgcagaccacacaagaatcacaaaccacgaggtccgtctcccccatgactgacaccaagacagtcaccaccccaggttcttccttcacagccagtgggcactcgccctcagaaattgttcctcaggacgcacccaccataagtgcagcaacaacctttgccccagctcccaccgggaatggtcacacaacccaggccccgaccacagcactgcaggcagcacccagcagccatgatgccaccctggggccctcaggaggcacgtcactttccaaaacaggtgcccttactctggccaactctgtagtgtcaacaccagggggcccagaaggacaatggacatcagcctctgccagcacctcacctgacacagcagcagccatgacccatacccaccaggctgagagcacagaggcctctggacaaacacagaccagcgaaccggcctcctcagggtcacgaaccacctcagcgggcacagctaccccttcctcatccggggcgagtggcacaacaccttcaggaagcgaaggaatatccacctcaggagagacgacaaggttttcatcaaacccctccagggacagtcacacaacccagtcaacaaccgaattgctgtccgcctcagccagtcatggtgccatcccagtaagcacaggaatggcgtcttcgatcgtccccggcacctttcatcccaccctctctgaggcctccactgcagggagaccgacaggacagtcaagcccaacttctcccagtgcctctcctcaggagacagccgccatttcccggatggcccagactcagaggacaggaaccagcagagggtctgacactatcagcctggcgtcccaggcaaccgacaccttctcaacagtcccacccacacctccatcgatcacatccagtgggcttacatctccacaaacccagacccacactctgtcaccttcagggtctggtaaaaccttcaccacggccctcatcagcaacgccacccctcttcctgtcaccagcacctcctcagcctccacaggtcacgccacccctcttgctgtcagcagtgctacctcagcttccacagtatcctcggactcccctctgaagatggaaacatcaggaatgacaacaccgtcactgaagacagacggtgggagacgcacagccacatcaccaccccccacaacctcccagaccatcatttccaccattcccagcactgccatgcacacccgctccacagctgcccccatccccatcctgcctgagagaggagtttccctcttcccctatggggcagacgccggggacctggagttcgtcaggaggaccgtggacttcacctccccactcttcaagccggcgactggcttcccccttggctcctctctccgtgattccctctacgcttcacaggccgggaccctgtggccctggtggctccgttctgggacgatgctgacttctccactggtcgggggaccacattttatcaggaatacgagacgttctatggtgaacacagcctgctagtccagcaggccgagtcttggattagaaagatcacaaacaacgggggctacaaggccaggtgggccctaaaggtcacgtgggtcaatgcccacgcctatcctgcccagtggaccctcgggagcaacacctaccaagccatcctctccacggacgggagcaggtcctatgccctgtttctctaccagagcggtgggatgcagtgggacgtggcccagcgctcaggcaagccggtgctcatgggcttctctagtggagatggctttttcgaaaacagcccactgatgtcccagccagtgtgggagaggtatcgccctgatagattcctgaattccaactcaggcctccaagggctgcagttctacgggctacaccgggaagaaaggcccaactaccgtctcgagtgcctgcagtggctgaagagccagcctcggtggcccagctggggctggaaccaggtctcctgcccttgttcctggcagcagggacgacgggacttacgattccaacccgtcagcataggtcgctggggcctcggcagtaggcagctgtgcagcttcacctcttggcgaggaggcgtgtgctgcagctacgggccctggggagagtttcgtgaaggctggcacgtgcagcgtccttggcagttggcccaggaactggagccacagagctggtgctgccgctggaatgacaagccctacctctgtgccctgtaccagcagaggcggccccacgtgggctgtgctacatacaggcccccacagcccgcctggatgttcggggacccccacatcaccaccttggatggtgtcagttacaccttcaatgggctgggggacttcctgctggtcggggcccaagacgggaactcctccttcctgcttcagggccgcaccgcccagactggctcagcccaggccaccaacttcatcgcctttgcggctcagtaccgctccagcagcctgggccccgtcacggtccaatggctccttgagcctcacgacgcaatccgtgtcctgctggataaccagactgtgacatttcagcctgaccatgaagacggcggaggccaggagacgttcaacgccaccggagtcctcctgagccgcaacggctctgaggtctccgccagcttcgacggctgggccaccgtctcggtgatcgcgctctccaacatcctccactcctccgccagcctcccgcccgagtaccagaaccgcacggaggggctcctgggggtctggaataacaatccagaggacgacttcaggatgcccaatggctccaccattcccccagggagccctgaggagatgcttttccactttggaatgacctggcagatcaacgggacaggcctccttggcaagaggaatgaccagctgccttccaacttcacccctgttttctactcacaactgcaaaaaaacagctcctgggctgaacatttgatctccaactgtgacggagatagctcatgcatctatgacaccctggccctgcgcaacgcaagcatcggacttcacacgagggaagtcagtaaaaactacgagcaggcgaacgccaccctcaatcagtacccgccctccatcaatggtggtcgtgtgattgaagcctacaaggggcagaccacgctgattcagtacaccagcaatgctgaggatgccaacttcacgctcagagacagctgcaccgacttggagctctttgagaatgggacgttgctgtggacacccaagtcgctggagccattcactctggagattctagcaagaagtgccaagattggcttggcatctgcactccagcccaggactgtggtctgccattgcaatgcagagagccagtgtttgtacaatcagaccagcagggtgggcaactcctccctggaggtggctggctgcaagtgtgacgggggcaccttcggccgctactgcgagggctccgaggatgcctgtgaggagccgtgcttcccgagtgtccactgcgttcctgggaagggctgcgaggcctgccctccaaacctgactggggatgggcggcactgtgcggctctggggagctctttcctgtgtcagaaccagtcctgccctgtgaattactgctacaatcaaggccactgctacatctcccagactctgggctgtcagcccatgtgcacctgccccccagccttcactgacagccgctgcttcctggctgggaacaacttcagtccaactgtcaacctagaacttcccttaagagtcatccagctcttgctcagtgaagaggaaaatgcctccatggcagaggtcaacgcctcggtggcatacagactggggaccctggacatgcgggcctttctccgcaacagccaagtggaacgaatcgattctgcagcaccggcctcgggaagccccatccaacactggatggtcatctcggagttccagtaccgccctcggggcccggtcattgacttcctgaacaaccagctgctggccgcggtggtggaggcgttcttataccacgttccacggaggagtgaggagcccaggaacgacgtggtcttccagcccatttccggggaagacgtgcgcgatgtgacagccctgaacgtgagcacgctgaaggcttacttcagatgcgatggctacaagggctacgacctggttactgtgaccatggaggccagtgccagcacctgcccagtgggccccgctgcagctgtgtgtccttctccatctacacggcctggggcgagcactgtgagcacctgagcatgaaactcgacgcgttcttcggcatcttctttggggccctgggcggcctcttgctgctgggggtcgggacgttcgtggtcctgcgcttctggggttgctccggggccaggttctcctatttcctgaactcagctgaggccttgccttgaaggggcagctgtggcctaggctacctcaagactcacctcatccttaccgcacatttaaggcgccattgcttttgggagactggaaaagggaaggtgactgaaggctgtcaggattcttcaaggagaatgaatactgggaatcaagacaagactataccttatccataggcgcaggtgcacagggggaggccataaagatcaaacatgcatggatgggtcctcacgcagacacacccacagaaggacactagcctgtgcacgcgcgcgtgcacacacacacacacacacacgagttcataatgtggtgatggccctaagttaagcaaaatgcttctgcacacaaaactctctggtttacttcaaattaactctatttaaataaagtctctctgactttttgtgtctccaaaaaaaaaa

SEQ ID NO: 264968 - DNA, 6910 bp, Homo sapiens
  misc_feature (1)..(1): n is a, c, g, or t
  misc_feature (3415)..(3416): n is a, c, g, or t
  misc_feature (3418)..(3418): n is a, c, g, or t
  misc_feature (3426)..(3426): n is a, c, g, or t
  misc_feature (3442)..(3442): n is a, c, g, or t
  misc_feature (3455)..(3455): n is a, c, g, or t
  misc_feature (3465)..(3465): n is a, c, g, or t
  misc_feature (3477)..(3477): n is a, c, g, or t
  misc_feature (3495)..(3495): n is a, c, g, or t
  misc_feature (3511)..(3512): n is a, c, g, or t
  misc_feature (3514)..(3514): n is a, c, g, or t
  misc_feature (3524)..(3524): n is a, c, g, or t
  misc_feature (3535)..(3535): n is a, c, g, or t
  misc_feature (3562)..(3562): n is a, c, g, or t
  misc_feature (3572)..(3572): n is a, c, g, or t
  misc_feature (3582)..(3582): n is a, c, g, or t
  misc_feature (3585)..(3585): n is a, c, g, or t
ntacagccccaaggtcgctccctctgggccctttcttccccattcttcccagcagcccaaagctctggtgggacaggggcagcccctggggagggaggagaggacccaggaacccggctaggagggtggcccacccatttccagtgtgacctgttcccattcccccatgtctcctcccatccctcccgccactcagctcaggctgatgagaagcagagcaacgggtgtatcggtgttttctttcctggtggggtagtggggtggggctgaggagagaaaagggtgattagcgtggggccccgccctcttttgtcctcttcccaggttccctggccccttcggagaaacgcacttggttcgggccagccgcctgaggggacgggctcacgtctgctcctcacactgcagctgctgggccgtggagcttccccgggagccagggggacttttgccgcagccatgaagggggcacgctggaggagggtcccctgggtgtccctgagctgcctgtgtctctgcctccttccgcatgtggtcccaggaaccacagaggacacattaataactggaagtaaaactcctgccccagtcacctcaacaggctcaacaacagcgacactagagggacaatcaactgcagcttcttcaaggacctctaatcaggacatatcagcttcatctcagaaccaccagactaagagcacggagaccaccagcaaagctcaaaccgacaccctcacgcagatgatgacatcaactcttttttcttccccaagtgtacacaatgtgatggagactgttacgcaggagacagctcctccagatgaaatgaccacatcatttccctccagtgtcaccaacacactcatgatgacatcaaagactataacaatgacaacctccacagactccactcttggaaacacagaagagacatcaacagcaggaactgaaagttctaccccagtgacctcagcagtctcaataacagctggacaggaaggacaatcacgaacaacttcctggaggacctctatccaagacacatcagcttcttctcagaaccactggactcggagcacgcagaccaccagggaatctcaaaccagcaccctaacacacagaaccacttcaactccttctttctctccaagtgtacacaatgtgacagggactgtttctcagaagacatctccttcaggtgaaacagctacctcatccctctgtagtgtcacaaacacatccatgatgacatcagagaagataacagtgacaacctccacaggctccactcttggaaacccaggggagacatcatcagtacctgttactggaagtcttatgccagtcacctcagcagccttagtaacagttgatccagaaggacaatcaccagcaactttctcaaggacttctactcaggacacaacagctttttctaagaaccaccagactcagagcgtggagaccaccagagtatctcaaatcaacaccctcaacaccctcacaccggttacaacatcaactgttttatcctcaccaagtggattcaacccaagtggaacagtttctcaggagacattcccttctggtgaaacaaccatctcatccccttccagtgtcagcaatacattcctggtaacatcaaaggtgttcagaatgccaatctccagagactctactcttggaaacacagaggagacatcactatctgtaagtggaaccatttctgcaatcacttccaaagtttcaaccatatggtggtcagacactctgtcaacagcactctcccccagttctctacctccaaaaatatccacagctttccacacccagcagagtgaaggtgcagagaccacaggacggcctcatgagaggagctcattctctccaggtgtgtctcaagaaatatttactctacatgaaacaacaacatggccttcctcattctccagcaaaggccacacaacttggtcacaaacagaactgccctcaacatcaacaggtgctgccactaggcttgtcacaggaaatccatctacaagggcagctggcactattccaagggtcccctctaaggtctcagcaataggggaaccaggagagcccaccacatactcctcccacagcacaactctcccaaaaacaacaggggcaggcgcccagacacaatggacacaagaaacggggaccactggagaggctcttctcagcagcccaagctatagtgtgattcagatgataaaaacggccacatccccatcttcttcacctatgctggatagacacacatcacaacaaattacaacggcaccatcaacaaatcattcaacaatacattccacaagcacctctcctcaggaatcaccagctgtttcccaaaggggtcacactcgagccccgcagaccacacaagaatcacaaaccacgaggtccgtctcccccatgactgacaccaagacagtcaccaccccaggttcttccttcacagccagtgggcactcgccctcagaaattgttcctcaggacgcacccaccataagtgcagcaacaacctttgccccagctcccaccgggaatggtcacacaacccaggccccgaccacagcactgcaggcagcacccagcagccatgatgccaccctggggccctcaggaggcacgtcactttccaaaacaggtgcccttactctggccaactctgtagtgtcaacaccagggggcccagaaggacaatggacatcagcctctgccagcacctcacctgacacagcagcagccatgacccatacccaccaggctgagagcacagaggcctctggacaaacacagaccagcgaaccggcctcctcagggtcacgaaccacctcagcgggcacagctaccccttcctcatccggggcgagtggcacaacaccttcaggaagcgaaggaatatccacctcaggagagacgacaaggttttcatcaaacccctccagggacagtcacacaacccagtcaacaaccgaattgctgtccgcctcagccagtcatggtgccatcccagtaagcacaggaatggcgtcttcgatcgtccccggcacctttcatcccaccctctctgaggcctccactgcagggagaccgacaggacagtcaagcccaacttctcccagtgcctctcctcaggagacagccgccatttcccggatggcccagactcagaggacaggaaccagcagagggtctgacactatcagcctggcgtcccaggcaaccgacaccttctcaacagtcccacccacacctccatcgatcacatccagtgggcttacatctccacaaacccagacccacactctgtcaccttcagggtctggtaaaaccttcaccacggccctcatcagcaacgccacccctcttcctgtcaccnncncttcctcngcatccacaggtcacnccacccctcttcntgtcaccgangcttcctcagtntccacaggtcacgccacncctcttcctgtcaccnncncttcctcagnatccacaggtnacaccacccctcttcctgtcaccgacncttcctcagnatccacaggncangccacccctcttcctgtcaccagcacctcctcagcctccacaggtcacgccacccctcttgctgtcagcagtgctacctcagcttccacagtatcctcggactcccctctgaagatggaaacatcaggaatgacaacaccgtcactgaagacagacggtgggagacgcacagccacatcaccaccccccacaacctcccagaccatcatttccaccattcccagcactgccatgcacacccgctccacagctgcccccatccccatcctgcctgagagaggagtttccctcttcccctatggggcagacgccggggacctggagttcgtcaggaggaccgtggacttcacctccccactcttcaagccggcgactggcttcccccttggctcctctctccgtgattccctctacttcacagacaatggccagatcatcttcccagagtcagactaccagattttctcctaccccaacccactcccaacaggcttcacaggccgggaccctgtggccctggtggctccgttctgggacgatgctgacttctccactggtcgggggaccacattttatcaggaatacgagacgttctatggtgaacacagcctgctagtccagcaggccgagtcttggattagaaagatcacaaacaacgggggctacaaggccaggtgggccctaaaggtcacgtgggtcaatgcccacgcctatcctgcccagtggaccctcgggagcaacacctaccaagccatcctctccacggacgggagcaggtcctatgccctgtttctctaccagagcggtgggatgcagtgggacgtggcccagcgctcaggcaagccggtgctcatgggcttctctagtggagatggctttttcgaaaacagcccactgatgtcccagccagtgtgggagaggtatcgccctgatagattcctgaattccaactcaggcctccaagggctgcagttctacgggctacaccgggaagaaaggcccaactaccgtctcgagtgcctgcagtggctgaagagccagcctcggtggcccagctggggctggaaccaggtctcctgcccttgttcctggcagcagggacgacgggacttacgattccaacccgtcagcataggccagcctcccgcccgagtaccagaaccgcacggaggggctcctgggggtctggaataacaatccagaggacgacttcaggatgcccaatggctccaccattcccccagggagccctgaggagatgcttttccactttggaatgacctggcagatcaacgggacaggcctccttggcaagaggaatgaccagctgccttccaacttcacccctgttttctactcacaactgcaaaaaaacagctcctgggctgaacatttgatctccaactgtgacggagatagctcatgcatctatgacaccctggccctgcgcaacgcaagcatcggacttcacacgagggaagtcagtaaaaactacgagcaggcgaacgccaccctcaatcagtacccgccctccatcaatggtggtcgtgtgattgaagcctacaaggggcagaccacgctgattcagtacaccagcaatgctgaggatgccaacttcacgctcagagacagctgcaccgacttggagctctttgagaatgggacgttgctgtggacacccaagtcgctggagccattcactctggagattctagcaagaagtgccaagattggcttggcatctgcactccagcccaggactgtggtctgccattgcaatgcagagagccagtgtttgtacaatcagaccagcagggtgggcaactcctccctggaggtggctggctgcaagtgtgacgggggcaccttcggccgctactgcgagggctccgaggatgcctgtgaggagccgtgcttcccgagtgtccactgcgttcctgggaagggctgcgaggcctgccctccaaacctgactggggatgggcggcactgtgcggctctggggagctctttcctgtgtcagaaccagtcctgccctgtgaattactgctacaatcaaggccactgctacatctcccagactctgggctgtcagcccatgtgcacctgccccccagccttcactgacagccgctgcttcctggctgggaacaacttcagtccaactgtcaacctagaacttcccttaagagtcatccagctcttgctcagtgaagaggaaaatgcctccatggcagaggtcaacgcctcggtggcatacagactggggaccctggacatgcgggcctttctccgcaacagccaagtggaacgaatcgattctgcagcaccggcctcgggaagccccatccaacactggatggtcatctcggagttccagtaccgccctcggggcccggtcattgacttcctgaacaaccagctgctggccgcggtggtggaggcgttcttataccacgttccacggaggagtgaggagcccaggaacgacgtggtcttccagcccatttccggggaagacgtgcgcgatgtgacagccctgaacgtgagcacgctgaaggcttacttcagatgcgatggctacaagggctacgacctggtctacagcccccagagcggcttcacctgcgtgtccccgtgcagtaggggctactgtgaccatggaggccagtgccagcacctgcccagtgggccccgctgcagctgtgtgtccttctccatctacacggcctggggcgagcactgtgagcacctgagcatgaaactcgacgcgttcttcggcatcttctttggggccctgggcggcctcttgctgctgggggtcgggacgttcgtggtcctgcgcttctggggttgctccggggccaggttctcctatttcctgaactcagctgaggccttgccttgaaggggcagctgtggcctaggctacctcaagactcacctcatccttaccgcacatttaaggcgccattgcttttgggagactggaaaagggaaggtgactgaaggctgtcaggattcttcaaggagaatgaatactgggaatcaagacaagactataccttatccataggcgcaggtgcacagggggaggccataaagatcaaacatgcatggatgggtcctcacgcagacacacccacagaaggacactagcctgtgcacgcgcgcgtgcacacacacacacacacacacgagttcataatgtggtgatggccctaagttaagcaaaatgcttctgcacacaaaactctctggtttacttcaaattaactctatttaaataaagtctctctgactttttgtgtctccaaaaaaaaaa

SEQ ID NO: 264969 - DNA, 7439 bp, Homo sapiens
  misc_feature (1)..(1): n is a, c, g, or t
  misc_feature (3415)..(3416): n is a, c, g, or t
  misc_feature (3418)..(3418): n is a, c, g, or t
  misc_feature (3426)..(3426): n is a, c, g, or t
  misc_feature (3442)..(3442): n is a, c, g, or t
  misc_feature (3455)..(3455): n is a, c, g, or t
  misc_feature (3465)..(3465): n is a, c, g, or t
  misc_feature (3477)..(3477): n is a, c, g, or t
  misc_feature (3495)..(3495): n is a, c, g, or t
  misc_feature (3511)..(3512): n is a, c, g, or t
  misc_feature (3514)..(3514): n is a, c, g, or t
  misc_feature (3524)..(3524): n is a, c, g, or t
  misc_feature (3535)..(3535): n is a, c, g, or t
  misc_feature (3562)..(3562): n is a, c, g, or t
  misc_feature (3572)..(3572): n is a, c, g, or t
  misc_feature (3582)..(3582): n is a, c, g, or t
  misc_feature (3585)..(3585): n is a, c, g, or t
  misc_feature (4179)..(4179): n is a, c, g, or t
  misc_feature (4333)..(4333): n is a, c, g, or t
ntacagccccaaggtcgctccctctgggccctttcttccccattcttcccagcagcccaaagctctggtgggacaggggcagcccctggggagggaggagaggacccaggaacccggctaggagggtggcccacccatttccagtgtgacctgttcccattcccccatgtctcctcccatccctcccgccactcagctcaggctgatgagaagcagagcaacgggtgtatcggtgttttctttcctggtggggtagtggggtggggctgaggagagaaaagggtgattagcgtggggccccgccctcttttgtcctcttcccaggttccctggccccttcggagaaacgcacttggttcgggccagccgcctgaggggacgggctcacgtctgctcctcacactgcagctgctgggccgtggagcttccccgggagccagggggacttttgccgcagccatgaagggggcacgctggaggagggtcccctgggtgtccctgagctgcctgtgtctctgcctccttccgcatgtggtcccaggaaccacagaggacacattaataactggaagtaaaactcctgccccagtcacctcaacaggctcaacaacagcgacactagagggacaatcaactgcagcttcttcaaggacctctaatcaggacatatcagcttcatctcagaaccaccagactaagagcacggagaccaccagcaaagctcaaaccgacaccctcacgcagatgatgacatcaactcttttttcttccccaagtgtacacaatgtgatggagactgttacgcaggagacagctcctccagatgaaatgaccacatcatttccctccagtgtcaccaacacactcatgatgacatcaaagactataacaatgacaacctccacagactccactcttggaaacacagaagagacatcaacagcaggaactgaaagttctaccccagtgacctcagcagtctcaataacagctggacaggaaggacaatcacgaacaacttcctggaggacctctatccaagacacatcagcttcttctcagaaccactggactcggagcacgcagaccaccagggaatctcaaaccagcaccctaacacacagaaccacttcaactccttctttctctccaagtgtacacaatgtgacagggactgtttctcagaagacatctccttcaggtgaaacagctacctcatccctctgtagtgtcacaaacacatccatgatgacatcagagaagataacagtgacaacctccacaggctccactcttggaaacccaggggagacatcatcagtacctgttactggaagtcttatgccagtcacctcagcagccttagtaacagttgatccagaaggacaatcaccagcaactttctcaaggacttctactcaggacacaacagctttttctaagaaccaccagactcagagcgtggagaccaccagagtatctcaaatcaacaccctcaacaccctcacaccggttacaacatcaactgttttatcctcaccaagtggattcaacccaagtggaacagtttctcaggagacattcccttctggtgaaacaaccatctcatccccttccagtgtcagcaatacattcctggtaacatcaaaggtgttcagaatgccaatctccagagactctactcttggaaacacagaggagacatcactatctgtaagtggaaccatttctgcaatcacttccaaagtttcaaccatatggtggtcagacactctgtcaacagcactctcccccagttctctacctccaaaaatatccacagctttccacacccagcagagtgaaggtgcagagaccacaggacggcctcatgagaggagctcattctctccaggtgtgtctcaagaaatatttactctacatgaaacaacaacatggccttcctcattctccagcaaaggccacacaacttggtcacaaacagaactgccctcaacatcaacaggtgctgccactaggcttgtcacaggaaatccatctacaagggcagctggcactattccaagggtcccctctaaggtctcagcaataggggaaccaggagagcccaccacatactcctcccacagcacaactctcccaaaaacaacaggggcaggcgcccagacacaatggacacaagaaacggggaccactggagaggctcttctcagcagcccaagctatagtgtgattcagatgataaaaacggccacatccccatcttcttcacctatgctggatagacacacatcacaacaaattacaacggcaccatcaacaaatcattcaacaatacattccacaagcacctctcctcaggaatcaccagctgtttcccaaaggggtcacactcgagccccgcagaccacacaagaatcacaaaccacgaggtccgtctcccccatgactgacaccaagacagtcaccaccccaggttcttccttcacagccagtgggcactcgccctcagaaattgttcctcaggacgcacccaccataagtgcagcaacaacctttgccccagctcccaccgggaatggtcacacaacccaggccccgaccacagcactgcaggcagcacccagcagccatgatgccaccctggggccctcaggaggcacgtcactttccaaaacaggtgcccttactctggccaactctgtagtgtcaacaccagggggcccagaaggacaatggacatcagcctctgccagcacctcacctgacacagcagcagccatgacccatacccaccaggctgagagcacagaggcctctggacaaacacagaccagcgaaccggcctcctcagggtcacgaaccacctcagcgggcacagctaccccttcctcatccggggcgagtggcacaacaccttcaggaagcgaaggaatatccacctcaggagagacgacaaggttttcatcaaacccctccagggacagtcacacaacccagtcaacaaccgaattgctgtccgcctcagccagtcatggtgccatcccagtaagcacaggaatggcgtcttcgatcgtccccggcacctttcatcccaccctctctgaggcctccactgcagggagaccgacaggacagtcaagcccaacttctcccagtgcctctcctcaggagacagccgccatttcccggatggcccagactcagaggacaggaaccagcagagggtctgacactatcagcctggcgtcccaggcaaccgacaccttctcaacagtcccacccacacctccatcgatcacatccagtgggcttacatctccacaaacccagacccacactctgtcaccttcagggtctggtaaaaccttcaccacggccctcatcagcaacgccacccctcttcctgtcaccnncncttcctcngcatccacaggtcacnccacccctcttcntgtcaccgangcttcctcagtntccacaggtcacgccacncctcttcctgtcaccnncncttcctcagnatccacaggtnacaccacccctcttcctgtcaccgacncttcctcagnatccacaggncangccacccctcttcctgtcaccagcacctcctcagcctccacaggtcacgccacccctcttgctgtcagcagtgctacctcagcttccacagtatcctcggactcccctctgaagatggaaacatcaggaatgacaacaccgtcactgaagacagacggtgggagacgcacagccacatcaccaccccccacaacctcccagaccatcatttccaccattcccagcactgccatgcacacccgctccacagctgcccccatccccatcctgcctgagagaggagtttccctcttcccctatggggcagacgccggggacctggagttcgtcaggaggaccgtggacttcacctccccactcttcaagccggcgactggcttcccccttggctcctctctccgtgattccctctacttcacagacaatggccagatcatcttcccagagtcagactaccagattttctcctaccccaacccactcccaacaggcttcacaggccgggaccctgtggccctggtggctccgttctgggacgatgctgacttctccactggtcgggggaccacattttatcaggctgtagggggtctntcctaacaagagtgagtcaagagggcccgtcctgtgctcctggactgggtgaataactccaatcagaggaaatgtgatgaaagctactgcaggaagtgtggaccgtgcccctgccacggacagggcagtgtggaggctccaagaggaagagacncacgcctgttctcaagaagctgcagattaggcatggggaggaatacgagacgttctatggtgaacacagcctgctagtccagcaggccgagtcttggattagaaagatcacaaacaacgggggctacaaggccaggtgggccctaaaggtcacgtgggtcaatgcccacgcctatcctgcccagtggaccctcgggagcaacacctaccaagccatcctctccacggacgggagcaggtcctatgccctgtttctctaccagagcggtgggatgcagtgggacgtggcccagcgctcaggcaagccggtgctcatgggcttctctagtggagatggctttttcgaaaacagcccactgatgtcccagccagtgtgggagaggtatcgccctgatagattcctgaattccaactcaggcctccaagggctgcagttctacgggctacaccgggaagaaaggcccaactaccgtctcgagtgcctgcagtggctgaagagccagcctcggtggcccagctggggctggaaccaggtctcctgcccttgttcctggcagcagggacgacgggacttacgattccaacccgtcagcataggtcgctggggcctcggcagtaggcagctgtgcagcttcacctcttggcgaggaggcgtgtgctgcagctacgggccctggggagagtttcgtgaaggctggcacgtgcagcgtccttggcagttggcccaggaactggagccacagagctggtgctgccgctggaatgacaagccctacctctgtgccctgtaccagcagaggcggccccacgtgggctgtgctacatacaggcccccacagcccgcctggatgttcggggacccccacatcaccaccttggatggtgtcagttacaccttcaatgggctgggggacttcctgctggtcggggcccaagacgggaactcctccttcctgcttcagggccgcaccgcccagactggctcagcccaggccaccaacttcatcgcctttgcggctcagtaccgctccagcagcctgggccccgtcacggtccaatggctccttgagcctcacgacgcaatccgtgtcctgctggataaccagactgtgacatttcagcctgaccatgaagacggcggaggccaggagacgttcaacgccaccggagtcctcctgagccgcaacggctctgaggtctccgccagcttcgacggctgggccaccgtctcggtgatcgcgctctccaacatcctccactcctccgccagcctcccgcccgagtaccagaaccgcacggaggggctcctgggggtctggaataacaatccagaggacgacttcaggatgcccaatggctccaccattcccccagggagccctgaggagatgcttttccactttggaatgacctggcagatcaacgggacaggcctccttggcaagaggaatgaccagctgccttccaacttcacccctgttttctactcacaactgcaaaaaaacagctcctgggctgaacatttgatctccaactgtgacggagatagctcatgcatctatgacaccctggccctgcgcaacgcaagcatcggacttcacacgagggaagtcagtaaaaactacgagcaggcgaacgccaccctcaatcagtacccgccctccatcaatggtggtcgtgtgattgaagcctacaaggggcagaccacgctgattcagtacaccagcaatgctgaggatgccaacttcacgctcagagacagctgcaccgacttggagctctttgagaatgggacgttgctgtggacacccaagtcgctggagccattcactctggagattctagcaagaagtgccaagattggcttggcatctgcactccagcccaggactgtggtctgccattgcaatgcagagagccagtgtttgtacaatcagaccagcagggtgggcaactcctccctggaggtggctggctgcaagtgtgacgggggcaccttcggccgctactgcgagggctccgaggatgcctgtgaggagccgtgcttcccgagtgtccactgcgttcctgggaagggctgcgaggcctgccctccaaacctgactggggatgggcggcactgtgcggctctggggagctctttcctgtgtcagaaccagtcctgccctgtgaattactgctacaatcaaggccactgctacatctcccagactctgggctgtcagcccatgtgcacctgccccccagccttcactgacagccgctgcttcctggctgggaacaacttcagtccaactgtcaacctagaacttcccttaagagtcatccagctcttgctcagtgaagaggaaaatgcctccatggcagaggtcaacgcctcggtggcatacagactggggaccctggacatgcgggcctttctccgcaacagccaagtggaacgaatcgattctgcagcaccggcctcgggaagccccatccaacactggatggtcatctcggagttccagtaccgccctcggggcccggtcattgacttcctgaacaaccagctgctggccgcggtggtggaggcgttcttataccacgttccacggaggagtgaggagcccaggaacgacgtggtcttccagcccatttccggggaagacgtgcgcgatgtgacagccctgaacgtgagcacgctgaaggcttacttcagatgcgatggctacaagggctacgacctggtctacagcccccagagcggcttcacctgcgtgtccccgtgcagtaggggctactgtgaccatggaggccagtgccagcacctgcccagtgggccccgctgcagctgtgtgtccttctccatctacacggcctggggcgagcactgtgagcacctgagcatgaaactcgacgcgttcttcggcatcttctttggggccctgggcggcctcttgctgctgggggtcgggacgttcgtggtcctgcgcttctggggttgctccggggccaggttctcctatttcctgaactcagctgaggccttgccttgaagggcgagccagtggtcttcccattccacgacgattgctacaatacagacggccacgtgaccaagcatt

SEQ ID NO: 264970 - DNA, 6924 bp, Homo sapiens
  misc_feature (1)..(1): n is a, c, g, or t
  misc_feature (3415)..(3416): n is a, c, g, or t
  misc_feature (3418)..(3418): n is a, c, g, or t
  misc_feature (3426)..(3426): n is a, c, g, or t
  misc_feature (3442)..(3442): n is a, c, g, or t
  misc_feature (3455)..(3455): n is a, c, g, or t
  misc_feature (3465)..(3465): n is a, c, g, or t
  misc_feature (3477)..(3477): n is a, c, g, or t
  misc_feature (3495)..(3495): n is a, c, g, or t
  misc_feature (3511)..(3512): n is a, c, g, or t
  misc_feature (3514)..(3514): n is a, c, g, or t
  misc_feature (3524)..(3524): n is a, c, g, or t
  misc_feature (3535)..(3535): n is a, c, g, or t
  misc_feature (3562)..(3562): n is a, c, g, or t
  misc_feature (3572)..(3572): n is a, c, g, or t
  misc_feature (3582)..(3582): n is a, c, g, or t
  misc_feature (3585)..(3585): n is a, c, g, or t
  misc_feature (4179)..(4179): n is a, c, g, or t
  misc_feature (4333)..(4333): n is a, c, g, or t
ntacagccccaaggtcgctccctctgggccctttcttccccattcttcccagcagcccaaagctctggtgggacaggggcagcccctggggagggaggagaggacccaggaacccggctaggagggtggcccacccatttccagtgtgacctgttcccattcccccatgtctcctcccatccctcccgccactcagctcaggctgatgagaagcagagcaacgggtgtatcggtgttttctttcctggtggggtagtggggtggggctgaggagagaaaagggtgattagcgtggggccccgccctcttttgtcctcttcccaggttccctggccccttcggagaaacgcacttggttcgggccagccgcctgaggggacgggctcacgtctgctcctcacactgcagctgctgggccgtggagcttccccgggagccagggggacttttgccgcagccatgaagggggcacgctggaggagggtcccctgggtgtccctgagctgcctgtgtctctgcctccttccgcatgtggtcccaggaaccacagaggacacattaataactggaagtaaaactcctgccccagtcacctcaacaggctcaacaacagcgacactagagggacaatcaactgcagcttcttcaaggacctctaatcaggacatatcagcttcatctcagaaccaccagactaagagcacggagaccaccagcaaagctcaaaccgacaccctcacgcagatgatgacatcaactcttttttcttccccaagtgtacacaatgtgatggagactgttacgcaggagacagctcctccagatgaaatgaccacatcatttccctccagtgtcaccaacacactcatgatgacatcaaagactataacaatgacaacctccacagactccactcttggaaacacagaagagacatcaacagcaggaactgaaagttctaccccagtgacctcagcagtctcaataacagctggacaggaaggacaatcacgaacaacttcctggaggacctctatccaagacacatcagcttcttctcagaaccactggactcggagcacgcagaccaccagggaatctcaaaccagcaccctaacacacagaaccacttcaactccttctttctctccaagtgtacacaatgtgacagggactgtttctcagaagacatctccttcaggtgaaacagctacctcatccctctgtagtgtcacaaacacatccatgatgacatcagagaagataacagtgacaacctccacaggctccactcttggaaacccaggggagacatcatcagtacctgttactggaagtcttatgccagtcacctcagcagccttagtaacagttgatccagaaggacaatcaccagcaactttctcaaggacttctactcaggacacaacagctttttctaagaaccaccagactcagagcgtggagaccaccagagtatctcaaatcaacaccctcaacaccctcacaccggttacaacatcaactgttttatcctcaccaagtggattcaacccaagtggaacagtttctcaggagacattcccttctggtgaaacaaccatctcatccccttccagtgtcagcaatacattcctggtaacatcaaaggtgttcagaatgccaatctccagagactctactcttggaaacacagaggagacatcactatctgtaagtggaaccatttctgcaatcacttccaaagtttcaaccatatggtggtcagacactctgtcaacagcactctcccccagttctctacctccaaaaatatccacagctttccacacccagcagagtgaaggtgcagagaccacaggacggcctcatgagaggagctcattctctccaggtgtgtctcaagaaatatttactctacatgaaacaacaacatggccttcctcattctccagcaaaggccacacaacttggtcacaaacagaactgccctcaacatcaacaggtgctgccactaggcttgtcacaggaaatccatctacaagggcagctggcactattccaagggtcccctctaaggtctcagcaataggggaaccaggagagcccaccacatactcctcccacagcacaactctcccaaaaacaacaggggcaggcgcccagacacaatggacacaagaaacggggaccactggagaggctcttctcagcagcccaagctatagtgtgattcagatgataaaaacggccacatccccatcttcttcacctatgctggatagacacacatcacaacaaattacaacggcaccatcaacaaatcattcaacaatacattccacaagcacctctcctcaggaatcaccagctgtttcccaaaggggtcacactcgagccccgcagaccacacaagaatcacaaaccacgaggtccgtctcccccatgactgacaccaagacagtcaccaccccaggttcttccttcacagccagtgggcactcgccctcagaaattgttcctcaggacgcacccaccataagtgcagcaacaacctttgccccagctcccaccgggaatggtcacacaacccaggccccgaccacagcactgcaggcagcacccagcagccatgatgccaccctggggccctcaggaggcacgtcactttccaaaacaggtgcccttactctggccaactctgtagtgtcaacaccagggggcccagaaggacaatggacatcagcctctgccagcacctcacctgacacagcagcagccatgacccatacccaccaggctgagagcacagaggcctctggacaaacacagaccagcgaaccggcctcctcagggtcacgaaccacctcagcgggcacagctaccccttcctcatccggggcgagtggcacaacaccttcaggaagcgaaggaatatccacctcaggagagacgacaaggttttcatcaaacccctccagggacagtcacacaacccagtcaacaaccgaattgctgtccgcctcagccagtcatggtgccatcccagtaagcacaggaatggcgtcttcgatcgtccccggcacctttcatcccaccctctctgaggcctccactgcagggagaccgacaggacagtcaagcccaacttctcccagtgcctctcctcaggagacagccgccatttcccggatggcccagactcagaggacaggaaccagcagagggtctgacactatcagcctggcgtcccaggcaaccgacaccttctcaacagtcccacccacacctccatcgatcacatccagtgggcttacatctccacaaacccagacccacactctgtcaccttcagggtctggtaaaaccttcaccacggccctcatcagcaacgccacccctcttcctgtcaccnncncttcctcngcatccacaggtcacnccacccctcttcntgtcaccgangcttcctcagtntccacaggtcacgccacncctcttcctgtcaccnncncttcctcagnatccacaggtnacaccacccctcttcctgtcaccgacncttcctcagnatccacaggncangccacccctcttcctgtcaccagcacctcctcagcctccacaggtcacgccacccctcttgctgtcagcagtgctacctcagcttccacagtatcctcggactcccctctgaagatggaaacatcaggaatgacaacaccgtcactgaagacagacggtgggagacgcacagccacatcaccaccccccacaacctcccagaccatcatttccaccattcccagcactgccatgcacacccgctccacagctgcccccatccccatcctgcctgagagaggagtttccctcttcccctatggggcagacgccggggacctggagttcgtcaggaggaccgtggacttcacctccccactcttcaagccggcgactggcttcccccttggctcctctctccgtgattccctctacttcacagacaatggccagatcatcttcccagagtcagactaccagattttctcctaccccaacccactcccaacaggcttcacaggccgggaccctgtggccctggtggctccgttctgggacgatgctgacttctccactggtcgggggaccacattttatcaggctgtagggggtctntcctaacaagagtgagtcaagagggcccgtcctgtgctcctggactgggtgaataactccaatcagaggaaatgtgatgaaagctactgcaggaagtgtggaccgtgcccctgccacggacagggcagtgtggaggctccaagaggaagagacncacgcctgttctcaagaagctgcagattaggcatggggaggaatacgagacgttctatggtgaacacagcctgctagtccagcaggccgagtcttggattagaaagatcacaaacaacgggggctacaaggccaggtgggccctaaaggtcacgtgggtcaatgcccacgcctatcctgcccagtggaccctcgggagcaacacctaccaagccatcctctccacggacgggagcaggtcctatgccctgtttctctaccagagcggtgggatgcagtgggacgtggcccagcgctcaggcaagccggtgctcatgggcttctctagtggagatggctttttcgaaaacagcccactgatgtcccagccagtgtgggagaggtatcgccctgatagattcctgaattccaactcaggcctccaagggctgcagttctacgggctacaccgggaagaaaggcccaactaccgtctcgagtgcctgcagtggctgaagagccagcctcggtggcccagctggggctggaaccaggtctcctgcccttgttcctggcagcagggacgacgggacttacgattccaacccgtcagcataggtcgctggggcctcggcagtaggcagctgtgcagcttcacctcttggcgaggaggcgtgtgctgcagctacgggccctggggagagtttcgtgaaggctggcacgtgcagcgtccttggcagttggcccaggaactggagccacagagctggtgctgccgctggaatgacaagccctacctctgtgccctgtaccagcagaggcggccccacgtgggctgtgctacatacaggcccccacagcccgcctggatgttcggggacccccacatcaccaccttggatggtgtcagttacaccttcaatgggctgggggacttcctgctggtcggggcccaagacgggaactcctccttcctgcttcagggccgcaccgcccagactggctcagcccaggccaccaacttcatcgcctttgcggctcagtaccgctccagcagcctgggccccgtcacggtccaatggctccttgagcctcacgacgcaatccgtgtcctgctggataaccagactgtgacatttcagcctgaccatgaagacggcggaggccaggagacgttcaacgccaccggagtcctcctgagccgcaacggctctgaggtctccgccagcttcgacggctgggccaccgtctcggtgatcgcgctctccaacatcctccactcctccgccagcctcccgcccgagtaccagaaccgcacggaggggctcctgggggtctggaataacaatccagaggacgacttcaggatgcccaatggctccaccattcccccagggagccctgaggagatgcttttccactttggaatgacctggcagatcaacgggacaggcctccttggcaagaggaatgaccagctgccttccaacttcacccctgttttctactcacaactgcaaaaaaacagctcctgggctgaacatttgatctccaactgtgacggagatagctcatgcatctatgacaccctggccctgcgcaacgcaagcatcggacttcacacgagggaagtcagtaaaaactacgagcaggcgaacgccaccctcaatcagtacccgccctccatcaatggtggtcgtgtgattgaagcctacaaggggcagaccacgctgattcagtacaccagcaatgctgaggatgccaacttcacgctcagagacagctgcaccgacttggagctctttgagaatgggacgttgctgtggacacccaagtcgctggagccattcactctggagattctagcaagaagtgccaagattggcttggcatctgcactccagcccaggactgtggtctgccattgcaatgcagagagccagtgtttgtacaatcagaccagcagggtgggcaactcctccctggagctctggggagctctttcctgtgtcagaaccagtcctgccctgtgaattactgctacaatcaaggccactgctacatctcccagactctgggctgtcagcccatgtgcacctgccccccagccttcactgacagccgctgcttcctggctgggaacaacttcagtccaactgtcaacctagaacttcccttaagagtcatccagctcttgctcagtgaagaggaaaatgcctccatggcagaggtcaacgcctcggtggcatacagactggggaccctggacatgcgggcctttctccgcaacagccaagtggaacgaatgattcttcaaggagaatgaatactgggaatcaagacaagactataccttatccataggcgcaggtgcacagggggaggccataaagatcaaacatgcatggatgggtcctcacgcagacacacccacagaaggacactagcctgtgcacgcgcgcgtgcacacacacacacacacacacgagttcataatgtggtgatggccctaagttaagcaaaatgcttctgcacacaaaactctctggtttacttcaaattaactctatttaaataaagtctctctgactttttgtgtctccaaaaaaaaaa

SEQ ID NO: 264971 - DNA, 5559 bp, Homo sapiens
  misc_feature (1)..(1): n is a, c, g, or t
  misc_feature (3415)..(3416): n is a, c, g, or t
  misc_feature (3418)..(3418): n is a, c, g, or t
  misc_feature (3426)..(3426): n is a, c, g, or t
  misc_feature (3442)..(3442): n is a, c, g, or t
  misc_feature (3455)..(3455): n is a, c, g, or t
  misc_feature (3465)..(3465): n is a, c, g, or t
  misc_feature (3477)..(3477): n is a, c, g, or t
  misc_feature (3495)..(3495): n is a, c, g, or t
  misc_feature (3511)..(3512): n is a, c, g, or t
  misc_feature (3514)..(3514): n is a, c, g, or t
  misc_feature (3524)..(3524): n is a, c, g, or t
  misc_feature (3535)..(3535): n is a, c, g, or t
  misc_feature (3562)..(3562): n is a, c, g, or t
  misc_feature (3572)..(3572): n is a, c, g, or t
  misc_feature (3582)..(3582): n is a, c, g, or t
  misc_feature (3585)..(3585): n is a, c, g, or t
  misc_feature (4179)..(4179): n is a, c, g, or t
  misc_feature (4333)..(4333): n is a, c, g, or t
ntacagccccaaggtcgctccctctgggccctttcttccccattcttcccagcagcccaaagctctggtgggacaggggcagcccctggggagggaggagaggacccaggaacccggctaggagggtggcccacccatttccagtgtgacctgttcccattcccccatgtctcctcccatccctcccgccactcagctcaggctgatgagaagcagagcaacgggtgtatcggtgttttctttcctggtggggtagtggggtggggctgaggagagaaaagggtgattagcgtggggccccgccctcttttgtcctcttcccaggttccctggccccttcggagaaacgcacttggttcgggccagccgcctgaggggacgggctcacgtctgctcctcacactgcagctgctgggccgtggagcttccccgggagccagggggacttttgccgcagccatgaagggggcacgctggaggagggtcccctgggtgtccctgagctgcctgtgtctctgcctccttccgcatgtggtcccaggaaccacagaggacacattaataactggaagtaaaactcctgccccagtcacctcaacaggctcaacaacagcgacactagagggacaatcaactgcagcttcttcaaggacctctaatcaggacatatcagcttcatctcagaaccaccagactaagagcacggagaccaccagcaaagctcaaaccgacaccctcacgcagatgatgacatcaactcttttttcttccccaagtgtacacaatgtgatggagactgttacgcaggagacagctcctccagatgaaatgaccacatcatttccctccagtgtcaccaacacactcatgatgacatcaaagactataacaatgacaacctccacagactccactcttggaaacacagaagagacatcaacagcaggaactgaaagttctaccccagtgacctcagcagtctcaataacagctggacaggaaggacaatcacgaacaacttcctggaggacctctatccaagacacatcagcttcttctcagaaccactggactcggagcacgcagaccaccagggaatctcaaaccagcaccctaacacacagaaccacttcaactccttctttctctccaagtgtacacaatgtgacagggactgtttctcagaagacatctccttcaggtgaaacagctacctcatccctctgtagtgtcacaaacacatccatgatgacatcagagaagataacagtgacaacctccacaggctccactcttggaaacccaggggagacatcatcagtacctgttactggaagtcttatgccagtcacctcagcagccttagtaacagttgatccagaaggacaatcaccagcaactttctcaaggacttctactcaggacacaacagctttttctaagaaccaccagactcagagcgtggagaccaccagagtatctcaaatcaacaccctcaacaccctcacaccggttacaacatcaactgttttatcctcaccaagtggattcaacccaagtggaacagtttctcaggagacattcccttctggtgaaacaaccatctcatccccttccagtgtcagcaatacattcctggtaacatcaaaggtgttcagaatgccaatctccagagactctactcttggaaacacagaggagacatcactatctgtaagtggaaccatttctgcaatcacttccaaagtttcaaccatatggtggtcagacactctgtcaacagcactctcccccagttctctacctccaaaaatatccacagctttccacacccagcagagtgaaggtgcagagaccacaggacggcctcatgagaggagctcattctctccaggtgtgtctcaagaaatatttactctacatgaaacaacaacatggccttcctcattctccagcaaaggccacacaacttggtcacaaacagaactgccctcaacatcaacaggtgctgccactaggcttgtcacaggaaatccatctacaagggcagctggcactattccaagggtcccctctaaggtctcagcaataggggaaccaggagagcccaccacatactcctcccacagcacaactctcccaaaaacaacaggggcaggcgcccagacacaatggacacaagaaacggggaccactggagaggctcttctcagcagcccaagctatagtgtgattcagatgataaaaacggccacatccccatcttcttcacctatgctggatagacacacatcacaacaaattacaacggcaccatcaacaaatcattcaacaatacattccacaagcacctctcctcaggaatcaccagctgtttcccaaaggggtcacactcgagccccgcagaccacacaagaatcacaaaccacgaggtccgtctcccccatgactgacaccaagacagtcaccaccccaggttcttccttcacagccagtgggcactcgccctcagaaattgttcctcaggacgcacccaccataagtgcagcaacaacctttgccccagctcccaccgggaatggtcacacaacccaggccccgaccacagcactgcaggcagcacccagcagccatgatgccaccctggggccctcaggaggcacgtcactttccaaaacaggtgcccttactctggccaactctgtagtgtcaacaccagggggcccagaaggacaatggacatcagcctctgccagcacctcacctgacacagcagcagccatgacccatacccaccaggctgagagcacagaggcctctggacaaacacagaccagcgaaccggcctcctcagggtcacgaaccacctcagcgggcacagctaccccttcctcatccggggcgagtggcacaacaccttcaggaagcgaaggaatatccacctcaggagagacgacaaggttttcatcaaacccctccagggacagtcacacaacccagtcaacaaccgaattgctgtccgcctcagccagtcatggtgccatcccagtaagcacaggaatggcgtcttcgatcgtccccggcacctttcatcccaccctctctgaggcctccactgcagggagaccgacaggacagtcaagcccaacttctcccagtgcctctcctcaggagacagccgccatttcccggatggcccagactcagaggacaggaaccagcagagggtctgacactatcagcctggcgtcccaggcaaccgacaccttctcaacagtcccacccacacctccatcgatcacatccagtgggcttacatctccacaaacccagacccacactctgtcaccttcagggtctggtaaaaccttcaccacggccctcatcagcaacgccacccctcttcctgtcaccnncncttcctcngcatccacaggtcacnccacccctcttcntgtcaccgangcttcctcagtntccacaggtcacgccacncctcttcctgtcaccnncncttcctcagnatccacaggtnacaccacccctcttcctgtcaccgacncttcctcagnatccacaggncangccacccctcttcctgtcaccagcacctcctcagcctccacaggtcacgccacccctcttgctgtcagcagtgctacctcagcttccacagtatcctcggactcccctctgaagatggaaacatcaggaatgacaacaccgtcactgaagacagacggtgggagacgcacagccacatcaccaccccccacaacctcccagaccatcatttccaccattcccagcactgccatgcacacccgctccacagctgcccccatccccatcctgcctgagagaggagtttccctcttcccctatggggcagacgccggggacctggagttcgtcaggaggaccgtggacttcacctccccactcttcaagccggcgactggcttcccccttggctcctctctccgtgattccctctacttcacagacaatggccagatcatcttcccagagtcagactaccagattttctcctaccccaacccactcccaacaggcttcacaggccgggaccctgtggccctggtggctccgttctgggacgatgctgacttctccactggtcgggggaccacattttatcaggctgtagggggtctntcctaacaagagtgagtcaagagggcccgtcctgtgctcctggactgggtgaataactccaatcagaggaaatgtgatgaaagctactgcaggaagtgtggaccgtgcccctgccacggacagggcagtgtggaggctccaagaggaagagacncacgcctgttctcaagaagctgcagattaggcatggggaggaatacgagacgttctatggtgaacacagcctgctagtccagcaggccgagtcttggattagaaagatcacaaacaacgggggctacaaggccaggtgggccctaaaggtcacgtgggtcaatgcccacgcctatcctgcccagtggaccctcgggagcaacacctaccaagccatcctctccacggacgggagcaggtcctatgccctgtttctctaccagagcggtgggatgcagtgggacgtggcccagcgctcaggcaagccggtgctcatgggcttctctagtggagatggctttttcgaaaacagcccactgatgtcccagccagtgtgggagaggtatcgccctgatagattcctgaattccaactcaggcctccaagggctgcagttctacgggctacaccgggaagaaaggcccaactaccgtctcgagtgcctgcagtggctgaagagccagcctcggtggcccagctggggctggaaccaggtctcctgcccttgttcctggcagcagggacgacgggacttacgattccaacccgtcagcataggtcgctggggcctcggcagtaggcagctgtgcagcttcacctcttggcgaggaggcgtgtgctgcagctacgggccctggggagagtttcgtgaaggctggcacgtgcagcgtccttggcagttggcccaggaactggagccacagagctggtgctgccgctggaatgacaagccctacctctgtgccctgtaccagcagaggcggccccacgtgggctgtgctacatacaggcccccacagcccgcctggatgttcggggacccccacatcaccaccttggatggtgtcagttacaccttcaatgggctgggggacttcctgctggtcggggcccaagacgggaactcctccttcctgcttcagggccgcaccgcccagactggctcagcccaggccaccaacttcatcgcctttgcggctcagtaccgctccagcagcctgggccccgtcacggtccaatggctccttgagcctcacgacgcaatccgtgtcctgctggataaccagactgtgacatttcagcctgaccatgaagacggcggaggccaggagacgttcaacgccaccggagtcctcctgagccgcccagctctctccgttgtaaaccgaatccgtagcgagcggcgcg

SEQ ID NO: 264972 - DNA, 2145 bp, Homo sapiens
tgagctcggcccgagtgatatgatgacgacttcaggatgcccaatggctccaccattcccccagggagccctgaggagatgcttttccactttggaatgacctggcagatcaacgggacaggcctccttggcaagaggaatgaccagctgccttccaacttcacccctgttttctactcacaactgcaaaaaaacagctcctgggctgaacatttgatctccaactgtgacggagatagctcatgcatctatgacaccctggccctgcgcaacgcaagcatcggacttcacacgagggaagtcagtaaaaactacgagcaggcgaacgccaccctcaatcagtacccgccctccatcaatggtggtcgtgtgattgaagcctacaaggggcagaccacgctgattcagtacaccagcaatgctgaggatgccaacttcacgctcagagacagctgcaccgacttggagctctttgagaatgggacgttgctgtggacacccaagtcgctggagccattcactctggagattctagcaagaagtgccaagattggcttggcatctgcactccagcccaggactgtggtctgccattgcaatgcagagagccagtgtttgtacaatcagaccagcagggtgggcaactcctccctggaggtggctggctgcaagtgtgacgggggcaccttcggccgctactgcgagggctccgaggatgcctgtgaggagccgtgcttcccgagtgtccactgcgttcctgggaagggctgcgaggcctgccctccaaacctgactggggatgggcggcactgtgcggctctggggagctctttcctgtgtcagaaccagtcctgccctgtgaattactgctacaatcaaggccactgctacatctcccagactctgggctgtcagcccatgtgcacctgccccccagccttcactgacagccgctgcttcctggctgggaacaacttcagtccaactgtcaacctagaacttcccttaagagtcatccagctcttgctcagtgaagaggaaaatgcctccatggcagaggtcaacgcctcggtggcatacagactggggaccctggacatgcgggcctttctccgcaacagccaagtggaacgaatcgattctgcagcaccggcctcgggaagccccatccaacactggatggtcatctcggagttccagtaccgccctcggggcccggtcattgacttcctgaacaaccagctgctggccgcggtggtggaggcgttcttataccacgttccacggaggagtgaggagcccaggaacgacgtggtcttccagcccatttccggggaagacgtgcgcgatgtgacagccctgaacgtgagcacgctgaaggcttacttcagatgcgatggctacaagggctacgacctggtctacagcccccagagcggcttcacctgcgtgtccccgtgcagtaggggctactgtgaccatggaggccagtgccagcacctgcccagtgggccccgctgcagctgtgtgtccttctccatctacacggcctggggcgagcactgtgagcacctgagcatgaaactcgacgcgttcttcggcatcttctttggggccctgggcggcctcttgctgctgggggtcgggacgttcgtggtcctgcgcttctggggttgctccggggccaggttctcctatttcctgaactcagctgaggccttgccttgaaggggcagctgtggcctaggctacctcaagactcacctcatccttaccgcacatttaaggcgccattgcttttgggagactggaaaagggaaggtgactgaaggctgtcaggattcttcaaggagaatgaatactgggaatcaagacaagactataccttatccataggcgcaggtgcacagggggaggccataaagatcaaacatgcatggatgggtcctcacgcagacacacccacagaaggacactagcctgtgcacgcgcgcgtgcacacacacacacacacacacgagttcataatgtggtgatggccctaagttaagcaaaatgcttctgcacacaaaactctctggtttacttcaaattaactctatttaaataaagtctctctgactttttgtgtctccaaaaaaaaaa

SEQ ID NO: 264973 - DNA, 449 bp, Homo sapiens
gttgtcgggcaggttctattctgatcagtgagcttgttgagggagtgttgctagtactcaagactcacctcatccttaccgcacatttaaggcgccattgcttttgggagactggaaaagggaaggtgactgaaggctgtcaggattcttcaaggagaatgaatactgggaatcaagacaagactataccttatccataggcgcaggtgcacagggggaggccataaagatcaaacatgcatggatgggtcctcacgcagacacacccacagaaggacactagcctgtgcacgcgcgcgtgcacacacacacacacacacacgagttcataatgtggtgatggccctaagttaagcaaaatgcttctgcacacaaaactctctggtttacttcaaattaactctatttaaataaagtctctctgactttttgtgtctccaaaaaaaaaa

SEQ ID NO: 264974 - DNA, 449 bp, Homo sapiens
ataaattatttggaattcttctgcaggagatatttgttctctgccattgttaattaattaattagttaatttttatcagtgtagagtcatggatatttgttttatagtttggattataatccaaaactgtttattttgttgctcaaatttctcagatttgccttttgggagctgtttcaattggctcctgtgactctttcacataccctcattcaatgatgactcttgggagagcaatttcaccagagtggtaaacacagcataacagtacgttgagaagtaaataagtgttgaagaagtggaagcacaaaggcagttaagtagcaccttaaatcagggtgaggcttaatatttgtctttataagtccttaagacattttaatctcataaaacacaggtagatgaaagccctgcctatgccatgaaaagccctgaagcattaaaagaaa

SEQ ID NO: 264975 - DNA, 200 bp, Homo sapiens
tgtccccacacaatggagcattggaaagaagaatcagagagaacgtgctgttcccggagcccatcagcctggccaaaccctttcagggccaaaaggacctgtggaggtcagaagggaaactgaggccgggtgaggggctcccccttacacaggaggtggggtcagacctgagacagggcctacacctgccaagccctggg

SEQ ID NO: 264976 - DNA, 309 bp, Homo sapiens
tgttcagctttactctcttaatgttcagatgcacttgactgctacagccaggcaactctcagtattgtctctcttgtctccaaatagtgggtaaaagcttgacctcaaacatttgtgttggaagggttagaccgcagaggttgtttggtcctaagctccttaaactgcgatgtgtacactgagcatcctctaattcttacagtaaatgtgttgcattaacctttgaacttggaagaagaaagctttggccagttagtctttcttttttttttttttttttttcacattaaaaaaatagacttatcagaa

SEQ ID NO: 264977 - DNA, 299 bp, Homo sapiens
ttatatatgattttacttaaataagtaaatgaatataaaaagcgagaaaattttatgacatagttatggcaaattaacatttattggttgaaatactacctcttaatgcagtttttcaaactgggtattgtcactcattagtgggtagacaatttaatgggtcatgattagtatttaaaaaattctgagtagaatagaaaatatcagtgtattgcacatagtaaagttattttgtgaaacctttgtttgacttgcattgagttgaaaataatgtgtaatgggttataatgtaaatatgt

SEQ ID NO: 264978 - DNA, 536 bp, Homo sapiens
tccatactctttgggttaatacatcacttgcttttataatagtctgaggtctatttcaaatggatttttaaaatgtcttcagtcagtcactgctgtggtttgaatgtgtcccctccaaaattcaggtgttgccaatgtgaagataatgagaggtgggacctttaggaggtgattaggccatgaggactcctccatccttcatgggattaaggcccttataaaagagcctccacagcttgggcacggtggctcatgtttatagtcccagcactttgggaggccaaggcgggtggattgcttgaggtcaggagtttgagaccagcctggccaacatggtgaaaccacgtctcacgtctaaaatacaaaaattagctgagcatggtgtcatgcacctgtaatcccagctaccagggaggctgaggcaggagaattgcttgaacccgggaggcggaggttgcagcgagctgagacggcatcactgcactccagtctgggcaacaagcgagactggtgataagcgagactccgtctcaaaa

SEQ ID NO: 264979 - DNA, 251 bp, Homo sapiens
ctagttactagtgatatagtgggcaactatgttctggttctcaagaatattcatagtcaataataagcataacatagtgataatatgatacttagggagatacataaggtcatattctggcatactctggagagagataccgtaatcagccttgaggtgcaggatgtgatctgtaaactgagacctgaagtatagttagactggtaagaggaatgaggatatatatggtggttaataaaagaacattctgg

SEQ ID NO: 264980 - DNA, 694 bp, Homo sapiens
gccatcatcttccatagcggaaagtcaatgtacaatatcccaagtaaaaaaatcaggaggaacacttgacattaaggtgtcaggaagtaaataccaggcaaagagtggaaagtggtttgaggaaggtggattggaagtaggctggctggctgaggactgctcttttccttaaggaaccttatgaaatctgcaggctctttatattctagtatataactttgataaaatttaaaaaatgatttaaagtgtaatagtataaatagagctaaaaagtaaagactttatcaaaatagaatctatgtgattttggtaaacaattttgggggtactccctttcccttttgataaatagaattgtactaatttctaatgtcccttgaactctacatttgtttattgtatttctttgtacatgtgtctgtacttttgaacacaaacacacagaaatctggtaactgggagtagagtcccctgattattttgatcattaaaatttggtatgtattatacacacacatgcaaaaacacaatctgatcccatcaaatgaaggtggcaaagccatcttctgatttttagagaaacaaaggaggctgcatttctatcttcctctgtccaggtgagaggagaagccgggagagaccaaagtacccttctgtttagactcttgtgtgtgacgtatggtgatgctgacct

SEQ ID NO: 264981 - DNA, 517 bp, Homo sapiens
gttgcagtgagccaagatgggggcaataagagcaaaactttgtctcaaaaaaaaataaataaataaaaaataaaatatgtcaagccccttctcttcctgtctcctctcgtggtgtgtacttgactccccttctcgccagatctcacaggactttcagatttaagcaatacctggccaagaaacaaaagcaaaatcattccattcccccagtggattcagatcaaaactggtaataaaatcaggtacgactccaaaaggagacattggagaagaacgaagcggggtctataaggaattgcacgtgagatggcacacatatttatgctgtgtgagcattacaatcgcgttaccatatcaagctgaaaatgtcaccactatctggagtgttggaaatgttttattgggaatatgttttttctctgaatctgctatgaacacgtcagttgggtgggttcagtaataaatatgtgagacttttcatttcaaaataaaaaaggcaaatgatgtaaaacataga

SEQ ID NO: 264982 - DNA, 1390 bp, Homo sapiens
cacgaggagagccaggaacaggccaggtcaggggagctggagcctggctaggtatggagagagcagggtacacttgctgcaactgtgagaagagccaggggtggccctggtggcctgggcgcgtttagctgtgcctggggccaggcctgactggctgcaagtcattactataggcggagagtgcagagtagcgcgctcctgctgtcactccctcctccaagtccacaaagaggcaagaaagggaggattttaaggcctatccataccgcatggcaggtgagagcagaggagcaaacagcacttttggatcctggaaagcagaaggtgagtgtcccaggcgtagctgacctgagaaaggcgactccaaagccagcagcagcaacagctggaactgccccagcctgcaccacgggacccccagctctgagactgagagcagctctggggacctctgggctggggtgaagagggatggctggaatcattgttgcaaacaattcagtaggcaggcagctccctagatcccaccgtggtctgcagaggccagcacctgtcccgacctcttactggtcggccctggagagccatctcctacagaggcaaaatgaacggtctctgggccaggaccaggcctgttcagggggatgtgtggctaagtgcataagggatgctgagactacagccctcgtgcccaggcagcgctcagggcatggatagccaggccctccccatccaggccagagatgggaagactccatccaatctcattccatgaccagggactggcaaagctctcagttctctctccatcccagcaggagacaaagaacccaacctcagagattcctcaactcggagacccagccaggccaccctccagagcatctcagtctgcaagccccttggtgtgctcagagcttccagtcacactgctcatgcctatccgtgcacagccagggattgcccttcgtggaggaaaacttcatgaaacaaaaaacaagctccgtggggaacacagaccatagaggaaaaagaaagctgtagaaaaagaaatgatgaatgccttcctggaggtgagaaagccatcgtgaaacgagaggaggttgctccaaaaagttcctagagagcaaaacaagggccttggaggcacaatgattgccaccgtggagacacatttcagcgccactagagtaaaaacactgcagacaggtgagctctcaacagatacatgtccctcgccttctcaggaaagatgggcagtaatgagggcagaagccacaaagaggaaaccgtagtgacaggacccagggtccttcaagctgcggtggggcaagcgctcgggacagtggtgagggagcagctcagccccaggtggtgcctggcaacccgc

SEQ ID NO: 264983 - DNA, 2900 bp, Homo sapiens
ggcaagaccttcagtcaaacgtcataccttgtgtaccatcgtagatttcatactggagagaaaccttacaaatgtgaagaatgtgacaaagctttcagtttcaaatcaaaccttgaaagacataggaaaattcatactggagagaaaccttacaagtgtaatgaatgcagcaggacctttagtcggaagtcatcccttacacgccatcgtagacttcatactggagagaaaccttataagtgtaatgattgtggcaagaccttcagtcagatgtcatcccttgtataccatcgtagacttcatactggagagaaaccttacaaatgtgaagaatgtgatgaagctttcagtttcaaatcgaaccttgaaagacataggagaattcatactggagagaaaccttacaagtgtaatgattgtggcaagaccttcagtcagacatcatcccttgtataccatcgtagacttcatactggagagaaaccttacaaatgtgaagaatgtgatgaagctttcagtttcaaatcaaaccttgaaagacataggataattcatactggagagaaactttacaagtgtaatgaatgtggcaagacctttagtcggaagtcatcccttacacgccattgtagacttcatactggagagaaaccttaccagtgtaatgagtgtggcaaagcctttcgtgggcagtcagcccttatttaccatcaagcaatccatggtatagggaaactttacagatgtaatgattgtcaccaagtctttagtaatgctacaaccattgcaaatcattggagaatccataatgaagagagatcgtacaagtgtaatagatgtggcaaatttttcagacatcgttcataccttgcagttcattggcgaactcatagtggagagaaaccttacaaatgtgaagaatgtgatgaagctttcagtttcaaatcaaaccttcaaagacataggagaattcatactggagagaaaccttacaggtgtaatgaatgtggcaagacctttagtcggaagtcataccttacatgccatcgtagacttcatactggagagaaaccttacaagtgtaatgagtgtggcaagaccttcggtcgaaattcagcccttataattcacaaggcaattcatactggagagaaaccttacaagtgtaatgagtgtggcaaggccttcagtcagaagtcatcccttacatgccatcttagacttcatactggagagaaaccttacaaatgtgaagaatgtgacaaagttttcagtcgcaaatcaagccttgaaaaacacaggagaattcatactggagagaaaccatacaaatgtaaggtttgtgacaaagcttttgggcgtgattcacacctggcacaacatactagaattcacactggagagaaaccttacaagtgtaatgattgtggcaagaacttccgtcacaattcagcccttgtaattcataaggcaattcatagtggagagaaaccttacaagtgtaatgagtgtggcaagaccttccgtcacaattcagcccttgaaattcataaggcaattcatactggagaaaaaccttacaagtgtagtgaatgtggcaaggtttttaatagaaaagcaaacctttcacgtcatcatagacttcatactggagagaaaccttacaagtgtaataaatgtggtaaggtttttaatcaacaagcacaccttgcatgtcatcatagaattcatactggagagaaaccttacaagtgtaatgagtgtggcaaaaccttccgtcacaattcagtccttgtaattcataagacaattcatactggagagaaaccttacaagtgtaatgaatgtggcaaggtttttaatcgaaaagcaaaacttgcacgtcatcatagaattcatactggaaagaaacattagaaatatgaagaatgtgacaaagtttacagttgtaaatcaagtcttgaaagacaggagaattcatactggagagaaagcttacaaatgtaagagtttgtgacaagaatcttgggcgtgattcacacctggcccaacaaactagaagtcacactggagagaaaccttacaagtgtactgagtgtggcaaagcctttagtgggcagtcaacacttattcaccatcaggcaatccatggtatagggaaactttactaatgtaatgattatcacaaagtcttcagtaacactacaaccgtttcaaatcattggagaatccataatgagagattttgaaagtgtaataaatgtggcaaatttttcagacattgttcataccttgcagttcatcggtgaactcatgctggagagaaaccttacaaatgtcatgattgtggcaaggtcttcagtctagcttcatcttatgcaaaacaggagacttcatacaggagacaaacttcacaagtatgatgattgcagcaaagcctttacttcacgttcacacctaattagacatcagagaatccatactggacagaaatcttacaaatgtcatcagtgtggcaaggtcttcagtctgagatcaccccttaaggaacatcagaaaattcatttttgagatgattgttccaaatgcaatgagtatagcaaaccatcaagcattaattggcattagagtcaattcagcattgacttgagtttgaattgacttaacattgagttcaagcattaattgacattaaagtgtttatgttaagaagattgggccaggcggggtggctcacgcctgtaatcccagcactttgggaggccaagaccaatagatcacttgaggtcaggagtttgagaccagactggccaacagacatgagtcacttttcccaccctgtattttgtttctttaataaaaactgttacgggtttttatgggtatctgttgaatctaaa

SEQ ID NO: 264984 - DNA, 3296 bp, Homo sapiens
ggcaagaccttcagtcaaacgtcataccttgtgtaccatcgtagatttcatactggagagaaaccttacaaatgtgaagaatgtgacaaagctttcagtttcaaatcaaaccttgaaagacataggaaaattcatactggagagaaaccttacaagtgtaatgaatgcagcaggacctttagtcggaagtcatcccttacacgccatcgtagacttcatactggagagaaaccttataagtgtaatgattgtggcaagaccttcagtcagatgtcatcccttgtataccatcgtagacttcatactggagagaaaccttacaaatgtgaagaatgtgatgaagctttcagtttcaaatcgaaccttgaaagacataggagaattcatactggagagaaaccttacaagtgtaatgattgtggcaagaccttcagtcagacatcatcccttgtataccatcgtagacttcatactggagagaaaccttacaaatgtgaagaatgtgatgaagctttcagtttcaaatcaaaccttgaaagacataggataattcatactggagagaaactttacaagtgtaatgaatgtggcaagacctttagtcggaagtcatcccttacacgccattgtagacttcatactggagagaaaccttaccagtgtaatgagtgtggcaaagcctttcgtgggcagtcagcccttatttaccatcaagcaatccatggtatagggaaactttacagatgtaatgattgtcaccaagtctttagtaatgctacaaccattgcaaatcattggagaatccataatgaagagagatcgtacaagtgtaatagatgtggcaaatttttcagacatcgttcataccttgcagttcattggcgaactcatagtggagagaaaccttacaaatgtgaagaatgtgatgaagctttcagtttcaaatcaaaccttcaaagacataggagaattcatactggagagaaaccttacaggtgtaatgaatgtggcaagacctttagtcggaagtcataccttacatgccatcgtagacttcatactggagagaaaccttacaagtgtaatgagtgtggcaagaccttcggtcgaaattcagcccttataattcacaaggcaattcatactggagagaaaccttacaagtgtaatgagtgtggcaaggccttcagtcagaagtcatcccttacatgccatcttagacttcatactggagagaaaccttacaaatgtgaagaatgtgacaaagttttcagtcgcaaatcaagccttgaaaaacacaggagaattcatactggagagaaaccatacaaatgtaaggtttgtgacaaagcttttgggcgtgattcacacctggcacaacatactagaattcacactggagagaaaccttacaagtgtaatgattgtggcaagaacttccgtcacaattcagcccttgtaattcataaggcaattcatagtggagagaaaccttacaagtgtaatgagtgtggcaagaccttccgtcacaattcagcccttgaaattcataaggcaattcatactggagaaaaaccttacaagtgtagtgaatgtggcaaggtttttaatagaaaagcaaacctttcacgtcatcatagacttcatactggagagaaaccttacaagtgtaataaatgtggtaaggtttttaatcaacaagcacaccttgcatgtcatcatagaattcatactggagagaaaccttacaagtgtaatgagtgtggcaaaaccttccgtcacaattcagtccttgtaattcataagacaattcatactggagagaaaccttacaagtgtaatgaatgtggcaaggtttttaatcgaaaagcaaaacttgcacgtcatcatagaattcatactggaaagaaacattagaaatatgaagaatgtgacaaagtttacagttgtaaatcaagtcttgaaagacaggagaattcatactggagagaaagcttacaaatgtaagagtttgtgacaagaatcttgggcgtgattcacacctggcccaacaaactagaagtcacactggagagaaaccttacaagtgtactgagtgtggcaaagcctttagtgggcagtcaacacttattcaccatcaggcaatccatggtatagggaaactttactaatgtaatgattatcacaaagtcttcagtaacactacaaccgtttcaaatcattggagaatccataatgagagattttgaaagtgtaataaatgtggcaaatttttcagacattgttcataccttgcagttcatcggtgaactcatgctggagagaaaccttacaaatgtcatgattgtggcaaggtcttcagtctagcttcatcttatgcaaaacaggagacttcatacaggagacaaacttcacaagtatgatgattgcagcaaagcctttacttcacgttcacacctaattagacatcagagaatccatactggacagaaatcttacaaatgtcatcagtgtggcaaggtcttcagtctgagatcaccccttaaggaacatcagaaaattcatttttgagatgattgttccaaatgcaatgagtatagcaaaccatcaagcattaattggcattagagtcaattcagcattgacttgagtttgaattgacttaacattgagttcaagcattaattgacattaaagtgtttatgttaagaagattgggccaggcggggtggctcacgcctgtaatcccagcactttgggaggccaagaccaatagatcacttgaggtcaggagtttgagaccagactggccaacagacatgagtcacttttcccaccctgtattttgtttctttaataaaaactgttacgggtttttatgggtatctgttgaatctaaaaaaaaaaaaaaaaaaaaaaaacctcagaggctctctttttcgggtgtgcgggaaaaacggggtattgcgaaatgggcccatgggtcataagctggttccctggacccaggttttcttggtccaagggggtaaatctggccgggtccccctatagggaggccgcaataacatctcgcggaataaaccccccgaggtttttacccaccgggggttttaatgaacttcccgggcgaaaaaaacgagcagacaagcaatgacgcaagaaagagcaaacaatggtgacaggtgaacatgaccacaagacgacaagacacgaggacacaacccacgcgaccagacgacacgacagaaaaccgacactgagcgagaacagacaaaactgcattcgcatcatac

SEQ ID NO: 264985 - DNA, 479 bp, Homo sapiens
agagagaaaaaaactcagagaagtcaatatttttaaagagcaagaaatgggataaaattcagcaaataattcaaggttgagctctatcacagtttagattataaatgccaacttctcagtcattaagtatatatgttaatattgtgtttctgtgtaatttttggaggattaaatatttaatatgttttatttcattttgatttgctgtttgttgtaggattactttcatcatttaaatgcttaattgcagataatactagaagtatatggaggtattttacttgtaaataggaaaatttgtaccataagttgttgggaagtttaaactcttctgtcacccacctataccagtaaagctccagtagcagcaaatgctttttaaaatgtctcttgagaagtgaggaataaacagctttccaacagagaacaggttttctctgcacaaagggtaaataggagaatttacttttgtaaataaa

SEQ ID NO: 264986 - DNA, 847 bp, Homo sapiens
ggagtgtagaaattgcctttcagtggaggttgtcaagacgactactgggaggggacacaggggattcaagtagtggactgggagtagacattggactagatgatttttaaggttgatttcaatctagcgactgtgatttttaggacatattacatctcccggaaaatgaaaaatgaagatacatctggcagttggggaatttcagattcattggttcagggtccctaaaggctttttctctccaacttcttcaagtcctcctgcaattatattctttctcttgcacatcaatttctttccagttatggaaacatccctatcaccatcagaacatgcctttttatcacccttcttaaaaaacaagttaaagaaatttctctattcaatgtagccttccagctctatggcacttctctcctgcccattctggcagaactgctagaagacttgtctcctggggtgtgtacaatctccccttcctgctgcctcctccccactccactactcctcaaaaaccctttctgttaaggtcaccaaagacctccattttaacaaatcccatggcctgttctagtcctcatctttttcagtctctcagtagtagttggcatcatccatcccggcccccttctttttctttttgtagtatgaccttgtaaccacccccaccccctcacttccctttgaagcactgtcctgacttgacttccagggcatcacatcccctttttttctcctacctgaataactgttctctccaagggcctctacagatggaattgccccagggcttagtccttgactttcttcttcatactacactgtctctagggttcttaacctgcta

SEQ ID NO: 264987 - DNA, 605 bp, Homo sapiens
ggactgtccagatgaacctgatgtttctgaggggctgctgtaaggctggttctgcaagagttagaaagactaacctggactcagctgctgctccggaaaagcactgcctctgaggggtaaagaagcattccaggaatgacgtatataggaaccacagcagacagaaagctcacaggagcgagcccctttccttcctccagcttccactcccctgtgacaccctgtgttcatggagctgcacaagaagccagccaacaaagcagacatttggtttgcagaatggcaaagccaagtacgcaaggcatggtttggaggctgagcatctacgactcactagctgggactctagcttccctaaggtcttgcatatctcactgggacatttcctggccaccctagttaatagtggctgatctggccctttctatctcttttcccattttattcttcttaacactgacctatctggcaagtagtagcagatgctttggttctgtatgtcacatccccttggcttagctctctctcaacaacagctgcggtggacggttctgtgagaactcggactcatgcccttcactgaggccctgttcttcaatcaacac

SEQ ID NO: 264988 - DNA, 568 bp, Homo sapiens
tcttggttcagaagcctaacagattgctagacaagagaaaaaacttgaagaaaaaagaagcttaatttcatgcttcataagtagcatttatatttatagcaccaatgtacattttgaaactttctttcaggggtgggagttatggggaaggggtgggtgtgaaggggtagatgaaagctttaatttagaaagaaagttcaagtaaaggaaattattttgattaaatatattttatttgatctgggtatttttggaccacattattaaattaattgttaagctgcagttgagttgttcaagtgagagttttgataagccacttatgggccgcgttgtgaatcacttgccagttgtactttatggagcttattttatgatttaaaatactgtactgtacataggaggtatgttaccttctccttatttgtatgtttaccatatactttgatatttgaaatgttatgtactggaaaggccacttatatttctagaacagattggattttatgcaaccttttttccttgaattaacagcaataaaaaaatgaaaaacagcttaaaaaatgtg

SEQ ID NO: 264989 - DNA, 446 bp, Homo sapiens
ttttgagcacctgctatgtgccaggagcattcaaggcgctggggattcagcagagatcaaaccagaccaaagctccagttctcggagctcagcttctcgtggggtgacagaggggcgcacgtggggagaactgtctcctctcctcttgcctggctctcactgctactacacatgggatttccaagtcagggctctttgcaggaattgcccagatggtctcttgcaggaagccagagagcctaagtgagattcgtttctgccccaattgataatttatgaaagcaacttcataaacaccaggtagtgtcccatttgttactcatttaagattattatttcctccattctttttatgaggggttttcttgttgattgtagcaagtggaagtaggtgtagggagataagttgttatggtgtcttcaaaaataaaaactaacaaataagc

SEQ ID NO: 264990 - DNA, 266 bp, Homo sapiens
acctgccttggcctcccaaagtgcagggattacaggtgtgagccaccgtgcccagctggtacctttttttttgttgttggtgaagtagaatgtgtgtatggggagggcaggtggataggatattttggaatttgaagagaatgggaatgtctggatagtgcatgtatagaatgggaagtaaacactggaggacctgggagtgtggtgcttattgatggatcgttgggtttatccaggattggggttttgccagatggctgtgatga

SEQ ID NO: 264991 - DNA, 308 bp, Homo sapiens
gctcgctggtgctttcctctctgctctggggtgtccctacttagttcttcttccggaagacctccagagcctggttagggttgtcgtgagtcctcggccactgcagaagctccccagcagtgatgagctgtgcccagcttgggggggggcaggtggataggatattttggaatttgaagagaatgggaatgtctggatagtgcatgtatagaatgggaagtaaacactggaggacctgggagtgtggtgcttattgatggatcgttgggtttatccaggattggggttttgccagatggctgtgatga

SEQ ID NO: 264992 - DNA, 222 bp, Homo sapiens
aaggatggttattaaaatgtttatgtttgagagaaacacagcttctcaaagatggcggggaagggtcctcacagttgtgccaagagcaaaaatctatacagcactcactatgtgccagtgaacagtcctaaacacttcatatatattaattcaatcttcctaacactgcagccctgttaggtaagcactactgctacccctattttagaggaagtaaacctg

SEQ ID NO: 264993 - DNA, 794 bp, Homo sapiens
taattttaaaattaggtgagggtagaatcatcacaggttaggaatacattcttcataagacacgatgctgtaaatacccttaatggacgaaaagttgaaatacttttgtttcctcttggagcagttcagggaaatgcccaccggggattgtcctgcacagatagggcaagaggatttcctgggtggagtctgccaaggcctgcctcgctggggaccccagagtcctgcacctctggttccgccccaggtggtgacattactgtccccgttctgtggctcgtggacaagactttctccagaccccttaaagtggtacatattctaaaaaactgtttttctattatgccataaccttgctctagtcagtgaatgttcctaatgctgctgtttcaacatttgaattctttttaatttatgaaacatgctaaattttttttttcaaacaaacacacacatccacatatacacatgcttcgctatgtggcttccaaggtttaaattttgaaaagtaaaagaattaaaacttcacgaccacagatcacctcaaaccagaaatacctcagaattttctacttatgtaaggtttattatatattttgttagttgtgttgtcttgtagtaagtatattttaatgtaagttggcttttgtgacaaggaagtttaaaagaaatagagaaaaagaaaaaagtttgcatcttctagggagtgctaccatttttgtttgataacgcccccttgtaaataattgtcatcaactgtaggttggctgtctgggccaagtctgggcatttat

SEQ ID NO: 264994 - DNA, 583 bp, Homo sapiens
tcacaaggtgatctttggccccatgttctgaaacctgttcagacatttgcaaaagcttcctctcttttccccaggagcaatttcttgcccagagttctcctgatcccaggtccttcaatctccataaatgaggcccaccccagatatttaggtcacttaattggccaaaatgccaataacacagtgtgtttagggacacagtctggctcaggacagaagataggactacatacaggtcaggaagtcttaatttggatcactgctgacttggataagaccctaggtagcaattagcaagttactttctgtcctcaacatgccttttgttcgacaagggcctggatatccaaattgttctggccagcggattggagacccctcctagtcgtgcctcttccttgctggcaaactgaagagtccttcccaagtgtccgtttcctcagctgtattttattttattttttttacttatttattttgagaccaagtcagtctctgtcacctaggctggagcttgcagtgagccgagtacttgtcgctgcactccagcctgggcaacagagcaagactccatctcaaaaaa

SEQ ID NO: 264995 - DNA, 311 bp, Homo sapiens
tgctgtaatatgatattaatgttactatcccagaccatactgtatttttcttgggcatccttatctgcataaacattctgagctgcctttttatctgacccagatggtctataataatttcctattagtcttagtttccttttatcttttatttccatccaaacatattttgtcccactgccaacttatttattatgtgacattctttctcccttcagacacaatatccgccttgacccatgttggcataattccccctagcctgttgtgtctatctcttgcataaactttccatatccaaattattccaa

SEQ ID NO: 264996 - DNA, 1030 bp, Homo sapiens
ataaggtattcccccatatgtatgtattacttcccctttgctgaaataagcgcaagaaataactaatggttttctccgctatagagacagagataggaaaggatacaaaaaagaccatggccataataaaaatcaggactacacagtcaccacaaattaccagaagatgagagagaaatactctgtcaactatactactgacatacactggaatgtcttcttagaagaaattttaaaggatttagtgaacaaccagttattatttcagaaaataaaaattaataaaaattttcagtgaaaggtagtatacaattggctattataattggctgtttagttctttgtaccctccacaaaattgcaagatattttttaactttttattttaaagtaattaaaatttcacaaaaaacatgcaaagaaatggacgggaaggtcatgtgcacccttcatccagtcctcattctcagtgttaacatcttgcaaaactgcaatattaaaaccaggaaactgacaatagtacaatccatggagcttttcatagaatccatagatatttcaccagctatacatacagttatttttgtttgtatgtgtgtatagctctatgtcattgtatcacatgtgtagcttcgagtaaccactagcacaatcaagacacttaactgtaccatcaccataagactccctagtgctaccactttatgcacaccccaccctctccccttcccctccctaacccctggctaccactaatctttctccataatgatcttatttcatgaaggttgtataaatgaaatcattcagtaatgtatctttttaagacaggtttttttttttcactcagcacaatttccttgaggttcatccaggttgttacccataataacagtttgttagtctttattgctgtagtctatagcatgcttatatcacagtctgtccaaccattcacccattgatgggcatatgggcatttccagtttggtgctattacaaataaagttgctgtgaacattcatgttca

SEQ ID NO: 264997 - DNA, 505 bp, Homo sapiens
caggcattgacttctcctcaatagctgtgaaagtcctaggtggcattttccaatataaggcagtttagtccacactgaaaattcattgtttagtgtagccaccttcatcaatgatcttagctagattttcttgataacttgttgcttctctatcagtatttgctgcttcaccttgtacttttatgttatggagagggcttcttttcttaaacctcatgaactaacttctagcttcaaacttttcttctgtggcttcatgaaggttgtataaatgaaatcattcagtaatgtatctttttaagacaggtttttttttttcactcagcacaatttccttgaggttcatccaggttgttacccataataacagtttgttagtctttattgctgtagtctatagcatgcttatatcacagtctgtccaaccattcacccattgatgggcatatgggcatttccagtttggtgctattacaaataaagttgctgtgaacattcatgttca

SEQ ID NO: 264998 - DNA, 425 bp, Homo sapiens
gcatcccttagctttcagtacatttcctgttttttttttttcattcctctgtggtgtacatatatgtgtgtgtgtgtgtgtatgtgtatccatgtaattaccatctaaaccaaaatatagaacattttcaggaccctggaagactcttgtgctccctactcagtatcccccaaaggtaatcactattttatcctctggcatatattaatttgcctaatcttgaactttgtgtacatggaattatactgtatgagctcttttgtgcctggtttctttagctaaatatatgtgagatatatctatgttcttgtttgttgcagtatttttccaccattctttgttttccactgcacattacctcaatattctaatgttgatggacatttggtctggagctattgtgaataaagctgtcataaatattc

SEQ ID NO: 264999 - DNA, 416 bp, Homo sapiens
tcaggcctcccagatagtaccaaggaactgaaatttaccagatcactgcatctggataataagacaccagactcctcacccatcatgattgcctaattcatcacctgcttcctgttgaccaacttctcttgcttacccctccctaattcctgttttcccacatgtggttacatttcttccatgctgtataaacccctaatttcagttggttagggagatggatttgaggctgatctccttggcagcatcacctgattaatgccttttttcttggaaacactcattgtctcagttattggctttctgtgcagtgagcagcaggacctaaaccctggtgtcttggtaacagtggctgcaccattttatattttcactaatagagcacaaagatcacaatttttctacatcctctcaaa

SEQ ID NO: 265000 - DNA, 358 bp, Homo sapiens
gttatctgtaccatttatgaaatgcaacatagtgattctaatgtgtaattattctgttcattttatgtaatgacgatgacaagaatgcctctcaagtagtaatttcttagtctttttgcttacagataggtttgtaatgtttctgcatgtgatattttctacctgtatcctaagtagatttttctttagcatgtttgttacaatgtaacaactttgcattataagaaatcaaggcatttccaatatctttatgctacatctatactttgatccctcagcaagttgtcctcactgttgtgtgaacctgtttttctatatttgcatgccattaaattcttgatgaccttcagtaggcaat

SEQ ID NO: 265001 - DNA, 144 bp, Homo sapiens
ggctgcatttggcttctgtaatttgacgaagacactggccctcttggcatacaaaatggccaagcgaggattcagcttgatggcatctgtgaataagtcaatggctttctggagttcaccatcatttagggcttcaatagcagc

SEQ ID NO: 265002 - DNA, 403 bp, Homo sapiens
tctggagacagtctcactgtcacccaggctggagtgcagtggcgcgatctcggctcactccatctgcctccccagttcaaacaattctgctgcctcagcctcccgagtagctgggactacaggcgcacaccgccacgccaggctaattttttgtattttagtagagacggggtttcaccgtgttgcccaggctggtcttgaactcctgagctcaggcaatccaccctcctcagcctccctaagtgctaggattacaggtgcgagccaccgcgcccggccagagttcactcttaatattaatacaacgggagagagaagaggccaggtgtctgggacaaagctgatataaatttgtgagcaaaagcaaattaatgtatttctccatgtcaaatagcttaagtca

SEQ ID NO: 265003 - DNA, 405 bp, Homo sapiens
accattatcaagttaaaaagttattcaattaaatataaagttgaaaaagaactacctacacatgttgaagatcaggttttatattacttcatatataactgaagagctaaatagattttaaaaagaacaaattctaagcgttatatataactggtataagaaagacctgtgctggcctggcgtagtggctcacacctgtaatctcagcactctgggaggccagggcaggcagatcacttgaggtcaggagttcgtgaccagcctggctaacatggtgaaaccccatctctactaaaaatacaaaaattagccaggcatggtggcaagcgcctgtaattccagctactctggagtctggggcaggagaatcatttgaacacaggagatggatattgcagtgagctg

SEQ ID NO: 265004 - DNA, 438 bp, Homo sapiens
tgagatggagtctcactgtgacacccaggctggagtgcaatggcgctgtctcggctcactgcaacctcctcctcccgggttcaagcgattctccagcttcagcctcctgagcagctgggattacaggcgcccgccaccacgcccggctaatttttgtatttttagtagagacgggggtttcaccacattggtcaggctagtcttgaactcctgacctcaagtgatctgcccgcttcgacctcccaaagtgctgggattacaggcgtaagccatcgcaccccaccattctagtttttttttttggagacagggtctctgtcgcccaggctggaatggcagtgggcagtggcacaccctcctccactattgcctgtctggcccaaactagtgtcatctttcctctcagcaccacagcctcctctttggtcttcctgcttc

SEQ ID NO: 265005 - DNA, 775 bp, Homo sapiens
ctttgctcttggttataaggaaaggctgcctgtgggctcatagcactgagagcttcccagattgtagacattcccttggcacttagaattctagactggcagggaccctcaaggtttcccatccacacttctatttcatgggtgggaaactgacatccaggcagtagatcagggatgcctgactccactccccttatctcattctggcaattctaattctttaggcagatctctctgcctccagggcttaactctgagctgagaaagcctaaaacggagttctgtttatttctgcgcccctctcaagtaggtattaaaaaagattgaagacatgaaagaaagaataactgaatgttactgatgccagaagcaactctcgctgggcgcaactctcgctgggcgcaactctcgctgggcctcagtttctcatgagcagaactgcagggggtaggtggtcccagtctctagggtctccaccaagcttcttctcagtgcccaggaagtggtacagtgtgctctcaatagtccttcagcttatgacagcctcagctcatgggacttgatgacagggaagagcaagctgcatgccatgaagtcagccaggtttgcctgtggaggctgctcccatctcctttcagaactgccccctcccctatcaggcccccacttcttccccagggccttgctctcagccagctgtctgggatggctttcctgtatagctttgagctccttcagcacaggagcctgacatggagtaagaaaaaagaaagaa

SEQ ID NO: 265006 - DNA, 424 bp, Homo sapiens
aggctgttctcaaactcctggactcaagtgatcctcctgccttggcttcctaaagtgctgggaccacaggtgtaagcccccatacctggcagagttattcatttttaaagaatataaaagttggctgggtgcggtggctcacatctgtaatcccagcactttggaaggccgaggcaggaggattgcttgaggccagtagttcgagaacagcctggccaatatagtaagacaccatctctataaaacacacacaaaaaatataaaaatttaaggttacttggcttctcttgcaaaatgaagaactatgtaagagaaggattttaaaagtaccagtagttactaaggttatatgtagttttacaagcccccattcaaatggctcagataagtcaatttttgagaattttcatttgtttttgcttcc

SEQ ID NO: 265007 - DNA, 242 bp, Homo sapiens
tccgagaaagggtctccctctgtcacccaagctggagtatagcggcacagtcatgatactgcaaccgtgacctcccgggttcaacttatcctcccacctcagcctcccaagtagcttggaccacaggcaggcatcaccacaccctgctaattaatttaaaaaaaaattgtagagatggggtctcgctgtgttaccagggctctgtcttctttatagatggggaaagtgaggcccagaaaggt

SEQ ID NO: 265008 - DNA, 422 bp, Homo sapiens
tgaccaccagggattatttccgtgggttttaagggtgggcacatgattctacctgagccaaggacacttagtcccatgactctttggggctgctgggaagagattttgctccaccacagatgctcaaaggataggacatgctcttgcggctgctgggaagagattttgctccaccagagacactcaaaggataggacatgctcttggggctgctggcagccacctggataccatgtggaagcaagcctgctttagaatgaaactgtgagaaaggagagccagacagagaggcaaggaggtgaggcccaagagctgatgacacagttggagctcctagatccagccatgcctgcgaccagcccattccttgggtatgtgtgacacaagccaataaacgcccttctttgcagaagccagttgaa

SEQ ID NO: 265009 - DNA, 516 bp, Homo sapiens
ccatagtggtggcataatttttcatttctaccagtaataaataagagttcctgttgctccacagcctcatcagcatttgttgtcagtgctcttaatttaactcttctaatacgcatatagtagtatctcattgttatattttaatttgcaatctgtaatgacttacagtgttgagcatctttttaaatgcttctctgccatctgtatatcttcttttgtgaatgtcggttaatttacttggcccattttaaaattgggttgtttgttttactgttgagttttaatagttctttgtatattttggataacagtgctttaccagatatgtcttctctccccaaccatggcttgtcttttcattctcttaacagtgtcttttgcagagcagaagttttaaattttaataaggtctaatgtaccattttttttcctccatgaattgtgctgttgttgttgtatctaaaaagtcaaatccaagttttggcagttacaaataaagatgctgtaaacatcaat

SEQ ID NO: 265010 - DNA, 403 bp, Homo sapiens
ctggaagggcaatttttctaaaatgtaaatctcatgagatttactcttctgcttcagatctttccatggccctccattacccccaggataaagtctgaaatgatggttatggcccagaaacactgcagacctgaacttggcctacttcggatgccttgtttcccgtggctcttcctagggcctgtagctacactgatccactttgaagttctcgaataatctgcaacctctggcctttgtacctgcttctgtcacgtgtagtcttcctagttctcctccctcccacccctgacctaggtaacttttgatcattcttccaaatatattttaaaattcacttttaggggtccttcctcttgtctgacagacctgtgtgaactaccttagcgcctgcagccagaaa

SEQ ID NO: 265011 - DNA, 498 bp, Homo sapiens
ggaggggtgtactacctgttaggggtagactacccagacatcatggatatcttggtcatatgaaaatcctggtaacccaacaggaatgcttctcactatcttacctttaatgtagcataatgccctggcataaaacctctgccactggatggtcagggttcacatttcacctatccttttactattttgtcatgctatccaaagtcactgaacctcaggtagactcagccttttttttttttttgtaaatataacaataataactgtttcatagtgttttcacaaggattaattaaaatgtcgtaagcacacatctaggcacacactgagtactcaacaaatgttagttaacattgttattattgctgttgtcactttcatctattcctttaaagcatcaacaccttgttgttcacctcttttctttttcctccctttagtcttcttctttcacagaaatgatcagaagcctattacatttgctaaagtgctgatacc

SEQ ID NO: 265012 - DNA, 490 bp, Homo sapiens
tctcagcttctttatttattgaatagatactctaatgtccacactgctatgctcatctatctgtccatcatttatccatcttctagcatttaactttcactgttttacattttgcttataagagttactgatagctctcaaagaacataaagtatgtcacattcatctttatacctagagttcctaggccactattctaaacactttaaatgtattaaatcatttattcctcatgataccatgagaaaggtattctttttatccccacttacttcagacttaaggaggttatttgacaccagtcacaattacattaatggtgtcagatagatttgaacatagatatctggctccagagtccacgctcttaattaccatgctatacaagaaagcaacttaattttcttctcaaatccaggtgctgtttcagaatagattttcatatgtgtttttatctcgtttttctctttactctttagctcttgttttt

SEQ ID NO: 265013 - DNA, 462 bp, Homo sapiens
gtgaatgtaaacatacctgttaaaagataactcatgtgagttgtattatgttgaaaataaggaattgctatttgaccatttcgaactgcaaaactggcagtttcagtaaggttttaacctaatagatagctacccaatagatatctgacctaagcccagatttttaccttttgtggttctttcatcagctctttcttgattaagatgctaatttcacgttcaggggaagctgtgaaaagtcaaaagatggcaacaggtagatcagaaggctttgcagggaaggaaacaaggagacaggagctggggtcacaccagctagcaaaaccaggatctttattatgcagtcagtttagttgtaaagattcagcataaaacattttcctttcctaggtgggttaataggtggttgggtgcaacttcagctcttctgtagcctgctggagacaacttgtaagggacttt

SEQ ID NO: 265014 - DNA, 596 bp, Homo sapiens
taatattagaggggcaaacttttgtacgatatgggtatgaaaaattgttgggagtctactttttctctcttacctaatttgtcttagtctttttaaagcttagattttccaaatgagccatagcaaaatataatgtttaaaaatgtttaaattctaagcactatgtcatagttaaataacttaaaggtgctacatcttatacagtccaaaaggaacataattagtaaaattctacaatttagaaaaaaaaaatagctgacagtgactgatttataaaagtaaaatatcttttgttaatactaatattctttttataaattaattgacgacaaaaaattgagtgaatgagatttgcagttcatttatctatgatgctggtttatttaatctctataatttgctgtatttgaaagagcatagtgatagaggtcatgataaaatctaggcccagtgccacaagtaaatccctgtaggaactctcaaggttttgatttcatttctgaatgggaataacaccttccaagaattttatgaagattagttccgttctattacccacagagtaacaattactggggattttgcacacttgtaag

SEQ ID NO: 265015 - DNA, 252 bp, Homo sapiens
ttccagcatgatgtggcctgaaaattcatctgaagacagctgctcactcccagggctaacaccgccccttgcatgctgatgtccttgtagtcattggtctgatgccacaataaataattcctaaggctggtgctctatttctgccctgagactctcccctttttctccaagctgtgccccattccttgttttagtccaggttccctacactccccaggccaatgcttttgaataaatcttgacgtcattgaa

SEQ ID NO: 265016 - DNA, 462 bp, Homo sapiens
ctggcggttccgggagagaacctcctacaacaaacaccgccgaagtttccctctccagcgcgatcgccaatcccaggagcgcccggcgtcggggctgggaaggagccgagcggaaacctggaagtgagccgcggcgcaggcgaatcctgccggttgctggtggcagcgccaagagaccccgcacagaaagtgggctgggagtctcgcttgctgtacccgcacctaagtgctcagaagcggcctttcgctctgcagagggggggtcttagaagcttggggaagaagcacattgtttcggagttccttgttgcgttctttctccttgggaggagggaattgcacaaggaaaagaagagaagcctttactttgtaactgaaattctccagagttgagttgcgtcgtacagactcggtgcatattttaatacaaaactaagggaagaggccatttgatacttggct

SEQ ID NO: 265017 - DNA, 711 bp, Homo sapiens
  misc_feature (593)..(594): n is a, c, g, or t
  misc_feature (612)..(612): n is a, c, g, or t
  misc_feature (619)..(619): n is a, c, g, or t
tgagccggaccggatggcgacttttaaaaatgtaaaaaccattagctagagggccacacataaacagacaacagaccacagtttactgatgcctgacttagagcaatggaaaagggctggcagcattgactggtgactgctgcatgtagtgagactaaagatagtacaaaacctcaccaggtttgacgaaggcaactacctctccatctgacttgcccaagtcagctatagctgtggcagagaatttaatctggaaatgctaggcttatatctttgaaaaattagataaatgaagttgttggttttgtgtttgttttattttattttttttgagacagtctcactctctcttgcccaggcagccaccctgcagtgtcgtggtgtgatcttggctcactgcaacctccacctcctgggttcaagcaatcctcccacctcagcctcccgagtagccgggactacaggcgagcgccaccacgcccagctaacccttgtatttttagtagagaaggggcttcaccatgttggccagactggtcttgaactcctgacctcaggtgatccacccgccttggcctcccaaagtgtctttnngtctaatactgaaaagtngcaaganacgttaactctctaaaccagcgctgtccaatacagtaaccactagccacatgtggctaatgcgcacttgaaatggtccgcatccgggggacc

SEQ ID NO: 265018 - DNA, 508 bp, Homo sapiens
tgagccggaccggatggcgacttttaaaaatgtaaaaaccattagctagagggccacacataaacagacaacagaccacagtttactgatgcctgacttagagcaatggaaaagggctggcagcattgactggtgactgctgcatgtagtgagactaaagatagtacaaaacctcaccaggtttgacgaaggcaactacctctccatctgacttgcccaagtcagctatagctgtggcagagaatttaatctggaaatgctaggcttatatctttgaaaaattagataaatgaagttgttggttttgtgtttgttttattttattttttttgagacagtctcactctctcttgcccaggcagccaccctgcagtgtcgtggtgtgatcttggctcactgcaacctccacctcctgggttcaagcaatcctcccacctcagcctgggaggttgaagcggcagtgagcagtaatcgcgccactgcactccagcttgggtgacagagtgag

SEQ ID NO: 265019 - DNA, 300 bp, Homo sapiens
gggaaggaggagaaaggatgaaagatgaagaaggaagagaaagaagggtcaggagcggtggctcacgcctgtaatcccagcacttcgggagtctgaggcgggtggattgcttgagcctcaggaattcaagaccaccctgggccaatatggtgaaaccctgtctctactaaacaaaaaattgccgggcatggtggcaggcatctgttatcccagctacttgggaagctgaggcacaagaatcacttgagcccgggtggcgaaggttgcagtgagctgaggttgcaccactgcactccagcc

SEQ ID NO: 265020 - DNA, 287 bp, Homo sapiens
tggcggggtcagggctgggtgcctggtttctgttcacatttactcttggctgggccatccctgtcctcttcctcaggcagcgccccccctgtgagtttactcatacctcaggctggagacacaggtctttgtacacagtctccacgctgtggcagacttgtttgagctctgtctccaaatggctgatctttgccattttctgggtgaactcttggagcttttcctggatgatcttgttgtggtcattataaatctgatagatcctctcctctaatttctctgtcaga

SEQ ID NO: 265021 - DNA, 303 bp, Homo sapiens
tacgtgtgggagactcggagatgacgctccgccccgcacttagagtcttacaagtgagtttcccatgggaacagttcaaggaagaatcaaataagcaatttcacagagggacacacaggttgtcacagaagtgctgcaggctcctaggtgccccctcttttccatacgttattgccaaagtaagaactaggcttggtgtggtggctcgtgcctctaatcagcatgagggaggctgaggcaagaggatcactcgagccaggagttcgacaccagcttgggcaacacagtgacaccctgtctcta

SEQ ID NO: 265022 - DNA, 413 bp, Homo sapiens
cattctaaagccaattggtggtgatagtggcacaattttataaattgactagaagtcattgaattgtacacttgtagtgagtaaactttgtcatgtagagtattccttaataaagcggttgtttttttctttttaaaaaataacctgcaattttctattctgtcagaaaaaagtttcaaattttataaaggagcagtctctatgagcttttagaaatgggcggcacatgcctttgaccatatttttgtagctctatgtagcagaaatgaagtggtacgtatgaatgtatgttgggtttaacagtcacactcgctgaccctgaaagttttatccggatgtgaggagagtttgaatctaatacagtgatgaaggggagggaggaaaacttccaaaagtgatttaggaagtcttgt

SEQ ID NO: 265023 - DNA, 431 bp, Homo sapiens
gcttagcttctgactcatcttttacagcttgctgctgaacttaactattaacttaaggatttattgtacatttaatggtttttccatagaaaaccatggcttaagtttggaaattgaaagtaagtgacttccagccaagttgttcataaattttctctttgatacatcccttttggttcaaatacacagcaataatagataaagtacagaactgaaaataaaatagacaaagggcaactaaggacaaagataaacatcttaatgtgccgaagaaggatcaagactgttaagattaatggctaaagtgaagtcctgctagttttaaggatcaaggagaggaacagaaagtgtagctcagaactcagcatctgcaggatgaaggaactaaaactcctacagaaatggacatgaagccaaaagatgtctggtga

SEQ ID NO: 265024 - DNA, 445 bp, Homo sapiens
aaataaatgggaaataaaaggccataatgattggtcttcaggaagctgtaaggattgttcttcaggaactaatttttcttgctactttattgtgtggacaatataatgcctcacgtatctgttggcatagtccctagtttctctctgctgtacccattcttcacatattttctagcattctttcaagaggatcaggagtctttgcccagatacctgtttgggaaaaggaagaaagagagtaaaaaattaataattaaatcaattttggagttattctgcagatgacacacagcagctttcttagtgtaatggaaagccagcctggtattaagcatctaacctcacaaagaatggcagtaataaaaatatctcttcaattaaaaagccccacactttagtttcaactaccaagccttggaaatgtaataaaaaaaaaactgtgaaa

SEQ ID NO: 265025 - DNA, 585 bp, Homo sapiens
ctcaggtctcaccccaaatcagggtttgcattttaataagactcccagcttattctaatgcacattacagtttgtggactgctgctctcaaagatgaaatagaatggattgtgttcatttatttttaaattcatatgatcagtaacatttattcaggatatgcactggaagttaagatggtaccctagctcttgaagggctcccagtttagtgatggagacagatgtgtggaagagatgtgttcaaagtggtttgatgtgccaaggagtgtgcctaattctgcctgtggaactctcacaaggcttcatggaggttacatttgagtgttgagtctttataaggagtacaaatatgtttgagaggaaggaaaagtcttgcagcccatggaggtattacatgaaagcctgaaagaacatgaaatgtgcagaaaatgatgagatttcaagttactggaggccaaatgtgtgggtatattgcagcacctggggatgggcttaataaatgtagcaatgttttctgctccatctacatagtaggtgatcagtgaatacttgtgaaaagaatgaatgaaaaagaaaaaaaaag

SEQ ID NO: 265026 - DNA, 310 bp, Homo sapiens
tccccactctagttctgaatttaaagaaagaaaaaggtaggttagcaaatataggtatcagttatttctattgacagatcatttggagaacatgtttttgggcgtgggagaaaaaagattcctaactctccgccccagaaataattttgctgacacaaaaatcagccagacatggtggcacaggcctataatcccagctacttaggaggatgagtttgaggataaggatacattgtgaaaaaggtgggaaaatcacttgaacacaggaggcagagattgcagtgagccaagagtgtcccactgcactcca

SEQ ID NO: 265027 - DNA, 182 bp, Homo sapiens
tcttggcctatttcctcccaactaggtttcccccaacagatgagtccttttttattttctgccacttagaggcaatttttgggttcactcattcatttctttaacagacatttttgattacctattatgtgtcatatgaagtgttgagaatacaatggtgaataaaacaccactcattccct

SEQ ID NO: 265028 - DNA, 401 bp, Homo sapiens
tcggacgagaaaaaaattcctcctaccagtattaatggcaatatgagagactgacttattctccttggctttgattttgtggagaaaggtctctcatcatgcaggtttgagtttgaatagacataactgctctgaagggacattctctcaacctagtacgtgtagattcccacaggtaaaagcattgcttagaatgaatttacaattccacattagttaatcacttgtggattgtaatctcccctgaaccaataatgggagtaagaacaaatggagtgatcagacccttaggaacgctggataatagaacgagagtataaactaaatgattaaaggacggactgagaggcatgggcacactctccagaatggatgatcagatatgacttgttaggatgttg

SEQ ID NO: 265029 - DNA, 418 bp, Homo sapiens
gcaccaaagcccctgtggacactgatgtctgaaattggaactgactacagtggtcaacagatgctctgggacccctaccatagcctgggggacacaccagggactggggcttcagcaacaggaagagaccttcaaccacgggcttgtggttcatggggactcggacagaagcacacagtcactgtggggtgaaggtggagggacacagcaggggctggagagggcggggctgtcattgtgtgggcatcagggcaggcaactctgaggaggggggcactgtgcagggtccccatcattcacctgcaggaagaggggcagagctggcaggattccagccacatgctgggcgagcacgcgtgggaggacctgctctgctgctaccatcttgattttctttatttttgcttttatttcctta

SEQ ID NO: 265030 - DNA, 722 bp, Homo sapiens
agaaggaactaatttcaggataagcttaatacacggaaactcctagaataatgcctctagtgcataggaggctggtggcagctgtattcattattgtctaggttatctttagaaagaagtctagatgcaagcttgcttccccttcagagaggcccggtagttttgatggtaagagcacaagccacatgcttagttctggagccatcttgtgccatatctaaatcacgaagaacacaggatcacaaagctcttatctacacgcagtgtcatgtccttaggggttcaaaaaactgtattttaaaaatgctagacatcatagaaattcattcacaataatttggaatatagaacaatgttactcgaagcccgctgcctgctaatcttctgatgtgtgtgcttcctgtctgcaggcattttttaaaagcctgcttttaacacagttataaccattatgaataagtttgtatcctgccttttttcacttagagtaatgatataagcatttgaacatcaccacagactttataacattctttcaatacaggaatattcattcagctggatgtatcatgctgttcttaatttcttaactggtgtaaatcgaggtgtgataaacatgtgtctgctaaaactttttctgtgtttatgatgatttccttaatatctattttcaggtgtggaattactgggtcaaagattctgatcattaaaaatattttaag

SEQ ID NO: 265031 - DNA, 365 bp, Homo sapiens
tcaatggatgaatgaatgaatataggcggtaattaaagtcatggaatttacttttgcaatatagtcttacaaataactggcactcctagtccaaacacaacttttgttttcatttgtttgcctttcaagcaagttataattagaagacatattttaggtggaatggtaccttttatagtaatctttattgggtctcataaaaatgactgactcacaaatctcacagagtaagactaagcttgaataagaatttttacaactcaaggtataaacagttcatgttgctattttttttaaagtactagctaaaacattccctgtaggttcactctatttaatatgtgactagctagttaaaaaaaaaa

SEQ ID NO: 265032 - DNA, 366 bp, Homo sapiens
aatagccgggcgtggtggcaggcacctgtggtcccagctactcaggaggctgaggcaggagaatggcatgaacccgggaggtggagcttgcagtgagcagagatcgtgccactgcactccagcctgggcgacagagcgagactccgtcgcaaaaaaaaagacagtaatattggtgtagtggtaaataaattaaaccaataaatagaatagaaagccccaaaatacacccttatgaatgaggtgtgttcttggccattatgaataatgctgctataaacgtgggtggtcaaatatctttttgagagcctgttttccattcttttagatatatacccagaagtgggattgctagaccatgtgataata

SEQ ID NO: 265033 - DNA, 680 bp, Homo sapiens
agtggttccatctactgacctatgcatttgtaaaggaagtgaatttagtttatatcttgtcactctagccttcaatactcatctattccagtacgttttttttgtagtttccctgttttctgtccaaagttgccactggtatgacctatttttgttgggccctgctctctacctgttgataattggttcatttgatgaatatcctatgttaacctgttcaggtaacatacttctgcaacccatttaaaatgcatatccctggaaagggcttataaggatggatcttagtgctaggaattcccatttagctcaggatctatttttggctttgtccttgggagggattgctattatgttgaagtctggacatctggtctgggtttggatctttggtggctttttttatgaagagagatgtgctggaccagtacttaagattgttttggcaataatgattatgtcttattaggcaggtagaggtaaaactgttaagtaatagtgatttgtatattacaaaaaaaaaaaattgaaggcaactatctgcttttttggttagagatattagattaaataattctttgatgtttatccagatttttgtcttcaatttgcatgcagggttggtatattttgtaaaaacttaaattcatctaagaaatgcaaatgctaatgttcaccct

SEQ ID NO: 265034 - DNA, 467 bp, Homo sapiens
ttttaaaatcacatactttgccctgatatgccatggaaactaacaattgctatcctgggtatattacaagaacttctctctatttttttatatttgctttggaataaatatttgataaaacgagggcaattttcatagcaacttttcttgaagctttttaaaatgtaattaagcattttaaaatctatcagatatattcagaacatttcccaaattgttttcttaaagatcaattttgttcagatactttaggttctggggaaaagctattttctgtccactttgacacaaaaacattccttctagttttttaagaacacagtactttgttgagatgttggcttcttggtttatggcatgaattctaatcacttttaaacttctaacttttattctacacttagagttcaagcaaaatgacaatgatcaagtttataaaatataaaacttctatatgaaaagcgaga

SEQ ID NO: 265035 - DNA, 530 bp, Homo sapiens
atttgggttgtttccatttttttgcctattctgaataatgctgttataaacatttgtgcacaagtgtttgtatgaacacatgttttcatttctcctaggtgtttatctaggagtagaatgtcttggtcatatggtaacactatagattgttttccaaagtggctgcccatttcacattcccaccagtagtaggatttcaatttctctacatcttcaccaacacttgattacagccatcctaatggatgtgaagtggtatctgatgatggttttgatttgcatttccctaaaggctaacaatactgagactcttcatgtttcttagccatttgtatatctcctttggagaattatctactcaaatccgttgcctgctttttaattagattgcctttttattactgagttctgagagtttcttatacattatatatatacaatgggcttgttttcctatctctaggtctagaattatcctttccagaattctaaaattttctgatttcaaaatataatactcttgtgttcat

SEQ ID NO: 265036 - DNA, 435 bp, Homo sapiens
gtgggatatagtctcgtggtgcgccgttttttaagccggtctgaaaagcgcaatattcgggtgggagtgccccgattttccaggtgcgtccgtcacccctttctttgactcggaaagggaactccctgaccccttgcgcttcccaggtgaggcaatgcctcgccctgcttcggctcgcgcagggtgcgcgcacacactggcctgcgcccactgtctggcactccctagtgagatgaacccggtacctcagatggaaatgcagaaatcacccgtcttctgcgtcgctcacgctgggagctgtagaccggagctgtagaccggagctgttcctattcggccatcttggctcctcccaaatctccttttttcttatcttaatggggaaaattgcattttatatattaaacaataacatgtgtcttagataaacactta

SEQ ID NO: 265037 - DNA, 351 bp, Homo sapiens
gtgggtatgtattcttgttatttttgaatgtcttgtgaggaaactaaagcacagagatgtcccaggacttggcggttgtcacacagctaacagtttgcagtgctgggattcaggcctaggagatctggtttcattcatcagggcctgtgctaaatggtcgagtgaagaggctgtcagggaagagttggcctgttcagaacaggtggtcttataagacccctctgaggaggcaacatttgaaaaccagaataaaatgagagaggaagccacatggccacgtggagaaagagcaaacgaggtttcagcaaatgaaaagttttgtataaacgagattatacctggtattctgta

SEQ ID NO: 265038 - DNA, 625 bp, Homo sapiens
tctggctggaatgcccctttcacccttctcttctctggtttctattataaggaaatctagcacaaatctaaactcttgagttcaggagtaacacaggctggaatcgaattcaggctccacctcgtataaacggtgtcatcttaagcaagtcacttttctttgcatttcggtctcctcctttgtcacataaagaacacctgcctgattgtattaccatgggctaaactaattgaacacaaagcacatagcacagtatctgccacagagtaaatgctcactatatgctcaatagatatttttactataggcactcaaccttgacatctcagattagatacgtttccccagtgcccaggtccactttagatgttctttccaaggctcttgcagcaatccacagatgcctctatcataattctccttccatcattcaagtgcccaccttatcgctggcagttggtttatcatccctcacttggcgtgtaagcttctcaagattaggtatctgccttacacatttctgtttggccagaccagctccttaatatttaatatgtgatgacgtccagggttttaattttattaaacactgaaagagagcttgttaaaatttcacaatatgaca

SEQ ID NO: 265039 - DNA, 391 bp, Homo sapiens
ctcacttcctcccctgctttttaaaagtgaagccatatggaggacacctgcatttcttcccctaagctagttttggaaataaattactttctttataccagacttcacttttgttaattggactctgcaagcaacaagcgactaacctgcattttggttacattaccatgttttaggtgggacaaacttctaatatttcaaatgtaacacaaatatcaaaccagtaaagactttatttaggaaccaaacccaggctgccatggtggaaaaagggcagaaccttagctactgaactacagcatggggcaaccactattgctatttcagtttggcttggctagcaaagggttgttttgttatgtaaataaagcccttcaggtaattgaaatct

SEQ ID NO: 265040 - DNA, 555 bp, Homo sapiens
ccccaaactcctggcctcaagtgatcctcccacctcagcctcccaaagtgctgggattgcaggtgtcagcccccgctcctggtctacgtgccatcttttactcactcatctgggagccgttggaggcaggggacactccacccaatccccgaggccggggcttgtaagtgggggcaggtgcgctctgaggctccagaccttgtcagggtccctgccgccagcacactgctggggatccccctgcaggcacatcgggcttaaaaaggaaatacactatttcatgacttcacttcttttatttttagaacaagtgactcatctccaccacaggggctctgtgagctgctcccggacaggcttacagaggccaagcagggagtgagaggctcgagagggctgcagctgcccctgcccacactctgaggcccatgagtggctgagatgcaaggcagtcggtcgttcccactgacctgcccctccaaaatagcaagtctggagaagccgggcacctgcagaagaggtggctgcggcagagggtgcatccatctcgtcccg

SEQ ID NO: 265041 - DNA, 477 bp, Homo sapiens
agatgttcccatctaacataatccagctatctaccacattgtggtggattaaatatggccacacattctttgcaactctcccattatgaggtggagcctatttattcattcctttgacctggactgactttgtgacttgctttgaataaaggaatagaacagaagtgatgttgcataagttctggagtttaggcctcaagagagcttacagtttccaccatcgctctcttggaacattgtctaccatctaaggaagtcagtctatcctactggaggatgagagaccacatggataagaactgagaccctgagccaatggccagacaggtgaatgaggccatcttgaactttccacacatgcagttgcctgagaaagtccagatgagaccaacagaggaatggtctggaccttgattctgtacagccaacccacagaatcatgagaaataataaatcattgttttaagccacagagct

SEQ ID NO: 265042 - DNA, 1492 bp, Homo sapiens
  misc_feature (971)..(971): n is a, c, g, or t
gctaggaaagctcatctggcctcctgttcattggcctcctgttccagtgcttccaggggatccacgttcagaagctgactctgcaggcaagaccgacgttattttcctggtggctgtgttcaaaaccacccaaagggtttgagaaatactttaagaggagtggaaggaacacaaactgagaaacatcaacagcaccaaaaaaagagactggtgaactagagaatgctgagtctggaggagacggaggcaggagaggagggaagcaggataacgttgcctggtggaggcggatgcagaaggggggacttcccctgggatgacgaggatttccgcagtctggcccttttgggggcaggcgttgccatgggatttttctacctctattttcgagatcctggaagagaaatcacgtggaagcactttgtacagtattacctggccagaggtctggtggaccggctggaagtcgtgaacaaacaatctgtgcgtgttattcctgcccctgggacctcttctgaaacgtagctgggtgcgaagaatcaaattggaaattatggaatttgtgaatttcctgaagaatcccaagcagtatcaggacttaggagcaaaaattccaaagggagccatgctcactggtcctcctggtaccggcaagacccttcttgccaaagcaactgcaggggaggccactgtgcccttcatcactgtgaacgggtctgagttcctggaaatgtttattggcgttgggccagcaaggggttcaactctgccaccaacgtcgtggtgttggctggcaccaaccgccctgacgtcctggacccggccctcatgcggcctggccggtttcatcgccagatttacactggtcccccttacattaaaggcaggtcctccatctttaaggtccacctgcgcccactgaagctggacaagagcctcaataaggacaccctggcgaggaagctggcagngctcaccccaggcttccctggtgtccatcataccccagggcaaggggctccgctacgcacagtacctgccccgggagcagcagctctacacccaggagcagctcttcgaccgcacgtgcatgatgctcgggggccgggtagccgagcagctgtgctccgggtagatcactatgggggctcaggacgacctgaggaaggtcacccagagtgcctacgcccaggttgtgcagtttggggtgagtgagaagctgggccaggtgtccttcgacttttcccgacacggcaagaccctggtggagaagctgtacggcgaggcaagcgcccagctccttgatgacgaggtccggcacctcgtcagtgccacctacaggtgcaccctggacctgctgacacggtgccgggagcatgtggagaaggtgggccagcggctcctggagaaggaagtactggagaaggcagacatggtggagctgctgggcccccggcccttctcggagaagtctacctatgaggagtttgta

SEQ ID NO: 265043 - DNA, 1043 bp, Homo sapiens
  misc_feature (522)..(522): n is a, c, g, or t
gggggcctcttcggtgttggtgagacagcagccaagatcttaaaaagcaacatcgatgtgttatttgcagacgtagctgggtgcgaagaatcaaattggaaattatggaatttgtgaatttcctgaagaatcccaagcagtatcaggacttaggagcaaaaattccaaagggagccatgctcactggtcctcctggtaccggcaagacccttcttgccaaagcaactgcaggggaggccactgtgcccttcatcactgtgaacgggtctgagttcctggaaatgtttattggcgttgggccagcaaggggttcaactctgccaccaacgtcgtggtgttggctggcaccaaccgccctgacgtcctggacccggccctcatgcggcctggccggtttcatcgccagatttacactggtcccccttacattaaaggcaggtcctccatctttaaggtccacctgcgcccactgaagctggacaagagcctcaataaggacaccctggcgaggaagctggcagngctcaccccaggcttccctggtgtccatcataccccagggcaaggggctccgctacgcacagtacctgccccgggagcagcagctctacacccaggagcagctcttcgaccgcacgtgcatgatgctcgggggccgggtagccgagcagctgtgctccgggtagatcactatgggggctcaggacgacctgaggaaggtcacccagagtgcctacgcccaggttgtgcagtttggggtgagtgagaagctgggccaggtgtccttcgacttttcccgacacggcaagaccctggtggagaagctgtacggcgaggcaagcgcccagctccttgatgacgaggtccggcacctcgtcagtgccacctacaggtgcaccctggacctgctgacacggtgccgggagcatgtggagaaggtgggccagcggctcctggagaaggaagtactggagaaggcagacatggtggagctgctgggcccccggcccttctcggagaagtctacctatgaggagtttgta

SEQ ID NO: 265044 - DNA, 204 bp, Homo sapiens
aagatgagaaaacttaaaagaaactataattaatactttcaaataattaagacattgcattcatgaaacaggaataggatgcttataaaagaaacattcagagaatgaccatcaataacaatagcatatattaaaagaacaataaaaaggttagaagataaagttgaggacatttccaagaaagtagaaaacaataagagatgc

SEQ ID NO: 265045 - DNA, 359 bp, Homo sapiens
tctttgggtgaggagtccagtcacatttagctgggtcctttgcaaggcgctgtaatcaaggtgttggttagggccaaggtcttatcagaagctcaattagggaaggatctgcttccaagcccatgtgattgttgacagatttagttgctttcacatagccttctttataggtagttcacattcatgacagcttcttcaaagccagtaaggaagagagggtcttctggtaagaaggacattatattcttgtggaatgtaatcatacatacgctgtcacctttgccatattctgttggttagaaggaagtgataggtcatactcatactcaagcagggagaattacccaatggtttgaata

SEQ ID NO: 265046 - DNA, 328 bp, Homo sapiens
ctactatattttgttggatcatatgaatagaagacaaatcttcaagtctgaacaaagaaaacaccttgataagttcagagctgatatgatactgtctaactcattattaccatcaattatccctgaaactactgagattgatatatgctatgtaattgggccttattcctggcagaccatgtcaaactcaaacctttaccatcagagtgaacagggaacctacagaatgggagaaaatttttgtaatctactcatctgacaaagggctaatatccagaatctacaaagaactcaaacaaatttacaagaaaaaaacaaacaaccccat

SEQ ID NO: 265047 - DNA, 281 bp, Homo sapiens
  misc_feature (245)..(245): n is a, c, g, or t
gggaggggccggtgcaaggcgaggggccagtgtgaggcaaggggctcacaccgacctttgtcagcgtgggaggggccagtgtgaggcgaggggccagtgtgaggcaaggggctcatgcggacctctctcagcatgggaggggccggtgtgaggcaaggggctcacgccgacctctcagcgtgggaggagccagtgtgaggcagggactcacactgacctctcccagcgtgggaggggccggtgtnaggcaaggggctcacgctgacctctctcagcccggg

SEQ ID NO: 265048 - DNA, 474 bp, Homo sapiens
caccctccaccactgccccgtaaggccactggacacgcagcccatcagttctcttcacgtggtcatccccctttagatgggagaaaatacacctgcctcatttttgtaccttctgtgtggacattccatgacagagcttcactaaatgtatgatgaagaacgaatgaatgaatgaatgaatgaatgaatatgagagcaaatgaatgaatggctcagatcctgggctggaaggctgtgtatgaggatggtgggtagaggagggtctgtttttcttgcctttaagtcattacttgtcattttggggcaggagcacaggctttgaatgccgactgactggactttaatcctggctttactagctgtgattgtgtgacctcgtacatgttacttaaaccctctgtgcctgtttctttatctgtaaaatggagacaataagatgacaaaggactgtggtaagaattaaatgctttaaaa

SEQ ID NO: 265049 - DNA, 3351 bp, Homo sapiens
gggcgccccgtcggccgccggcttcctccttgaaacccgccggcgcacatgaggccgctgcccccgccgcaggcgctggcggccccctcgcggtgcccgtggtgatgccatgccccgccaccacgcgggaggagaggagggcggcgccgccgggctctgggtgaagagcggcgcagcggcggcggcggcgggcggggggcgcttgggcagcggcatgaaggatgtggagtcgggccggggcagggtgctgctgaactcggcagccgccaggggcgacggcctgctactgctgggcacccgcgcggccacgctcggtggcggcggcggtggcctgagggagagccgccggggcaagcagggggcccggatgagcctgctggggaagccgctctcttacacgagtagccagagctgccggcgcaacgtcaagtaccggcgggtgcagaactacctgtacaacgtgctggagagaccccgcggctgggcgttcatctaccacgctttcgtttttctccttgtctttggttgcttgattttgtcagtgttttctaccatccctgagcacacaaaattggcctcaagttgcctcttgatcctggagttcgtgatgattgtcgtctttggtttggagttcatcattcgaatctggtctgcgggttgctgttgtcgatatagaggatggcaaggaagactgaggtttgctcgaaagcccttctgtgttatagataccattgttcttatcgcttcaatagcagttgtttctgcaaaaactcagggtaatatttttgccacgtctgcactcagaagtctccgtttcctacagatcctccgcatggtgcgcatggaccgaaggggaggcacttggaaattactgggttcagtggtttatgctcacagcaaggaattaatcacagcttggtacataggatttttggttcttattttttcgtctttccttgtctatctggtggaaaaggatgccaataaagagttttctacatatgcagatgctctctggtggggcacaattacattgacaactattggctatggagacaaaactcccctaacttggctgggaagattgctttctgcaggctttgcactccttggcatttctttctttgcacttcctgccggcattcttggctcaggttttgcattaaaagtacaagaacaacaccgccagaaacactttgagaaaagaaggaacccagctgccaacctcattcagtgtgtttggcgtagttacgcagctgatgagaaatctgtttccattgcaacctggaagccacacttgaaggccttgcacacctgcagccctaccaagaaagaacaaggggaagcatcaagcagtcagaagctaagttttaaggagcgagtgcgcatggctagccccaggggccagagtattaagagccgacaagcctcagtaggtgacaggaggtccccaagcaccgacatcacagccgagggcagtcccaccaaagtgcagaagagctggagcttcaacgaccgaacccgcttccggccctcgctgcgcctcaaaagttctcagccaaaaccagtgatagatgctgacacagcccttggcactgatgatgtatatgatgaaaaaggatgccagtgtgatgtatcagtggaagacctcaccccaccacttaaaactgtcattcgagctatcagaattatgaaatttcatgttgcaaaacggaagtttaaggaaacattacgtccatatgatgtaaaagatgtcattgaacaatattctgctggtcatctggacatgttgtgtagaattaaaagccttcaaacacgtgttgatcaaattcttggaaaagggcaaatcacatcagataagaagagccgagagaaaataacagcagaacatgagaccacagacgatctcagtatgctcggtcgggtggtcaaggttgaaaaacaggtacagtccatagaatccaagctggactgcctactagacatctatcaacaggtccttcggaaaggctctgcctcagccctcgctttggcttcattccagatcccaccttttgaatgtgaacagacatctgactatcaaagccctgtggatagcaaagatctttcgggttccgcacaaaacagtggctgcttatccagatcaactagtgccaacatctcgagaggcctgcagttcattctgacgccaaatgagttcagtgcccagactttctacgcgcttagccctactatgcacagtcaagcaacacaggtgccaattagtcaaagcgatggctcagcagtggcagccaccaacaccattgcaaaccaaataaatacggcacccaagccagcagccccaacaactttacagatcccacctcctctcccagccatcaagcatctgcccaggccagaaactctgcaccctaaccctgcaggcttacaggaaagcatttctgacgtcaccacctgccttgttgcctccaaggaaaatgttcaggttgcacagtcaaatctcaccaaggaccgttctatgaggaaaagctttgacatgggaggagaaactctgttgtctgtctgtcccatggtgccgaaggacttgggcaaatctttgtctgtgcaaaacctgatcaggtcgaccgaggaactgaatatacaactttcagggagtgagtcaagtggctccagaggcagccaagatttttaccccaaatggagggaatccaaattgtttataactgatgaagaggtgggtcccgaagagacagagacagacacttttgatgccgcaccgcagcctgccagggaagctgcctttgcatcagactctctaaggactggaaggtcacgatcatctcagagcatttgtaaggcaggagaaagtacagatgccctcagcttgcctcatgtcaaactgaaataagttcttcattttctttccaggcatagcagttctttagccatacatatcattgcatgaactatttcgaaagcccttctaaaaagttgaaattgcaagaatcgggaagaacatgaaaggcagtttataagcccgttaccttttaattgcatgaaaatgcatgtttagggatggctaaaattccaaggtgcatcgacattaacccactcatttagtaatgtaccttgagttaaaaagcctgagaaaccaaacacagctaatgctatggggtgtatgaatatgtcaagtttaggtcatttagaagatttgacactgtattttgaaattatgggagtaaacaccttcaaatttcaggcatttctgctttgtgactaaatacaaactacattttcaagattaggccataatgtatatttaaacacaatggctatcaacagctgctaata

SEQ ID NO: 265050 - DNA, 3324 bp, Homo sapiens
gggcgccccgtcggccgccggcttcctccttgaaacccgccggcgcacatgaggccgctgcccccgccgcaggcgctggcggccccctcgcggtgcccgtggtgatgccatgccccgccaccacgcgggaggagaggagggcggcgccgccgggctctgggtgaagagcggcgcagcggcggcggcggcgggcggggggcgcttgggcagcggcatgaaggatgtggagtcgggccggggcagggtgctgctgaactcggcagccgccaggggcgacggcctgctactgctgggcacccgcgcggccacgctcggtggcggcggcggtggcctgagggagagccgccggggcaagcagggggcccggatgagcctgctggggaagccgctctcttacacgagtagccagagctgccggcgcaacgtcaagtaccggcgggtgcagaactacctgtacaacgtgctggagagaccccgcggctgggcgttcatctaccacgctttcgtttttctccttgtctttggttgcttgattttgtcagtgttttctaccatccctgagcacacaaaattggcctcaagttgcctcttgatcctggagttcgtgatgattgtcgtctttggtttggagttcatcattcgaatctggtctgcgggttgctgttgtcgatatagaggatggcaaggaagactgaggtttgctcgaaagcccttctgtgttatagataccattgttcttatcgcttcaatagcagttgtttctgcaaaaactcagggtaatatttttgccacgtctgcactcagaagtctccgtttcctacagatcctccgcatggtgcgcatggaccgaaggggaggcacttggaaattactgggttcagtggtttatgctcacagcaaggaattaatcacagcttggtacataggatttttggttcttattttttcgtctttccttgtctatctggtggaaaaggatgccaataaagagttttctacatatgcagatgctctctggtggggcacaattacattgacaactattggctatggagacaaaactcccctaacttggctgggaagattgctttctgcaggctttgcactccttggcatttctttctttgcacttcctgccggcattcttggctcaggttttgcattaaaagtacaagaacaacaccgccagaaacactttgagaaaagaaggaacccagctgccaacctcattcagtgtgtttggcgtagttacgcagctgatgagaaatctgtttccattgcaacctggaagccacacttgaaggccttgcacacctgcagccctaccaatcagaagctaagttttaaggagcgagtgcgcatggctagccccaggggccagagtattaagagccgacaagcctcagtaggtgacaggaggtccccaagcaccgacatcacagccgagggcagtcccaccaaagtgcagaagagctggagcttcaacgaccgaacccgcttccggccctcgctgcgcctcaaaagttctcagccaaaaccagtgatagatgctgacacagcccttggcactgatgatgtatatgatgaaaaaggatgccagtgtgatgtatcagtggaagacctcaccccaccacttaaaactgtcattcgagctatcagaattatgaaatttcatgttgcaaaacggaagtttaaggaaacattacgtccatatgatgtaaaagatgtcattgaacaatattctgctggtcatctggacatgttgtgtagaattaaaagccttcaaacacgtgttgatcaaattcttggaaaagggcaaatcacatcagataagaagagccgagagaaaataacagcagaacatgagaccacagacgatctcagtatgctcggtcgggtggtcaaggttgaaaaacaggtacagtccatagaatccaagctggactgcctactagacatctatcaacaggtccttcggaaaggctctgcctcagccctcgctttggcttcattccagatcccaccttttgaatgtgaacagacatctgactatcaaagccctgtggatagcaaagatctttcgggttccgcacaaaacagtggctgcttatccagatcaactagtgccaacatctcgagaggcctgcagttcattctgacgccaaatgagttcagtgcccagactttctacgcgcttagccctactatgcacagtcaagcaacacaggtgccaattagtcaaagcgatggctcagcagtggcagccaccaacaccattgcaaaccaaataaatacggcacccaagccagcagccccaacaactttacagatcccacctcctctcccagccatcaagcatctgcccaggccagaaactctgcaccctaaccctgcaggcttacaggaaagcatttctgacgtcaccacctgccttgttgcctccaaggaaaatgttcaggttgcacagtcaaatctcaccaaggaccgttctatgaggaaaagctttgacatgggaggagaaactctgttgtctgtctgtcccatggtgccgaaggacttgggcaaatctttgtctgtgcaaaacctgatcaggtcgaccgaggaactgaatatacaactttcagggagtgagtcaagtggctccagaggcagccaagatttttaccccaaatggagggaatccaaattgtttataactgatgaagaggtgggtcccgaagagacagagacagacacttttgatgccgcaccgcagcctgccagggaagctgcctttgcatcagactctctaaggactggaaggtcacgatcatctcagagcatttgtaaggcaggagaaagtacagatgccctcagcttgcctcatgtcaaactgaaataagttcttcattttctttccaggcatagcagttctttagccatacatatcattgcatgaactatttcgaaagcccttctaaaaagttgaaattgcaagaatcgggaagaacatgaaaggcagtttataagcccgttaccttttaattgcatgaaaatgcatgtttagggatggctaaaattccaaggtgcatcgacattaacccactcatttagtaatgtaccttgagttaaaaagcctgagaaaccaaacacagctaatgctatggggtgtatgaatatgtcaagtttaggtcatttagaagatttgacactgtattttgaaattatgggagtaaacaccttcaaatttcaggcatttctgctttgtgactaaatacaaactacattttcaagattaggccataatgtatatttaaacacaatggctatcaacagctgctaata

SEQ ID NO: 265051 - DNA, 849 bp, Homo sapiens
gggcgccccgtcggccgccggcttcctccttgaaacccgccggcgcacatgaggccgctgcccccgccgcaggcgctggcggccccctcgcggtgcccgtggtgatgccatgccccgccaccacgcgggaggagaggagggcggcgccgccgggctctgggtgaagagcggcgcagcggcggcggcggcgggcggggggcgcttgggcagcggcatgaaggatgtggagtcgggccggggcagggtgctgctgaactcggcagccgccaggggcgacggcctgctactgctgggcacccgcgcggccacgctcggtggcggcggcggtggcctgagggagagccgccggggcaagcagggggcccggatgagcctgctggggaagccgctctcttacacgagtagccagagctgccggcgcaacgtcaagtaccggcgggtgcagaactacctgtacaacgtgctggagagaccccgcggctgggcgttcatctaccacgctttcgtttttctccttgtctttggttgcttgattttgtcagtgttttctaccatccctgagcacacaaaattggcctcaagttgcctcttgatcctggagttcgtgatgattgtcgtctttggtttggagttcatcattcgaatctggtctgcgggttgctgttgtcgatatagaggatggcaaggaagactgaggtttgctcgaaagcccttctgtgttataggtgaatatcagagtctcagatacctggactatgacaccaacattcttgtcttctatctcctgttttgcaatatttgattaatattaaaagctaacatccatggagtacttatcatggaccgggc

SEQ ID NO: 265052 - DNA, 916 bp, Homo sapiens
gggcgccccgtcggccgccggcttcctccttgaaacccgccggcgcacatgaggccgctgcccccgccgcaggcgctggcggccccctcgcggtgcccgtggtgatgccatgccccgccaccacgcgggaggagaggagggcggcgccgccgggctctgggtgaagagcggcgcagcggcggcggcggcgggcggggggcgcttgggcagcggcatgaaggatgtggagtcgggccggggcagggtgctgctgaactcggcagccgccaggggcgacggcctgctactgctgggcacccgcgcggccacgctcggtggcggcggcggtggcctgagggagagccgccggggcaagcagggggcccggatgagcctgctggggaagccgctctcttacacgagtagccagagctgccggcgcaacgtcaagtaccggcgggtgcagaactacctgtacaacgtgctggagagaccccgcggctgggcgttcatctaccacgctttcgtttttctccttgtctttggttgcttgattttgtcagtgttttctaccatccctgagcacacaaaattggcctcaagttgcctcttgatcctggagttcgtgatgattgtcgtctttggtttggagttcatcattcgaatctggtctgcgggttgctgttgtcgatatagaggatggcaaggaagactgaggtttgctcgaaagcccttctgtgttataggagtcaggaattgttgcgtaatcttctcagtttcctcccttactcctgttccctatggtgggggcagagtggatttaaggaagaaagtgtatcaccatccatgggcactgttaagaagaatcctttattccatacttctttcatagtatgcacatctcaaaagtctccacttattaaaccagaatttatgg

SEQ ID NO: 265053 - DNA, 359 bp, Homo sapiens
ctgagagactgattgtctcaagcctcatagccactattaggggaagccagggtttgagcccatctgtgtgacatgtgataaattatcatataggaggaaaaaattagtagtgataatactgatctccagacaaagcaaaaacctcctatgaagaaaccttagcttctcatgtctaccctgagctaatttcctgacctgaggttgtttttcagatgacaactggatgggtggaaagaatgttaacacatcactcattgaatattatctagccacatcctcgtaagtcccttctgtagatggccttatctgctgttttatcctgtggatctaactctgtttgaactttgagaataattaaa

SEQ ID NO: 265054 - DNA, 391 bp, Homo sapiens
tgaggcccagcccactggagaggcatatcccataatccgctcattcatatggaaattcattatttttcaccctccaggtgcccattttagtcagaaatcatttgtatggctatggaatcacttcgtcactgggcttgactatgccaaggtcacaaagttaaattagtaccacagtcgagaggtaactcaagggcaatttgttccactttgcttgctcttctctactgagctggcctccaagagtcatttactcgagtttgtctctcctgtccccaaaagtggtagtgacctgctttgtgacatcccacaaagagcctccggctctagcaatgggagggtagagtgaacagaactgggtttagaacctcactctggcacttgccagtttcta

SEQ ID NO: 265055 - DNA, 384 bp, Homo sapiens
cagaacagtgcctggcccacatttaacacagtcgaattgttaactgtaatcatgaaagaaaagcacagagcgttctgagagcccatagcaggtagctcaagcctgaaggccactctgaccaggccaagtcaaacctgaaactggaggctgtggttttgtagtcacctctgtcttccctgaggggaagctgaggctcagagaggtggaaccatgggtgaacctttagctgtgccctgtgccttgctcctgatcacagggacttggatgccacagtggcttcaggtctgccctggggccagcattgtgattccacagtttgtagaggccccaaccctctccccaggaagtactctgcctagtcagggagagtggtgcatctgtttt

SEQ ID NO: 265056 - DNA, 417 bp, Homo sapiens
cccgttttcctccaagatgcttctgtcagttgattttggtctctatcttgcatcgttagagactttccacagttgtcttggttgtcctctcaggtgtaagggtggagattaaacagctggctctgaacatgtgagtggggcttattcactatgagatttgctgtgggatgatctgagtgggccagtatcactgtctttcctcctttcccatgggaatagtcagatttctcagtatgcttcccctgtcctgtctggagggcagtgttctgggaatgaggggctggtgtcaggtacagaagaggtcttccagtttggcatgcatatagtaatcatctatttttggtaagggacacctcttctacaataatgcctagcattcctaggaccagagactttttgctaaactttgcttgagaa

SEQ ID NO: 265057 - DNA, 474 bp, Homo sapiens
ttactccggttgcccacactgcctagcaatccttgaaccaggatgccttcaaagcattccttgggagattccagaaccattccacctcgttaccctcccccaagaaggggatgttttatataaagaaaaaaaacaatttttgtgttgcccatcctccctacctcaatgacttcctagagggcaacagaatggccaggtgagagctgctgtggggttagaactggaaagaatcagatctaatttaacatccttgttttcagatcatggaacccgaggtccagagaggtcaaggggcagctacttgatcccccacttagtctgtgtttccaccacaccacattgggacatagcccatgagcctgtccacagggaaccccagtcagagcttcatccccagtcagggacaaagacttggaacattccggtcctggccccctctacagctaataaaaacctttgggcaactcctttaaa

SEQ ID NO: 265058 - DNA, 608 bp, Homo sapiens
gagaagtcgggttgaaaggtgtgtcgtttgcgtcctggatctcccttaatttaaccccataacattccattttacagataaggagactgatgctcactaagacactaatatgcccactcacacagcaagtcccaagtctctccccaaaatgatttgagaattttgaggcacacaaaagggagaaaattgagtgcccgtgatccaacgttctgcaactgtttggaaaccaggaaagtggaggagtggtagtacttctgaaccctaactaaaatatatcagcctgcaccatcagcacagcttgcagatgaatgtaatggccaggctattaaaactgaagtgaagtgaagaagttacaactgagttcgaattctgactcctccacagattagccatgtgagctgggaccctcagcaaattttttgagcctcaggttccttatctgtaaaagggtagtgataatgatggttattaaatgcttatgacgcatgaaacagttctatggggtaggttctgttattaccgtcctttaaagatgagcatcctgtggtttcagtaacttgctcaagattgcaaagctactaaataaaagccttctaaatttgaaccca

SEQ ID NO: 265059 - DNA, 383 bp, Homo sapiens
ccagaaggaatgcagaaagaatgatcagagagatgagaagattgattggtagaccagaaggtgataagagactaggagaaaatgtttcagaaaattaagagtaggctgggtgtggtagctcacgccagtaatcctagcactttgagaggccgaggcaggcagattgcttgagcccaccttggcccccagagtttgaaaccagcctgagcaatagggcaaaacactgtctctacaaaaattagctgagtgtggtggcacacctatagacccagctatccaggaggctagggtgggagcatcacctgagctcagggaagttggctgcagtgagccatgattgtaccactgcaccccagcctgggtgaccttgtctcaaaaaaaaa

SEQ ID NO: 265060 - DNA, 531 bp, Homo sapiens
cacaaatgtagcatgcctataaaatggaatgaatgacatatatactacagcatagacaggcctcaaaaatgttatgcgaaatgaaagaagccagatgtaaacagcttatttatattgtatgattctgttatattccattatcacaaaagggaaaactagagatgtagaaagcatatcagcagtcacttggaactgtcagtgggagaataattaactgaaaatgagcacaagataaattttttgaaataaaggaagtgttctaagacaagacagagttaatatttgcagaatagtataaatttactaaaacaaatgtacacttaaagtgaatgggccgggcatgatggctcatgcctgtaaacccagcacaatgggaggccaaagtaggaggatcactcgagcccaggaattcaagagcagcctatgcaatacagtgagacctcatcttaacaaaaaatcagaaaattagccaggcatggtggcgtgcacccatagtctcagctactcaggaggatttcttgagccctggag

SEQ ID NO: 265061 - DNA, 377 bp, Homo sapiens
caccacacatgggcaacacaattgctgtctctcatacgagtgttatcacattccaggacttaatttttctggttctcatgagttgagccagtggctacttggtgattttccttcacagacaccagaaaaataatccacatcttcacaacaacagctgttcctctatagcctcccatgagaccggaaccatcacgactgcgctgctgcttatgatttgcttcgttgtatttaatgtgagcaactcgtgccacagcatttacctaagtacggtgaagaaaagggatcagttgtggaccatctcagatttgatttcctcatgttaccccattttttggtccatttttgctcattggtagagaaagtcttatcctgaattc

SEQ ID NO: 265062 - DNA, 388 bp, Homo sapiens
gataaattggaaggaaaaagggcttaaagcaggtttgtaagtctgcaggactaattccattcagttctgagacttgaaaatagttctctgtggcttgatattctgttctctaggcccactggcatggccttaccccttggtcctgggttggcagcctgccctttttttttttcttatgactacttagttcctgttttgttttgttttgtttttctacctttttaatcttaagtacagatgcttcttaagttatgagcagattacattctggtaaggcaagaggattatttgagcccaggattttgaggctttagtgcgtgattattgcacctgtgaacagccacttcactgcagcctaggcaatatagtgagaccccatctctttaaa

SEQ ID NO: 265063 - DNA, 336 bp, Homo sapiens
cattttagaactttttattaataagcaattctgagtgaattaagtagaaatcttcatttttatgattctcccctttagctaacattttttaggataccaagcaatgttctaaatacttcacatgtactgactcacttaattctcttaacatctctttgtaactggtactatttatccccattttacatgcacagagaggttcagtaacctatcaaaggccatacaagtaaagagtggataagctaaaatttgaagctaaatagtttttggttctggaacttgcactgtatgttgactgcatcagataggaaggctttattttatcatattatttta

SEQ ID NO: 265064 - DNA, 571 bp, Homo sapiens
gtcttcgcttccccatgccgcctccgcccagccttggggttgtctgctgggaaggcagagggcaggggtggggacctcaagtcatctcctccaggacaggccactccctgacaccctcagggtgaggaggagggtggggcgcacactgtctgtgagtcacagagcttccctctcccctgtgccggggcagcactctgggccccatcccatgtctagacacagggagaggatggtggccagcagatcaccctactccaggccaccctctgctctccagcctccttttcctcctggggtcctgtcctttggaggataaccactcacagcccccaggaagtcatcgctcagccgctggttaggaaaccaacaaagcatatggccaggctgagggcagtaagcgtcgaatgagtggaacggctgaccgcccacccatgcattcaagggcgtaatctccacggtaatgctgctgattaataggtccagattgctgggcgtggtgactcacgcctgtaatcccagcactttggaaggccaaggtgggcggatcacctgaggtcaggagtttgagacc

SEQ ID NO: 265065 - DNA, 412 bp, Homo sapiens
cctaaaaatgatttagaattaataaccacagaagtgtcttttctcccatgtaacatcatgtggcacattaatgtcccatggagcacattttgggaaatattcctttgaactactgatgccaagggcatcttagacttcctttaccatgtactgtcatggcagagtgtataattaagaatgggctcccacattcttcagagtctgtaccctttctttgcagtctgtaaagagagaaaagtcaggacaaatatattagaatgcagccctagtccattagttccatttgaagtcaccatggttgatggaatatgtcataactgtccttataagcaaggatatccagctcaccttttgttaggcttgataggaaccaagagggttcaagctgagggaaagaaagcctaatgctatt

SEQ ID NO: 265066 - DNA, 399 bp, Homo sapiens
aatgttaaatgataagcccaaagtctcctagcgtggaaacttgttgagacagcaggaagtttcacagagttctagactgttagaatgtgaagagcctggaaatcatcatgctgctaacatcattgaagaggaagaaaccagagctagaagttgagtcacttccccaagttcccacacagggtttctagaactggaaccacaaccaagtttcctggctctgaggtcagttgtctttctctactgcatcacagagcagggacgccgtcacgggggtgttgagacattaagtgagctggatcagacaagaatatatccatgtttaccttcgccttataacttatgtagtcatctgtgtcctggaactaagtaattcaattgctaaaacgttgaaagttctct

SEQ ID NO: 265067 - DNA, 1579 bp, Homo sapiens
actctgggcgaggccgcccctatcccagccgcaccggtccttcccggcacacgcgaggctcccatggctctggcggtggccccgtgggggcgacagtgggaagaggcccgcgccctgggccgggcagtcaggatgctgcagcgcctagaagagcaatgcgtcgacccccggctgtccgtgagtcccccttcgctgcgggacctgctgccccgcacagcgcagctgcttcgagaggtggcccattctcggcgggcggccggcggaggcggccccgggggtcccggcggctctggggactttctactcatctacctggccaatctggaggccaagagcaggcaggtggccgcgctgctgcctccccggggccgaaggagtgccaacgacgagctcttccgggcgggctccagactcaggcgacagctggccaagctggccatcatcttcagccacatgcacgcagagctgcacgcactcttccccgggggaaagtactgtggacacatgtaccagctcaccaaggcccccgcccacaccttctggagggaaagttgcggagcccggtgtgtgctgccctgggctgagtttgagtccctcctgggcacctgccaccctgtggaaccaggctgcacagccctggccttgcgcaccaccattgacctcacctgcagcgggcacgtgtccatcttcgagttcgacgtcttcaccaggctctttcagccatggccaacactcctcaagaactggcagctcctggcagtcaaccacccaggctacatggccttcctcacctatgatgaggtccaagagcgtctgcaggcctgcagggacaagccaggcagttacatcttccggcccagctgtactcgcctggggcagtgggccatcggctatgtgagctcagatggcagcatcctgcagaccatccctgccaacaaacccctgtcccaggtgctcctggagggacagaaggacggcttctacctctacccagatggaaagacccacaacccagacctgactgagctcggccaggcagaaccccagcagcgcatccacgtgtcagaggagcagctgcagctctactgggccatggactccacatttgagctctgcaagatctgtgctgagagcaacaaggatgtgaagattgagccgtgcgggcacctgctctgcagctgctgcctggctgcctggcagcactcggacagccagacctgccccttctgccgctgcgagatcaagggctgggaggccgtgagtatctaccagttccacggtcaggctactgctgaggactcagggaacagcagtgaccaggaaggcagggagttggagctggggcaggtgcccctttcggctcctccattgcccccacggccagatctgccccccaggaagcccagaaatgcccagccgaaagtgagactcctaaaggggaactcccctccagctgcgctgggaccccaggaccctgccccggcctgaaggccagggcacccagatgtgctgctcaagggagccccaagggctggaagggggttgtgaaaccgaaataaactgccaagcctggtctgtc

SEQ ID NO: 265068 - DNA, 1505 bp, Homo sapiens
tgccagtagagctcggtgtgaatcggccgaggcccgcgccctgggccgggcagtcaggatgctgcagcgcctagaagagcaatgcgtcgacccccggctgtccgtgagtcccccttcgctgcgggacctgctgccccgcacagcgcagctgcttcgagaggtggcccattctcggcgggcggccggcggaggcggccccgggggtcccggcggctctggggactttctactcatctacctggccaatctggaggccaagagcaggcaggtggccgcgctgctgcctccccggggccgaaggagtgccaacgacgagctcttccgggcgggctccagactcaggcgacagctggccaagctggccatcatcttcagccacatgcacgcagagctgcacgcactcttccccgggggaaagtactgtggacacatgtaccagctcaccaaggcccccgcccacaccttctggagggaaagttgcggagcccggtgtgtgctgccctgggctgagtttgagtccctcctgggcacctgccaccctgtggaaccaggctgcacagccctggccttgcgcaccaccattgacctcacctgcagcgggcacgtgtccatcttcgagttcgacgtcttcaccaggctctttcagccatggccaacactcctcaagaactggcagctcctggcagtcaaccacccaggctacatggccttcctcacctatgatgaggtccaagagcgtctgcaggcctgcagggacaagccaggcagttacatcttccggcccagctgtactcgcctggggcagtgggccatcggctatgtgagctcagatggcagcatcctgcagaccatccctgccaacaaacccctgtcccaggtgctcctggagggacagaaggacggcttctacctctacccagatggaaagacccacaacccagacctgactgagctcggccaggcagaaccccagcagcgcatccacgtgtcagaggagcagctgcagctctactgggccatggactccacatttgagctctgcaagatctgtgctgagagcaacaaggatgtgaagattgagccgtgcgggcacctgctctgcagctgctgcctggctgcctggcagcactcggacagccagacctgccccttctgccgctgcgagatcaagggctgggaggccgtgagtatctaccagttccacggtcaggctactgctgaggactcagggaacagcagtgaccaggaaggcagggagttggagctggggcaggtgcccctttcggctcctccattgcccccacggccagatctgccccccaggaagcccagaaatgcccagccgaaagtgagactcctaaaggggaactcccctccagctgcgctgggaccccaggaccctgccccggcctgaaggccagggcacccagatgtgctgctcaagggagccccaagggctggaagggggttgtgaaaccgaaataaactgccaagcctggtctgtc

SEQ ID NO: 265069 - DNA, 923 bp, Homo sapiens
cgaaacgtgccgtcagttacaaatgtgagccaccgtgcccgccctcaaaataaaaatgtagaaaacattgattttggtggatctatcttgacaaccatatttctccgtgagaagcttcagctgttcctccttcttcgtgtccatcttctgaaatgccctgtaggcattatagtacaaaaccacaagttatcagagcagaacagattatagtctccacaaatataatctataatatccagttttcaacaacaacaaaaaaaaaattgctaggtatgcaaagaaatagaaaaaaagcagtcaacagaaaatgactcttaagtgggcctacctctacccagatggaaagacccacaacccagacctgactgagctcggccaggcagaaccccagcagcgcatccacgtgtcagaggagcagctgcagctctactgggccatggactccacatttgagctctgcaagatctgtgctgagagcaacaaggatgtgaagattgagccgtgcgggcacctgctctgcagctgctgcctggctgcctggcagcactcggacagccagacctgccccttctgccgctgcgagatcaagggctgggaggccgtgagtatctaccagttccacggtcaggctactgctgaggactcagggaacagcagtgaccaggaaggcagggagttggagctggggcaggtgcccctttcggctcctccattgcccccacggccagatctgccccccaggaagcccagaaatgcccagccgaaagtgagactcctaaaggggaactcccctccagctgcgctgggaccccaggaccctgccccggcctgaaggccagggcacccagatgtgctgctcaagggagccccaagggctggaagggggttgtgaaaccgaaataaactgccaagcctggtctgtc

SEQ ID NO: 265070 - DNA, 451 bp, Homo sapiens
gaggtggttggatcctcgagccctagggactacttagggatgtgagctgcttccctggtcgctccctgacccaagccctgccccaccccagccatggccaacactcctcaagaactggcagctcctggcagtcaaccacccaggctacatggccttcctcacctatgatgaggtccaagagcgtctgcaggcctgcagggacaagccaggcaggtaaagggtccagggctcagcagaacaaggctgcagggctcagggatctgggctctgggctggtgcgtggtggagcccagatgtccttccaagagtgggaacagaggtacccaggaccccagagagttgataactcagaggcaggacactgagtgcccctcccagcccgcctcttctctcgaggcctcctgtactgtcccataatcctgcagctaagggacagtgcccgctctagcaa

SEQ ID NO: 265071 - DNA, 534 bp, Homo sapiens
ccctgccaacaaacccctgtcccaggtgctcctggagggacagaaggacggcttgtgagtctccattctggtaggaggagggtgtcagcaaaatctggttggaaagatcttgcatgttgtgcactgccggtggccaccacgtttgagggtgcaaccattcacataggggacatctcaaatctgcagtactacaaaattccagcaggtggcagtcaaaggtcttgaggaaggggcgcctctgagggtcgcacaaagtggccatagatcgggcccagccacagctccgaggagaagtgtgtggggcattgggcacaaccgcaagggctccattccttggaactgagctcaagagcgtttgcttctattttcttcctcttttactttagttaatttttaaaaaatgagatggggtttcgccatgctgcccaggctggtctggagctcctgggctcaagcgatcttcctgcctcggcctcccaaagtgttgaaatgacaggcgtgagccaccgtgcccagccagcttttgtttctaga

SEQ ID NO: 265072 - DNA, 1720 bp, Homo sapiens
actctgggcgaggccgcccctatcccagccgcaccggtccttcccggcacacgcgaggctcccatggctctggcggtggccccgtgggggcgacagtgggaagaggcccgcgccctgggccgggcagtcaggatgctgcagcgcctagaagagcaatgcgtcgacccccggctgtccgtgagtcccccttcgctgcgggacctgctgccccgcacagcgcagctgcttcgagaggtggcccattctcggcgggcggccggcggaggcggccccgggggtcccggcggctctggggactttctactcatctacctggccaatctggaggccaagagcaggcaggtggccgcgctgctgcctccccggggccgaaggagtgccaacgacgagctcttccgggcgggctccagactcaggcgacagctggccaagctggccatcatcttcagccacatgcacgcagagctgcacgcactcttccccgggggaaagtactgtggacacatgtaccagctcaccaaggcccccgcccacaccttctggagggaaagttgcggagcccggtgtgtgctgccctgggctgagtttgagtccctcctgggcacctgccaccctgtggaaccaggctgcacagccctggccttgcgcaccaccattgacctcacctgcagcgggcacgtgtccatcttcgagttcgacgtcttcaccaggctctttcagccatggccaacactcctcaagaactggcagctcctggcagtcaaccacccaggctacatggccttcctcacctatgatgaggtccaagagcgtctgcaggcctgcagggacaagccaggcagctacctctacccagatggaaagacccacaacccagacctgactgagctcggccaggcagaaccccagcagcgcatccacgtgtcagaggagcagctgcagctctactgggccatggactccacatttgagctctgcaagatctgtgctgagagcaacaaggatgtgaagattgagccgtgcgggcacctgctctgcagctgctgcctggctgcctggcagcactcggacagccagacctgccccttctgccgctgcgagatcaagggctgggaggccgtgagtatctaccagttccacggtcaggctactgctgaggactcagggaacagcagtgaccaggaaggcagggagttggagctggggcaggtgcccctttcggctcctccattgcccccacggccagatctgccccccaggaagcccagaaatgcccagccgaaagtgagactcctaaaggggaactcccctccagctgcgctgggaccccaggaccctgccccggcctgaaggccagggcacccagatgtgctgctcaagggagccccaagggctggaagggggttgtgaaaccgaaataaactgccaagcctggtctgtcctccagggtgcaaaggaagagtgcagtggccagcagggggcagcagagggcagcaggcactgggaaagggccgtccccaggcctggtccccacctgaacaacaggagtccaggccccagcccctcctccctcagactcaggagtccatactccagcccctcctccctcagacccaggagtccatactgcagcccctcctccctcagacccaggagtccatactccagcccctcctccctcagacccaggagtccatactccagcccctcctccctcaga

SEQ ID NO: 265073 - DNA, 1858 bp, Homo sapiens
actctgggcgaggccgcccctatcccagccgcaccggtccttcccggcacacgcgaggctcccatggctctggcggtggccccgtgggggcgacagtgggaagaggcccgcgccctgggccgggcagtcaggatgctgcagcgcctagaagagcaatgcgtcgacccccggctgtccgtgagtcccccttcgctgcgggacctgctgccccgcacagcgcagctgcttcgagaggtggcccattctcggcgggcggccggcggaggcggccccgggggtcccggcggctctggggactttctactcatctacctggccaatctggaggccaagagcaggcaggtggccgcgctgctgcctccccggggccgaaggagtgccaacgacgagctcttccgggcgggctccagactcaggcgacagctggccaagctggccatcatcttcagccacatgcacgcagagctgcacgcactcttccccgggggaaagtactgtggacacatgtaccagctcaccaaggcccccgcccacaccttctggagggaaagttgcggagcccggtgtgtgctgccctgggctgagtttgagtccctcctgggcacctgccaccctgtggaaccaggctgcacagccctggccttgcgcaccaccattgacctcacctgcagcgggcacgtgtccatcttcgagttcgacgtcttcaccaggctctttcagccatggccaacactcctcaagaactggcagctcctggcagtcaaccacccaggctacatggccttcctcacctatgatgaggtccaagagcgtctgcaggcctgcagggacaagccaggcagttacatcttccggcccagctgtactcgcctggggcagtgggccatcggctatgtgagctcagatggcagcatcctgcagaccatccctgccaacaaacccctgtcccaggtgctcctggagggacagaaggacggcttctacctctacccagatggaaagacccacaacccagacctgactgagctcggccaggcagaaccccagcagcgcatccacgtgtcagaggagcagctgcagctctactgggccatggactccacatttgagctctgcaagatctgtgctgagagcaacaaggatgtgaagattgagccgtgcgggcacctgctctgcagctgctgcctggctgcctggcagcactcggacagccagacctgccccttctgccgctgcgagatcaagggctgggaggccgtgagtatctaccagttccacggtcaggctactgctgaggactcagggaacagcagtgaccaggaaggcagggagttggagctggggcaggtgcccctttcggctcctccattgcccccacggccagatctgccccccaggaagcccagaaatgcccagccgaaagtgagactcctaaaggggaactcccctccagctgcgctgggaccccaggaccctgccccggcctgaaggccagggcacccagatgtgctgctcaagggagccccaagggctggaagggggttgtgaaaccgaaataaactgccaagcctggtctgtcctccagggtgcaaaggaagagtgcagtggccagcagggggcagcagagggcagcaggcactgggaaagggccgtccccaggcctggtccccacctgaacaacaggagtccaggccccagcccctcctccctcagactcaggagtccatactccagcccctcctccctcagacccaggagtccatactgcagcccctcctccctcagacccaggagtccatactccagcccctcctccctcagacccaggagtccatactccagcccctcctccctcaga

SEQ ID NO: 265074 - DNA, 1323 bp, Homo sapiens
tgccagtagagctcggtgtgaatcggccgaggcccgcgccctgggccgggcagtcaggatgctgcagcgcctagaagagcaatgcgtcgacccccggctgtccgtgagtcccccttcgctgcgggacctgctgccccgcacagcgcagctgcttcgagaggtggcccattctcggcgggcggccggcggaggcggccccgggggtcccggcggctctggggactttctactcatctacctggccaatctggaggccaagagcaggcaggtggccgcgctgctgcctccccggggccgaaggagtgccaacgacgagctcttccgggcgggctccagactcaggcgacagctggccaagctggccatcatcttcagccacatgcacgcagagctgcacgcactcttccccgggggaaagtactgtggacacatgtaccagctcaccaaggcccccgcccacaccttctggagggaaagttgcggagcccggtgtgtgctgccctgggctgagtttgagtccctcctgggcacctgccaccctgtggaaccaggctgcacagccctggccttgcgcaccaccattgacctcacctgcagcgggcacgtgtccatcttcgagttcgacgtcttcaccaggctctttcagccatggccaacactcctcaagaactggcagctcctggcagtcaaccacccaggctacatggccttcctcacctatgatgaggtccaagagcgtctgcaggcctgcagggacaagccaggcaggtaaagggtccagggctcagcagaacaaggctgcagggctcagggatctgggctctgggctggtgcgtggtggagcccagatgtccttccaagagtgggaacagaggtacccaggaccccagagagttgataactcagaggcaggacactgagtgcccctcccagcccgcctcttctctcgaggcctcctgtactgtcccataatcctgcagctaagggacagtgcccgctctagcaaggagcccaaagacccgcttgagggtaaggtccgtttctggtaggtcagagtcatgttgtaccatctgttcagtattttgagtatgaatttcccacctgttggcataggagactgaaaaacaagacatgagagtccttaaattatttcaaccaggagttttgagctgttgggtccccctagagggctgagaattgagctgtctagataccaagagaagagaaggtcaggtttgtgagtctctgcagggctgaggtgcaggggtaggacggtgagtgcgttagcattcttccagttacacttcaaacttatttaaggga

SEQ ID NO: 265075 - DNA, 467 bp, Homo sapiens
gcaacttctggaagtttctacccagttggcaaagaaaccttctcaatcccctacttaccctaaactaagaggaccagaaagtctgcaggccccatgatatgctacatctgctgacaccagggaaactccactacaagggagttgcagtctgtcactcaacttgctgaggaccaactcttgggggcacagtccctacctgcaagctgcttggatctctttgacagaattgtcacagccggacaattgttggagcaaagaggattcacgtctcatgataatttccatggctgcagtgttatgctgagaaggatgttgagggcccgtcttgtcttggcaggaagagcgttgtctggggagaatgtgataaagaggagtaactgaagataattggagactaacgtgatttcctcactgccataattagtggcagaggtgggactggaacacaggcaagaaacatcccaaaa

SEQ ID NO: 265076 - DNA, 403 bp, Homo sapiens
acttgcttaggtcagggtatggattaactgtgcaccaatttcttctcagaagggagaaaactttaactgccatctccactttacgcctgagttgctttaagattagcctttggaattctcaagcaaacacgtagttagatatatgtatagcaagaaaaaaaaatgagggagggattactttttaaagcaagctagcaaattggccgtactggttactgggagagagcatcaatgagaaaagaaatagattagcactgagtattaagaaacctcaacatttaacaggttattgttggcagacgagcattcagtggagattgtaaagtggttagaaatgtgtgaggatgaacaggagagggtaaggagggtacttcaagaagcaaagagtgatcaacaaggacaa

SEQ ID NO: 265077 - DNA, 390 bp, Homo sapiens
gcgcccggaaagccggggaaccggaaccggcctaaagccaagataagagtccgctgatttgacgtcacaagcaggctgcctttctccggtcccgaggctccagccttgccgcccttcttcctgatcgcgcaagcgagagctggttcgcagcaacgcagtgtcttttgtagactgatattctggtcctttttattaatgggaaggagggaatttagtaatctctctgaataggtgtctgcaggttgctgctgtagacgagcttaaaatgcagccggtgatttcagctgtttgcacactaaactcacctacattgtttacttaacccatcctaggttttaagccccattaagaggccctgcagtaaaggaagaacatgacgtgggctttaca

SEQ ID NO: 265078 - DNA, 349 bp, Homo sapiens
ctttttgatttgaaaactgacttggacagaggtcatatttctgtaaaagatcttatcggagggtgggtgcaggtcctgagtttgaagtccaggctgtggaagacttaacaagcactcctggtttagggtttgtttatgattgagagctatattaatccaaattcacatctttttttcttaactgaaaatatcttattgttaaagatgaatacaggaagtaacaaatgcatatccctcaaaaattgtgctgagtgagaaggcacatggttctctgttaaagggtcgtaaagtcctaccctgctctgtactactattaatatatttatttctctaacacattaaaaaaaaa

SEQ ID NO: 265079 - DNA, 430 bp, Homo sapiens
aactgagaaggaggaagatgtgacaggatttattagagatagtgtggcaaaatggctttgaagaccagcgaatctgcattagaatcctgaccacgctatttactcgttacgtgaattgcttcattttcctgacatttcgtttccctacaaaacttggataataccatttaactcaaaggtgggaattactccattggtgtgtggcacttcagtaggtactcaatgttatttttgtggtaagcagaattataagatggcccccaagacccctgctcctgggtttgcattcccgtaagggtgggcaagacatggtcatattacgttatatggcaaggggattttgcagatgcacttaaggtctctagtgagttgactctgagttagtcaaaagggagattatcctgactgggcctgaccatagcaggtgagc

SEQ ID NO: 265080 - DNA, 492 bp, Homo sapiens
gctgtcattcaattacttaatctctccagcatgccacttcctcaggccaattcatatgggaatatgaattcataggagtgttataaagggtagtttatacaatgagctcatgactatgaaatgcttagcatggcatccaaaaagccctgaataagtggtgcaacaatacctttttattacggaaaagacacccaacctagaaaagagtgttcataggggattaagagaagtaagtacagttagtgagcagagcaagccagcgtggtgagggcctttcctaggtgaggcatccaccacatttgaaagtgggatgcagggcaagagctcaacatcaaccaggatgggcaggaatgaagtaaatagctcacacctgttccttcatgggtcagttcctttcattttcacttttgactctgatgcaaaattagaactcttctctgctcaaatgttactattcttaataaagtaaagtaaataagtagggtccaaaaa

SEQ ID NO: 265081 - DNA, 306 bp, Homo sapiens
atcacctccccaccctgagaggcctcttttctaggattaaggcctcaccccccagccaaggataatagcctcaccggagagatcattgtctacctgcaagaacagtgaaaagtgacctgaaagaagatggttctcattcgtctctctctttcatctccttgaaatatctagccacagggtaacacaggttttgagaggatgggaacggaacgtggcaaggatctgtgagtgtgcaggctgtgtttcacatatcattaaacttagtctagtgagggttctgcaaaataaatgtagttgttttaagac

SEQ ID NO: 265082 - DNA, 332 bp, Homo sapiens
taaaagcagaggaaggggatggagcgatgggcagggggcaacggtagggagggtgtcggggaaaactttttggagaatgtgacgatgaaagtgaacaaggagaagtcaaccgtgttgagatgatggcagctaatgatgtggacaggccactctgttctgagtgcattatctattgattcatcatgtcatcctcgcaacagccctgcacgatcaattctgtcattaaccccatagtacagatgaggatgcggaggcacagagaagataagggacttgtcctgtgtcacacagcaaggagccatccggctcctaagttggtgcatttgacttct

SEQ ID NO: 265083 - DNA, 298 bp, Homo sapiens
agcacaggaagacagatttgagcttgacctttgtctctttgtgaattgactttcaatataaagctttccctttctcagaaacatggtgtcatagtaccggcttcaagcgcatcaggcaatgaatccatttgctttaataataaaagcagtgagcttgtggtcaagaattgcatcagtaagtcaagacacttataaaaatgtgtgggagaaaaaagcaatcatcctaaaaagaaacaaaaataaaatacataaaacccccaaacaacaaaaatagcagtttactattgtattctagaaa

SEQ ID NO: 265084 - DNA, 362 bp, Homo sapiens
gtagaacatttcccaaggttgtgttctaattgcgtacctccacccaacccttcacctaactgtggtaaaagaaatttgatttttataaagagaggaggccaaatgagacattagcagagctaagtctacccagattgctgaggaacagggaacttagcttctctcaaagtttccaatgatcccttcatccccaggacagagtgacactgcacccacactactgataccaacaccaactgtgtctcccacatctcaagagctattaaaatttaaacatgatattaatagtaactacatttattgaccattttctgggttccaggcccttcatatacatatctctgagctagctactactaatc

SEQ ID NO: 265085 - DNA, 320 bp, Homo sapiens
tctttttaagccggagtatgagcaatatcttatcagctcacgatacatttatgaagcaatatcctaaagtattcctgcaccaaaaacccagacttcctaaacttttcaaacaggaggaacaaagggaactcaatgaaggcaaagaggaaagtcaacatcaacaacctgatgattctaacaatatagctgtccatgttcagagagcacatggtggccatattttatatagaccaaaaagagccacagagaaatttgaagaattcctagctatcttaaagaaattgtaagtatttaaaatatattccttcttctaattgaaa

SEQ ID NO: 265086 - DNA, 472 bp, Homo sapiens
ttaaatctggggtgctggcccaggaccgaggccaagccatcaaatgtggccaccctgggctttgtcatgggggccagtggtgggaaggagcagggtgtcgtgggtagcaattagctaggcccagtgtctcaggtggtaaatgaatttatcaagacagctgtaaataaagaaaagcagatttataagagaagatatagaaaatacgttgcgtggccgggtgtgatggttcatgcctgtaatcccaggactttgggaggccgaggtgggcaggtcacaaaataaagaggttgacaccatcctggccaacgtggtgaaaccccatctctactgaaaatacaaaaattagctgggcgtggtggcgggtgcctgtagtcccagctactcaggaggctgaggcaggagaatcacttgaaaccgggacgtgggggttgcagttagccaagattgcatcactgcactccagcctggagaa

SEQ ID NO: 265087 - DNA, 428 bp, Homo sapiens
gctgggtgtgcacaggctgttttcctaagacttttacttattacatatattttttgagatggagtcttgctctgttgtccaggctgcagggcagtggagtgagctcagctcactgcaacctccacctcctgggttcaagcgattctcctacctcagcctcctgagtaactgggattacaggtgcccaccactatgcccaactaatttttgcatttttagtagagatggagtttcaccatgttggccaggctggtcttgaactcctgccctcaggtgatccacctgcgtcggcctcccaaagtgctggtatcataggtgtgagccactgcacccagggatttttactattaatgtgctttaaagatatgttttacctattagctgtaaaaactagccacttgtccctcttacacttatctcttactttt

SEQ ID NO: 265088 - DNA, 212 bp, Homo sapiens
ccagcagctacgccagtgtcgggattgctcagcaagctgcggtgtaaacctggctatcgagtaattagcacccttataaaaacaaaattaaggccgggccgggcacagtggttcacacctgtagtcccagcactttgggaggccaaggcaggaggatcgcttgagtccaggagttcacgaccagcataggcaacacagtgagacctcatctc

SEQ ID NO: 265089 - DNA, 423 bp, Homo sapiens
agttcagttgtaccttttaagcagggaaggacctctggatagtgagttcagtttcctgttgaactttatcctgcccacctttccctctgagctacactcactactggtagcagaacatgatactaagtggaaactttgggttagtggataaaatcgaatggagactgagatgaaagtaaatctgactctcataaaaccagattatcaacagccagtgtcacggtagccctagctgggggtagaattgtgaagggaagcagatgggagtctggttttcctgtatagtggtggcagatcccatctagccaggattagagatgatttatgggtttaaggaattatggcaaactgggtaaaggcaaccaaaaatctaaattgttccgtggtctcccttctttccagtttcaaaaagactggtatgtt

SEQ ID NO: 265090 - DNA, 505 bp, Homo sapiens
gccgctgaatcctgaaatcctgtgattcccacactcggaagctggtgtcgtatattggccacaaagtagttcagatttgattcagaaataggaaatgaatagaaaagacataacaaaagttagtctcgccttatggtaaagtttgttttactgtctgggtcaagttcaaatgagaagctgggctgattggccagcctctgcgacttgatcctgaagatctgctttcttttctaccagaaggctcctaattcttttatctggaataaaaagggaactccgtcttaaagatgctcacgtgaggcggcatattgccagagggtgggcgcaaagactgggggctggagattccattccaaatctgttactgattgatcagaacactttttcaaatccatgcctcagttttagaaaatcctcattagaaacgctaacagtaaaattggtgaatactaaacacttttaagaaccatgaaagcttttgtaaataaagaataaagtgaggagt

SEQ ID NO: 265091 - DNA, 475 bp, Homo sapiens
acctgggtgacgtttacgttctgggatttcgggagatgcggttttctgcacgccaggggccaagcctgagacgtagatggacggcagggataggagctctctccgcgccacaaacgcccctgctcatacctgggttccttgattttcctgcctatataaccgagcctcccatggccgggctctgagctctcattctgcggactgggacaaaggggttaactgtgatgcgctttgtataaccccaggattctgcacttgcccaagggcgaggcgcaaatcaaaaactacgcacaactgaacaccgagatcaggtgagtcctgagtgtctcacgacataaaatccttacgattttaacaagagttgtatttgtgctagcactgttaactgacaaacgcatgccagatcccatctgtctttaaagctcaatgtgtgacgttagacacgtcgttttgctcttcaactttcttatttgga

SEQ ID NO: 265092 - DNA, 238 bp, Homo sapiens
agtgtctgtgggaggtggatagtgtctgtgggaggtggacagtgtctgtgggaggtggatagtgtctgtgggaggtggacagtgtctgtgggaggtggatagtgtctgtgggaggtggacagcgtctgtgggaggtggatagtgtctgtgggaggtggacagtgtctgtgggaggtggacagtgtctgtgggaggtggatagtgtctgtgggaggtggacagcgtctgtgggaggtgg

SEQ ID NO: 265093 - DNA, 205 bp, Homo sapiens
tccacccttctcagtagctgagtgaccaaggagttggagaggaggagtgaaatgaacatgatcactggctgctgatagaacagtaatgagattaatggctcttagagctttctcattaacagtggaaacggtgtgtcagaggcatttacggtattggttctcaagacatcaccccagtacacacagagctaatcacgtgtcccgc

SEQ ID NO: 265094 - DNA, 690 bp, Homo sapiens
acacacacacacacacacacacgtgggaatgtaaggcttattttcttggcacatggatattcaattgcttctttaccatttattgaaaagactgtccattctgcattgaattgcctttgtacctttgtcaaaaatcaattgtctctagaaaaatcaggtttccaggaaaaaaaagactaatgtgttccactagtgttcttatttttcagttgtgttggcttttgtagattctttgcatttccatataaattttagaattagcgtatcaatttcttaaggcttggtgggatttccattgggattgtattgagtctatataaataaataaaactgagagagaattaacattttattttatttttttgagatggagtctcactctgttgcctaggctgtcgtgcggtggtgcgatctcagctcactgcaacctctgcctccgagattcaagcaattctcctgcctcagtctcccaagtagctgggattacaaatgcctgccactacactcagcttaatttttttatttttaatacagacagggtttcaccaagttggccaggctgttctcgagctcttgacttcaagtgatcagccctcctcagcctcccaaagtgctgagattacgggtgtgagcccccgcgcctgactgagaattaacattttaatattgagtgttttgattaaagtcttc

SEQ ID NO: 265095 - DNA, 375 bp, Homo sapiens
gcttgcagaaaatctccctccctctataaaagttaagctttatttttgtttattttaatttttttgagacagagtctcacttttttgcccaggctaaagtgcagtggcacaatttcggcttactgcaacctccacctcttgggttcaagcgattctcacgtctcagcctcccgagtaactgggattacaggcgtgcgccaccacacccagcaaattttttgtatttttagtagagatgggtttcgccatgttggccaggcttgtctctaacccctggcctcaagtaatctgcccccctcggcctcccaaaatgctgggattacaggtatgagccaccacacccggccaagttaaactttttaaatacattttggg

SEQ ID NO: 265096 - DNA, 521 bp, Homo sapiens
  misc_feature (58)..(58): n is a, c, g, or t
  misc_feature (108)..(108): n is a, c, g, or t
tagggaaatgtaaggaattggcttgcaaacagtaatctgtgggacattcgcttgactntagattttgtgtgatcgtaagaagataatttagaaatagattttgttttntagacatgtcagatatactgaaaagatgaataaaaaataggactggttgggcacggtggctcagtggctcatgcctgtaatcccagcactttgggagactgaggcgggtggatcatgaggtcaggctggtcttgaactcctggcctcaagtgatctgcctgcctcagccttccaagttgctgggatcataggcatgagccactgtgcccgcctctatatccatttttaacatttaccaagcactaaaagagatcttatatatgctgaatttttgttggaagttttgtataggcttggaataaacaaatccaaatgttaaaattggaaaatctatttctgtaagattcatagctttttattgtggttgctgtcataatatgattctaagaaaactgttttgagaaaaaaaaaaa

SEQ ID NO: 265097 - DNA, 364 bp, Homo sapiens
taaggaaagagctcttattagttgaaagaaaatgtagattcatgtttccttggagactagtctagtttccaaggatagacggcagtgaggagtcgggtatctagatggaatttctgttggtttggattccagctctgctgcttaccagctttgtgacctcaggcaaacaacttaacctctccaagcctcaatttccccatctatataatggtgatatttataagtttcaccttatagggccacggtggggattccatgaaatagtgtatgtgaagtgcttagcacagtgcctggcacatactcaatgctctatgcatgtcagctagtacttaatgatgctaataaacatgttatgtccctaaaa

SEQ ID NO: 265098 - DNA, 468 bp, Homo sapiens
cagatggtaacaagtgtcagaagcattcaattagcccctgcatttgctcatgatttaacaagctccgtctagtggcatacctgtgatatgtggagctgcagagacgtaagcttctgaaggactctataaaaagctttttgagaatgatgggtttgagtatttcaagttcccagactgccgtaaaaggcaaaggccaggctcccccattcctcttgactgtgtgctcacacagcaaattgagcttccaaaggcaattaattccacaatcctcaattccacaggggatcatgggctgtgcacacagcttcatagaaccactgagccagggggactttgccctatatagaaacccttgtgtttatacaccttggaaatgcttttcaaagccaattcgctcacattgtcatgttggagcctcacaaaatcctgttaagtagaacagttattatcccatttgatgtatttaaa

SEQ ID NO: 265099 - DNA, 2690 bp, Homo sapiens
cgtggagacatgcaccatcctggtctggtgtggacaaggagcagggcagcggggcaggcagggtgaggatggactccttgaacagtcttgcactgaggagagtgttgactgacatatttggactcttctaccttgtctgtcatggtctaatgcatgtcttttctgggtgtggtttcttttctttttttttttttttcttttttcgagactgagtctcacccaggctggagtgcagtggcgtgatcttggctcactgcaacctccacctcccgggttcaagcgattctcctgcctcagcctcccgagtagctgggaccacaggtgtgtgccaatacacccagctaatttgtgtattttttagtagagatgaggtttcagcatgttggccaggctggtctcaaactcctgacctcagatgatctgcctgccttggcctcccacgtgctgggattacaggcgtgagccacgcgcccagcaggatgtggtttcttgaggatcctctcagggctttggcctctcccagctcctatcccactactattagggtcacagaggaggaggtcaagactgggatttacccatgaaggctctttggatgaaatcagctggatattggctgggtcactttgttaaagaccagaacctggggtgggaagcctgtgcctgtttggatgtcagagcccacagccatgggcccctggcccagcttcctaaccagtttggccctgtttgccttggaagcacttgggctgtggggtcaaatggtcccacgcgctgatcttggccttggcgcttgctggctgcatgaacatgagtacatcttgtcacctgtcccagtttcagtctctctattctgggcagaaggattttctcaccgacaaggactaagtaccctcctgtaggctcaggactagggcagagcttgtacacgatagaggagatgctcgatcgggttctctctccaagtcctgcttctcatggatttaaggggctgtggagggcctgactgctgtgctgagttaggcccggggcctgccagtggagttctaaggcctttaaagagtttgagttgtgttttaggaagaccacctggggcagtgtggaaatgtcatgattgagggagagagtttcttgaagcaactccgtctagtgcagagcttctcaagctagggtgcatctaagtatctggaggagctgttaaagcacgtgttgctagatcccactctgagagttttatttttgtttgtttgttttttgagacggagtcttgctcttgttgcttagtcaggagtgcaatggtgcgatctcggttcactgcaacctcagccttcctgggttcaagcaattctcctgcttcagcctccccagtagctgggattacaggtgcctgccaccatgtccggctaatttttattttttctttttgtatttttagtagagatggggtttcaccatgttggccaggctggtctcatactcctggcctcgtgatctgcccacctcggcctcccaaagtgctgggattacaggtgtgagcccagccgagagtttgattttctaacattctcaggggtcgctgttgctgctgccgctaatgttggtaaagtggttagtcagacagatacagggcccttgcccagggtttaaacccttgctgggtttaaactttagatcttctacttgtagctagctatgtggccttggccaggtcctctaacctgtgtgagccttagtttcctcatctgtaaattggaatgctacctgcttcctaggatgttgtaagaatcccatgatttaacgtgtataatccctcagcacagtgcctgtggtcagcatttaatagaggatcgttttattattttattaataccagtgaggaggctgttgctgaagtccaagggagagatgaaagagaggctgaacgaggctcgtggctgagggatggagggcatctgttttctcagtggctcaaagcctatgatcctccctcataggagaacacgttgcttccttccacagcgggaacttgctgaaaacctgtcggctggtgcctgtgtgtcctctagagggcagtggagtcaaggctgaggatggagcattgtgtgccctcggttggggctggtctgtgcgttcagcctttattccctgttctgaaacccaattgtgtatttgcattggactgtcccctcctccttgctctgtgtacttgctgacgctttttggaaaacacatcacagggcacctctgatttcctgcttgtcttgtagcctgggattagcagtagctgaagcgtgctgctttctggcagttgtgtttatttctcaagggcacaggctgtacagatcatgggggcctgctccctgcagctcagctgagcctaggatgaaccacagttgctcttatgccagttaaaaacttggggcctgttccatcttgcatttcctcccccgcttcccagtcctcgcccgcaccctttgatcctgtgagtggagaaatgaagagaactccaaatccttaatccattttgaaggccggctggcagcagggctttctgtgggcctggtaagcagccctagttgaatcattttagagaagggcaggtattctttcaaggttatagaaagaaagaaaaaaaaaaaaccagaagcacatttataatattggacagtataccttgtcccaagccctgt

SEQ ID NO: 265100 - DNA, 1852 bp, Homo sapiens
cgtggagacatgcaccatcctggtctggtgtggacaaggagcagggcagcggggcaggcagggtgaggatggactccttgaacagtcttgcactgaggagagtgttgactgacatatttggactcttctaccttgtctgtcatggtctaatgcatgtcttttctgggtgtggtttcttttctttttttttttttttcttttttcgagactgagtctcacccaggctggagtgcagtggcgtgatcttggctcactgcaacctccacctcccgggttcaagcgattctcctgcctcagcctcccgagtagctgggaccacaggtgtgtgccaatacacccagctaatttgtgtattttttagtagagatgaggtttcagcatgttggccaggctggtctcaaactcctgacctcagatgatctgcctgccttggcctcccacgtgctgggattacaggcgtgagccacgcgcccagcaggatgtggtttcttgaggatcctctcagggctttggcctctcccagctcctatcccactactattagggtcacagaggaggaggtcaagactgggatttacccatgaaggctctttggatgaaatcagctggatattggctgggtcactttgttaaagaccagaacctggggtgggaagcctgtgcctgtttggatgtcagagcccacagccatgggcccctggcccagcttcctaaccagtttggccctgtttgccttggaagcacttgggctgtggggtcaaatggtcccacgcgctgatcttggccttggcgcttgctggctgcatgaacatgagtacatcttgtcacctgtcccagtttcagtctctctattctgggcagaaggattttctcaccgacaaggactaagtaccctcctgtaggctcaggactagggcagagcttgtacacgatagaggagatgctcgatcgggttctctctccaagtcctgcttctcatggatttaaggggctgtggagggcctgactgctgtgctgagttaggcccggggcctgccagtggagttctaaggcctttaaagagtttgagttgtgttttaggaagaccacctggggcagtgtggaaatgtcatgattgagggagagagtttcttgaagcaactccgtctagtgcagagcttctcaagctagggtgcatctaagtatctggaggagctgttaaagcacgtgttgctagatcccactctgagagttttatttttgtttgtttgttttttgagacggagtcttgctcttgttgcttagtcaggagtgcaatggtgcgatctcggttcactgcaacctcagccttcctgggttcaagcaattctcctgcttcagcctccccagtagctgggattacaggtgcctgccaccatgtccggctaatttttattttttctttttgtatttttagtagagatggggtttcaccatgttggccaggctggtctcatactcctggcctcgtgatctgcccacctcggcctcccaaagtgctgggattacaggtgtgagcccagccgagagtttgattttctaacattctcaggggtcgctgttgctgctgccgctaatgttggtaaagtggttagtcagacagatacagggcccttgcccagggtttaaacccttgctgggtttaaactttagatcttctacttgtagctagctatgtggccttggccaggtcctctaacctgtgtgagccttagtttcctcatctgtaaattggaatgctacctgcttcctaggatgttgtaagaatcccatgatttaacgtgtataatccctcagtccctctcccctccgagcacgatgctcgcaccgtatc

SEQ ID NO: 265101 - DNA, 594 bp, Homo sapiens
tcccagggattcatgaggtatttgagaaaaatacagactgaagatgattggctaaccatctagaaagaggggaacaaggaatccctagttcctttatcttccaagcaaatagccaaagtatgtgagggagagaagaagaggcatcccccttctttctcccattttatatccccaagtcctggtgacctcagtagggtgctgcccatggatgccaacacagctttcacccatgttaacagtgaggcctaaggggtgggagttatccatatttgcccatgcactgcctcttccctgctgtgagtaacttttgagttcctagatcttgtctatgccatgcatgcaagtataaccttcaaccatgaagtgggagggcctatccagtaagaattagtcatgctcacctgcgttgtgccccatcttctgttgttgcctccctctgcatcccttagatccagttttccctcttatggtttcaacccaaagcctggaattgagtttgggacaaaagcgtacctcaggggatacatgaattaatttagattatgtcacagatggctgtcaccaaatttgcagccagcagcctatggggtcact

SEQ ID NO: 265102 - DNA, 1516 bp, Homo sapiens
accagaagagatggagctggacagagctgtgggggtcctgggcgctgccaccctgctgctctctttcctgggcatggcctgggctctccaggcggcagacacctgtccagaggtgaagatggtgggcctggagggctctgacaagctcaccattctccgaggctgtccggggctgcctggggcccctggcgacaagggagaggcaggcaccaatggaaagagaggagaacgtggcccccctggacctcctgggaaggcaggaccacctgggcccaacggagcacctggggagccccagccgtgcctgacaggcccgcgtacctgcaaggacctgctagaccgagggcacttcctgagcggctggcacaccatctacctgcccgactgccggcccctgactgtgctctgtgacatggacacggacggagggggctggaccgtgagtgtggggctgggcagaggcggtcagcctgggagtcccggaggccaggctgcacacctggtgggagaacacactctggaattctctattctcctggtcggggacagtcagagatgatgggggagatgaccggtgggtaaaagtccaggcctttgggggaggctgggagaggttgggtgctctcctgctgtgtggcttggggcttgttgcctcccctctctgagcccccatttcctccttcatcctgtggagtcttgtgaggagaacaggttggcctcctggtcaaccccacctgtgatctctgccaactacaaatgctgccctctggagagcggtcccccgtgctgtggaacgtcggcctggcccccccggctcctgtcccctggcttctccacaggttttccagcggagggtggatggctctgtggacttctaccgggactgggccacgtacaagcagggcttcggcagtcggctgggggagttctggctggggaatgacaacatccacgccctgaccgcccagggaaccagcgagctccgtgtagacctggtggactttgaggacaactaccagtttgctaagtacagatcattcaaggtggccgacgaggcggagaagtacaatctggtcctgggggccttcgtggagggcagtgcgggagattccctgacgttccacaacaaccagtccttctccaccaaagaccaggacaatgatcttaacaccggaaattgtgctgtgatgtttcagggagcttggtggtacaaaaactgccatgtgtcaaacctgaatggtcgctacctcagggggactcatggcagctttgcaaatggcatcaactggaagtcggggaaaggatacaattatagctacaaggtgtcagagatgaaggtgcgacctgcctagcccaggccggcctcagggtcaggacgcctccacacatagttggttggggggtagggtttgggagcttggccctacggtttgtaaaagaaacacatgtcgtgattctaaattgggtttgtcttgctgtgcggaagaggttcaaatccagctctgtttccgcaatc

SEQ ID NO: 265103 - DNA, 1002 bp, Homo sapiens
accagaagagatggagctggacagagctgtgggggtcctgggcgctgccaccctgctgctctctttcctgggcatggcctgggctctccaggcggcagacacctgtccaggagaacgtggcccccctggacctcctgggaaggcaggaccacctgggcccaacggagcacctggggagccccagccgtgcctgacaggcccgcgtacctgcaaggacctgctagaccgagggcacttcctgagcggctggcacaccatctacctgcccgactgccggcccctgactgtgctctgtgacatggacacggacggagggggctggaccgttttccagcggagggtggatggctctgtggacttctaccgggactgggccacgtacaagcagggcttcggcagtcggctgggggagttctggctggggaatgacaacatccacgccctgaccgcccagggaaccagcgagctccgtgtagacctggtggactttgaggacaactaccagtttgctaagtacagatcattcaaggtggccgacgaggcggagaagtacaatctggtcctgggggccttcgtggagggcagtgcgggagattccctgacgttccacaacaaccagtccttctccaccaaagaccaggacaatgatcttaacaccggaaattgtgctgtgatgtttcagggagcttggtggtacaaaaactgccatgtgtcaaacctgaatggtcgctacctcagggggactcatggcagctttgcaaatggcatcaactggaagtcggggaaaggatacaattatagctacaaggtgtcagagatgaaggtgcgacctgcctagcccaggccggcctcagggtcaggacgcctccacacatagttggttggggggtagggtttgggagcttggccctacggtttgtaaaagaaacacatgtcgtgattctaaattgggtttgtcttgctgtgcggaagaggttcaaatccagctctgtttccgcaatc

SEQ ID NO: 265104 - DNA, 603 bp, Homo sapiens
accagaagagatggagctggacagagctgtgggggtcctgggcgctgccaccctgctgctctctttcctgggcatggcctgggctctccaggcggcagacacctgtccagaggtgaagatggtgggcctggagggctctgacaagctcaccattctccgaggctgtccggggctgcctggggcccctggcgacaagggagaggcaggcaccaatggaaagagaggagaacgtggcccccctggacctcctgggaaggcaggaccacctgggcccaacggagcacctggggagccccagccgtgcctgacaggtgactgaccacccccacactcctcccacggcttgtggctgcccttggctggaagtccagggtcatacgacgccattgccagaatgaagtgacaaatatgaacagaagaaaatggttgcttgcccgtttccttgtcccctaattattcaaggaagtgacaaatattgtccagacaacttacatacactccatggcaatttttttctatttataatctacgccagaaggccccttgcaggctgtaaccctttataaaaaaataaaatctcctttttaaatttaaaaaaaaaca

SEQ ID NO: 265105 - DNA, 1116 bp, Homo sapiens
accagaagagatggagctggacagagctgtgggggtcctgggcgctgccaccctgctgctctctttcctgggcatggcctgggctctccaggcggcagacacctgtccagaggtgaagatggtgggcctggagggctctgacaagctcaccattctccgaggctgtccggggctgcctggggcccctggcgacaagggagaggcaggcaccaatggaaagagaggagaacgtggcccccctggacctcctgggaaggcaggaccacctgggcccaacggagcacctggggagccccagccgtgcctgacaggcccgcgtacctgcaaggacctgctagaccgagggcacttcctgagcggctggcacaccatctacctgcccgactgccggcccctgactgtgctctgtgacatggacacggacggagggggctggaccgttttccagcggagggtggatggctctgtggacttctaccgggactgggccacgtacaagcagggcttcggcagtcggctgggggagttctggctggggaatgacaacatccacgccctgaccgcccagggaaccagcgagctccgtgtagacctggtggactttgaggacaactaccagtttgctaagtacagatcattcaaggtggccgacgaggcggagaagtacaatctggtcctgggggccttcgtggagggcagtgcgggagattccctgacgttccacaacaaccagtccttctccaccaaagaccaggacaatgatcttaacaccggaaattgtgctgtgatgtttcagggagcttggtggtacaaaaactgccatgtgtcaaacctgaatggtcgctacctcagggggactcatggcagctttgcaaatggcatcaactggaagtcggggaaaggatacaattatagctacaaggtgtcagagatgaaggtgcgacctgcctagcccaggccggcctcagggtcaggacgcctccacacatagttggttggggggtagggtttgggagcttggccctacggtttgtaaaagaaacacatgtcgtgattctaaattgggtttgtcttgctgtgcggaagaggttcaaatccagctctgtttccgcaatc

SEQ ID NO: 265106 - DNA, 1980 bp, Homo sapiens
accagaagagatggagctggacagagctgtgggggtcctgggcgctgccaccctgctgctctctttcctgggcatggcctgggctctccaggcggcagacacctgtccagaggtgaagatggtgggcctggagggctctgacaagctcaccattctccgaggctgtccggggctgcctggggcccctggcgacaagggagaggcaggcaccaatggaaagagaggagaacgtggcccccctggacctcctgggaaggcaggaccacctgggcccaacggagcacctggggagccccagccgtgcctgacaggtgactgaccacccccacactcctcccacggcttgtggctgcccttggctggaagtccagggtcatacgacgccattgccagaatgaagtgacaaatatgaacagaagaaaatggttgcttgcccgtttccttgtcccctaattattcaaggaagtgacaaatattgtccagacaacttacatacactccatggcaatttttttctatttataatctacgccagaaggccgggtgcccaggagctgaaggtgggggtgacactgggaggtgggagggccaggccaactggctgcggccatcacagctgcgtgcctgggggccgtgtccctgtccaggcctcagagtcccgctctgttcatacagacgcctatggccctgcttcttcctcccaggcctccctcctactgcctgtgccctgcccagggctcctgtcctgcagccattccccgggttcccttcccaggcccgcgtacctgcaaggacctgctagaccgagggcacttcctgagcggctggcacaccatctacctgcccgactgccggcccctgactgtgctctgtgacatggacacggacggagggggctggaccgtgagtgtggggctgggcagaggcggtcagcctgggagtcccggaggccaggctgcacacctggtgggagaacacactctggaattctctattctcctggtcggggacagtcagagatgatgggggagatgaccggtgggtaaaagtccaggcctttgggggaggctgggagaggttgggtgctctcctgctgtgtggcttggggcttgttgcctcccctctctgagcccccatttcctccttcatcctgtggagtcttgtgaggagaacaggttggcctcctggtcaaccccacctgtgatctctgccaactacaaatgctgccctctggagagcggtcccccgtgctgtggaacgtcggcctggcccccccggctcctgtcccctggcttctccacaggttttccagcggagggtggatggctctgtggacttctaccgggactgggccacgtacaagcagggcttcggcagtcggctgggggagttctggctggggaatgacaacatccacgccctgaccgcccagggaaccagcgagctccgtgtagacctggtggactttgaggacaactaccagtttgctaagtacagatcattcaaggtggccgacgaggcggagaagtacaatctggtcctgggggccttcgtggagggcagtgcgggagattccctgacgttccacaacaaccagtccttctccaccaaagaccaggacaatgatcttaacaccggaaattgtgctgtgatgtttcagggagcttggtggtacaaaaactgccatgtgtcaaacctgaatggtcgctacctcagggggactcatggcagctttgcaaatggcatcaactggaagtcggggaaaggatacaattatagctacaaggtgtcagagatgaaggtgcgacctgcctagcccaggccggcctcagggtcaggacgcctccacacatagttggttggggggtagggtttgggagcttggccctacggtttgtaaaagaaacacatgtcgtgattctaaattgggtttgtcttgctgtgcggaagaggttcaaatccagctctgtttccgcaatc

SEQ ID NO: 265107 - DNA, 282 bp, Homo sapiens
cttgcccaggctggtctcaaactccttgccccaagtgatcctcccaccttggcctcccaaagagctgggattacaggcatgagccaccgctcctggccaacggtgtcctatcttatctcacaaccctattcctggagaatctggcatagggagttggagctatggctcagggacactgaccttggagacttgaaccctggtctgaggtctgcagggaaattttcaaagggaaaatgtctgagtacttgtttcagaaacttccagaggcagaaagcaggagac

SEQ ID NO: 265108 - DNA, 406 bp, Homo sapiens
agcagacaccaatggtcagtgcttctactttggatcaaaaagagagaactccaataggcttagggtgggtcaggtgctcacactcatctgaggaaggggagggtcccttgaggaatagtaccatagactacccaatgttggaggataatggccccaacgcaaaaatgggatcttgccaccagacaaatgggatatagatgccaggctgcaaaatccaacaaatgtacacgtgcccaaatcccgactccatcactaatagccatgcaatcctctgactatcaattagattaattgacactcttttttctctcgctactgtggtacatgcagtagttacctttattcttcactttgttttctcataagactaacaagcagttttttaaaataaagaaataaaagcaaa

SEQ ID NO: 265109 - DNA, 613 bp, Homo sapiens
gatattgtatacaaatttagtaaacatgccatcagtttcatcctcatcactgatacaaagtttgaacagggccgggcacgctggttcacacctgtaatcccagcactttgggaggccgaggagggcgaatcacgaggtaaggagatcgagaccatcctggctaacacggtgaaaccccgtctctactaaaaagtacaaaaaattagttgggtgtggtggtgggcgcctgtagtcccagctactcaggaggctgaggcaggagaatggcgtgaacctgggaggcggagcttgcagtgagccgagatggtgccactgcactccagcctgggtgacagagtgagactccgtctcaaaaaaaaaaaaaataatccctgtcatttcttctttcctattctaagaaattttatcaagagcagaaattcagatgaaccatgtccactctcttctcctaatccagcagtataaacagtctatgaaaaaaagtgaaatgaacttggcaggacagaggagcctttaaagaacccactctgtgttcaaagaccctgttgttcctttctaagaaccccaaatgatttttaaatctgttttaaaatttttttatactgtttaaaaa

SEQ ID NO: 265110 - DNA, 414 bp, Homo sapiens
cttgatctgaatgatacttatatttatgtgctaatttttctctaaattaatcatatacttatgacatgcataataaagtcaaaatattttaaggtcaaattaataaagggaatgtcctaaatgaagatattctgtctgtgaacaattatatagttatatgagagaacttgctgggcataatagctgtaactttaatctttattaaatattattaaataataagtcattgttaaatctattaaatagatttcttaaattgtccctaatttttcatgagggcggtctgtatccattagccaggtgcctgagtttagctaattttggttttgggcaggagttgggaaagtcagactgttatctgactgattgttcatggactttaaaattagtcttacacataccccaagatttaaa

SEQ ID NO: 265111 - DNA, 1055 bp, Homo sapiens
gtacgtctatgagagggaataatgtggatggatggaagtggagtagaaactacccctttgcctgtgagccccctgtcccgtcctttttcactcacataccagtcaccataccttcagtatccatcctacttcctttatagctgtttcacttggaaactaatgtgtgggagcacctcctgcagcaaactgctcttgaatcttaattcgatgagtcagtgactcttaaataccgattaagccttcaccctctcccccctcccccttttaaacttatgacctgtaagattcttgtaaaaaatagggttagggaaacatttttagaatttaataggattaaggacacctggagtgtgggcgatgttgagctagagtttacctttgtgaatattggacgtgtcttcaggaacggagaagaattttgaatgctaatttttacctttcagctatgtgaaaacacatgatttacgttgatgtaaccgaatttacattgctgaatatgttggtgatttcattaacttttagagcattccggtttaagttttagcttatttgggctttctccttgctttccaaacgaaatacttcgtcttttaaatgttttgctttaacgtgacagctgcgtggagaaataatggttggcaacacttttctattgagaagggatttaattccaagcagaatattagcatccgttttcttgtaattaagttcaacttttgtttatcttcggagggttggaaagagttaagtgagttaggacttagtcatttggatgcattcctttaaatacagtgcattactaaagtcagacctttttgaaataactttttaaagtctgtaccgagtcctgtttaacgtaaaatagctagagaaaggccaaacaacatttcctcctcccttactccctccccaccccaaaacacacgcttctgctgagcgggtgtagaaggaggtacattgctgcagtgtcagtgcagtgtagaagcagaagtggcagccatgttctgtctctttttgtgaatcgccctcatttgcatagcacactcttcattcat

SEQ ID NO: 265112 - DNA, 596 bp, Homo sapiens
agtgtattctttgagatcagctcagtccatttctagccaataaggttagcctcttcaagaggacagattagttttgagtctgtatgtatttaattctaacttggactgattccacttccagctttatgtgctctttgccctgtctccttaaaattatcaagaataatttgagtatcaggggcaaatgtcatgagatatcgctggctgcagaaccatctaatgacagccttatctaaaacacttgcactatgaaaaatgttctttttattttgatccatagacattctagcccttggcaaacctagaactgggctcatcacatttgctagcctcctacttatcttggttttcagattactctcagtccctgggtcaaattcacactttgtcactgttgtctatttcactgcctaacctaggtcaccatccatcaactctagcaagtgagacaatatcaagagttgtgattattgatgctcttttaccgctctgccccatttgatgtttgtatatttgatagaatacagtgcatacctagttggtatagtgatggggactgtttccatggttaggtacattttgtgccctgctttctg

SEQ ID NO: 265113 - DNA, 633 bp, Homo sapiens
agtgtattctttgagatcagctcagtccatttctagccaataaggttagcctcttcaagaggacagattagttttgagtctgtatgtatttaattctaacttggactgattccacttccagctttatgtgctctttgccctgtctccttaaaattatcaagaataatttgagtatcaggggcaaatgtcatgagatatcgctggctgcagaaccatctaatgacagccttatctaaaacacttgcactatgaaaaatgttctttttattttgatccatagacattctagcccttggcaaacctagaactgggctcatcacatttgctagcctcctacttatcttggttttcagattactctcagtccctgggtcaaattcacactttgtcactgttgtctatttcactgcctaacctaggtcaccatccatcaactctagcaagtgagacaatatcaagagttgtgattattgatgctcttttaccgctctgccccatttgatgtttgtatatttgatagaatacagtgcatacctagttggtatagtgatggggactgaaaagccctccaactctgagtctggctttttttcatgattgatttggggatttgtttccatgaagtagggtaca

SEQ ID NO: 265114 - DNA, 394 bp, Homo sapiens
tttttatcccttgcatcatcaaatagtgatctttttggaaatgggaataatgtatttcttgtatacctgctgcttgcttccacagtgtctcaaatatgtatgctccagggctgggcacagtggtttgctcacaactgtaatcttagcatttggagaggctgaggtgggaggatcgcttgagaccaggagttcaagaccagcctgggcaacatagtgagacctcatctctacaaaaaattaaaaaataaccaggcatggtggctcacacccatagtcccagctacttgagagtctgaggcaggaggattgcttgaacccaggagttggaggttgcagtgagctatgattgcaccactgcactgcagcctgaggaacagagcaagaccctgtctca

SEQ ID NO: 265115 - DNA, 352 bp, Homo sapiens
ggaaacccataatcatggtttcaagtgggcagagaactaggctctggcgtcaggggaggaaggggaactgttcactgtcaacaccttttaggacgtttccattgggatcgaagggtggctcactctgccactttgacataagaatcacttctacctaaggcacttgaaaaatggcacaggcaagagcatcatcggatctctccttttcttcctgaagacaggagataaaaacgctcaggtgaaagatgccttccctgtaccgggcgaagaaagattcctctacagggaagcacgtcatagccaacagaattctgtacagacattaaagtaattaaagtaattcctgtcgttc

SEQ ID NO: 265116 - DNA, 266 bp, Homo sapiens
  misc_feature (230)..(231): n is a, c, g, or t
  misc_feature (233)..(233): n is a, c, g, or t
  misc_feature (263)..(263): n is a, c, g, or t
aggtgccccggacaggtgtggccagcacgtcttgccaagaccccaccaccccacccacccgcatctgtggccttctggaaccgagctgtggcctggggttccatggagcaggtggggcgcggaggaactgagctgtggcctggggttccgtggagcagaaagttggccggacgtggtgcgggcgcctgtggtcccaggtactcgggaggctgaggcgggagaatggcgtnnanccgggggcggagcctgcagtgagccgggantgc

SEQ ID NO: 265117 - DNA, 408 bp, Homo sapiens
aaatgaactagttagaaaatagcatactaattaaacctcatctctcactttcaaaccatgttaatgttgtctgcaggatctttatttgtaagacaaccaatttagttacttgctttcttaaaagttcagaatcctccacattcactctcatttctgtttgaaccctacgctgtcagattagcaaaagacagcttgcagaaattaaatatatttttgttagcaaaaattagcttgcaaaaatatacacatgagttttagtccacaaattgtcaaataacttagaagtcatctggaaaacatataatgtccttaagcaggtttcctgtatttagctaataccagtgcttaaaagacatgcaggatcacagttagcatttcaattttcagttgtattttctaactctggat

SEQ ID NO: 265118 - DNA, 676 bp, Homo sapiens
gcctaaaaagccacatgaaggagtttgaattttattgtgactcttgattagcattttaatgaggctttgaaatttagccacatttttcaccaaaaatattaatcagaagaaattaatttgatgtgtatgctaccaatgattgctattaggctaaaataatggttcatattctgttttgttttgtattaatggttcatattctgttttgttttgtaagtgaccattaacactttgtattttatgtattacttgtgtgggtttctacaggatatacatatgcatttatctagtgatattttcatcctcacacatgtgaagttttgaggattagagttaaacaatgtacctggtatgtaataagtgttctaaaatcactgacaggattattagacaatatgtattttatatgtgtgttgtatactatatgtaattgcatttatggtttcagatatggaaatcactgtgtcaatctgaaggtgtgagccttcggtgtaggcagagtaaaacccaatgcccttgtgaaagaatgcttttttttggtgatgtttatgctgaacaataatagagaaaggccatggttttacatttctctgagacatcactgccaacaaactgaatatgtttttcattatactttttccttggctatatttattcatttatttatttattttgg

SEQ ID NO: 265119 - DNA, 327 bp, Homo sapiens
gaccttattgcctttgtgatgacaggccggtattggacaggctgtccctcaatctgggtttatctaacgtttctcaagggtcaacgcaggctgtgcgtgttgggtaggcctgttactgtgggctcatccccgcgcttcttgtcgggaggcacagggttttgactgtcccattgctgatgctcactttgatcacgtgaggaaggtggtatctgccagccttctctccactgtaaatttattctttttctgtttgtaattaataactatgtgggaaggtattacgagactgtgtaaatatcccattcctcattaaattttcaatttatt

SEQ ID NO: 265120 - DNA, 356 bp, Homo sapiens
gttactgtgttgattatacttaattggttacctttcaatagattgtttacctgcttatatacttctttgcatgtctagattgctcaggaaattatattcttttctaattaagaattttctagtctattctgtttcaactcttcctaaaagtctttctaaaataaatttacacccatttctgcccctttgtaagtcagactctctttgatatgttaggattttgcagtgctgtgggcttttcttaagttctcattgaagtgtttagatttgggtgggaggttgggcttcatgtatactctatattggaaattgctgttcggactaaataacttttcttgttaatgagatctttctca

SEQ ID NO: 265121 - DNA, 424 bp, Homo sapiens
catgatgcctggcaattcactccccaaggagaaactagacctacccacacatatagattctaaagggggaaaaaggaatcacaataataaacaagaatcctgctatttagaaaaatgaatatatatctcaaaaaatccttacatgggccgggcgcggtggctcacgcctgtaatcccagcactttgggaggccgaggcgggcggatcacgaggtcaggagatcgagaccatcccggctaaaacggtgaaaccccgtctctactaaaaatacaaaaaattagccgggcgtagtggcgggcgcctgtagtcccagctacttgggaggctgaggcaggagaatggcgtgaacccgggaggcggagcttgcagtgagccgagatcccgccactgcactccagcctgggtgacagagcgagactccgtc

SEQ ID NO: 265122 - DNA, 989 bp, Homo sapiens
agcggaaagaatgaaacttccttactgttcactaacctacgtctcaattacctcccaacatgtttgcagcaagtaccctgtcgatggtaggcaagaggaaggtgtgacccacaaagatcaaggaatctaagccggccaaggttaagcatgaatcgaggaaaggaaacagaaatcctcttcctagtcctctttcctctgttttctcctctgggtaccagaattgcgacagagtgggacagctcaggcagctgcaggtcttggccagtgctcttcctcacccaggccatgcagcatcaacacagtcaccgtagaactcctcttaagacaagcaaaggaactttccaacccagttgagtgcacttttcccaagtgtgtggtaaaaagttaaatgacactttgtgaaagggatccttaagctacaaaaacattttcccccatcacactaagcacttggttttgtccttgtagttgcaaaaggggctggagtcatttgatgaattctgaatgttgtaaggctgcttttctggaagggtaaacagggaaccttttagatgccaagaccttttagaataacgacccttcagaggaaactgaagtgcaaaggattgaagtaaccttccagaaggtacacagctggtgagacaaagcctggactgggtcccaagcctgcctgactccggactccacaccccacagtgataccagaatcaccctgaaaatgggaaacacgctgcagctgctgtcctgattccagcctctgaccaggagagctggattgaccaggaagccaatgaagctaagtttcagggccccctgtctgcctaaggcctctcccaaggccctgcaccaaagtttctatttgtgactttgttttcttagaaaaaactcctcaattatgtgaattcacctctgctgacaagtaactccttagaggacgtgagttttagaaggacaagctccaaaagcatctctagatagcctccagaacc

SEQ ID NO: 265123 - DNA, 582 bp, Homo sapiens
catgccgttcttagtagtgtgatgaaatctcgcgccacccagctccatcctgcccgggatgtgaatcatccttttgtccatcgtattcctgctgtagacatgactcaacccacccatcacttagcagccgtctgggttatcagattgactgtcatagcggcacagtgcttgtgttcaagcaacccttattttacttcccgatggccccaaagtgcaagagtagcgacgctggtgattccgacatgccagaaagaggctgcaaagtgcttcctgtaagcgaaaagctgaaagttctcaatgtaataaggaaagaaaaagaaatcatatgctgaggttgctaagatctatggtactcagggagttttgagattttccaagatgccatcgaggaactgaaaagtgctgcccagctgcagtgagggctttttaaaggcagtttcatgtctacaccccactgagttcagactgtccaatgaagcactgacattgttacacatgcgtgttgtggacaacttgagaaaacacttgtctgcaggaagatgaaattaaaatcaagtgtgatcctaccaccgaaagataagt

SEQ ID NO: 265124 - DNA, 582 bp, Homo sapiens
agcggaaagaatgaaacttccttactgttcactaacctacgtctcaattacctcccaacatgtttgcagcaagtaccctgtcgatggtaggcaagaggaaggtgtgacccacaaagatcaaggaatctaagccggccaaggttaagcatgaatcgaggaaaggaaacagaaatcctcttcctagtcctctttcctctgttttctcctctgggtaccagaattgcgacagagtgggacagctcaggcagctgcaggtcttggccagtgctcttcctcacccaggccatgcagcatcaacacagtcaccgtagaactcctcttaagacaagcaaaggaactttccaacccagtactcagggagttttgagattttccaagatgccatcgaggaactgaaaagtgctgcccagctgcagtgagggctttttaaaggcagtttcatgtctacaccccactgagttcagactgtccaatgaagcactgacattgttacacatgcgtgttgtggacaacttgagaaaacacttgtctgcaggaagatgaaattaaaatcaagtgtgatcctaccaccgaaagataagt

SEQ ID NO: 265125 - DNA, 476 bp, Homo sapiens
ctttccaggtaatcacggcctggacaacctgctggggaaggcccacctaactgattctgccaattttgacaatgtggacccatctttcatcaggacagagcacaatgacttgggatggaaatgccttatattttagcaaatttgatgtataaatgcttggaatttacacttgagaagctgaggggtggtggttatcgacaggaatctgtcagagagcatacccatggagcatttataattgggagccattccagaattctggtttgcatacaactctttaaaaagccagctaccctgaaatgtacactatctgagctctgcctttgcctgtgatgagtgatgttggtcctgcctcttagttctgctctcagtctccaccatcggcttctcagattttccttccaggaccagcaggcaggtgggtgtggtgactttgtggcagacactgtggcagattaaaggtggttgcaaattgt

SEQ ID NO: 265126 - DNA, 281 bp, Homo sapiens
ctagaaggtgcaaatgtgtgaatggccactgtgaagagccggtggaccctgccacgtgcctttttcccctcccatcaacctcttttgtgcttccccctccatgtaccaccttctccataaccacccctggcctcacaactctctcctttggcactatcgtctccttttttttgtttgtttttttggagtagatgaggtctccttatgttgcccaggctggtctcaaactcctgggctttttcctgctttttggctgccttctcttccatcgtttccatttg

SEQ ID NO: 265127 - DNA, 416 bp, Homo sapiens
ggaactgttacaacatgttggtaatataaaggaaaaaggaaggtatctcacatttagtgagaacttattatgtgtcaggtgcaagagctattaagattcacgagatataatttctctccttacaaaatttcttgccatgggacaaagagacaagtaactcaccagttatttgatcatttcattaatatagtgatgacaaagaaagtaaaattcaaggggagggagtattgtcaaagagttctcctcatttagataccttcctttttcctttatattaccaacatgttgtaacagttccagggtcacaccaaataattataagtctacagccctttgcctagttacacaaaatatgaatgacatccattatccctggaaaataattggttaactgaaacattaccacaaataaaggt

SEQ ID NO: 265128 - DNA, 434 bp, Homo sapiens
attaccaaggcatcagggcagagactcccctgaggctatgctagaagggtaccatttgaaaaggaagtgtatgacccaccgtgaaatggaactggtagctggtcacccaggtgctcttccttgttaactgatgagagcgattattatgtgagaactttaacaacctgccaaaggatcccggggcaagaatgagagctgaaccattgaaaagctgagcatcgaagtgcctgggaagcccaaaactcagcacattcatgcttttgctggtttttgaccattgagaagaaaaaagagtcagcaaccagggagcaggatgagtggatctggttcagaacatctgtgaacacagagggagtggaaacttcactttcaacatcatcagccaacttccctcccattacaattctatctcaagatcaaggtcatgcaacaaa

SEQ ID NO: 265129 - DNA, 828 bp, Homo sapiens
tcaggattttggtttgtgagtgctatccagccactggtgctagtacaaaactttatcacattaacttgctttatttaattctgtgttattttcaacatcattatccaataataaaatatgacttcatcaatttatctttcaaatcaagttgctcacatcatttcagatatatattacaatccaatagctcccaattatttttaaaaacttattcataaacatgggataaacctataaagactgctgtttcttcatgagataataatatgatataaaaacaaaacttcaaaatatgtttccaaaatcacaaagaataaaatatatcaatttgtaggtaaatgagctcccccaaattttatgatgatagcacacatttttcttgattaagaaaattctgtatatgttttcctctttccgaatataaacaggctatgctagaagggtaccatttgaaaaggaagtgtatgacccaccgtgaaatggaactggtagctggtcacccaggtgctcttccttgttaactgatgagagcgattattatgtgagaactttaacaacctgccaaaggatcccggggcaagaatgagagctgaaccattgaaaagctgagcatcgaagtgcctgggaagcccaaaactcagcacattcatgcttttgctggtttttgaccattgagaagaaaaaagagtcagcaaccagggagcaggatgagtggatctggttcagaacatctgtgaacacagagggagtggaaacttcactttcaacatcatcagccaacttccctcccattacaattctatctcaagatcaaggtcatgcaacaaa

SEQ ID NO: 265130 - DNA, 432 bp, Homo sapiens
ctccttgattaaattaaatgaacatcctttcctgttactccaaaggattccttataatttttttatagcacctttgattttagactgagggcttttagatagacttaaatagattcttctactgtatgtttctgaaatattggcccctgtactttaccaacatacatttcactttataaagttaatgtaagggcttttcagtgactccaggcaaacctcaaacaatctctgatttgcaaaaagatcaagatgcctctggaaataacacacaacccagtgttgttattattatttttttgcaagacctaactagagaagtgatcattatactgtatattctttaatcttgatgtttttaaagaagtttaagtgttgtatcctttaagcaattaagttcagttcaaaagacagaataaatacaaagctctttaa

SEQ ID NO: 265131 - DNA, 687 bp, Homo sapiens
gggattacaggcatgagccactgtgcctggcctgctttagaggtttgtttatttatttatttatttatttatttatttatttatttattttgcatattctgaagatacagaatatggcaagcacattttaggtactcaagtaaaattcagcacatttcagaaagaatactatgtaaatgattatctagggactggattactgctctacaataaagtaaacacaccaccaatacacaataacaaaggtcataccaaaatcttatgctgaataatacaagttaggcatgaagtaaaacatgctcaatgatactatctatatagaaatcctagaaaagacaaaaagctcaaatacagtaccagaaagctgatcagtatttgcgcaggagctgggagaaggggcatgagaacattttgaaattatggaaatgttttatttcttgattgacatgtggttatatggatatgaatattcattagaatgtcccctcactctacacttagtataggtacatttaattataaaatataattctatgaagctaatcaaatggctgttaaagaaagttttggtactgaaataaacctattaacaaattggaagttcctttttcttcctttctttgttttaatgcaactccttaactatgccaaaaaatggaaaccctcctgaatatggtaaaatgttta

SEQ ID NO: 265132 - DNA, 314 bp, Homo sapiens
ttgtttttgtttttgtttttttgaatggaaagcctctttagtaataacaattataaaccacattgtaagaagtaaatagaagaaagttagaagtttcctagtaaaacaaggttttagaatgcatttgataaatacagcttctttgttggtgatttctgttttacctttgttttttgatgtgtttttagttctttcagtggtctctacagcatttctatatatgtttatcaccttatttcttgagtatataacttacataccatctgttatctttcaatatgatagatatgtattttgctcagttatcattacta

SEQ ID NO: 265133 - DNA, 299 bp, Homo sapiens
ggcaggaggcccagtcagaaacaccgagggcagaactgtcccgggaagtcacctcagtcacacgaaagccaccgtgaacaggagcttagctacagacgatgggaacgaggtgatcaacactgcaggagaaactggtgcacggcggtgactgactggggatttggcataaggacaactgccttttaaaggctgggagaggccagcgcagtggctcatgcctgtaatctcaacacttagggaggccgaggcacaccgatcacctgaggtcaggagtttgagagcagcctggccgacacggc

SEQ ID NO: 265134 - DNA, 235 bp, Homo sapiens
cctacagcttgagggatctgggtcagtgatagagaatggagagaaagtatagggaaaatgagatttgaaagcctgctggagagaagtctgacattttagctgttacatgaatatatctcccagcctctataaacaagggcatgctggttagggccacctgtacttagagccagttatggtttgcataagcatttcataggatgccatcctggggaaatcctcatggggagcccca

SEQ ID NO: 265135 - DNA, 482 bp, Homo sapiens
ctgctaagaacagctttggcactatgagatgttaactgctgttctctttggattcatctgcgttgcactctttattaatggctgtgggtaacgggattaggcatgtacaggattgagggacatgggcaattccccccctaccttcaagacagcaccctcagccgcctaaacttttcagtgttcctgcaatggtaggtcttcctctggcctccctgagcatttcgccttgcccaccctgccacggacagtgctttttattcgctcctttccctttcttatctctctgttactcagggcaaccatgttgctcagagaccacgtgtcgaaactcttaagtcagaggttggattaaagatgacggggctcacccatctgggggcaaatttaagctttgccaatttgatattgggtgctaagcagagtggctaatgtctgtgttttatcacttgtattttgctctggccagaacgaaaaaaaaataa

SEQ ID NO: 265136 - DNA, 528 bp, Homo sapiens
ctttcattctgcagcagcctgcctcgctctctgactgatgtgctctgccaggagctctgtgttcctggccacaaggctgactcatcccgctgttgttcctaaccgtgcctgtcctatatgtctaggttgaggattggggatacagacaaagggaaggataggtcaaaatgaacgaccaggggactaggcgatggttgggtactgataagttccaagttggggccccaagttggcaaggggtgatactggtttctgcagaaagaaacagacttattgtcctaaggttgatagcaaaggcttgtgtgaatgttcagttccatagtctgacaaccacacagagtttgggtacatttgtgtttcgagatttatattttgcgttgacttcgtgatttatgtctaaatataaggcccacttgcattattcagtaggaaaagatatataagaaaaattgaagagctctgtatcattctgagaaatgggtaaataattcccaaataaataaagttgatgtgggtgagcaattttta

SEQ ID NO: 265137 - DNA, 476 bp, Homo sapiens
actgtctgttactttaagtggttttttatctagcaacagctagctgatacacagacataacaatttgcatttccctatggcttggtaagtatcttctacctttgttggtacaattaggccaacaaggattaaaatcaacaaagaatgtgtacatggatgttatccttactgctatgaatatcaaactattgcttgaggattgaggtccagtaataaaacagcagctatttctccaaaaaaatcctctgtgacttttcaaatgaaatgagggctttcctgccaatcccacaagtcaggaagataaaattgggcatggatctttcccttgctgctgcagaaactcttcatccctgtcagagatggcagatccattgctacaaccagggggccgtgctgaaagttcagagctggttttggaaatgacacagtctacttcattctggataagggcacagtctgtcataacaggttatttt

SEQ ID NO: 265138 - DNA, 206 bp, Homo sapiens
ccactctctacacagggcccaggttctaggccaagtggggtccctcttgtccagaattctctcctctgtcccctctccgcaagcagggacagaaaggggaagtgacaaaaacatacagttgcccataccctgccctccatctctcctcgccctccaagcagacgaaaagcatcagtgccttgctgcccggactgccttgagccttc

SEQ ID NO: 265139 - DNA, 343 bp, Homo sapiens
acatcttttcatgtgtttcttttgccatacatgtctttgttagtgaagagtcttttcgaatccttagcccgttttttaaattgaattgagtaaaaaaaatattgtgtttcgagacttttgggtttttttgttttgtttcttttaagacggagtctcactctgttgcccaggccagaatgcaatggtgcaatcttggctcgctgcaacctccgcctcccaggttcaagcaattctcctgcctcagcctccagagtagctgggactacaggtgtgcgccaccacgcccggctgatttttgtatttttagtagtgacagggtttcgccctgttggccaggctggtc

SEQ ID NO: 265140 - DNA, 464 bp, Homo sapiens
tttttgatatgacaccaaaagcacaggcaataaaagaaaaaagtgagatacagcaaaatttaaatgtgtgcaacgaagaacacaatcaagagtgaaaaggcaatctaaagaatgaaagagagtatttgcaaatcatatagctgataaagcattaacatgagtacacaaagcactcctacaactcacaccaaacaacccaatataaaactgggcaaatgacttgaatagacatttctccaaggaagatatataaatggtcaaaaagtacattaaaagatgctctacatcactatcattagggaaatgcaaactaaaatcacaagataccacctcacatcacttaggatggctaccatcaaaaaataaaaataacaagtgttagcaagcatatggagaaattggaactcttgtgtactattggtgggaatataaaattgtgtagccccttatggaaagtgtatgta

SEQ ID NO: 265141 - DNA, 489 bp, Homo sapiens
atgaaggaaaaggactggcctggggtcacagagctggactctccagtgagacagagcagcctcttcccaaccccactggaaacacggagccctagtgtccacttagcactctctgctcaccccagccttactgtgatctctcccctctgctcccgtctgccccagccgcaaggcctcgggtctaccgtggaatgaggggatccctaggcccagggaagggaggcgcgcttaggggtgggggcacaaacgggcatctcggtggcacttgtcctctctctaccctgggaaagggcagaaagcggcagccaagtcagggctgtgcacgggagagagagtgaccgcggcgggggcgcggagaaccccgctgggctcccgctcggtgagagggcgggagccgtgggtccgcgaagccccttcctcccccgcacctctccccgcagcgggggcgccccgccccccgggcgcccgacgtggaccggccgccgccac

SEQ ID NO: 265142 - DNA, 469 bp, Homo sapiens
gtagttataaattcctggaagatgaaaaccaaaatttaaaccaataactttttctccatcctggaagttttttctaggaaatatacaagaattgatgagggagaaaatgtttatccattgaatctcaacaggaggagtttcatatttgttgctaagaggaattatttttgaaatatttcaattagctttttaacaaaaaagaatgaggacccttgatgagatctacaaatagagtataagtgggggaaaaaatcaaggtccaaagaatgtaaattatataaccgttagtgtaaaaaagagggagaaagtggaaacgtctaagtccttgtttcttatccatggaattgatctggaaggatggacaggaaactgataccagtggaaaactgtgaagagaaaaacttaggctggagcacagaagaatggggagagcccacatgatgctcttcagttttcgttaaaaaaataa

SEQ ID NO: 265143 - DNA, 581 bp, Homo sapiens
atcatttacctttctttttttaaatcattaattttttaaacagccttgatgtgtttttataaattgtagactgtgaatttttgtgctgtttgaaatctaagagagagttgcctttctttgtattcttggagcaaagtagaaagtgaacccatgactagaaagataatatcaagtaggatattgtaaacacacctcagggagataacatggggtggaggcagacaaacaggccaatccgggggaggaatggagttaaggaaagctctacaatgaggcagattttttaatacccactccttccaagtccttcagctcaagctgcagccaaatatttgcataaagagctggtaaaggattccagcttcctggttcatgacattacagcatggatcgttttcaaaattaatactgcctcctgtttcagcagtggctgcctgcacagctctccctgtggctcagagtatgggagtgagtatgccctgtaacccaaaagaggtgtggtgagctcggcttcccagcacagaatcacagagcaatacgggtacctttaaactttaaagccacacctgaaatttaaaaaa

SEQ ID NO: 265144 - DNA, 462 bp, Homo sapiens
ttaagtttcttagataatgaattttagatttcctttctgtcttttatcctacaatttcttggatgaagtttggagtaattaattgtatcttgatcatgattgcaaacttcttttctacaaattataaggaaagtaactaattacaatgcttaaagacgttttacaccttgtaatcttcatctcggctctcaaaggtagctattttggctctatttgtggttcaagtatcttaaagtatggactccttgtacttattaagagttgcagtataaaactctcatcactaataactttcttttctttttattcttttgagacagagtctcgctctgtcacctgggctggagtgcagtggcactcagtcatagctcacttaacctcgaactcctgggttcaagggatcctcctacctcagcctcccaagtacattcatgcaccaccacaccctgctaattaaaaaaa

SEQ ID NO: 265145 - DNA, 495 bp, Homo sapiens
aagcatgtgaggcatttcaaagcccagtgggcctgtttggaggcaggttctcccacagacatggttgtgcaccactgaaaaatagtcacatgacttttctgagcccataaagtagaaatattgccccaaacaatccctctggtcctcaccactccttaaattcagtgacagactctagatggatgttacagctcatctctgcctgcatctccagcacagcagtgctaaccccaatagcaagtttattccttgtccaggatctgttattacagattacaattaaatcaccaggtttatcttcactgctggcaagcattcaaaacacaaacatactcatgatctcagtatgtaaaagagattgaagaattaaaatagttcaggcaagggggctcatggctgtaatccccacactttgagagacaaggcaggaagagtgctcaaagccaggagttcaagatgagcttgggcaacatagcaagactgcatctacacaca

SEQ ID NO: 265146 - DNA, 399 bp, Homo sapiens
aactttcactccccaagatgtttttatatttttactacataagaatgcatctataaatactggcattttcaagaaagttaatttttactaacttcaacccaaatttgccattgtataggatggctccttttcagggcaaacataggttcaaactggacgccattgaagattaactggtactcactttgatcctattgattcctctttgctgtctagataaaaatgtatttgtcacaatgtagtttgtactaactcttatagcaaaaaataatattcagagaaaaatctaggggaagtaagtatgcagactaactcttatatcttgtcctttcataagaaaaatttcccatcattaaacatttaataatctattatactgcctataaaatttccctttaa

SEQ ID NO: 265147 - DNA, 214 bp, Homo sapiens
catgccaggaatgacgctgggagaggtatcagtggaacagactcctagaagacaacgagaatggtgggattctgaagtggcaggggccatatgatgcaagtaatagttactggcactaattgacaaggtcaaggtgggcattgttaccataatacacaacaatcattgatctgatagtagtcaggtagtatgacctacagagatctttgtagct

SEQ ID NO: 265148 - DNA, 187 bp, Homo sapiens
aaggctatgactgctaagcagcaggcagaacaggcaaccatggagaagattgtatgctgagatggaagacccaaaagattgaagcagcctggataactcgggtaccacacagaggacaactgccctagagagttgccttgacccgcaaaagacattgcctgagatgaaaataaacttttattgtgtt

SEQ ID NO: 265149 - DNA, 398 bp, Homo sapiens
tgagacagggtctcactctgtttcccaggccggagtgcggtggcacaatctcggctcactgcaacctccacctcctgggttcaaacagttgtcctgcctcagcctcccaaatagctgggattacagggtgtgccaccaagcctaactaacttttctatttttagtagagacagggttttaccatgttggccaggctggtctcgaactcctgacctcaagtgatctgcatctcccttgacctgccaaagtgctcggattacaggcctgagccaccatgtcctgcctcatgtagttctttatagcagtgtgagaacaaatataggcgccaacaggttaagattataagagcactggcctcgtgcacaaacatttagagaattcaagacatcacaattttt

SEQ ID NO: 265150 - DNA, 1307 bp, Homo sapiens
tgtcgcgggggcgggaggaattaagggagggagagaggcgcgcgggtgaaaggcgcattgatgcagcctgcggcggcctcggagcgcggcggagccagacgctgaccacgttcctctcctcggtctcctccgcctccagctccgcgctgcccggcagccgggagccatgcgaccccagggccccgccgcctccccgcagcggctccgcggcctcctgctgctcctgctgctgcagctgcccgcgccgtcgagcgcctctgagatccccaaggggaagcaaaaggcgcagctccggcagagggaggtggtggacctgtataatggaatgtgcttacaagggccagcaggagtgcctggtcgagacgggagccctggggccaatggcattccgggtacacctgggatcccaggtcgggatggattcaaaggagaaaagggggaatgtctgagggaaagctttgaggagtcctggacacccaactacaagcagtgttcatggagttcattgaattatggcatagatcttgggaaaattgcggagtgtacatttacaaagatgcgttcaaatagtgctctaagagttttgttcagtggctcacttcggctaaaatgcagaaatgcatgctgtcagcgttggtatttcacattcaatggagctgaatgttcaggacctcttcccattgaagctataatttatttggaccaaggaagccctgaaatgaattcaacaattaatattcatcgcacttcttctgtggaaggactttgtgaaggaattggtgctggattagtggatgttgctatctgggttggcacttgttcagattacccaaaaggagatgcttctactggatggaattcagtttctcgcatcattattgaagaactaccaaaataaatgctttaattttcatttgctacctctttttttattatgccttggaatggttcacttaaatgacattttaaataagtttatgtatacatctgaatgaaaagcaaagctaaatatgtttacagaccaaagtgtgatttcacactgtttttaaatctagcattattcattttgcttcaatcaaaagtggtttcaatattttttttagttggttagaatactttcttcatagtcacattctctcaacctataatttggaatattgttgtggtcttttgttttttctcttagtatagcatttttaaaaaaatataaaagctaccaatctttgtacaatttgtaaatgttaagaattttttttatatctgttaaataaaaattatttccaacaaccttaatatctttaaattaa

SEQ ID NO: 265151 - DNA, 828 bp, Homo sapiens
taccgtcttcagatggagtcgtaggataagccgggtactgctgagaagcttagatgacaactgcacatcctctgggcaacaaagttatagtttgaagctctgcacttgtcattactggcttggattaaggcgagttcattgaattatggcatagatcttgggaaaattgcggagtgtacatttacaaagatgcgttcaaatagtgctctaagagttttgttcagtggctcacttcggctaaaatgcagaaatgcatgctgtcagcgttggtatttcacattcaatggagctgaatgttcaggacctgattagtggatgttgctatctgggttggcacttgttcagattacccaaaaggagatgcttctactggatggaattcagtttctcgcatcattattgaagaactaccaaaataaatgctttaattttcatttgctacctctttttttattatgccttggaatggttcacttaaatgacattttaaataagtttatgtatacatctgaatgaaaagcaaagctaaatatgtttacagaccaaagtgtgatttcacactgtttttaaatctagcattattcattttgcttcaatcaaaagtggtttcaatattttttttagttggttagaatactttcttcatagtcacattctctcaacctataatttggaatattgttgtggtcttttgttttttctcttagtatagcatttttaaaaaaatataaaagctaccaatctttgtacaatttgtaaatgttaagaattttttttatatctgttaaataaaaattatttccaacaaccttaatatctttaaattaa

SEQ ID NO: 265152 - DNA, 299 bp, Homo sapiens
ggccttgagagtcaacctccagtacctgttatggtgggcatgtacaagagaaactgtgtgaccgaggtgtctatcctaacacacttaatgacagagttaggtctggctctcctagcccagtattccattcagggcagattcagcacaactgcagtctaggacaaaagatgattctttcaacttttacttcttcagttaatacaaatgaagaatgatagagaaggagcaactccaagaaatagtgagaagtgtgtagctgagtagatttcccaaaagcattaatagggccagtgttacca

SEQ ID NO: 265153 - DNA, 963 bp, Homo sapiens
ccatagagaggtttacagtagattcacttgagaaggctctgtggtggtgtgaaaaaggtacttgtcctggttgatactgctactacctactttttaaccttgtaccagtcatttaacctctcatggtccagttttcccatcaataaaatgaaagttggactagaagatttttaggatcccttctagttctatgattatatgacatatgctgaagaaaaaatagtttctagttcaggaaaaggataatcaaatttataaatacagaaagcctttataaattcaagtaatttggacgaaggctgatgtgaattggttaaatgtctgaatttgtgaatacttgtaaatcattaacactgcaactattcacgttaagctgtaacttgaattaggctagcaatattaacatgtagcgagatatttgagaaacctgctactttgaataattctgacttagaatatgaattattttggatgactaaaggtaatattttctaaagtagcttaggtattacagtaatacttattaaccttttaaaatgtggtttaaaggcaaagttcagcccctgaatactaaaaataattgaacatacagtacttgcggatcactctgtatgagacaaagggagtagtatgaagttttatgttttttcccccttaaatgaaatctacattagtcttttaaaaatatgtatttttgataaccctagctgacagaactccatcgcaaggttattgacttattttggcagaatgtgtttattattttgtacctctgtacacaagcacgtatgtctcacttgacattcagtgcgtcttaatgaaaaagaacacaaattgctcaatgcatatctggtttccagttatttctacccgaagattatttggtctgtgggtctgcagtgacacctagtgggtgataaggatgtgagcatcaatgattaaaatgaatttcacagctaattt

SEQ ID NO: 265154 - DNA, 459 bp, Homo sapiens
tattttctgtttgctggtacatttttgtgataagctttttaaggtacaggaaaatctctatatatcactctctgaaggagagcaaatgccattgatgtggcttcactccacatgacaaaagacttatcctagtttgcagccaagtgactggaattgatttgggggcatcttaggggcaacaggtcagtctgagagtgtataaaatgtgaactcagagaataagagcgcttgaggagaggaaactgagctcttcctgcagctgcctctcagcatcctacgtgagggatcacacaccccctattccccctcatttgtgagtacatcacccagtgcagatgtaaaaatttatataaaatatattcatatgccaactaaactaatgtatcacatacatttataaaacatacaaactgttacagaaggaagtaaaaaatatcaataaaagtctaatatttattc

SEQ ID NO: 265155 - DNA, 192 bp, Homo sapiens
gcacagtatactttcgttccaactgagctgtaacccctagttactggcacctttaagccatcaaaatggctaaatcactggcacctttaagccatcagcacatggtgaacccagaagttttaactggaagctggtaagacctaaagtgatggtttgcactcaaaagctgcctgtctgatggctttaagacaa

SEQ ID NO: 265156 - DNA, 202 bp, Homo sapiens
ctgggggaggccctcggagtggggtcttacaagggagacaggaattgccagatggacaagcacagagtgggcacccggaagagggaggaggacgttctgaacgaggagccagcgcatgggcactaaagctggcagggggtgggctgggagcaggagatgagacaggatcagggagaggcgcgccctcgggggtctggctgcc

SEQ ID NO: 265157 - DNA, 390 bp, Homo sapiens
ctatatttagacaagtatatttttgcaaaacagcgaaagctcagtgttcctttcaaaatgaaaactttccttttccatacctcactatcaattatttcagtctcagatatgccccgttctgtttctcccacaatatttgacttaattaacaatacagtcgattatttacaaggaagttatttctaaaactgtagttcaaaatcacatctgattttttcacctgacttttgtggtatagttgtttttgtttttaatgatgttgccggggttcacttttcccaaaagtagtttttaagagtaaaaaactggggggaaatcataaatggccaaagaggttaaataaattatgttaccttcattaagtaaaatatttgcagccactataatgat

SEQ ID NO: 265158 - DNA, 609 bp, Homo sapiens
caggactgggtgtccaaggatggggagattcccatattcccatgatagggccagttcctctcagtcatctctccagctaaccctcagaccatcctacaagcagaagctaacatgagagcctttactgagaacttctggggcaccacaggccccaggtttgcgaggagagcaggtcaaagttcagggcagctgggggcagctattgtaacttcagggtcaagagagctttactccagtggttataatcaacttaaaggtcttccctcctctcagtgaaaatgaaccccggatcctcttatcatttggccttcccccttgcacaaagtttatctcctccacagtctcacatccaatcctgagaccttgacaccacagttcaaagatgaacataccagcctgggcaatacagtgagacctcgtctctccaaaaaaacaaaacaaaacaaaacaaaaaaactaattagctacaggtggtggcatgcacctctagtcccagctacttgggaggctgaggtgggaggattgctggagcctaggaggtgaaggttgcagtgagctgagatctcgctactatactccagcctgggtgacacagcgagatcccatccc

SEQ ID NO: 265159 - DNA, 430 bp, Homo sapiens
tctgctcctccgtctcccagaatcctgccctggaaaaaaccagcgccaaccgccggtttaactgaggacggatttaaggcattacgaaagacagctttcccctttgctcggctctccttctctctcctgctgccctgtgaagaggtgtcttctgccataattgaagaggaagaagagctcttaccagggggaggcagagatggcacagcaagagacatgcccccagaatgccaccaatgccccaggacaggcccacccatgggaccaggttatcgggataacctgggaggatggggtggaatctgaggggtgagccttcttccccaggctggaagtgggcgacacgagactggcacctctacatctgattgtcccccaaacccagcatttatgtcgtgagcaaagaaagaaatcatgttacttcttccag

SEQ ID NO: 265160 - DNA, 326 bp, Homo sapiens
  misc_feature (32)..(33): n is a, c, g, or t
  misc_feature (52)..(52): n is a, c, g, or t
  misc_feature (56)..(56): n is a, c, g, or t
aagaccacgacaacacaccaagaatcacaacnntccctcagggagactgaanaagnacgaagaggaagaagagctcttaccagggggaggcagagatggcacagcaagagacatgcccccagaatgccaccaatgccccaggacaggcccacccatgggaccaggttatcgggataacctgggaggatggggtggaatctgaggggtgagccttcttccccaggctggaagtgggcgacacgagactggcacctctacatctgattgtcccccaaacccagcatttatgtcgtgagcaaagaaagaaatcatgttacttcttccag

SEQ ID NO: 265161 - DNA, 321 bp, Homo sapiens
ggaatgtaagtttacttaacacaaaaaaaaaagcgcttaggaggagcagacgagaagaggaagaagagctcttaccagggggaggcagagatggcacagcaagagacatgcccccagaatgccaccaatgccccaggacaggcccacccatgggaccaggttatcgggataacctgggaggatggggtggaatctgaggggtgagccttcttccccaggctggaagtgggcgacacgagactggcacctctacatctgattgtcccccaaacccagcatttatgtcgtgagcaaagaaagaaatcatgttacttcttccag

SEQ ID NO: 265162 - DNA, 360 bp, Homo sapiens
tttttttttaacatcatcttatactatctttaatttcataaaaaggatttaagggtctctctcccacctattaaaaatctaccttccacacttgtttccacccttgcttcctcattttgatgatttattttctcaaaccaaaatcattaaggttatgtcacagtttcttctaaatctttgtacctcgtaacccatcagtcaccaaggtctttcaagccttccttcccaatgacttttagattttgctcctgtccttcattgcctgaatccttagccctttatgcctgggatactgaaattgcctgccaaccagtgttataaggtagaaaatgctacattaataagttccacaaaaatctt

SEQ ID NO: 265163 - DNA, 491 bp, Homo sapiens
cacgaggttaatcccaaaattaggattataatgtatatatagctttgttcttctttgtttacttaatgctataacatgttcttttcctcatgtcattgaaagtcacatttttgtataaagtactcattgcttagatggatcatgatccagtatattctgttgcagtgggaagaggagaggaactttggtgcatcccttttgcttccaggcctaaaacaaaagaactcagtgggtttcagttcccagttgtatggctatgcacttcttggtaagctaaatgatccttacaaatactgttcttcatggttagaattgttgcattcttccagttcataataaaattgtaatttgatttaaatttaccagtgaaatccaattagccttcgtttttagacataaaaatagaccttgatggccttacagttactccataagagagtaaagagggttcttaaaacctgccatcactggcaaagcaagaactagttctg

SEQ ID NO: 265164 - DNA, 186 bp, Homo sapiens
gaaacaacctaattgtctaaaagccgagaacagttaaattgcagaaatacatactgtgtagctattttaaaaaatgaactggttacgtaggaaggatgtgtatttttttgagtcttttaaaaaggcaagttgcatgacaatatgtatgatataaacccattaaaaactctataggaatatttatta

SEQ ID NO: 265165 - DNA, 667 bp, Homo sapiens
tcacaaaacgtcttccaattgtgtttcactttcacatgtcagatttcatgtaatgattgctaattactagcaacccagacaagatatagacttatgaaattgcctcatgagtttagtgatttttcagcaactggaaggaaatagaaaatccttgggtcagttctacctgagttctaatcccagctgtgtcttttacgagctggtgggcttgagtaagttattcaacttttgtgtgcctcagtttcctcctctgaaaaatgtggatgataatagtacctaccagttagggtggctgtgagaattaaaaaagatgattcgcataaagcactagtttagggcccaatagtaacatgtaatatcccagcattttgggaggccaaggcttgagtccaagagttcaagaccagcctgagcaacatggcaaaatcctgtctcgtctaaaaatacaaacaattagctgagtgttgtggtgcatatcagtagtcccagctaccagggaggctgaggtgggaggattgcttgaactggagaggtggaggctgcagtgagctatgatcacgccactgcactcccacatggtggaccagagtaaaaccctgtactttgggaggctgaggtgggcagatcacaaggtcaggagatcgagaccatcctggctaacatgatg

SEQ ID NO: 265166 - DNA, 342 bp, Homo sapiens
gctataagtattaataagtaagtgcactagcaatactactagaaattgagtatttttgaacatagccagccctcaagtgaataattagctcagtatgaaaggaactaaaatggtcatttttctcacagggcttcaagatacaagagcccaaggcgctctagtctcctttgggtgtttgaatttcctctttaaacacaccaacagtaaaagaactactatttcaaataagcagtaccataactgactatatcttccaaggttttggatgcaatctaagggaaagggggaaaagagacccgacttggcaagacccgtaccgaagcagtctggaaaaaaagcaaa

SEQ ID NO: 265167 - DNA, 651 bp, Homo sapiens
tgaacttaaatcattgggggctgttatgaggattaaatgagcttatgcatgaacgctctttgcacagtaacactaagtgatagttattaatcctccaccagtatcaccctgtctaggcaagcccctggaaaaatcctactaattctgtaaggattatctccaaacttttcttcatgccctggtgatactttgaacctctcttatggcacttttcctgtttttctgtttcttacaattataaatatacttgcctaatctcttcctgctagactgaaagtaacttgagggtagagatattgtgtatgtgtctcccacaaagactaacagaaaatcttgcataaggtaggcacttaatacttactgagctgaattaaattgcactagtttatatttaaaatatacttaccaataagtaccatcagttggtgtcatgttatgacactgccattggcctttactttccttctttccagaggtctatcatttgtcctgcagtgatagttcaagattatctgccatagaagtgagttgggagttcatagagtttccagaaagtcttttcctgtaacactcacagaaagtcatagagaccaaaatgagattgtgggctctgggcacggtagctcatgcctgtaatcccagcagtttgga

SEQ ID NO: 265168 - DNA, 249 bp, Homo sapiens
aaaaaaaaaaaaaaaaaaaggttcccagaagctgatgccagtcaatcattggggctcccagtgcacaatagctactgtgttcctgtgttgcctgcatctgtcaggtaccgctttcaatgcaagatgcaatcatggttgcttccctgctgatgggattttggtgttttagcaacattcacatactttttgtttagaaaattatttgctgatgttttaagttaaagtcaataaaggaggctattttctgta

SEQ ID NO: 265169 - DNA, 726 bp, Homo sapiens
gtgatttatttattttgttgagggtttccaaagaaccaactctggtatttatttgtgatttggggtttttaattcattaacttctatctatcaatccctttgtcttgctttccttgtatttactttattcttctcttattaacttgaattgaaaacttgccttatctatttttcttctgttcttcataacattgaaaagcatttaaggtcatgaatttgcttcattataactttgacagttctcctagctcttgatatatagggttttcacgttcctgttttctcactattttgcaattgcagttttaaattcctctttgattcaaaagttacttagaaaacagttgcaatgtttttatgtttatgtttaattttcacatggatggagatttttggtttctcttttgttgttaatctccatttttgctgtactaggtcaaagcactgacctgtacaatttctattaggggaaatttactagaattttttttcttactttgttgcctaatgaatgcaatatttctgtaagtgtcccatgggcactggagaagaactgggcttctcagccttaagggcacagtttgatatgtaaactattaagtcatcttactgattacattactcagaatccccacgttcttattgacttctcaggcccttagggagttatgttatggttttccactcttactgcgtatctttcaggttttccttatgttcatgggt

SEQ ID NO: 265170 - DNA, 433 bp, Homo sapiens
gaaacagccaaaatggttctgagtcaaggtgattgtgatgattgtgacattagagagaatgaagatgacattttaacactgcagaaaaagtgcctataggtggcatggtgaaaatgtgtgatgggtttactgaaggactagagcagtgtgtattcataacagaacaataaatcatgtcagtttgtaaaatcaaagggagacttctaagttaaaaactgttgttaatgaggcagaggaactctggaggaaacatcttaaaaagccatttagcaaaatgcctcctgatacctagaggacccactttctggtccctcaacagcttctgctatttctcctcactccccaaaataaaataaagtgtacagtaaccttttaatcaaaacacagcattataggtggaaacgaaaaggctgctgttgtttgctgctgttgc

SEQ ID NO: 265171 - DNA, 246 bp, Homo sapiens
gggcaacagtgaacgtcaaagaataataaattactgtaaaattaagtatggcagcttctctgtcctctgcaccatttactagacttcccatctgaagagttgtcttccccttttatgacaggctgttttaagacagagctgatatgatgaccataattaggtcttgggagagaaattagatcaagaaattcctgactgcttcaagctaatgtagagaagggccacacttccttctgacaatccctg

SEQ ID NO: 265172 - DNA, 417 bp, Homo sapiens
aaatcataagggtaaaactcaaatttttacatatttatgtggttggggtgtgaaaagttttttaatggagagttgacattgtcctagaaaattcttccgtatgtggcttttaaatgtatgattataggccaggagcggtggctcacgcctgtaatcccagcactttgggaagccgaggcaggcagatcactcgaactcctgagctcaagtgacttgtccgcctcagcctcccaccaaagtgttgagattacaggggtgagcccctgcacctgacccatagcagtttttcatttaaaaaaattattgtatactgttccatgatatgaatatgccacaattcatttatccattattgtggatggacattaggttgtttccagtttggggctattatgaataaaattgatatgaaccttc

SEQ ID NO: 265173 - DNA, 656 bp, Homo sapiens
tacttcccagagctctcagccaacaatggtggtatcctccaagagcaaaccgaatgcagaccatgttacattctgagggctgctggaaagccctgctcacacctcaaaggaggaagattattgattctttgtaaaagcatcaaataggtatcacatcagactctaggaagctcatcctgcacccagagaataaaaatactatttgagatgctcccaaactttacttatctaagtggccatatcattggcatcattcagacttacaatgtgtgcactcagagctgagaacattaagtattgattgctctttaaattcacgtagactgaatcattacagtcagttttgcgagtttcattgttttgttgggaacaaaagaaaattctccataagacatgatgacaggatgggtacaaaaaacagtgagcaaaaatgaataagacctaatatttgctaccataacagggtggctatagtcaaaataatttaattatatatttaaaaataactaaaagagtataactggactgtttataatacagaggataaatgttgaggtgactgagaccccatttaccctatgtgattatcacatatggcatggctacatcaaaatatctaatgtaatctacaaatatatacactactatatacccac

SEQ ID NO: 265174 - DNA, 376 bp, Homo sapiens
accaatacctgctaaatattctattttcttacagctcacaccttaggattgattactttgctttgcaataactatgaagaagaaatacaggcttgttatggtttgaatgcatcctctccaaaatttaggttttgcccacattgcagtattaagagatgattagaccataaggggttttcccttgttaatgggatcaagactcttataattgaagctttagacaacattcatttagcttgcccttctgccacttgtcaagtgatgatgccacaagaaggccctcacaagaccagaagctggtgccttgatcttgaatttaacagcctctagaattgttaaataaattgagaaataaatttttggtttttattagtga

SEQ ID NO: 265175 - DNA, 467 bp, Homo sapiens
cctttaacactgacttatttcttaatcatggcagtttaggcatgccctgttttaaaagaaaatcctatctatgagaatccatattgaaaacacagacatatccataggtaatgacatctgcctctgttaaggtttttgtttttcccctctttacaaaagaagtcacctcagtaaatttttcaatagcatgaccacagtccctcctccagcacaaaaatttagattttcataaaactctccgagaacgcatcatctgtcactaacatcaatacttagctctttcacactactctatttgtgacacccagagcctcacgactgatggaatcaccctgtcttgacttttcatcccttcattggttgagagtttgtttcctaaccaatgttgctgaaaagaattcagcactgagtaggggtagggcaggaaatgagggattactgcctggggactggggacgtagaagaga

SEQ ID NO: 265176 - DNA, 705 bp, Homo sapiens
caaatcaaccctttctctgggctatctaaaataatcaggtactagaccaaaaaatgacatgctgtctgccttaccttttagtgatgatttgtaggaagaggaaggtaggggctggtgagtggaaaagtagtagagtttgtgagggaatgttctgtatgtctgaagacaaagtctggagattggtgggccagaaggtgtgaatctactctgaaggacaggcaagagtccagcccagggaaaaaggtgcagatgggtaggatttgggtgggtacttgaattaaaaaaatgaatttgtgaggcaatattgctggagtcaaaaccaaaaaatcaaattgaccagggcaaaaaatagcctggggcctagcatggctctgctgccacgtaggatgactggacctctttccaggttcgtgttaacagtccatactacttatggtatacgtgaaatgctttctattcattcaagcaaccttactaaaaacaccccatgaaaataaaagtctatatcttcccttcaatatacattcatatgtgcttattttaagcatatatctaccaatttgagtttggcattctttttcatttaatattattacctattcagcttccaacattatcacttccttactacacacatctgtttcctaggactgctgttaacaaattgccacaaatgtatggcttaaaacaacagaaatttattat

SEQ ID NO: 265177 - DNA, 480 bp, Homo sapiens
ataattatagaacaaaatgtgcttaccttttagtagctatttaaagatatttgctcctaggttttatggtcaattaattagtaatgaaaatacacatgttgcttagctttttcgtatatgttgggagcataggtgaataaaggcaaataaagttaaaaagcaagttgggatctagattattttgtctttttaatgctaggttcggatgtttgcagaagacaatggtcacttgactttaaggagacaaagtgagaggtttccttttgttagccaaactagctttatttctaaattgtgtcagtgaactataataattttcagtgggacaaaagggacatcatactggacttaataatacctgggtgatgaagtaatatatacaagaaacccctctgacatgtatttacctaggtaagaaaccttcgtgtgtacccccgaacctaaaataaagttaaaaaagggtgactgatatggtttggc

SEQ ID NO: 265178 - DNA, 1790 bp, Homo sapiens
gaggtgcccatttaagctagatgtgcatgtcaccacagatgagtttcagttagggcttatagcagcacatggagtgcctgagcatgccaataggcttttggtcccaactatggaagggagctgagctccagtatttcttggtagagaagcagttagtaacagcaggatgggtgtgttcatgggtaaccaccccctcaactgggaaaacagtaactgcatatgctgccctttaggctcacaaaagtgtgtcaggatgggttacagtcatcgtatgggccacttacctagtagcgggaggggtgtgttcatggggaacaaccccccagacagggaaggcacagacatccactttagcaaagtggggtgcctacttggagcagcaaagtatgccaagtcccttagcagcaaagttgcaaaaagtcttgggacctgtagtcctaatgcaaaataagactgtggggcctaaggcatccctagaccctatgctttcaccattaggaagagcgtccccccattcctaatagggcatggtatacagatgggtctagccaaggtgctactgctgcctcgactgttgttgcagtccagcctagtactgacaccatatggtttaaaaccagtgtacgcaaagtagctaatgagctaaactcacagcaatgtaaatggtaatcaccaagaaggtaacactgatggtaatctgtgccaatagctgggcagtttatcacagcttatgtatgtgtcaaatctgtatatatacattgggcctgcgtgcccaatgcttatgggtcaggcttatgtgtcaagcctatgtgtatgtattgggtttgcatgcccaaagtttatatatcaggcctgtgtgccaaacctgtgtatcaaacctgtgtgtccaaggcctatgtctccctcggcctaggggatggaatgtaaggtacacggatgtgctttggtcgaagaatagaccaaggcggatatccaggcctgcaggaatcagcaagtttggtgcacaggtgcaaacctccacttgttatataacctgtttgtataagttcatactttgctctgagccactattgcctgtgaaaggtataattgccctgctaatgctatacagcggctcgtgggcttggcttggctcaacatagcaggtgcacttgtgcccagagaaagagagagtcagagctatccatcttgcagatgaacaggagggagctaggacatagctcgactggcttgtggccagagacagaaagagttaagctgctgacccgaaaggcagggcagagccggctgtacagctgtatgtgggagccactagctcaagcagctgagacagggaagacagcataaagagctagtgtgagaaagttgttaatgagagctgctgctgaataaaaccatattcacctgcctaaggccccctgagtgttctttctgcccatccacccacttccctcatacttcagcatgggctagacccagacccccggatctgacaaaggtgcctgcttctcctttgccttttgccatgattgtaagtttcctgaggtctcctcagctatgtggaactgtgaatcaattaagcctcttttctttataaattacccagtctcagatatttcttcatagcagtgtgagaacagatgaatacatattgtctctgacaataaatgtgttctcactcatatcattcttcgtctgtacataaatatttatttctgattacttttataattttttaaattggttctgagtaacttgattaaaatatgacttggtgaatttttttttca

SEQ ID NO: 265179 - DNA, 437 bp, Homo sapiens
atagaggatcttccacaccgcaatctctccaggtgattctgatagatggtaaagtttgagaaccattggaattgttgtagcagtttttctgtttgttggaaacaaaaaattaactagaggtagttaccttaatttcacacttcacagcttaaagttattttaaaatcgtttcttcatatttcctgccagttgaatttgctgacatttttctaaaccactaatggtatcttaggcacagtatccttgaatcacaggcagtagtattaagtttctgaagactgcttctccccccaccatgctccttaagtcttatttaaataaccttcagtgagtacagaaggggcccattactacgcccttcctggtgacaccagttaaccaagccagggcaagtaagtgtaccctgcagccctgccagccaaagattgctacttttt

SEQ ID NO: 265180 - DNA, 684 bp, Homo sapiens
gggcagatcagcagaggtcaggagttcgagaccagcctgaccaacatggcaaaatcccatgtctaccaaaaacacaaaaattaaccaggtgtggtggtgtgcacctgtaatccaacctactagggaagctgaggcagaagaattgcttgaacctgggaggtggaggttacagcgagccaagattgtgccactacattcttggatcctaccccaaacgtactgaatcagaaagtctggcagtggggactcaacagcctgtgtttcaactagtctctccaggtgattctgatagatggtaaagtttgagaaccattggaattgttgtagcagtttttctgtttgttggaaacaaaaaattaactagaggtagttaccttaatttcacacttcacagcttaaagttattttaaaatcgtttcttcatatttcctgccagttgaatttgctgacatttttctaaaccactaatggtatcttaggcacagtatccttgaatcacaggcagtagtattaagtttctgaagactgcttctccccccaccatgctccttaagtcttatttaaataaccttcagtgagtacagaaggggcccattactacgcccttcctggtgacaccagttaaccaagccagggcaagtaagtgtaccctgcagccctgccagccaaagattgctacttttt

SEQ ID NO: 265181 - DNA, 432 bp, Homo sapiens
tttatggcacttatccctgaatgttatctgcttattgtctgcgcctcctaccataaggatcagaattttgcatcatcttatccttagtgcttggaacagtggtataatacatagtagacacctaattaatatggttaagtaaacaatatctatattacagagaagaaggcaaaaataggtagattggcaacatagaggagagggtgatcaactctgacttttggtaatatgtaaaatgggtatgactagaagtgtttgagggagatttagaggcagtggggcaggatgtgcataaacaaagaaccttaaaacagcatggcacatctggggactgcaagttctcagcctggacacctcccttaagcttctggcctgtatacccacctgcttcctggattatctcttcctggacaaggcattcataggtacctc

SEQ ID NO: 265182 - DNA, 765 bp, Homo sapiens
atcttgcaactttttgaatcctagagatgaaatacacaagtcagaggtacagaatatgcaatttaggagaagcatttgtgaaaaaacaggtatacttagaaattttagttaacacagtacttaatcccagctctggaactcacctatataaaaatgtgtgtgtggcggggctgggggctaggttattctctttaacttagagaatgcacacagcgtccctcgcatatgcatggcacttggaagctactcaataaatattaacttcctttccttccctcacaatatgagtcaacaattgatgcatcttccaaggggtcatggggaggactgtcatcgttggtggcacgagtgcacatatggtttagaatgtcggaggtgattcgccctgctctatattccctgcctgctgtctgcctctagctctggcaacctcattctaagtggaaagcaagatgagaggggacttaaagacacattcataataggaactgagagttatcagtcattggtgaatggtgttatatgcagagcccttaagggaattggagaagtttctctagagaaaagggcagataatataagggctattttcaaatatctaaaaggctgcctttctagaaaagtgattagccttcattaaaagctagaaaaccagattttacccagtattaaggaagaactttctaatattcagaactgttccaaagataaaagtggactccccaggaccccagaggtggtttacaagtcatgtgggcaattatt

SEQ ID NO: 265183 - DNA, 455 bp, Homo sapiens
agttttacttatttccaacaaggcaagttttcctgcttccatgatgatggagagcaggcacctcctttcttgagtttcagcttgcttctgacagggaaggtgagtgtaagttttttccagcttctaagatggcagagaacaatcaccagcctgagacttatttccaggtaagtagctgaattagagttttgtcttaaaatttttccttaatgactaaaatttaagattactcaccagctgcttttaatttctccttaccattagaacactcagtaatcatatgaattgtgcatttgtttgttttgcttaactctttttgtttgtttatgtttggggttttgttgatgttgtttcacttttctcccatctcttcctgacttggtcagatccaaagaatgctccaaattgtggggaacaaggcttctgaattggctaaaactcatgtggctgcaaaa

SEQ ID NO: 265184 - DNA, 811 bp, Homo sapiens
atcaataacttgaaggagacagaggtagccctgtgattggaggagtgagagcatcccaggctgggggtacggctgaggcaggggccaggaggtgggagggcggccaatgtgcaatactgggacctcaggggcacgaccttggtgccttgattggtggtaaaaatttaaagtagaagcagctgattgctgagcagagggccttccccagatcccaggaggctgcagtgggtctgatgcttgttttcaggtttctagggggttgctaggtgattgggatcacagccttcacatgcctggtagaccctgttttggtttcccactgctgtcctaacagatcacaaactgggtggcttaaaacaacagaaatttactctctcaacagttctggaggccggaagtccaaaatcaaggtgttagcatggctgtgcttcctcagaaggctctaggggagagcccttccttgcctcttccagccctggggaccctaggagttccttgttccttggcttgtatgtgcatccctccagtctctgcttccctttgaatgtggccttcccctctgtgcctgtgcgtcttctccactttgtgtcctatgtggacacttgtcactggatttagggcccacctggggaatccagaacaaatctcatttcagtagcctcaatttaattacatctgcaaagacaccctgtattggtctgtcttcatgctgctgataaagatatacccgagactgggtaatttagaaagaaaaagaggtttaatggacttagttccatgtggctggggaggcctcaggatcatggcagaa

SEQ ID NO: 265185 - DNA, 115 bp, Homo sapiens
atgcccgccccccatccgtccatgcctgtatcatctaacaccttcctgacactcctacgatgattttttttaaaggcacctggtttataatctttctctcctagattaaagatct

SEQ ID NO: 265186 - DNA, 774 bp, Homo sapiens
agaaacccgcggatgggtgggccggcagctcctgggacgcccgactcacagcggagccgcgtgggatgagaaggattgagggagagaggggggccctgtcccagggtctctaagaagtcccccacctctgtactccccagcccagcggtgacttcgaggtgggcccagggggcctggagggaggggcgtggatacagcgggaaaggagagacccctagcggggtggacaagaagggaggaactccacagaactgcttaatccggctccatccccatcagcgggctttctcagcgcctgcacccctctctatcccatctcgaagcctccagttaatccagagtgagacgcaggaccgccgggaggcgagcggggatgctgaagctagggcaggctaaagccccgcggccaaagggcaggcttgtgcgccctccgccccctctccgccccctctccgcccctccgcgcccaggacctaattgtttgcaaaagcaaacacggaaaaggcaggtacaaaggtcgggaggagggaccgggacctgcttctgcctggggtttcgaccttcccgccagaagctccactggggcctggacctggagaagggacatcaacagttaacgtccagggcagctttcagcggcgtgggcggggatccccagggaagcactgttagcagtttcttgtacatccagcctggtatattttctgcatgtataggcaaatacctgtttgtgtgttcttttctttcttttacataaataatcgcatactaggc

SEQ ID NO: 265187 - DNA, 328 bp, Homo sapiens
  misc_feature (41)..(41): n is a, c, g, or t
cccgaggtggaactgaaccacaagctgataaaaggcatccnaccagagcaccatagacctcaaaaacgagctgaagcagtgcatcgggcggctccaggagcccacccccagttcaggtgaccctggagagcatgacccagcgtccacacacaaatccacacgccctgtgaagaaggtctccaaagaggaaaagaaatccaagaaacctccccctgtccctgccttacccagcaagcttcccacgtttggagccccggaacagttagtggatttaaaacaagctggcttggaggctgcagccaaagccaccagctcacatccgaactca

SEQ ID NO: 265188 - DNA, 450 bp, Homo sapiens
aaaataccgctcaatccaactttcatcgtgaattcttgaattcacagtaggatcattaaatgtgacggtatcactctgctataaaaactatttccaaaacaaaacaaacctatctaccccctttcttgatttaaaaaaaaaaaaaaaaaaaagaaggaaaatttgagggtttttgattttttcaacttcacataccggtttgcctttgcaaaaaaaaaaaaattgtttagtctcaaagtatagctgcaaggtggaccggctgcacgggtcccagagggccgctcgcctccgacggtcgcagtttcagccgggccgcgcccgcgagaaacagcggagaggccccagcaggcgggcgccgccggacaggtttaccgtccgcgtcggccccggggaaccgctccctcgcgcccgcagcacttgttcgcggcgcggactccacaccgcggccgc

SEQ ID NO: 265189 - DNA, 313 bp, Homo sapiens
acaaattttgaagataatacttttttgggggtggggaacttctgctgttattgttgctgtgctggaggaatggtgcttattcttttggtagcataactagtggtctgacatgaaaaactcttaaaacttaccctatattgggtctttaactgctattttatgttaaaaccttacatattagtatgtatatatatatgtgaatgcatacatatacaaactacattttcttatttttaaaatatcttaaggtacatgaaggagttaacatgttcatgaaacattgtgacatggaaaggtacttaggacttagtct

SEQ ID NO: 265190 - DNA, 402 bp, Homo sapiens
caaagctgaagtccccgccttggagcaagtcaaggagtaatggacagacaagtgtgtacagacataattataattaaacataaatgtgataatggagtttgttgttttttcatggcagcttcaaaccatgaaattaaaaagctactctgcagggacaggaaatgatcagcactccagaaatagagttggagagatgctttccttatggtccatttctggccatttcattatctctgtcttgatgggactctatggagcaggaaccacctcttagcctggcattgtggcaagagcctcagttctctgtcagacaagcttgggttcaaatcccagtcacttattaataatgagttctttcaaggttatttcctcatctatgaataaaagataaaaacgcatcca

SEQ ID NO: 265191 - DNA, 488 bp, Homo sapiens
actctcggcttctcctcctccacccgcccttttgtctgagggacccgggattttgcttttcccttatagaaatggtggagtcagtgaagaaattagcagggatggatgtggagctgacagctgaagaaagaaacctcctatctgttacatataagaatgtgattggagctagaagagcctcctggagaataatcagcagccttgaacagaaagaaggaacaagggaggagaagacaagctaaaaatgattcggaaataccggcaaatggtgagactgttgtacaacagtccccccttatccgcagtttgagttaccagtggtacagtacaataagatatttttagagaaaagagactacgttcatgtaacttctattagagtatgttataattgttctggtattaatctttttctgtgcctagtttataaattaaactttaccatgagtatgtatgtacagaacaaaacatagtatatataaagtttg

SEQ ID NO: 265192 - DNA, 1093 bp, Homo sapiens
ctccttggaacagcggcccccaaaatgcaactgaagccatttccctgctctgagacctcggacaagtcactccccgccagggctgcagtttcctgtctctaaaaggagttgatgagcagctctaggtggggtggcgatgggggacgcaggaggtgccccgtgcctgtggtcccctgttgaagttcacgcctcctcaaatgcagcggccacccagcgctcgctgggtgccatgtgtgccccacaaaacacctttcctcagcctcgaggacaagtaccagaggccagttccgcgggaaaagttaatggtggtttcctccagggtccctaaagcccctcctgaaaagtgactgtggttcccctccccctgtcctcaggttttgagtgggcacaacctaagctggatctgataggccctgtcacctgctggttcctccctggttgacaccaagcagaggggcaatgctctctcgctgtccttagacccaagcaggagaaaaatctaccctccctccttccctccccattccccatcacaccatgattggcttttaagcttcagggatgtttcccggaccgagtgtggcttcagagtcagagagatgtgagttcaagaccacttgcttaggtaagtcacactgctccaagtttcagtttcttcatctgtgaaatgggagcaataaccacctctttttcaggattgccattgagatcattcgtggaatccataaagtgcccagcccacaggttatttattctgtccagcttttattcaagctttttgcttagcactgaggaaacagcaattcacgaggcaggcatggtctctgccttcatgcaacttgcattctaggaggcagacagactgtggacagcaattacagaatttcatgacagttatacaagtgccatggaacatatagagtacgataagaccagatatccagggaaactgacctggtctggggctcaggaaggcctttcccaaagtgtgatgacatcgaagctgagacctgaagtcaattggggcaccaggattgcagttggtaggaagtgggcagggggtgctaaaagaggtggtggagggagagcgttc

SEQ ID NO: 265193 - DNA, 382 bp, Homo sapiens
ggcaacatagtgagaccctgtctcttaaaaacaaaacaaaacccttacgccgtacacaaaattaactcaaaatagacttaaagagccaaaacaatacaacttttagaagaaaatttgagaaagcctctgagaccttctgttaggcagaaatttcttagatgtgatactagaagaacaatcaataaaagaaagttgattaattggtcctcatcaaaatttaaaatgtttacacttcagaagacagcaataaaaataaaaagataggtcaggtgagctggctcacacctgtgatcctaacactttggaaggctgaggtaggaggatcaggagtttgagaccagcctgggcaacataatgagaccccaccccccaacctcttaaa

SEQ ID NO: 265194 - DNA, 229 bp, Homo sapiens
cccaatgtgttgagattacaggcgtgagccactgtgcctggccttggatatttcttttaaaggctttttaaaagttctcctagttctattccattgatgttaagattgactgggctagtccaaaggtagtcagttatttcaattggttgttcacggttagttacagatcaaactcttgttatactctttcccccttctcactactgcacttgactaattaaaaaaaaaa

SEQ ID NO: 265195 - DNA, 390 bp, Homo sapiens
ttcttcattcatccatctcccccacaagactgtgcaaaccgtgagggaatggaaaaagtctcttaattcgaattcttgcttcagtttccctccattttttggttgtgcacgttgagccagtttatttttcaaggttcctccatctgaaattaggaattatgtgccaatatcttgccagtttgtttgtaaatatgactggtgtcatagttacagcttttgttgcattgcatttttaggcagttatgttgccaagttcttaggcatatgtgcaaaagttgtatacatatattaacatactggtcttatacatagaatcaaacatcactcaaagtggttttgcttaacaaaatattatatagacccttaaattattatttacaaaagtaaaaa

SEQ ID NO: 265196 - DNA, 236 bp, Homo sapiens
acagtggggaggccttggcccaattcccagccctgcctcctccccagcccggggtgcctgggcctccagagtcccctgcccctccctgctcacagatttggggggtgctttggtcagcaatattgtggggagttactccagaccaccctggccatgcaccccggggtccccgaaggccctggggtctccgagcccggcccccgggagctgtgtgcctttgtgagcggggcggccgc

SEQ ID NO: 265197 - DNA, 632 bp, Homo sapiens
ttacataatttttatgtaaccataattaaaccaaattagtctttttttcttcatacttttcttcggtaaatagtgaagaaataatgggcatatctaattaaccagttctagtgggtgttgtgatatctttatatctagttcagtctcagatgtatgaatatgattatatagtcatgattgaagttcaaaatgaggaagtatacaaaatcctcagccactgaaaaattcagttaacttgtttatactcctgtaagctctagttagtcacaagacaaagtatatagtaacactttgtaatgaagtaacattttctgcccacattaattttactaaagacctaaattgttaaaattaattgccaatctctggatatattatgcttagtaagtgttttgaaattaaagaccttaaacatttcagcaagtaaattttggattctagctctgttttaaattgaatcctaattttcaaaccactgctaccccagattcatacctgtttttgaaatcttgtttatggaatggaaaattgacagtatggtaatagtttattgactgattggacaaaggatattctggttttaactgacttttccatttaaataaaattcatttgataattttggttgcaaa

SEQ ID NO: 265198 - DNA, 492 bp, Homo sapiens
taatagatatatttatatttctcttttatatataaatatatataagtataatataatagatatatttataatagactgaatacagtcagtctattacttcatagaataaagattagaaggaactgaatatattggaaagaacagtccattagttttgtcatttttttaagagtttcattagcaatcttctaattcaagctgttccaaagaaataggtcgttttcacagttgtcccttttaattttgggaaatgagacaggagagaaggaaaaggaggcgagcaaatttttactcacacttaacactgggctggaagttgtggtcactctgagcacatagagcggattaagggacatttttgctttcaaggagctcagagtctggttctaagagatttttctcaactacccctaatgtaagcgtcttctagattttataatgcttacactcaaaatctatccctctcctaaacaatgaaatagaaaaaaacaa

SEQ ID NO: 265199 - DNA, 641 bp, Homo sapiens
aattagatggcccagatatttaacttgtgtcttactagttataacttttctttagaaatcttatgacatttcgcagctagatgttttaataaatcaacaccatcttccttacaagccagctacagggaagaggaactaagtagatcatctacatatcatagtaaggacaagtcccggggaaaacttccatctcctaaatcaggcttcagaacttgagagaaatagaaaggactttcagtacagtcctgaggcataagtctaaatgaactattgtccttccccagtgaagcaaatagttactcactggtttgaacaacaaggataatgaagaaggcactgcagaagtcaattacagccaggggcagtggctcatgcctgtaatcccagtactttgggaggctgaggcaggcagatcacctgaggtcaggagtttgagaccagcctggccaacatgatgaaaccctgtctctacaaaaatagaaaaattagccgggcatgatggcaggtgcctgtaataccagctactcaggaagctgaggcaggagaatcgcttaaaatcaggaggaagaggctgcagtgagccaagatcgcaccattgcactccagcctgggtgactaagcaagactccatctcaaaaaaa

SEQ ID NO: 265200 - DNA, 411 bp, Homo sapiens
cccatttttcagtggtattaattcttggttttggctattctagttttctgatggtaaagtctacctttaataatatgtctgcttctacttcttgatttatcaattctatatggtattcaatgattccttgcattgaaagattaggaaattactgcaattattctgacctttgtgtgttcttcctcctctcccatccacgttagttataaaattttaaatcatggaccctaatgttagtctgaattcaattcccacctctgccacttactggctgtataacttcgggcaagttacttaacctctctgtgttccaattttctcatgagtaaaaatgcggataatgatactaactgcttcataaagttgtcatgaagatgaagaattaaaacatttaatgttaattcatgttga

SEQ ID NO: 265201 - DNA, 529 bp, Homo sapiens
tgctagagacagcttacctgaatcatgcagtgtatacaggatgtcagtgaagaggtctggcaggaatgcctcactctcttcctactgactggtacatgttatgatgcagtaattatcaccaattccccaccctggttattagcatcttactctgaaggtaacttgttccagttgacccaggaagaaattcagattttactggcaagagaggggagagagaaattgtttctccaaggagtcacccttgcagggaccaaatgcttgttgatttgagacaatctgtacactgaaggcaacaacaccatgtacctgcgcaccaaaggccagagtcagggcagccgggcagtgacggtagttcagatcgagtctgtaaggcttgtggtgattggacagaaaggaacagaaggagggcctctcaacctcgaagcttttgagatggcaggttatgtcagagaggccattgagcaacatgtggcccatttataactaaataaaaaatagttggtgtttgacctgtaaaatgaattca

SEQ ID NO: 265202 - DNA, 609 bp, Homo sapiens
tttacttttatgatttgttagatggatccaaagcattgctcagtccagatctaatcattccctctactgaggcaagaccttcccaaatatatcctacccaataccctgtgactaaatttttctagtctctttgctgggaacaggcactgttccaagccctatgcgaatgctgggcattgttctctataatcctttaagatgttttttcttctctgcctctgctagtttcctcacacacatgtgctttgctgaatccttgaaggggcgggccccctctgcaaatctccaaatttctctctttctgcagctctcccctctctctggtacctttttcagtgaattatagctgccttggtctctccagactctcagctcccattgattcaacttgtggagtctacctggaaagcctcaaggcaataagatggggcaatcccagggttcagctcttgtttccttttttcagggatcactgtacttgttgtctgatgtccagagtcttctgttgtttttgtatttggtctgtttgagtattgttttttcaataagataagtccagtgcctgttactccatcttggctaaagcagaaaacttgataggtgctgggg

SEQ ID NO: 265203 - DNA, 464 bp, Homo sapiens
tttacttttatgatttgttagatggatccaaagcattgctcagtccagatctaatcattccctctactgaggcaagaccttcccaaatatatcctacccaataccctgtgactaaatttttctagtctctttgctgggaacaggcactgttccaagccctatgcgaatgctgggcattgttctctataatcctttaagatgttttttcttctctgcctctgctagtttcctcacacacatgtgctttgctgaatccttgaaggggcgggccccctctgcaaatctcccagctacttgggaggctgaagcagcagggtcactcgagcctgggagtttgaggctgcagtgagctatgatagtgccactgtactccagtgtgggtggcacaacaagatgcattctctgacaaaaagatttgttaaataaaaagataacctgaatgcaattattataccaaaaaaaaa

SEQ ID NO: 265204 - DNA, 410 bp, Homo sapiens
aataagttgatgactgattaaggcaggtgttatggttactatacggccaccattgcttccagtgagaacctctctatccaggaaagatcttcagttgcatagtaaagggatattgactctaaaggaaagatataggtgtttgctccaccctacccaaagggaaaaagaagcagataataaaggaggttgttttgaaaacacttgtatatttgtttattaaagttcatatgttggccaggcactgtggctcacgcctgtaatcccagcactatgggaggctgagacaggcagatcacttgagtcctggagtttgaaaccagcctggccaacatggcgaaaccctgtctctactaaaaatacaaaaattagccaggcatggtagcaagccccctgtaatcccagctactcag

SEQ ID NO: 265205 - DNA, 369 bp, Homo sapiens
ttatgttggaatattaggatgctgtgccatagtttttttcaggcagacatttcatttgctataaactgctgagaaaccagaaaagagcaacactcatgctttcagatgcatgaaatatagggaaaaaattccaaagcaaacatatcaaaagaataacctgtgatgggtttttatattcagatggctcagtgtaagacgtattttctcctttgagtcaccaaacccagaaaaaaaaaataccactaatctagaatgtaatgccaactctaagctccaaaaagtttttgctcatatgtacaccccctgagcctaggctagttctttgtatgcagtggatgcttaataaatatttatttatatagagaaagc

SEQ ID NO: 265206 - DNA, 1222 bp, Homo sapiens
ttctgttacacaaggggtaccaaagtccactctgagcttttcctctgggaacagatcccagattattccagacttaagacatggagatatatcttgctagagcccccagtatatattcagtgtgtcctctgaagtaacaaccatcccatctggctgagaagtgatggacacggctccttaaccacactgtaccctctgtcttggcacctctctaccagaaagatatcaacaaattggatggaattcagagaacatgacttcctattatccttctcaaagttattgctgcagaggaaagaagcatacatcttttacccaccaggaaacccccaaagcatctattaccataatagccatgggaaacagaaggcacctcaaataaaggtggggaaaagaatgaaagaaatggctttggcctgtgcctgtttgacctctgagagatactttttgcaagaaattgttaagttttggcccaaaaagtggtcggtcttttatccttccttgtggaggccaaactgcaaaccaggatgaagaaaccatcagtggcagtttggggaggtggaggagggactatctagactcagtgaatcaccaaggaaacatgaggcctatttctctgtgaagctgaacttcaaaaaacaatctaagagatacaaagggaaaagtgtgactgctctgacagcaaaaacaagcaaatatctccagaggggattaatccttctgcttcaaagtaactaaaacaaagaaagctgagccagcttcactggaaacaacacctgtccatcagacaaggatgagctaatcaaaagaaaacactgcctatgtgcacgactcagcagcctggacagctaataccaaggaacacgttttcactataaagattcagctttcaaaatccagttccctcttgtagagccacagggttaaaagggaccttagagatcatctacatacaggccaaaccctcaatgaatgccagtgttcgccttatgttcttcttgccggactcttttctggcctctgttctgtcaggatgtttcctgttttgcaaaacagctttaatccttgagtatatttaattgttagaaaacagttcctcaaatttgaccccaaatttaagtctaatttatgaagaaagttttgcctttggagacaggtttaattttacttccatgtggaaaaccttcaaataaaatgatgactattgtgtactcacgaaaaa

SEQ ID NO: 265207 - DNA, 1767 bp, Homo sapiens
ttctgttacacaaggggtaccaaagtccactctgagcttttcctctgggaacagatcccagattattccagacttaagacatggagatatatcttgctagaggtaggaagatgataagatcagtttctataggtagaggataatgtgtcctaaaatgtaggtagagataagtctgacagtggtttagacaaaaagggcctctgctaatggtggagagatcaaggaagaaaagagcaacgttaaagtgaggctgtacccacagatcatgctcaagcaaattcgaaccgtgagcgcatttctcttaaacaatgaacacttagaataaaaattaaaatttcccacaaatttctaattttaaaatagtttcccaagatttcagtggtattgtatatatgcccatataattttttggattactattcccacaagtgtaagatgaaagaggacctgccctccattctatctactccctctctgcaaaggccattttgaagatctcagttttactgaaaggggtctgccacacataacttccctggtgtaccagcaacaagtgttcagtggaccatggcaacacaaagaatgacggaggagagaaaatgccatgcagaagtgatagtcaagatgaagatgtgggagaggagcagcccccagtatatattcagtgtgtcctctgaagtaacaaccatcccatctggctgagaagtgatggacacggctccttaaccacactgtaccctctgtcttggcacctctctaccagaaagatatcaacaaattggatggaattcagagaacatgacttcctattatccttctcaaagttattgctgcagaggaaagaagcatacatcttttacccaccaggaaacccccaaagcatctattaccataatagccatgggaaacagaaggcacctcaaataaaggtggggaaaagaatgaaagaaatggctttggcctgtgcctgtttgacctctgagagatactttttgcaagaaattgttaagttttggcccaaaaagtggtcggtcttttatccttccttgtggaggccaaactgcaaaccaggatgaagaaaccatcagtggcagtttggggaggtggaggagggactatctagactcagtgaatcaccaaggaaacatgaggcctatttctctgtgaagctgaacttcaaaaaacaatctaagagatacaaagggaaaagtgtgactgctctgacagcaaaaacaagcaaatatctccagaggggattaatccttctgcttcaaagtaactaaaacaaagaaagctgagccagcttcactggaaacaacacctgtccatcagacaaggatgagctaatcaaaagaaaacactgcctatgtgcacgactcagcagcctggacagctaataccaaggaacacgttttcactataaagattcagctttcaaaatccagttccctcttgtagagccacagggttaaaagggaccttagagatcatctacatacaggccaaaccctcaatgaatgccagtgttcgccttatgttcttcttgccggactcttttctggcctctgttctgtcaggatgtttcctgttttgcaaaacagctttaatccttgagtatatttaattgttagaaaacagttcctcaaatttgaccccaaatttaagtctaatttatgaagaaagttttgcctttggagacaggtttaattttacttccatgtggaaaaccttcaaataaaatgatgactattgtgtactcacgaaaaa

SEQ ID NO: 265208 - DNA, 451 bp, Homo sapiens
cccctacaagttagttaagttttattgcgaaggaaagctgcctggctttatctaaaggtgttagatcaatcataatcaaccccaaaatgccttaaaccagcatctctcttagggagagcgaggagggacgtttctaaaaggggtctcttctagggagcatttccagctgtacaggccatattaaagggcttggatgaccaagtattatattattgtttggccaaaaaatatgttctctctgctttggtaagtggcttcttaataatgcacagccgaaaatagaaatcaaatgcaaatgcaggagtgaggcagaagccagttgaagaggtgacccaggtagatgtgtttaaatctgagggcagatgcatgtgtgctatttttaagtcacggaattctcttcacttagctaacagtgctattatttgtttttcagacttgtgaacaaatctga

SEQ ID NO: 265209 - DNA, 459 bp, Homo sapiens
ggaatccccatgttggtgagatagaggtgggttcctcatcgtttttctttcgggatttcaagaagtggttctcttgtattcttatgccacgtataataacaatttatatcattaaatgttttcccattatcaaaagatgttcatgcttatttttaaaacagaaataagaagtaatacagagaaaaagaagaaaagtcttccattgttttacaacccaaaaataaccaccatttttgggagacatttgtttccatttttacttttatagtattttgttggtgtgtgtaggaagtaatctgggcgttttgcccagtttggtttaatttttgtttatttgtgaagtgtcttagattgcattacacttattagatcattactgttattagctgttcctaatgatacatcataatgtgatcttatcaatctaaaattgaagcaataaaaagttcattccctaga

SEQ ID NO: 265210 - DNA, 418 bp, Homo sapiens
aaactgctagcaaaatgcatgtggaaaccaagggcttggattttgctgtactgggtttaccggttctctcacaagcgcctgtgatggaaactcatcgacaattgttcttggttggaagaaggggctgagagattgacaagaaacaccgctttctggtttcaataagcttgaatagccctcaaaataaggagaaggggacactccttccttgggggagaataaaatctcactctcccctgcctcacccgtccccaccgggcacgaaccggcgcctccgtggtcccatcacccaagttccccacctcactggggagaagcgccctttcccggcacccacaccaaacaacaaacccgacacggcctttgaggaaagcgggagccgccgcctgggagagacgcaggggcccaaggcgcaggc

SEQ ID NO: 265211 - DNA, 357 bp, Homo sapiens
tgcttccttccagattggtaattccatcatggctggacattagaatcatcttggggagctttaaaagtcatgggcggcaggagagacagctcatgcctgtaattccacactttgggaggccgaggcaggtggatcgcctgaggtcagtagtttgagaccagcctggccaacatggtgaaaccccgtctctactaaaaatacaaaaattagccgggcatggtgatgggtgcttgtaatcccagctactcaggaggctgaggcaggaaaatcgcttgaacctaggaggcggaggttgcagtgagcccagatcacagcacttcactccagcctgggcgaaagagcgaaactcccatctca

SEQ ID NO: 265212 - DNA, 431 bp, Homo sapiens
tattttatatctctacttgtaatcccttgccccagacacctgtgagcttgtcatcaccttgtagcttttatgaacagcgtcaaccacttttatcacttgcattcggagttatacaaaacagagatgagtatcttgtgtcaatctgtcagatgtccccagacaggttagaaacataacataatgatttgcagtgaagtctgctctgttccctcttatgcaatgggaggtgggatctggaaccaagctgccctctgctgaagacccagattactgctgtactggggagtggagagagtaagagtgaaagtgccacacacctttcctactattgtgacaatagctttttcttgatagggcatttgctggcttgctgtaaacctgtgactgttttccagagatgctttaaagttggttcagataacttctgggct

SEQ ID NO: 265213 - DNA, 407 bp, Homo sapiens
cctctcttaagctatggataaataatgattaaactacataaagataaggaacaatcactgaatgacttaacctgtcattcccaactctttgtattcacactctagcctttcctttctcccttgtcctttaggattcttcaccatcctatgtgggagccagctttagttcctcctgcacgaggccagggatgtgtattctgtgcttttgcaccctcgttgctccagtttgaatgcctattctgcatagtcagaactgctttccaactagttttcctgtaaatagtctccctatatttaatactgcctaccccccactgctgacagggttatcttaataaaaagcaaatatgattacactctttgtcctcctaatagcctattctgactctcaaatgcccacaggataa

SEQ ID NO: 265214 - DNA, 1101 bp, Homo sapiens
ggaggggcagcaggagttgacagtgaggagggttgggatgccagaattggtggggggatggagggaccttgtgccaaaaggggtgtggggaggatggataataaagcccttggggtaaaggcagggcagggacacttactggaagcctacctcaccttttctaggtctgagaaaaagacctaagggcctggagtagtagggataggaggatgtggtgcagaagtcgggacagaacaaacagcgacacatgcgatgtcattaggtagagtgatgtcttggtcactgcaacatggtaccaatagttccagcctgtgtgggggtgcagtctgcaaaaaatgaaaataagcatgcatgttctttccaaggatttttacactcattttaagtatacagcttgatgattgtttaaatatgtacacaactgtataaccaccactcaaagcagatagagaacattctccgcatcacataaagctgcctcctgccccttcctagtccatgtagcccccagctggggacctctatgctgacttcatcatcaattgtgtctgttcttgaactccatctctctggaattctacagcatgcactctttggtctggcttctttcatgcaacataatattggatggactcatccatgtcactgtgtaccaatagtttcttttcttattgctgggtagattccatcatgaatatgctacagtttaaccgttctaccattgatgggcacttgggtcgtttccaggttggaaccattataaataaaagtgattacgcgcctgcccctttaaaaacagattatctcattctctcgctgtctcttgcacacatacaggccctcgcacaggtgccagagcaggccagcctcctctgggaggtctccccttgcccctcaatgctgatttcctcatggctgggggatgagggctccgggctgggagccagggtgggagcagcgataccctcttcctaagactcatcgcgtctcttccagcctcctcgccccaggccgcgggcgccctgagccttcctgaccccgcagggggcctcgcccgcggtcccccatgagcgcgcccggctgaccggcggggcggccgca

SEQ ID NO: 265215 - DNA, 549 bp, Homo sapiens
cctttctcttcttcctcctctccattcttttaggcacagagcattccttttaacattgccgtttttcttaatagctagataagcccaggtatccagtaagcccccaaaggagacttggtgtaagcagacctggtggaacaaacatccagaccatccagacattattatgagttttgagtggccagtggggctccatgtgctttatgtttggattatttaatgtttttcccgtcctttaatgttaggtctcttcagccaaatgataaggttgaacagggcggaaattacagggtggggatcacagtggcgttttagcataagccttcgcttccattcatgtttcagtggtttgaaagagttgtttttttattccacccttttgctttatgtttttttgtttttgcattttatttaccgtgcttttcgttcatttgtttcatcttatctcttttcttccctccactggatcaatagcattttatttccttttttcagtgtttgctttttaaaaaaaaattcatggctgatgtttaaaattctgatttccca

SEQ ID NO: 265216 - DNA, 364 bp, Homo sapiens
ttatcatttttgactcattttttctcatgttttccactaatttacaatttctaaactatcattacttatttcgatgctctcattgttccagatttggaagccccttcaagctggatttgatgtttttctgatatgtacttccctccaactatttttttagcactttttaatattatttcataataagatgctccaggcttgttcctctttcattcttactaacataagcttcgttgtcctgcacttgaagtagagcaatagcctcctatatgatcttgctattctatattcttcctgtagttgggtggctgaggggggatgattgtttgagcctaggagtttgaggccagcctgggcatcatag

SEQ ID NO: 265217 - DNA, 461 bp, Homo sapiens
tcatttattgattctcctcttatagaaaatccaaataccagtatgtttcttatctactgaaaacagaaaattagaaaaattgtgaaggacataaataacaaattgaaaataaaaagactttcctgaatacaaaaagcaaggtgctctgagaagctaacaacatgtcctttatgggagggaaaattttcagagtggctgagtaagttttgaaaagaagagttacgtgcatcaaaaattcagttcagatttggctttctaaatatatttttagcttagaatatttatgaactgagacttttccaaaaatacttaataaaatactggtcaccaccaatcttttgtaaataattagtagattatgaaagagactaatgccagatccagatgtatttgtccactctgaaatctatgaaccatgatctacactgagtttggacttgaaaaggcacagcatataggtt

SEQ ID NO: 265218 - DNA, 409 bp, Homo sapiens
gcggttttgaaactcagtgagcaaggcgtcttagacaagctgaaaagcaaatggtggtacgataaaggggaatgtggaagcaaggactccggaagtaaggtcagtcaccggctacagaggtcacgcacacctgtaacaaaaatgcacagtgttgaacagtgtcctccgagcctcagagaggcttggaggccttagagagctgggccccagcagggccttgatgtccaagagtccaggcagggttaaaaagtttgaatatcagcacgccagtgtttcccaaccccatggaacctgatcctaccccttcaaaaggctccattatccactgtgttctggtactctttgctgtgggacagggccgtttagcacacaacccaggatggtccttttggctacccctaattattta

SEQ ID NO: 265219 - DNA, 327 bp, Homo sapiens
cagccaggcatcagtggagcacagcggaaatgggtccaaagccacccacagaggctctgtgtggttcttggataattctggaaggctctagagaaggcaacaagaaggcaggaacccagggccagaaactggacaacttgtgtgtgtttgtctgtaaagtggggctaggaatccgcgtgggggtcaaatgagaacagctctgcctcccagcgcacagtcccgcgtcgaggtcagagagcctcttaggccctggctcttttgggaaatcatcccaggggctaaagacaaaactgaagttgaaataaacatgggggtccaaacactcca

SEQ ID NO: 265220 - DNA, 532 bp, Homo sapiens
acaggggattaaggggcgtgtggtaagaggatccatttcaaagagctggtagaagatgatcaatgatctaggaaatcagagttgaagaaggaacatcagtgccttgaaatgttccctagagctctgacccccacaagggttttaactaaatggctacttagtttattggatttacccacatagcacatatttaaatgaaatggatggaggaaagaacctctgcactacatggcagaaaaatgacaaaaagcttttgaaggtcagggaacatagcacaatcactttagactggtgagaaaatgaaattcttctcaagaccttgtagacctgatggtgctatcaattttaaaaccagtgtagtgctgtgggaggcgtgtgtttcatactaagtgacttgtactgaattgtaatagctttgagcatccacttgagaccttaatgaatgagttacataaaatgttaatatcattaatgccagagaaattatttatttattactatcatcacatattacaaagcagagctaccaaat

SEQ ID NO: 265221 - DNA, 645 bp, Homo sapiens
tgttaccaatctaagtggtaggcacacctgtgtctgtattgttgtgtttttcaaaatttttcaaaatataaattaactgcaactgaatgtaatgtatgagatgagtaataaaaccttgccttaaaaacagtatttgatacgtggctggacaaactggcataaacacatcatgcatatgggaatcaccattatggtaggaatcaggcaggaaactgcattagggtcctacttatttataggggagtgtaattaagattactcttcattccatgttttcccaacagtgttagtctcaccagtcccttttagaaccagtgacacaagcatataaactgtttttccaactcaaaatgcagtcaaaatgaatataaacttctataaacaccaattatatttacaacatgcacactcacgcacacacatgtgtgcatcacaatgaaaaaataccctggacccattatcaaaggaccatagtttaaaaaacatgttaatttgtctttccaaaaattactacacaatctattacttctcttgttatataacagtttttctaaatatggctttataagcagatgttcatctttcatgacttcttcttagtaatattagatttatttcaggcaataattacaattaatcatcata

SEQ ID NO: 265222 - DNA, 517 bp, Homo sapiens
aagcttggtggtatgtgcctgtggtcccagctactggggaggctgaggtgggaggatcgtttgagcctgggaggcagaggttgcagtgatcaggaattgtgccactgcactccaacctgagtgacagagcaacactctgtcttaaaagaaaaaaaaaaaagagagagatagtaatctcttgggcaaaaggtatcaaataattgaaagaaaagtttaaacacatttccgagaggcagggcaactaataactggtcagaaaaatttagacggtcttcattttaaaattggcatcaggaaggattaccatgaacttattttaaatccatattgtaccagaatgactatgtctgtgtttcttaggaatgttgaagctttttgtgaaaactgtactgtatacatatataaatatacacacacttacatgtatgtattttgatagatattacatggactaaattttgtcaatttcatgtaatttaccctttgcaataaaaatgattcattaaatatataacta

SEQ ID NO: 265223 - DNA, 342 bp, Homo sapiens
tggcctcaagtgaacctcctgcctcagcctcccaaagtgctgagattataagtgtgagccaccatcctggcctaaatatctttcagcatataatcagtataaaaattataaagatagtatatattcttttctattacatcttcaaaatctgctgtgtgttttacacttaacatatctcggttcacaccagcaacatttcagtgaagtactcaataaccatacttggggctgggcgtggtgacacatacatgcctgaatcccagcactttgggaggctgaggtgggaggattgcttgagcccaggagtttgagaccaggctaggcaacaaaccaagatgctgt

SEQ ID NO: 265224 - DNA, 363 bp, Homo sapiens
aaagacggtgctttctgcactcagcttgaaggctttctactctagcatcacatctggcttgaatattaagtattgctttttcttgattgtcagctttgttgcgagcatcatccagttgctgttgaagcaacatattttgtttagttgacaaaatctttcctgcttttctatgcatttttccattgtactgtatccacttttgtacattttttcagtgtccttcattcaactctgtttttgctttagctcactttgcacgtgttcaaaaaccaaagccttttctttcagagcctctcttgtgtaatggagctcagtttcgaggactctggacttactctcagctttggaaagttgcagagaaag

SEQ ID NO: 265225 - DNA, 595 bp, Homo sapiens
gagaaagatagaggcttataaaattttggtatcattggtaaaacttagcttcatcatatactctgcaatatttaacatagttaacaactatcacagataagaccaaaggtcagtttacaaacatctacactgcaaacccaagggaaagtgaatttatactagaataatgaaacactataaaaatgttctttaaaaaacttggagaatgttattttatggaattctctatagaataaaatacaggatgtaagcagtatgtaaggaaacaattcaaggagaaatgaaggacaagatgggtttgaaatatccactaactctcaacctctgatcactaagtcagatgcccagtgtgaatccctgaagttccttttgagcatcctctgcttatccattgtgccttcttctacattttgccttcattttacatgcatggcaggagggaagtataatagtgagatagaataggcgggctactcctttattctaaaggctgtaattcttacagcaaccaatatatgtataaaccattgtacttgtccaaaaatgccaataaattttaataaataaagcatgatcacttccagaaaaaaaaaaa

SEQ ID NO: 265226 - DNA, 312 bp, Homo sapiens
tgccgccaccctcctgggcctcctggggcggcagccctgccagtctatgggttccatcacgctctggtgccttctctcttctacgtaagcggtggtgccagagccccctcactggccccctggcctctgtccttctggcccgttctttgtggtgccaaaaggggaacttcatagaagtttttaaattatgaagtatttcaagcaaagggaaaatgtaaggataacataattaacagccccagctttctgaaatcttaacatttgccatattcacttcaaatcttatttttttaggaaataaaactttaaaat

SEQ ID NO: 265227 - DNA, 308 bp, Homo sapiens
acagttgacccttaaacaatatgtttgaactatgtgatgcacttacatgcaaatttttgttaaccaaacgtggattaaaaatacagaatgggccgggcgcggtggctcacgcctgtaatcccagcactttgggagactgaggcgggtggatcatgaggtcaggagatcaagaccatcttggctaacatggtgaaacccgtctctattaaaaatacaaaaaattagccgggcatggtggcaggcgcctgtagtctcagctacttgggaggctgagacaggagaattgcttgaacccatgaggtggaggt

SEQ ID NO: 265228 - DNA, 1223 bp, Homo sapiens
ccagcagtgagctgtgagttctgtccttgctggctttcccaagtggaaggctaccctcatctttcactaatggcagactaggacaagcattacccaggcctgcaagcttgttaaggactaggaacccaagcaagaactcaccatgccaatcaaacctgttgggtggatatgtgggcaggtgttgaagaacttttctggaagaatcgaggggatccagaaagcaatcatggaccttgtagatgagtttaaagatgaatttcccaccatcctaagattatcacagtctaatcagaaaagagaacctgcgcagaaaacatccaaaatcaggatggctattgctttagctaagattaatcgagcaacattaattcgtggattaaacagcatatccagatcctccaaatcagtggccaaacttctgcatcctcagcttgcatgcagacttttagagctaagggacatatctggtcgtctgctgagggaagttaatgcgccgaggcaacccctatataacattcaggtcagaaagggttctttgtttgaaatcatctcctttccagcaaagactgctttaactagcataatatatgcttcatatgcagcactaatttatttggcagtctgtgttaatgctgtgctgaagaaggtaaagaacatcttccaggaagaagaatccataaggcaaaacagagaggagagtgaaaattgtagaaaagccttttctgagcctgtgctttcggagcctatgtttgctgaaggtgaaatcaaagcaaaaccttataggtcattgccggagaagccagacatttcagattaccccaagcttcttgctaataagcagagtaataacatccaagttttacattctgtgtttgaccaatcagctgaaatgaacgagcaaatctgaatacaggtatcactgaacagaacttaagagttatctatttaatggcacatttcatctgacaaaactcagagtctagtttacatattctgaattgctctgctttcttaaaaaaaagagaagggggctactattaaaatgtcattttctagtatttacatgatagagtaaataaaatgaatattgatgtggaatatatgtactgactacatacttttaatgaacaagaaaatccatcctctggtaggttagactttacactgtggtttataatataagcatatttataatacattaatgtttttattaaagacttgtt

SEQ ID NO: 265229 - DNA, 625 bp, Homo sapiens
tccaactacacacagagctcaagaggaaaggccacttatggtcaataagcatgagcatattgatggtggccattagaaaaaaaaaagtgtaaatcaatgtaagtcagtctcccactatcagaccagtcatataaatcactctttctactaaagaaaacatcaagtgagaagcaagaaaaaggttaatggtttctttgcaaaatcatcgtttgagtctaagttcttgttttatgaactaaacagaagatggaaagggggaaaggagggtttcccttataatcgtaagaaggtcagtaactttcagcagattacccgaatttataccatgaactgaatgttattttttaattaacgattataaaatctgcatcctacttaataattttaatagcactgttctttgtttctttcctcagactttgtggtagattcattcctttatttattaacagatactagggatacagtggtatctttgaagaaagcaagatatttcaggaaagaaacaagtgagcaaagagcttcaatatactgtggacaatgctgcagcagaggagaaggatgagaagtctccagaggtggtgatacttaggaggccaagtgggcagaatacctggtcagggtt

SEQ ID NO: 265230 - DNA, 797 bp, Homo sapiens
gttttcattatcataattgaatttccaagaacaacttgatatcattcagctgtccaaaaaataataagagcattcattaaatactgattttcttaaacttaaatgttgtatttcatatttatttatataatacaaatggaaatcaaaactgaaatagcctccctttagaatgtcacatttttcttagaaaacattttggaattggttaaccttattgggaatggataatttagaaacaaaccaaaaaaaaaaaaagatatttgaagtgtttttataggagatgtatttttatcatagtaaatgatcacaattttaaataattcatcttacaagtcaggtaaaataaaatcgattcccagattccatacattaggagtgcaaagacaggatcatacacatgacttatacctctcatttaaatattttatagtataaagtatttatggaaagggtttgagatagatgatttttgggaaagggcaaaatgtgtcagatgccctagttaatcatgtaatttaattctggtattgtgagtggttagcaatcaattttgaatttataattctgctattttaaaagaaatgtagtcttgtagtatgaaataattaaaaattgttaaatgtatattttggttgtattataataaaatgcaaacatgactgttctatgattataaaaactactggtttgtgtgcaaattttgttttcaaaccccaaatacagtaaattttatatataaaataggactaaagaaaatataagatgcaatattttctgaaatgttcagtagatgtatt

SEQ ID NO: 265231 - DNA, 590 bp, Homo sapiens
atcgggaaacatcactccctccctcccatcagcaatcagatccaggagtgcttagggccccattacagccaagtcccaggtcaccctctctggtccattcccctaatgctgcccacacctttgtaaacgctctcaattgccctgtgagacagcgtaccatctgtttcctgccagggcccgacgcatacagggtgtgggcaagggtttgtgaaatgcagggtcttagagttcacccagttcaccttcccttttaaaaatgtttcactttagagacaggctcttgctctgtcacagaggctggtgtccaggggtgccatcatagctcactgcagcctccaactcctgggctcaagcgatcctccttccagagcctcagaaacacctcagacaccttattctgttttttctacctacaatgctcacccctacaggttcttaaaaaaaagcagcaaataatattgccttgatccctgacagcctgtagagctaccaacaagagagcaccaggaatcgcccacttgtacgatacatgaagtcctacagtggctctggctttctggggaactcacacctttatcaagagcctatat

SEQ ID NO: 265232 - DNA, 999 bp, Homo sapiens
gcaccactgcactccagtctgggtgacagagtgagatcccatttaaacaaaaaaaaaaaggaaatcatcaatgcattgtaacagggtagagttgtgggggaagatcatgccccttaaatcagcttgtaaaatgtgagaaaaacaagtgaggcaatctgtatccctggagaaggactgtgcaggtgaactgtttgcctttccacgtgaaggcaaagagaaactgacttcctgggttgacagggatgctgaaagaggtgccactgagatcaatagctgaggaacatcaagtgtcaacaggtgtgttaggattgtatgtgggtctggcgtagtggggtgctgaggtataacaatattgttaatggctcttaggtcttgagacctccatccctttccatttggtttctggacaggcagtatgggcatgctgcaggggctagtgcaagggactatgaatcccttggagaggaaatcattaataatgggctgtctaccagccaaagcttcaggattgaggagaccctgccttacattaggtagaggtttgttggggtctaaatgtatggtaataggtggtgctgagtgaattagacctacatcagtgttagatttagccaagtgtatcaggcggttctcttaaagccaggtgctgagtggcaactgagtaattagtgacagacaagggaaagacatgtaaggtcaattgatacggtttctgaaggagagacctgcagaatggtatctccctaatgagaaaaagaaatatgagcctggtcagatgtggtggctcacgcctgtaataccagcactttgggaggccaagcgggctattcccttgagcccaggatttagagagagaagcctgggcaacatggcaaaactctgtctctataaaaaatgcaaaaaaaaattagctgggcatagtggcatgcatctgtagtcccagttatttgggaggctgaggtgggaggattgattgagcctgggatttcaaggctgcag

SEQ ID NO: 265233 - DNA, 2985 bp, Homo sapiens
gtgaggcgagcctggagctcatttccaggcgcccttccctcttcggaactaagggagacttgtgggcttttgcacactggctgtagggttcccgggaaagactggagcagcgaacaggagggagagaggtggacaggcagagtctgcacctgccgcctgcacctccgttagggcgacagggcagctggtgtttcgctcctggagtgtgcctacctcgcaaggggggcgagggccacaggctgaggcgcccgcgtcccggagtgcaccgcttggccgaggcaaggtgttgctggggcaaggctgctccgaagcgaagtcgcgcaaaaggaagagtctgggaggcaggcgacttaggagagtctagtcactgagagacagaggcagcatctgccattctaactacggagctgagtaatttagaaaccctccttaactctccctttccagctctccccaaagtccacagaagctctgctgaactctagaaatcttccctggctggggggaagtttactagtatcctctttggctaagacagggagtggaaaaaacaggcggggctgtactgtccgctgtttggggagacgcggtcttcctcgcgcccccttcagccactccgactgcctgggaagtcccagcccgcgctctccggaacccggctcgccgtctcgccctggacatggaactacgcatctgagacctgctggacgttttgctggccgttttgcaagactcagctgtcaagaaaagtgaaggatgaagccaccatttcttttggcccttgtggtctgttctgtagtcagcacaaatctgaagatggtgtcaaagagaaattctgtggatggctgcattgactggtcagtggatctcaagacatacatggctttggcaggtgaaccagtccgagtgaaatgtgcccttttctacagttatattcgtaccaactatagcacggcccagagcactgggctcaggcttatgtggtacaaaaacaaaggtgatttggaagagcccatcatcttttcagaggtcaggatgagcaaagaggaagattcaatatggtttcactcagctgaggcacaagacagtggattctacacttgtgttttaagaaactcaacatattgcatgaaggtgtcaatgtccttgactgttgcagagaatgaatcaggcctgtgctacaacagcaggatccgctatttagaaaaatctgaagtcactaaaagaaaggagatctcctgtccagacatggatgactttaaaaagtccgatcaggagcctgatgttgtgtggtataaggaatgcaagccaaaaatgtggagaagcataataatacagaaaggaaatgctcttctgatccaagaagttcaagaagaagatggaggaaattacacatgtgaacttaaatatgaaggaaaacttgtaagacgaacaactgaattgaaagttacagctttactcacagacaagcctcccaagccattgttccccatggagaatcagccaagtgttatagatgtccagctgggtaagcctctgaacatcccctgcaaagcattcttcggattcagtggagagtctgggccaatgatctactggatgaaaggagaaaagtttattgaagaactggcaggtcacattagagaaggtgaaataaggcttctcaaagagcatcttggagaaaaagaagttgaattggcactcatctttgactcagttgtggaagctgacctggcgaattatacctgccatgttgaaaaccgaaatggacggaaacatgccagtgttttgctgcgtaaaaaggatttaatctataaaattgagcttgcagggggcctgggagcaatcttcctcctccttgtactgctggtggtcatttacaaatgctacaacattgaattgatgctcttctacaggcagcactttggagctgatgaaactaatgatgacaacaaggaatatgatgcctatctctcttacacaaaagtggaccaagatactttagactgtgacaatcctgaagaagagcagtttgctcttgaagtactgccagatgtcctggaaaaacactatggatataaactcttcatcccagaaagagacctgattccaagtggaacatacatggaagatctcacaagatatgttgaacaaagcagaagacttattatcgtgctaactccagactatattctcagacggggatggagtattttcgaactggaaagcagactccataacatgctagtcagtggagaaatcaaagtgattttgattgagtgtacagaattaaaagggaaagtgaattgccaggaagtggaatcactaaagcgtagcatcaaacttctgtccctgatcaagtggaagggatccaaaagcagcaaattaaattctaagttttggaagcacttagtatatgaaatgcccatcaagaaaaaagaaatgctacctcggtgccatgttctggactccgcagaacaaggactttttggagaactccagcctataccctctattgccatgaccagtacttcagccactctggtgtcatctcaggctgatctccctgaattccacccttcagattcaatgcaaatcaggcactgttgcagaggttataaacatgagataccagccacgaccttgccagtaccttccttaggcaaccaccatacttattgtaacctgcctctgacgctactcaacggacagctaccccttaataacaccctgaaagatacccaggaatttcacaggaacagttctttgctgcctttatcctccaaagagcttagctttaccagtgatatttggtagtgaaaaatctgaattcctctgaacagctagataagcatagagaatttctgttataccaagcataaagtacacctaataacgttgtgttaaaaaagtgtttgaagaaaaaggtacaaaaatggcttttatacttaaatatttttgtttacatttccagaatagtggggg

SEQ ID NO: 265234 - DNA, 417 bp, Homo sapiens
caaaaatgactgtgctggggcagtggaggacacaaaaatgagacacagttcctgtcctttagcagcttgaagtcaggcttgatgtcaagtagaaggtgatgagaaaaagaaaaaaattgcccagaggccaggcacggtggctcatgcctataatcccagcaatttaggaggccgaggtgggaggattgcttgagcccagaaattcgagaccagcttgggcaacttagcgagacccatctctacagaaaataaaatatgagctgggtgtgatggtgcatacctgtagtcccagctacttgggatgctaaggtgggaggatcgcttcagcctgggaggtgaaggctgtagtgagccatgattgcaccactgcactccagcctgggtgacagagcaagatcctgtctcaaaaaagaaaag

SEQ ID NO: 265235 - DNA, 287 bp, Homo sapiens
atcagatctcgtgagaactcactcactatcataagaacagcatgggggaaaccaacccccatgatccaatcacctcttaccaggtccctccttcaacgcgtggggattacaatttggattacaattcacgatgggatttgggtggggagacagaggcaaattatatcagtggtggtccactgaatgagaggagtgaatgagaagggattattaagggtatctcccaggcttcccagcaactgactgcaatcccctaaatagaggactctggtagggtaggtttgtca

SEQ ID NO: 265236 - DNA, 511 bp, Homo sapiens
aaaataactaccaatgattgcaagtttttctaatacgtgattggttggtgccagctcttggtagtaaaattgaatcagtagaatcagcaaatagttccaaaggtttttactgaaaaaaaaaagctctgactttttaaatcagggactttgaatatcaactgagtattagattatattaaggaactatttcaatcttgacggatgtgataaggacaccttatgtaagaagatcgccccattgttagatgcatactctgtacaataacatatgctgtctgaaacttcattgaagatacttcaggaaaaagaagtgactatagataaaacaaataggacagaatagtaatggttagtgatggctggtgaaactcggtgatgagtccaaaatgctcttatattccccagttttatttatactcaattttcataatacaaaatagaaaagagttctgtggtcaaataagctttgagaaaccctggttttaataaaattaatttaggcatttttaaa

SEQ ID NO: 265237 - DNA, 854 bp, Homo sapiens
tccaattccctttttttttctgtgacccattccctcacctggcaataaaggatctttcctgcttgattgacatgtgcaaatggtaggtgaaccccttgattccatatgtctccctcaaaatcactttacatcctaaggccaggatttggcccctctccctagggccactgaagttttagctattccatttgtattaaaaactggttaagagctataatggagggtgattgactctgaatcttgacaaatttagaatcttttccgggctattcaatcaggctttgccaaccttcatttcctttatttttcaaatgaagaaaatgaagcaggtaattaaggataaatttcttgtgtgagacaacatggggagcctgtggcacttccagaattaggccaggaatccctctgccagggaattcagtagaaatctctgccaagttatctctttgatgtatatctccgcaattcttatttgctttgaaaactactgcctcctaccttcgtttcagatgtggaaattgaagctgtaataaatgttaagtatcctaaaagcaggactcacatagcaaattcaaggcacaacaaggattctcaatcgttgtgtgtttgtgcttttttctaacaattcctgcctactgccttcctgtgttaagatagggagaagaggactgtggcagattctggtgttttagtgccatatgctctcttcatatgaatgctattaatcatctgattacagtaaattgatttaagtgctggtgagatcaacatctcctgaaatttattaatctatttattgaacacctactgcatacaatgtagtacattaggttcttttgggggaaaatgaaaaa

SEQ ID NO: 265238 - DNA, 204 bp, Homo sapiens
agttgggggcccccccaaattaaaatttgggggccgtttatccttttccccctctcttcatatgaatgctattaatcatctgattacagtaaattgatttaagtgctggtgagatcaacatctcctgaaatttattaatctatttattgaacacctactgcatacaatgtagtacattaggttcttttgggggaaaatgaaaaa

SEQ ID NO: 265239 - DNA, 449 bp, Homo sapiens
gctttttttttctctttaaaacaagagcattaaactgtgaatttttgaagcttctatccagcaaccaatgaattacttctgcagccttctgccctccttgggccattcatccaacagtcagatgaacgtttaagaacacaaccagttcataaactggtacttgaccatgaatgacaaattcatactgatttttttcttctgtcatccacttgcaatatttctctcttattcatactcttcttgtagatatatttctccagcttggaccatctgcttttccccctaaactcagaacctgccatggcttcctccttaccgtcaaaatcagcattcagtatggcctaaaaggtccacatgcccagagttcctatcaaaatctcaaatttttcttttgggttaaataggaaaagaggagactattaacaccagaagtcagaagagtaagattt

SEQ ID NO: 265240 - DNA, 279 bp, Homo sapiens
gcacaaatgaagggtttacgcccaaccaatatctcacattatttaaacaaaccatgtggttttaatctttcttacctttgaacacacttctgccagctattcccagctcccttatctttttatgataatctcttgcatccttctaaactctctgggggtataatcacctttgtgaaatctttcctgaatcccatttatctcttcccatttgttgccaggaactcttccacttgtagattcaacagtgaataaaacaaagttctttcttttgtggagctt

SEQ ID NO: 265241 - DNA, 488 bp, Homo sapiens
acacatggctcaagaataaagcaatcaaggatttttttctttctgtaaagcatatattatatgaaacgtttgtcaggttcttcactcattgtaaattaggcaaggaggaaaggataatacagcattggtatgagaggagagagagggaaaacaggtgcccaaaatggaacaaccccaatgagatggagaactgaaatacagtcatgtgtcacttaatgacaaggatacactcggagaaatgcctctttatgcaatttcatcattgtataagcatcacagagtgcacttacacaaacctgggtggtacagcctactacacacctaggctatacgatatagcctaatgcacttaggctacaaacctgtacaccatggtactgtaatgaatactgtaggcaggtgtaatacaatagtaaatacttgtgtgtttaaacatgtctaaacatacaaaagctacagtaaaaataaagtataaaaaatttttaaaa

SEQ ID NO: 265242 - DNA, 380 bp, Homo sapiens
ggtttcaggagctggtggggacaggaatcagactgaggtgagaataaggttgatggcataaaaacagcaagtggtgtttggcagtgacagggaggagggagagagtgcagggcagagagctgccctgttggagctggagcctgcagggccagtagagtgagggggtgcacaggttgtcagtggcctgcagaggggcaggagggcagaggaagctccgtttgtgggtctttagacataaggaagttgagaaagattgtgcccaggctgggcgcggtggctcatgcctgtaatcccagcactttgggaggcaaagtcaggtggctcgcttgagctcaggagtttgagatcagcctgggcaacatggcaaaaccctgtctcta

SEQ ID NO: 265243 - DNA, 319 bp, Homo sapiens
tggattttttccattgcatgtaataagtattccaagaaaactgtattagtagcagatataagcacaatactttctctcaagggttaccttatatctttaaaattttttatcatgacgataactgctgaatatatttatcttaatttacaggatttcttttactggggaaaaataaatttaagatttttcctgctgccctgatgtcctgtgcaccaaagaacattatcaagagagctaaaaagcaactcatagaatagaagaaaacatttgcaaattatgtatcagataagggcctagttaccagaatatataaataact

SEQ ID NO: 265244 - DNA, 445 bp, Homo sapiens
tatgtggtatgctagcgactagtgctaaggagaaaaactaaagccgagagggagacagaccccatgtgtgtttgtggcagggtggggtggcatggtgccttggatgggaggccagggaatgccttgctgagaacataatatttgagtgaagacctgaagaaaatatacaaatctctagagattccctatatgtccatcttgggcaggaaaattcttgcctcctctttaacaatgtgtactacctgagggtgtgttatgttctggagcagagggctctgtggggacacatggatgctccctgccctggagaagtatctctggggtaacaagtcctcagccctttagctccttgaagtctagcagagggaagtgctaaatgccaggtcataactgcaagtctgcaggtgggatccttgagggctggagtggcaaggggaaggtgaca

SEQ ID NO: 265245 - DNA, 798 bp, Homo sapiens
tcagacactcggctccacctcactgagtctctcaggcatgtgcagggtcctaggaagcatatgaagtgcatcaggaaccccctcctgcccccgttgccgaggcagcactgccctctgctaggaacagctccgtgttggcctctctgtccccacacactgggcctgcagggcttctccgagactcttcagttcaggcttctgggtgctttccttagttcagcaccagtgctctgtgtgggcagcgtctcccccgaggatccgcagctccgggttacccgcaggcgtccatctccgggatggtcctggctgtgctgctgcaccagggccgccttccccaccttttccagaggaacctgttctacggccagaagaacaagtaccgagcaccccgagggaagccggccccggcctcaggggacacccagacccctgcaaaggggtccagtgtccgggagcctgggcgcagtggtgttgaggggccacattccagctgagtggccttgctctgtgtgagccccgtgcgagggccctgcttgtagctggaccctggaaccttctgtagctaagagggaatcctggccccctccccagaagccatttgtcaataaaccatttctaaggacaaaaaaaagacacaacaaaacacaacaacaaacaaagacaaaaaaagcaacaaaaacaaaagacaaacaaaaaagaagaaaaacgcacacaaagaagagagaacacaagagacaacacgaaagcgacaacacagagcaaagaaaagagaaggagagggaagcacaacacaagagg

SEQ ID NO: 265246 - DNA, 698 bp, Homo sapiens
tcagacactcggctccacctcactgagtctctcaggcatgtgcagggtcctaggaagcatatgaagtgcatcaggaaccccctcctgcccccgttgccgaggcagcactgccctctgctaggaacagctccgtgttggcctctctgtccccacacactgggcctgcagggcttctccgagactcttcagttcagggatggtcctggctgtgctgctgcaccagggccgccttccccaccttttccagaggaacctgttctacggccagaagaacaagtaccgagcaccccgagggaagccggccccggcctcaggggacacccagacccctgcaaaggggtccagtgtccgggagcctgggcgcagtggtgttgaggggccacattccagctgagtggccttgctctgtgtgagccccgtgcgagggccctgcttgtagctggaccctggaaccttctgtagctaagagggaatcctggccccctccccagaagccatttgtcaataaaccatttctaaggacaaaaaaaagacacaacaaaacacaacaacaaacaaagacaaaaaaagcaacaaaaacaaaagacaaacaaaaaagaagaaaaacgcacacaaagaagagagaacacaagagacaacacgaaagcgacaacacagagcaaagaaaagagaaggagagggaagcacaacacaagagg

SEQ ID NO: 265247 - DNA, 1294 bp, Homo sapiens
cttcatatagggacaccagtcatcgaattggaggttcactctactcaagtatgacgtcaccgtgatttcactgattttatgtcccaggccgtattctaacaagggcacatcctgtgttctgggaagggcgtgtcgctggggaaatactcttcacccggctgcaacctctcactgtagaactgcctctgtggagaagcccaaagggcatttgcggcttctaggagccaagtaggaggaggctgggatccgtgtttcaggcgggactccaggcttgggcgggcctgatactcgagtccacatgccccctctagagaggaacctgtctcctgccagggccagggaggggggcactggctgcttctgtattttggggtttggggccctggagcttcccatgcggaattgccgtccctcctcctaggcgagtcccagggccaccccatcccacagggacccgggcgccagcttctgaaagcatggggcatctgcggaagaactgggttgtttcccagctttcgtccctgcggaggggcgatccggcccctccatgtcagcagtgtttggtcgtccacatgcttgtcagccccacgctgtgctcctgcgtctcttcccgtctcatccatctggatgcttgacacctctgacagcatccctttcctgtcatcttagggcagcttcaggaaaccgaaaaacaggcttgtgtccttccattaacccctttatccacaagttcagtatcagcatgagccctggggagctccaaggctgcagccaggagccccgtagccagggatggtcctggctgtgctgctgcaccagggccgccttccccaccttttccagaggaacctgttctacggccagaagaacaagtaccgagcaccccgagggaagccggccccggcctcaggggacacccagacccctgcaaaggggtccagtgtccgggagcctgggcgcagtggtgttgaggggccacattccagctgagtggccttgctctgtgtgagccccgtgcgagggccctgcttgtagctggaccctggaaccttctgtagctaagagggaatcctggccccctccccagaagccatttgtcaataaaccatttctaaggacaaaaaaaagacacaacaaaacacaacaacaaacaaagacaaaaaaagcaacaaaaacaaaagacaaacaaaaaagaagaaaaacgcacacaaagaagagagaacacaagagacaacacgaaagcgacaacacagagcaaagaaaagagaaggagagggaagcacaacacaagagg

SEQ ID NO: 265248 - DNA, 406 bp, Homo sapiens
acacaatagggtgactatagtcaacaatagtttatggtgtatttcaaaataactacatgagtgaatttagaatgttccaagacaaataaatgataaatgtgaggctatggatatcccaattatccagatttgatcattacacattatatacatgtatataaatatcacatgtacctgattaaatatgtataactattatgtaccccccaaaatacaaaatacaaataaatttgtactgacatgttaactactatgaaaagacgtatcttcagatgcttataatagtttgctaaagctggatgcaaatttaagcagcagagggtgagctacttttttttaaacttaagaacatattatgacgacctaggttaatatgcttaattaatgtgaagttcagttttctttt

SEQ ID NO: 265249 - DNA, 708 bp, Homo sapiens
caatgaaaatttagcaagccactgaatttgagttttcactttgtttctaatatgctgtgtgaatcagtacagttttcttaccctttcttggtcttaatttccttactgataaaatggggtagtaatacctatctcaaaaaattattgcacatattaaataacattcctctatgtatctcaatggcattagacattaggagaagcattttgtggaggatttgaagttgagatcttcatccaagaagtagcttttcaatttgctagaagcttaatgtaggcaagccacttcatttttcagaacttgtttactcatttataatatgggaataaaaatttgtgcaagtcagagaagggtgccttaaaaatgttgtggccaagccacatgagatcaaagacacacttttcatgacctcaaatgtgggcccagcctaggtcagccaacccccatccaacccttagactcacgaacaaatccacctgagatcagcagagccaccctagatcagctgaaactctaagcacaaaaataaaaacttatcactgtataccactggagttttctggttatctctcgtatagcaaaatctaactgatgcaatctccatctggccttcatccttctccctttattgtcctttcgtgtattgttcatccagcaaccaggatgatcttgttaaaacattaaacagattctgtcactcttattca

SEQ ID NO: 265250 - DNA, 516 bp, Homo sapiens
catttttgtcttctctcatctcagaagggtgtggggctgattgctcactgatgctctacatcctgccgctcccacatcacctgaaaacttgctccatcatcaatttctcccctttctcctgcgtcttcactctcttggtctctactagatccttcccttcacagatagatatggtgctgtctcttccatcttaaaaaaatgagttctcttggccaggcgcagtggctcacatctgtcatcccagcaatttcagaggccaaggtgggaggattgcttgagtccaggagttcaagagcatcctgggcaacatagtaaggctccatttctactaaaataaattttaaaaaattagccaggcatggtggcacacacctgtagtcccagctacacaggaggctgaggtgggaggctgaggtgggaggatcgcttgaatcccacaggtcaaggttgcagtgagctgtgatcacatgactgtactccagctctgtgtgacacagcaagaccttatctcaaaaa

SEQ ID NO: 265251 - DNA, 1346 bp, Homo sapiens
agcccgcgcctgcgcctttgcggcgggattcggtcccgctgtcctaggcgggatggtgccgctgtgccaggttgaagtattgtattttgcaaaaagtgctgaaataacaggagttcgttcagagaccatttctgtgcctcaagaaataaaagcgttgcagctgtggaaggagatagaaactcgacatcctggattggctgatgttagaaatcagataatatttgctgttcgtcaagaatatgtcgagcttggagatcagctcctcgtgcttcagcctggagacgaaattgccgttatcccccccattagtggaggatagtgcttttgagccatctaggaaagatatggatgaagttgaagagaaatctaaagatgttataaactttactgccgagaaactttcagtagatgaagtctcacagttggtgatttctccgctctgtggtgcaatatccctatttgtagggactacaagaaataactttgaagggaaaaaagtcattagcttagaatatgaagcatatctacccatggcggaaaatgaagtcagaaagatttgtagtgacattaggcagaaatggccagtcaaacacatagcagtgttccatagacttggcttggttccagtgtcagaagcaagcataatcattgctgtgtcctcagcccacagagctgcatctcttgaagctgtgagctatgccattgatactttaaaagccaaggtgcccatatggaaaaaggaaatatacgaagagtcatcaacttggaaaggaaacaaagagtgcttttgggcatccaacagttaatcacttatgtttttagagcatgcaatcttaactttgttaaactattattattgatcacattttgatttttttctctccacatcaggatagtttactgaagcacaatctcttatactagtgggacaaaagggagaaaaaggaagcaagataaatgggtatgtaggatgaagggttatttaaaatggaactaaagatagaaggaggactgtaggaagaaatggaataatttaaatgtgaggaaagatatctgtggtagacatgtccttccatgactaatttctaattgtaactcaacacacattgaggtatgggccctcctcagtgactttaactagctcagaaacgtactcccccaccaaccccacctcaccgccccccatcccggttctgggagagcattgttattaaggatgcatgacaggaatgttggcagaactggaaagtattaaaaaagcattatcagacagtcttgatattatacattttcagaaatatattaaaaataataaactaaaacccatgatttcaaaagtttaaaaa

SEQ ID NO: 265252 - DNA, 868 bp, Homo sapiens
agcccgcgcctgcgcctttgcggcgggattcggtcccgctgtcctaggcgggatggtgccgctgtgccaggttgaagtattgtattttgcaaaaagtgctgaaataacaggagttcgttcagagaccatttctgtgcctcaagaaataaaagcgttgcagctgtggaaggagatagaaactcgacatcctggattggctgatgttagaaatcagataatatttgctgttcgtcaagaatatgtcgagcttggagatcagctcctcgtgcttcagcctggagacgaaattgccgttatcccccccattagtggaggatagtgcttttgagccatctaggaaagatatggatgaagttgaagagaaatctaaagatgttataaactttactgccgagaaactttcagtagatgaagtctcacagttggtgatttctccgctctgtggtgcaatatccctatttgtagggactacaagaaataactttgaagggaaaaaagtcattagcttagaatatgaagcatatctacccatggcggaaaatgaagtcagaaagatttgtagtgacattaggcagaaatggccagtcaaacacatagcagtgttccatagacttggcttggttccagtgtcagaagcaagcataatcattgctgtgtcctcagcccacagagctgcatctcttgaagctgtgagctatgccattgatactttaaaagccaaggtgcccatatggaaaaagggaattattcgagagtctcacttggaaggaacacacagggtttggctccaacgttatcactttgttaaacacgcacttaactggaacttttttcggcccttggtttcccccacgagtttgggaccctt

SEQ ID NO: 265253 - DNA, 927 bp, Homo sapiens
gtatcaacgcagagtgcccattacggccggggctaggcgggatggtgccgctgtgccaggttgaagtattgtattttgcaaaaagtgctgaaataacaggagttcgttcagagaccatttctgtgcctcaagaaataaaagcgttgcagctgtggaaggagatagaaactcgacatcctggattggctgatgttagaaatcagataatatttgctgttcgtcaagaatatgtcgagcttggagatcagctcctcgtgcttcagcctggagacgaaattgccgttatcccccccattagtggaggatagtgcttttgagccatctaggaaagatatggatgaagttgaagagaaatctaaagatgttataaactttactgccgagaaactttcagtagatgaagtctcacagttggtgatttctccgctctgtggtgcaatatccctatttgtagggactacaagaaataactttgaagggaaaaaagtcattagcttagaatatgaagcatatctacccatggcggaaaatgaagtcagaaagatttgtagtgacattaggcagaaatggccagtcaaacacatagcagtgttccatagacttggcttggttccagtgtcagaagcaagcataatcattgctgtgtcctcagcccacagagctgcatctcttgaagctgtgagctatgccattgatactttaaaagccaaggtgcccatatggaaaaagggtaagttaagaaaataacacattttagcatgtggacctgatttttctcaggaatttttagataaatccccccatatttatggactttttactgactgtagtatcttgttttctttatctgtgaaatatcttctttccaagatttgttaagcatgaaaaatatgtgccccaaagaatgcatggcacacagtaagcctc

SEQ ID NO: 265254 - DNA, 287 bp, Homo sapiens
  misc_feature (91)..(91): n is a, c, g, or t
  misc_feature (100)..(100): n is a, c, g, or t
gtggggcaagatccaaaagcgtagcaaaagagtttgcctgcaaatctttggaaaagcgaaagtgtttttttgaatgaaaaaaaaggtaatnttttttttncaacaaccccacctcaccgccccccatcccggttctgggagagcattgttattaaggatgcatgacaggaatgttggcagaactggaaagtattaaaaaagcattatcagacagtcttgatattatacattttcagaaatatattaaaaataataaactaaaacccatgatttcaaaagtttaaaaa

SEQ ID NO: 265255 - DNA, 1738 bp, Homo sapiens
agcccgcgcctgcgcctttgcggcgggattcggtcccgctgtcctaggcgggatggtgccgctgtgccaggttgaagtattgtattttgcaaaaagtgctgaaataacaggagttcgttcagagaccatttctgtgcctcaagaaataaaagcgttgcagctgtggaaggagatagaaactcgacatcctggattggctgatgttagaaatcagataatatttgctgttcgtcaagaatatgtcgagcttggagatcagctcctcgtgcttcagcctggagacgaaattgccgttatcccccccattagtggaggatagtgcttttgagccatctaggaaagatatggatgaagttgaagagaaatctaaagatgttataaactttactgccgagaaactttcagtagatgaagtctcacagttggtgatttctccgctctgtggtgcaatatccctatttgtagggactacaagaaataactttgaagggaaaaaagtcattagcttagaatatgaagcatatctacccatggcggaaaatgaagtcagaaagatttgtagtgacattaggcagaaatggccagtcaaacacatagcagtgttccatagacttggcttggttccagtgtcagaagcaagcataatcattgctgtgtcctcagcccacagagctgcatctcttgaagctgtgagctatgccattgatactttaaaagccaaggtgcccatatggaaaaaggaaatatacgaagagtcatcaacttggaaaggaaacaaagagtgcttttgggcatccaacagttaatcacttatgtttttagagcatgcaatcttaactttgttaaactattattattgatcacattttgatttttttctctccacatcaggatagtttactgaagcacaatctcttatactagtgggacaaaagggagaaaaaggaagcaagataaatgggtatgtaggatgaagggttatttaaaatggaactaaagatagaaggaggactgtaggaagaaatggaataatttaaatgtgaggaaagatatctgtggtagacatgtccttccatgactaatttctaattgtaactcaacacacattgaggtatgggccctcctcagtgactttaactagctcagaaacgtactcccccaccaaccccacctcaccgccccccatcccggttctgggagagcattgttattaaggatgcatgacaggaatgttggcagaactggaaagtattaaaaaagcattatcagacagtcttgatattatacattttcagaaatatattaaaaataataaactaaaacccatgatttcaaaagtttaaaaaaaaaaaaaaaaaaaaaaaaaaaaaaaaaaaaaaaaaaaaaaaaaaaaaaaaaaaaaaaaaaaaaaaaaaaaaaaaaaaaaagaaaaaaaaaaaaaaaaaaaaaaaaaaaaaaaagaaagacaaaaaaagaaaaaacaaaagaaaaagagaggggggaaaaacacaaaagagggaagaagacagaggagacaacaaacaaaaggagaaagagagaacagaagaaaagagaaaaaacaacagagaagagacacacacaaaacagccaggagaaggacacaaaaacagaagacagaaaaaaagaaaaacacacaaaaggcgaaaacagaaaacaaagcagacacaagcacaaacaacacagagagaaacaaaaaagatgagacaacaaaaaagag

SEQ ID NO: 265256 - DNA, 1807 bp, Homo sapiens
agcccgcgcctgcgcctttgcggcgggattcggtcccgctgtcctaggcgggatggtgccgctgtgccaggtaagggtggcgggtgtgcgtgcgggcctgggtgcggagccctcctcgacgtgtctctcccgccctttccctccacatacccagccttggtcagtcggacctccccactagcccccaacctggccggcgtcttgggttcgggggcgcccccgcccccgcccccgggcccttcctgtctccgggctttactgcgactgccccagcagaagtcgggtcctctccgagaactcttgtcagctcacggcagcaaggacggactcgttctgaaggcgcctccaccttttatgaccacctctttcccagattattcgttttgatgaagctaaaattttaatctaaaaagaaatgcacctcatggagaattcttgtgaagaactgtgcttcatctgtggatttctacacccttgatcatttgcaaacctgtaattatttcgtaaagagttgtttgcacggagtgacaggttgaagtattgtattttgcaaaaagtgctgaaataacaggagttcgttcagagaccatttctgtgcctcaagaaataaaagcgttgcagctgtggaaggagatagaaactcgacatcctggattggctgatgttagaaatcagataatatttgctgttcgtcaagaatatgtcgagcttggagatcagctcctcgtgcttcagcctggagacgaaattgccgttatcccccccattagtggaggatagtgcttttgagccatctaggaaagatatggatgaagttgaagagaaatctaaagatgttataaactttactgccgagaaactttcagtagatgaagtctcacagttggtgatttctccgctctgtggtgcaatatccctatttgtagggactacaagaaataactttgaagggaaaaaagtcattagcttagaatatgaagcatatctacccatggcggaaaatgaagtcagaaagatttgtagtgacattaggcagaaatggccagtcaaacacatagcagtgttccatagacttggcttggttccagtgtcagaagcaagcataatcattgctgtgtcctcagcccacagagctgcatctcttgaagctgtgagctatgccattgatactttaaaagccaaggtgcccatatggaaaaaggaaatatacgaagagtcatcaacttggaaaggaaacaaagagtgcttttgggcatccaacagttaatcacttatgtttttagagcatgcaatcttaactttgttaaactattattattgatcacattttgatttttttctctccacatcaggatagtttactgaagcacaatctcttatactagtgggacaaaagggagaaaaaggaagcaagataaatgggtatgtaggatgaagggttatttaaaatggaactaaagatagaaggaggactgtaggaagaaatggaataatttaaatgtgaggaaagatatctgtggtagacatgtccttccatgactaatttctaattgtaactcaacacacattgaggtatgggccctcctcagtgactttaactagctcagaaacgtactcccccaccaaccccacctcaccgccccccatcccggttctgggagagcattgttattaaggatgcatgacaggaatgttggcagaactggaaagtattaaaaaagcattatcagacagtcttgatattatacattttcagaaatatattaaaaataataaactaaaacccatgatttcaaaagtttaaaaa

SEQ ID NO: 265257 - DNA, 1503 bp, Homo sapiens
  misc_feature (816)..(816): n is a, c, g, or t
  misc_feature (822)..(822): n is a, c, g, or t
  misc_feature (826)..(826): n is a, c, g, or t
  misc_feature (834)..(834): n is a, c, g, or t
  misc_feature (839)..(839): n is a, c, g, or t
  misc_feature (842)..(843): n is a, c, g, or t
  misc_feature (870)..(870): n is a, c, g, or t
agcccgcgcctgcgcctttgcggcgggattcggtcccgctgtcctaggcgggatggtgccgctgtgccaggttgaagtattgtattttgcaaaaagtgctgaaataacaggagttcgttcagagaccatttctgtgcctcaagaaataaaagcgttgcagctgtggaaggagatagaaactcgacatcctggattggctgatgttagaaatcagataatatttgctgttcgtcaagaatatgtcgagcttggagatcagctcctcgtgcttcagcctggagacgaaattgccgttatcccccccattagtggaggatagtgcttttgagccatctaggaaagatatggatgaagttgaagagaaatctaaagatgttataaactttactgccgagaaactttcagtagatgaagtctcacagttggtgatttctccgctctgtggtgcaatatccctatttgtagggactacaagaaataactttgaagggaaaaaagtcattagcttagaatatgaagcatatctacccatggcggaaaatgaagtcagaaagatttgtagtgacattaggcagaaatggccagtcaaacacatagcagtgttccatagacttggcttggttccagtgtcagaagcaagcataatcattgctgtgtcctcagcccacagagctgcatctcttgaagctgtgagctatgccattgatactttaaaagccaaggtgcccatatggaaaaagaaatatacgaagagtcatcaacttggaaaggaaacaaagagtgcttttgggcatccaacagttaatcacttatgtntttagngcangcaatctnaactntgnnaaactattattattgatcacatacttnaaaagccaaggtgcccatatggaaaaggaaatatacgaagagtcatcaacttggaaaggaaacaaagagtgcttttgggcatccaacagttaatcacttatgtttttagagcatgcaatcttaactttgttaaactattattattgatcacattttgatttttttctctccacatcaggatagtttactgaagcacaatctcttatactagtgggacaaaagggagaaaaaggaagcaagataaatgggtatgtaggatgaagggttatttaaaatggaactaaagatagaaggaggactgtaggaagaaatggaataatttaaatgtgaggaaagatatctgtggtagacatgtccttccatgactaatttctaattgtaactcaacacacattgaggtatgggccctcctcagtgactttaactagctcagaaacgtactcccccaccaaccccacctcaccgccccccatcccggttctgggagagcattgttattaaggatgcatgacaggaatgttggcagaactggaaagtattaaaaaagcattatcagacagtcttgatattatacattttcagaaatatattaaaaataataaactaaaacccatgatttcaaaagtttaaaaa

SEQ ID NO: 265258 - DNA, 1301 bp, Homo sapiens
agcccgcgcctgcgcctttgcggcgggattcggtcccgctgtcctaggcgggatggtgccgctgtgccaggttgaagtattgtattttgcaaaaagtgctgaaataacaggagttcgttcagagaccatttctgtgcctcaagaaatattggctgatgttagaaatcagataatatttgctgttcgtcaagaatatgtcgagcttggagatcagctcctcgtgcttcagcctggagacgaaattgccgttatcccccccattagtggaggatagtgcttttgagccatctaggaaagatatggatgaagttgaagagaaatctaaagatgttataaactttactgccgagaaactttcagtagatgaagtctcacagttggtgatttctccgctctgtggtgcaatatccctatttgtagggactacaagaaataactttgaagggaaaaaagtcattagcttagaatatgaagcatatctacccatggcggaaaatgaagtcagaaagatttgtagtgacattaggcagaaatggccagtcaaacacatagcagtgttccatagacttggcttggttccagtgtcagaagcaagcataatcattgctgtgtcctcagcccacagagctgcatctcttgaagctgtgagctatgccattgatactttaaaagccaaggtgcccatatggaaaaaggaaatatacgaagagtcatcaacttggaaaggaaacaaagagtgcttttgggcatccaacagttaatcacttatgtttttagagcatgcaatcttaactttgttaaactattattattgatcacattttgatttttttctctccacatcaggatagtttactgaagcacaatctcttatactagtgggacaaaagggagaaaaaggaagcaagataaatgggtatgtaggatgaagggttatttaaaatggaactaaagatagaaggaggactgtaggaagaaatggaataatttaaatgtgaggaaagatatctgtggtagacatgtccttccatgactaatttctaattgtaactcaacacacattgaggtatgggccctcctcagtgactttaactagctcagaaacgtactcccccaccaaccccacctcaccgccccccatcccggttctgggagagcattgttattaaggatgcatgacaggaatgttggcagaactggaaagtattaaaaaagcattatcagacagtcttgatattatacattttcagaaatatattaaaaataataaactaaaacccatgatttcaaaagtttaaaaa

SEQ ID NO: 265259 - DNA, 1964 bp, Homo sapiens
  misc_feature (1277)..(1277): n is a, c, g, or t
  misc_feature (1283)..(1283): n is a, c, g, or t
  misc_feature (1287)..(1287): n is a, c, g, or t
  misc_feature (1295)..(1295): n is a, c, g, or t
  misc_feature (1300)..(1300): n is a, c, g, or t
  misc_feature (1303)..(1304): n is a, c, g, or t
  misc_feature (1331)..(1331): n is a, c, g, or t
agcccgcgcctgcgcctttgcggcgggattcggtcccgctgtcctaggcgggatggtgccgctgtgccaggtaagggtggcgggtgtgcgtgcgggcctgggtgcggagccctcctcgacgtgtctctcccgccctttccctccacatacccagccttggtcagtcggacctccccactagcccccaacctggccggcgtcttgggttcgggggcgcccccgcccccgcccccgggcccttcctgtctccgggctttactgcgactgccccagcagaagtcgggtcctctccgagaactcttgtcagctcacggcagcaaggacggactcgttctgaaggcgcctccaccttttatgaccacctctttcccagattattcgttttgatgaagctaaaattttaatctaaaaagaaatgcacctcatggagaattcttgtgaagaactgtgcttcatctgtggatttctacacccttgatcatttgcaaacctgtaattatttcgtaaagagttgtttgcacggagtgacaggttgaagtattgtattttgcaaaaagtgctgaaataacaggagttcgttcagagaccatttctgtgcctcaagaaataaaagcgttgcagctgtggaaggagatagaaactcgacatcctggattggctgatgttagaaatcagataatatttgctgttcgtcaagaatatgtcgagcttggagatcagctcctcgtgcttcagcctggagacgaaattgccgttatcccccccattagtggaggatagtgcttttgagccatctaggaaagatatggatgaagttgaagagaaatctaaagatgttataaactttactgccgagaaactttcagtagatgaagtctcacagttggtgatttctccgctctgtggtgcaatatccctatttgtagggactacaagaaataactttgaagggaaaaaagtcattagcttagaatatgaagcatatctacccatggcggaaaatgaagtcagaaagatttgtagtgacattaggcagaaatggccagtcaaacacatagcagtgttccatagacttggcttggttccagtgtcagaagcaagcataatcattgctgtgtcctcagcccacagagctgcatctcttgaagctgtgagctatgccattgatactttaaaagccaaggtgcccatatggaaaaagaaatatacgaagagtcatcaacttggaaaggaaacaaagagtgcttttgggcatccaacagttaatcacttatgtntttagngcangcaatctnaactntgnnaaactattattattgatcacatacttnaaaagccaaggtgcccatatggaaaaggaaatatacgaagagtcatcaacttggaaaggaaacaaagagtgcttttgggcatccaacagttaatcacttatgtttttagagcatgcaatcttaactttgttaaactattattattgatcacattttgatttttttctctccacatcaggatagtttactgaagcacaatctcttatactagtgggacaaaagggagaaaaaggaagcaagataaatgggtatgtaggatgaagggttatttaaaatggaactaaagatagaaggaggactgtaggaagaaatggaataatttaaatgtgaggaaagatatctgtggtagacatgtccttccatgactaatttctaattgtaactcaacacacattgaggtatgggccctcctcagtgactttaactagctcagaaacgtactcccccaccaaccccacctcaccgccccccatcccggttctgggagagcattgttattaaggatgcatgacaggaatgttggcagaactggaaagtattaaaaaagcattatcagacagtcttgatattatacattttcagaaatatattaaaaataataaactaaaacccatgatttcaaaagtttaaaaa

SEQ ID NO: 265260 - DNA, 938 bp, Homo sapiens
agcccgcgcctgcgcctttgcggcgggattcggtcccgctgtcctaggcgggatggtgccgctgtgccaggttgaagtattgtattttgcaaaaagtgctgaaataacaggagttcgttcagagaccatttctgtgcctcaagaaataaaagcgttgcagctgtggaaggagatagaaactcgacatcctggattggctgatgttagaaatcagataatatttgctgttcgtcaagaatatgtcgagcttggagatcagctcctcgtgcttcagcctggagacgaaattgccgttatcccccccattagtggaggatagtgcttttgagccatctaggaaagatatggatgaagttgaagagaaatctaaagatgttataaactttactgccgagaaactttcagtagatgaagtctcacagttggtgatttctccgctctgtggtgcaatatccctatttgtagggactacaagaaataactttgaagggaaaaaagtcattagcttagaatatgaagcatatctacccatggcggaaaatgaagtcagaaagatttgtagtgacattaggcagaaatggccagtcaaacacatagcagtgttccatagacttggcttggttccagtgtcagaagcaagcataatcattgctgtgtcctcagcccacagagctgcatctcttgaagctgtgagctatgccattgatactttaaaagccaaggtgcccatatggaaaaagggtaagttaagaaaataacacattttagcatgtggacctgatttttctcaggaatttttagataaatccccccatatttatggactttttactgactgtagtatcttgttttctttatctgtgaaatatcttctttccaagatttgttaagcatgaaaaatatgtgccccaaagaatgcatggcacacagtaagcctc

SEQ ID NO: 265261 - DNA, 477 bp, Homo sapiens
aagaaatacaccaaccataggcttaacccaatgcttagacttggatttggaagttaagttacctgggaatagtctcagattgggttttaaagggttgaatggctgatcacagaaaacaggttgaactgaaaagcaagggtggagatcacatagcaaaggcatttgaggaacaagaaagatgcttggtaaagagagtgctcagggtggagacagcactgtgtcctcagcctggtgaatagttaaaacatgggtctctggattatacaacccggggggcaatgatctgaacaagggccacaaactgcatatgaatgccaaataccttgctgcatggacagggcaggcaaagagcttagtctgagtactctggtaatgtataattggggcctgagtagaagggagatactgttacagtacgtagttaagcggacataagcagggcaggagagggcccccctcccaccaggaatgtcaggc

SEQ ID NO: 265262 - DNA, 559 bp, Homo sapiens
cagaacatttttgtcaggccagtatccactcttctctggcatcataatcttagaagagttccaaaggagtaaaggagataatggattttaacaattgggcaagataaggaattaaattgacatgaatgtattaattatccacataaagtagatgaaggagtgttgggaggatttttacacactcaggtatcatcatcatgatgcctcagattttggggacctgaaagattttattaaccttcaggagtgaggacttaaaaggctttcccagggctggcgcggtggctcacgcctgtaatcctagcactttgggaggctgaggcgggtggatcatgaggtcaggagatcgagaccatcctggccaacatggtgaaaccccgtctctacaaaaaatacaaaaattagctgggtatggtggcatgagcctgtagtcccagctagtcaggaggctgaggcaggagaatcgcttgaacctggaaggcggaggttgcagtgaattgaggtggcaccactgcactccagcctgggcaacagagcaagactctgtctcaaaaaaaaa

SEQ ID NO: 265263 - DNA, 972 bp, Homo sapiens
tcccggtcgctcggccgacgatagttgctgacggctgggtgtcaggagctggtgacgtttgaagatgtggctgtgtacttctccctggaggagtgggaaaggctggaagcagaccagcggggcctctaccaggaagtcatgcaggagaactatgggattctcgtgtccttgggatacccaattcccaagcccgatctgatcttccggctggaacaaggggaagaaccttgggtcccagatagtccccgacctgaggaaggagacatcgtcactggcgtctacacaggagcctggttctggacggacgacatagaggaccacgaggaggaagacgacgaggacttcctggcggaggtggccgaggaggagaacgagcccccagggctctggtcggcggcctacggcgtgggggacgtgcctgggacgtgggggcccgacgactcggattcggcgcagactccagaggggtggggacccgacccaggcggcctgggggtcctggccgacggctctgaagcgaagcctttcctgcccggccgggagccgggtgcgaacctgctgtcgccctgggcgttccccgccgcagtggccccgccggccgggaggccggagaccacgtgcgacgtgtgcggcaaggtcttcccgcaccgctcgcggctggccaagcaccagcgctaccacgcggccgtcaagcccttcggctgcgaggagtgcggcaagggcttcgtgtaccgctcgcacttggccatccaccagcgcacgcacaccggcgagaagcccttcccgtgcccggactgcggcaagcgcttcgtctacaagtcgcacctggttacgcaccgacgcatccatactggcgagcggccctaccgctgcgccttctgcggcgcgggcttcgggcgccgctcctacctggtcacgcaccagcgcacgcacaccggcgagcgaccctacccgtgtccgcactgcggccgc

SEQ ID NO: 265264 - DNA, 1243 bp, Homo sapiens
gatagtggtggaggaggaggaggagggtgtggcagaggtagtgcaggatgcgcaggtggaggcggtggccgaggtggaggtggaggcggacgtggaggaggaggatgtgaaggaggtgctggcagaggaggagtgtccggcgttggggacccaggagcgacttagccgtggtggtgatgccaagtccccagttcttcaggaaaagggcctgcaggcctcccgggctccagccactcctagggatgaggacctggaggaggaggaagaggaggaggaggatgaggacgaggatgatttgctgacggctgggtgtcaggagctggtgacgtttgaagatgtggctgtgtacttctccctggaggagtgggaaaggctggaagcagaccagcggggcctctaccaggaagtcatgcaggagaactatgggattctcgtgtccttgggatacccaattcccaagcccgatctgatcttccggctggaacaaggggaagaaccttgggtcccagatagtccccgacctgaggaaggagacatcgtcactggcgtctacacaggagcctggttctggacggacgacatagaggaccacgaggaggaagacgacgaggacttcctggcggaggtggccgaggaggagaacgagcccccagggctctggtcggcggcctacggcgtgggggacgtgcctgggacgtgggggcccgacgactcggattcggcgcagactccagaggggtggggacccgacccaggcggcctgggggtcctggccgacggctctgaagcgaagcctttcctgcccggccgggagccgggtgcgaacctgctgtcgccctgggcgttccccgccgcagtggccccgccggccgggaggccggagaccacgtgcgacgtgtgcggcaaggtcttcccgcaccgctcgcggctggccaagcaccagcgctaccacgcggccgtcaagcccttcggctgcgaggagtgcggcaagggcttcgtgtaccgctcgcacttggccatccaccagcgcacgcacaccggcgagaagcccttcccgtgcccggactgcggcaagcgcttcgtctacaagtcgcacctggttacgcaccgacgcatccatactggcgagcggccctaccgctgcgccttctgcggcgcgggcttcgggcgccgctcctacctggtcacgcaccagcgcacgcacaccggcgagcgaccctacccgtgtccgcactgcggccgc

SEQ ID NO: 265265 - DNA, 270 bp, Homo sapiens
aaaactggagggaaaaaagggcaagaagtcctgtgatggatgacctttgggatccttatttccacctctgcttagcaggactgacattgtctccacaccagacaaaccctctaatgccaaactaaataggatgcatttataggggtgcctggcctctatttcttcctcatttaggaaaatcataaagcatgcagaaaataacccagacaaatgtgccaagatccttgaagacttgttcctgcttctcaggtcaattaacaaaaaaagaaa

SEQ ID NO: 265266 - DNA, 381 bp, Homo sapiens
agtgcagtgtcgtgagcatgtacagagggaagttgacagcggggagaggctttgctgaggaagtggcgtttggaagaacgagaatgagatggggttttgccgtgttacccaggctagtcacgaactcctgtgctcaagcgatctgtctgcctcggcctccaaagtgctgggattgcaggcatgagccaccgcgcccagccagaaagccactgctttatagaccaccacttaaatgcacctggcagcttcatgtacgcaagaactttcctgcagctcctttaaatttaagaatcttttggcaaaatgaagaatacaagcgtgtttcttcttcatatgctttgttttaggaacattaaaaaaatatagttactacaatcagaa

SEQ ID NO: 265267 - DNA, 610 bp, Homo sapiens
actctgaagaactggtggcttcagcagtacagccacgactcggcagacccaggcatcctcgtgctcctggcctgcggtaccatatccagcacctgcggccagatagccagttacccgctggccctggtccggacccgcatgcaggcacaaggtgaggcctgggcgggaggatggggcagggggagtctcatcgcttgggccccagcttctcccaagtagagccctgggctgggaccctcctggatttcgatgggcttctctgggcctccgtttccccatttgtgacattgaaatgggagtcctttactttcatggagctgaggattaactaggataacaggtgcagtgggtacaggaagagatcccttgcagacttagctgggatgtcgttgctggcaaatgtctagcatttccaggctggtaacttgaactcttaatttgtaagcatgggttatcgtgagcgggaggctaggaacaggggtagggagcagtcagggccagagtggttattgtttttgtctgtatttttttttttgaattatttccccccgtcccctccaccactaccctcccattctccctgaatctgttttgagaattttcttgagaa

SEQ ID NO: 265268 - DNA, 629 bp, Homo sapiens
tatgatacgttcttggctattcccccaggacagggatcttgctttaccctaaaatgcctgattatcaaagtgttatgtgtttgtgcatgaatgcgtttttaggtggggggagcagagaggaggttcatagctttcacattcttaaagagttccatgatccaataatagcttaagaactactgttttagattttttttttttttttgtaaacattttttactgcttccataaaaagctggtttcttctctcattcttaccaacaggtgccagcacttcgctcatgtaaagtgacactagtgggggagagaagaggccaaggcgaaatggacattgactctaacgagctgactgtcacttaatgcacatcctctagaaaccagacttcctcaaaatcgagcatcgaggtgtactgaggagtgtggtgcagcaggcagagttaacatgcacacaagctcttccagtcaggcagaattctcaatgtatccagccatctggagcctcatgggatcagagagcagcctacatctccagaaaggcattcagctaacaaacaggtcactgaccttgtcaagtgaccaggtgtccctgatgcattgtcacccgcagttaggaaattctccctctcctg

SEQ ID NO: 265269 - DNA, 283 bp, Homo sapiens
tatgggttgaactgtattccccaaaaagatagattgaagtcctacccccagtacttcagaatacgaccttatttagaaataggttcattgcagatgtaattagttatgatgaggtcacactggaatagagtggacctttaatccgatgtgacagccctccttataaggaggaaaaattgggcacagacacagaggaaagacagctacgtgaagatggagaaagaaattggagcaatgctgccacaatccgaagaatacctggggtgaccaaagctagaagagg

SEQ ID NO: 265270 - DNA, 254 bp, Homo sapiens
cttagcctcaggttggaagctgcctggaagtcgggtttgggggcctttttggaacttggtagagtcatggcaagtggaaaacactgtccacgttagaggtttacttagatacccctccgttcacaaccttacctgcctctccctgacttcagccacagctactgcctgtttttgatcaggtagcgattgttctctgcatcacttattctgatctctcaaaatgcagagcccagcctatcacacttcacgaaaac

SEQ ID NO: 265271 - DNA, 588 bp, Homo sapiens
aattgattttatttaatccaaaaagatatgcagtactaattaaatatgattagagatgcagtagggtcaggctaggcatggtggctcatgcctgtaatcccagcactttgggaggccaggagtccaagactagcctgggcagcacggtgaggccctcatctctacaaaaatctaaaacttagtcaggtgtggcagcacgcatctgtaatcctagctacctgggaggccaaattgggaggatccctggagcccaggagtttgaggctgcagtgagctatgaccatgccactgcactccagcatgtctcttaaaaaaaaagaaaaaaatggtctgtaaagaaggcacaaggagaacaccacgtgacaatgaaggcaaaggctggagttatgcagctacaggctaaggaagtcaaagatggtggaagccagcaaccaccaagagggagggagcaccatggctccaatattagactcccaccccacagaactcagacaacacatctgttgacttaaaccacccagcttgcggcacgttgtcatagcagttctaaggaactaatacagagaaaaataaacatttcgactgtta

SEQ ID NO: 265272 - DNA, 487 bp, Homo sapiens
tcaagagctcgtgtgtgacctgcagacatgcagtttcaggagaatggcgagggcagaagccagattgcaggggctggaggagtcagagtagaaagcagcatgtgtgggcctgttatggagagtcctacaccacaagttcacagggggcttttacttggttgtaagcatttttttttttttaactcttaagaagagtaccatagggctggacgcagtggctcacacctgtaatcccaccactttgggaggctgaggcaggcagatcacctgaggtcgggagttgagagcagcctgaccaacatggagaaacctcgtctctactaaaaatacaaaattagccaggcgtcgtggcgcatgcctgtcatcccagctactcaggaggctgaggcaggagaatcacttgaacccgggaggctgaggttgtggtgagccgagatcgcgccattgtactccagcctgggctacaagagtgaaactccatctcaaa

SEQ ID NO: 265273 - DNA, 371 bp, Homo sapiens
gcggcccctactactactaaattcgcggccgctcgactcctgggcttaagtgatcctcccagctcggcctctcaaagcgctgggattagaggcttgagctactgcattcggcctcattttttacatgtacatttaaaaatgggactttagattcctggttctcaaattggactgcatatcaacatcacctgtagggcccattcaaacagaatgatttttactctcagagtttctgattccacaggtctgggctggggccggagaatttgcaccacaagtgcccaggtgagtccggtggtgctggtggggcactcagtgtgtgctgagaccactggcttagatcaccactctcactggaaatcagagtccct

SEQ ID NO: 265274 - DNA, 396 bp, Homo sapiens
aagaaggagccaatgttgttttaaaattttagcttgagagataggtggggaagaaattaaatagacaagtaatcgctattcagaagagaagggagagtcattgtacgaggcccaagatacttgcccaaaaatatcgcagagaaaaactagtctttggggtcctattttttgagtggaacatttgagttatttaaaattagaattttattttggtcagattagaatttctagggtatgtcatatgtgtttttaaattgaaagctcttaaaactcctattgtagtttaatgtcattatccattaatttacataaatctgatttggatctctattttcatcgtagactgtgtaggggcaatttttcctaaaggttctgtgacatagtgctacctttttt

SEQ ID NO: 265275 - DNA, 173 bp, Homo sapiens
ttggactcatccaaatgagacccagcagctgaacctccagaagacagcctcaccagccttgtaaacaagatcatttcctttacccccatggaaaacaggacccaacaaatcccttgctgatgcaataccacatgttgtaagaataaaccattgtgtttttgccaagagttggt

SEQ ID NO: 265276 - DNA, 364 bp, Homo sapiens
aatcatcatgaagatcccctgccttggccttgaccctggagcttaggccgttccccagagcccagtgaccagattaataagagtgaaggaagggttctttgtcctccaccttttctctcaggtgtcaggcatagcgaagggcgtctgccccacccttgcctggcagggtagttgaaactggtttgtctctcacttgttaaaaggtgactgtacagtgtggatgagggaggaccttatttcagacaaatgaaattgaaatgttgacacctctccaatacagacttgcttcacttcatcgcttcctttctacttggaagtctatgttatttctgaactcattaaagctggaaacatcctgagagag

SEQ ID NO: 265277 - DNA, 451 bp, Homo sapiens
ggtcacaagatggagtcctttgtttccatgtttcctgtctcccaaatctgtctgatcccatggagttggtggtatacggcatcgtttgtgttgaacagagcctttgcaggcatgtctgtctaaaacactcaagctgaaagaaggacagggcctacagcttgtttttatggcccttactctaagaatgatttattatgtttttaagggttgttttaaagaagatgaatattcggcaagaccatatgtagcctgtaaaggctaaaatactatctggctgggtgggtggtggtggtggtgtgagagacaaggtgttactgttacctaggctgcagtgcagtggcgtgatcatagctcactgcagcctggaactcctggctcacatgatcctcctgccttagccttccaagaggttgggagtacaggtgtgcactatcctgcctggcttactaac

SEQ ID NO: 265278 - DNA, 467 bp, Homo sapiens
aatggggataatagtagtttcccctgacattagggttaactggggttgtgtatgtgaagcattgaaccgaatgcctggttcctacatgaataattgctcaccctcttgacaattttcttttaattcatgatctcataggctatttcttttgggaatatagtgaaacaaatttcagataaaaagagcaaaacatacaaaacacagtggtaacagaatggattgtgcatgttcaaaaccattaatcccttgcaaaaagtaactagaaaatgtttcctctgatttcatcccatcctaaccactatatttgagtgtgtatgtgtgtgtatctatcttctatttatccctaaaacccagacagtattcatctatatattttaattagtaatagattccttagtatcagtatgtaaatgagttaaaaatgcaactttataaaacaaataaaagattgaaaccatccttcttat

SEQ ID NO: 265279 - DNA, 498 bp, Homo sapiens
tacatgtgacagtaattgtgtattagttctgtaattgtcattttgaaaacccatgaagtattgcttggaaaaaaatgtcactagtgataagacttaattgcaagtgaagtctgttttcaactgtttgcagttagaagcaggtgttgtaacatctattaaatgattttataaatcttgggttttatcacatttgattaaatgctgctaagccactgatggtcaattccagaggaaaaaaaaagtttaatgactacagtttataaaattaatcaccaggcaaaactacatatttaaaatgtcaaaaggcttgaatcatgaaaagaattcctcaaccttgttaccaaattattgttttcaggattcacaaagcatgttatatatccatttatatttcagtttatacatatgactggtttctattcctgagacttaagtaagtacttggtgcgctttttcttttgttacaggtcagaaataaatcaggataatgaaaaatag

SEQ ID NO: 265280 - DNA, 311 bp, Homo sapiens
atttgaggcccgaagagaaaagaactaaaaggcagcagatgttcacttaaccaagtcacacggggtagattttacagaggaaagaggggccttcagctagacactcactgctcctcagctatcttttcctcttctcttcctgaccggagctcctctctgtcacttcccacacctcggggttctcccaatgtcagttactcccactcctgtatttctgacctctctttccactggatctctgcccatagaacaaaaccatgctaaagcattctgtttaaaatcaaagtaaaaccaaaaccaaacagatgata

SEQ ID NO: 265281 - DNA, 187 bp, Homo sapiens
aaggccgggatggagctgctgactctattatacacactcctcttctggggtcccttgctgtccacattacaggtggttttgggcaacgggcagcactgggaagtgacagggtgcaggagggcagggttggggtactctctccttgccacactgtccctctataatcacagtgcccacagtgtcccca

SEQ ID NO: 265282 - DNA, 2662 bp, Homo sapiens
agttcctgagagaagaaccctgaggaacagacgttccctcgcggccctggcacctctaaccccagacatgctgctgctgctgctgcccctgctctgggggagggagagggcggaaggacagacaagtaaactgctgacgatgcagagttccgtgacggtgcaggaaggcctgtgtgtccatgtgccctgctccttctcctacccctcgcatggctggatttaccctggcccagtagttcatggctactggttccgggaaggggccaatacagaccaggatgctccagtggccacaaacaacccagctcgggcagtgtgggaggagactcgggaccgattccacctccttggggacccacataccaagaattgcaccctgagcatcagagatgccagaagaagtgatgcggggagatacttctttcgtatggagaaaggaagtataaaatggaattataaacatcaccggctctctgtgaatgtgacagccttgacccacaggcccaacatcctcatcccaggcaccctggagtccggctgcccccagaatctgacctgctctgtgccctgggcctgtgagcaggggacaccccctatgatctcctggatagggacctccgtgtcccccctggacccctccaccacccgctcctcggtgctcaccctcatcccacagccccaggaccatggcaccagcctcacctgtcaggtgaccttccctggggccagcgtgaccacgaacaagaccgtccatctcaacgtgtcctacccgcctcagaacttgaccatgactgtcttccaaggagacggcacagtatccacagtcttgggaaatggctcatctctgtcactcccagagggccagtctctgcgcctggtctgtgcagttgatgcagttgacagcaatccccctgccaggctgagcctgagctggagaggcctgaccctgtgcccctcacagccctcaaacccgggggtgctggagctgccttgggtgcacctgagggatgcagctgaattcacctgcagagctcagaaccctctcggctctcagcaggtctacctgaacgtctccctgcagagcaaagccacatcaggagtgactcagggggtggtcgggggagctggagccacagccctggtcttcctgtccttctgcgtcatcttcgttgtagtgaggtcctgcaggaagaaatcggcaaggccagcagcgggcgtgggagatacgggcatagaggatgcaaacgctgtcaggggttcagcctctcaggggcccctgactgaaccttgggcagaagacagtcccccagaccagcctcccccagcttctgcccgctcctcagtgggggaaggagagctccagtatgcatccctcagcttccagatggtgaagccttgggactcgcggggacaggaggccactgacaccgagtactcggagatcaagatccacagatgagaaactgcagagactcaccctgattgagggatcacagcccctccaggcaagggagaagtcagaggctgattcttgtagaattaacagccctcaacgtgatgagctatgataacactatgaattatgtgcagagtgaaaagcacacaggctttagagtcaaagtatctcaaacctgaatccacactgtgccctcccttttatttttttaactaaaagacagacaaattcctacctctctgtaccttggtttcctgctctgtaaaacaggaatgagaagccctacttgcaaggttgtggtcaccattccaggagtcacatcccgttagagctcctggcacaggtgtatgccgagcactgatggatcgctgtgctttgaacacaaaggtcctgctgggaacctctcctgattctggtggcaactagtacttatatgtctgtgtcacttgcctgcaaaatagcgattctgcaactttccaggaaataacctcagcctgcaaatcaggtctaggtagcatctggatcctgcccacctcttcagcctcatctgcccaccctgtgactgctaggccgccttactctctgcagtctacgtattgtgcacagtccagtgggaatctttaggacacactgagctctctccgcactgctcacagcccatccatggctcctggatcctgaacctcccatcacatcctcttcgtgacatcactctcccacttcagtccactcctccatcttcaccacttaacccactggtccctctggtcttttccaaatcatttgcaacatgccctgttggttcatacctcagtccttgcacactggggaccctcctcctagaacgccctcctcctgggccttcttctgtctctgtctttgaaaatggagttcaaggattggacttctgggttgagctgagggagagagtgaagcagcagctcatgatctccctcctctaaagccaaacccagggaatgagaaacgtttccaaaggggcacaggatcatctggcaaattaaacaacatgatccaaaaaaatttacctacatgcagcacccgaacgaggaaagggacatctcacaacaatcactttatgcagtagccctgataggaagaaatcaaaggactggaggaagcactaaaacttccctaaatctagactcttgcccatttacggcagcatcaaaaaaccgtaaagtacca

SEQ ID NO: 265283 - DNA, 1464 bp, Homo sapiens
agttcctgagagaagaaccctgaggaacagacgttccctcgcggccctggcacctctaaccccagacatgctgctgctgctgctgcccctgctctgggggagggagagggcggaaggacagacaagtaaactgctgacgatgcagagttccgtgacggtgcaggaaggcctgtgtgtccatgtgccctgctccttctcctacccctcgcatggctggatttaccctggcccagtagttcatggctactggttccgggaaggggccaatacagaccaggatgctccagtggccacaaacaacccagctcgggcagtgtgggaggagactcgggaccgattccacctccttggggacccacataccaagaattgcaccctgagcatcagagatgccagaagaagtgatgcggggagatacttctttcgtatggagaaaggaagtataaaatggaattataaacatcaccggctctctgtgaatgtgacagccttgacccacaggcccaacatcctcatcccaggcaccctggagtccggctgcccccagaatctgacctgctctgtgccctgggcctgtgagcaggggacaccccctatgatctcctggatagggacctccgtgtcccccctggacccctccaccacccgctcctcggtgctcaccctcatcccacagccccaggaccatggcaccagcctcacctgtcaggtgaccttccctggggccagcgtgaccacgaacaagaccgtccatctcaacgtgtcctacccgcctcagaacttgaccatgactgtcttccaaggagacggcacagtatccacagtcttgggaaatggctcatctctgtcactcccagagggccagtctctgcgcctggtctgtgcagttgatgcagttgacagcaatccccctgccaggctgagcctgagctggagaggcctgaccctgtgcccctcacagccctcaaacccgggggtgctggagctgccttgggtgcacctgagggatgcagctgaattcacctgcagagctcagaaccctctcggctctcagcaggtctacctgaacgtctccctgcagagcaaagccacatcaggagtgactcagggggtggtcgggggagctggagccacagccctggtcttcctgtccttctgcgtcatcttcgttgtagtgaggtcctgcaggaagaaatcggcaaggccagcagcgggcgtgggagatacgggcatagaggatgcaaacgctgtcaggggttcagcctctcagatcttgaatcattttattggatttcctacattccttggactgggtttcgagtttctcctgaatctccgtgatctttgttgccatccagattctgaattctatgtctatcatttcagtcatttcagactcattaagaacattgctggggagatagtgtggtcacttgaaggtaaaatactctggcttttggatgt

SEQ ID NO: 265284 - DNA, 1690 bp, Homo sapiens
agttcctgagagaagaaccctgaggaacagacgttccctcgcggccctggcacctctaaccccagacatgctgctgctgctgctgcccctgctctgggggagggagagggcggaaggacagacaagtaaactgctgacgatgcagagttccgtgacggtgcaggaaggcctgtgtgtccatgtgccctgctccttctcctacccctcgcatggctggatttaccctggcccagtagttcatggctactggttccgggaaggggccaatacagaccaggatgctccagtggccacaaacaacccagctcgggcagtgtgggaggagactcgggaccgattccacctccttggggacccacataccaagaattgcaccctgagcatcagagatgccagaagaagtgatgcggggagatacttctttcgtatggagaaaggaagtataaaatggaattataaacatcaccggctctctgtgaatgtgacagccttgacccacaggcccaacatcctcatcccaggcaccctggagtccggctgcccccagaatctgacctgctctgtgccctgggcctgtgagcaggggacaccccctatgatctcctggatagggacctccgtgtcccccctggacccctccaccacccgctcctcggtgctcaccctcatcccacagccccaggaccatggcaccagcctcacctgtcaggtgaccttccctggggccagcgtgaccacgaacaagaccgtccatctcaacgtgtcctacccgcctcagaacttgaccatgactgtcttccaaggagacggcacagtatccacagtcttgggaaatggctcatctctgtcactcccagagggccagtctctgcgcctggtctgtgcagttgatgcagttgacagcaatccccctgccaggctgagcctgagctggagaggcctgaccctgtgcccctcacagccctcaaacccgggggtgctggagctgccttgggtgcacctgagggatgcagctgaattcacctgcagagctcagaaccctctcggctctcagcaggtctacctgaacgtctccctgcagagcaaagccacatcaggagtgactcagggggtggtcgggggagctggagccacagccctggtcttcctgtccttctgcgtcatcttcgttgtagtgaggtcctgcaggaagaaatcggcaaggccagcagcgggcgtgggagatacgggcatagaggatgcaaacgctgtcaggggttcagcctctcaggggcccctgactgaaccttgggcagaagacagtcccccagaccagcctcccccagcttctgcccgctcctcagtgggggaaggagagctccagtatgcatccctcagcttccagatggtgaagccttgggactcgcggggacaggaggccactgacaccgagtactcggagatcaagatccacagatgagaaactgcagagactcaccctgattgagggatcacagcccctccaggcaagggagaagtcagaggctgattcttgtagaattaacagccctcaacgtgatgagctatgataacactatgaattatgtgcagagtgaaaagcacacaggctttagagtcaaagtatctcaaacctgaatccacactgtgccctcccttttatttttttaactaaaagacagacaaattccta

SEQ ID NO: 265285 - DNA, 1430 bp, Homo sapiens
agttcctgagagaagaaccctgaggaacagacgttccctcgcggccctggcacctctaaccccagacatgctgctgctgctgctgcccctgctctgggggagggagagggcggaaggacagacaagtaaactgctgacgatgcagagttccgtgacggtgcaggaaggcctgtgtgtccatgtgccctgctccttctcctacccctcgcatggctggatttaccctggcccagtagttcatggctactggttccgggaaggggccaatacagaccaggatgctccagtggccacaaacaacccagctcgggcagtgtgggaggagactcgggaccgattccacctccttggggacccacataccaagaattgcaccctgagcatcagagatgccagaagaagtgatgcggggagatacttctttcgtatggagaaaggaagtataaaatggaattataaacatcaccggctctctgtgaatgtgacagccttgacccacaggcccaacatcctcatcccaggcaccctggagtccggctgcccccagaatctgacctgctctgtgccctgggcctgtgagcaggggacaccccctatgatctcctggatagggacctccgtgtcccccctggacccctccaccacccgctcctcggtgctcaccctcatcccacagccccaggaccatggcaccagcctcacctgtcaggtgaccttccctggggccagcgtgaccacgaacaagaccgtccatctcaacgtgtcctacccgcctcagaacttgaccatgactgtcttccaaggagacggcacagtatccacagtcttgggaaatggctcatctctgtcactcccagagggccagtctctgcgcctggtctgtgcagttgatgcagttgacagcaatccccctgccaggctgagcctgagctggagaggcctgaccctgtgcccctcacagccctcaaacccgggggtgctggagctgccttgggtgcacctgagggatgcagctgaattcacctgcagagctcagaaccctctcggctctcagcaggtctacctgaacgtctccctgcagagcaaagccacatcaggagtgactcagggggtggtcgggggagctggagccacagccctggtcttcctgtccttctgcgtcatcttcgttgtagtgaggtcctgcaggaagaaatcggcaaggccagcagcgggcgtgggagatacgggcatagaggatgcaaacgctgtcaggggttcagcctctcagaagacatcatcgtccagttcctctgcatttgaacagctgttcccccacccctcaataccgtttagagcagaagccagcaaatactatctgtcagggacagatagaaactattttcggcttcatgggccacacagtctcattgcagctcctcaaatctgct

SEQ ID NO: 265286 - DNA, 225 bp, Homo sapiens
gaattctttatatattctggacattagttcctcatcagatgtatgacttaatagatattttctctcattctgtgggttcttttcactttcctgatggtatcctttgatgtacaaaagttttgaattttgttaaagtccagtttgttttttccttttgtcactcttgcatttggtgttgtatctaagacccattgactaattcacggtcacagatttatacctatg

SEQ ID NO: 265287 - DNA, 537 bp, Homo sapiens
ctgctgattaccatgaccgtgacatggctttgaaaagcacatctcatcgctgcctggtgactcctttcagaggctcccccagggcaggttgttttgcaaccagacaatgaaatccaaatttactagggacatggatgaagctggagaccatcattctcagcaaactaacacaagaacagaaaaccaaacaccacatgttctcactgatagagggatagtgccaacccacatagacttagaagagagcaagctggagggccagtcttaacgtgtcccacctcccctctgtttgagagtgtgtctcactggcggtactctcaggaaaccagaaagcgccggggggcccactgatgtcatcaattcagggatttcaagacacatttgatatcttacagagctgatagctgccgtgcataggggaaataaatgagaggaatatgtctgcatagtgggggtgcagctagccttgggtagtgattcatttaatattcttttggctgcaagtaacagaatatccaaataaaattggtgctatga

SEQ ID NO: 265288 - DNA, 521 bp, Homo sapiens
ctacacagtgtgcatcaaccagttgtttgaagacctgacacatttactgagtcctctcttcttctcagtaatcactactacatttcttcaactgtacctgaaatgacagtgtatggagcctaggtgacagttgacccttaaaacatgtcttctgacctgcttgtggaataaatgccttccaggttgctgacttgcttaaatgtgctccccattgtgtctccatcccatagacagagacattctctgtggttctgcaaatcacagcacttggtctagatctgcatatgtgacatgccccaccttgagctacagttggtctgagctcagagtcttaaactcatttaaaagcagtgaagtgtcccaactcaccttttttctcatcctgagcattgtttccttctcattcttatttattgtggtcttctcattcatacttcatttaactgataaggaaatgctttatctgtatcaaaacatctcttgtaccccataaatatatacacctactatgtacccacaaa

SEQ ID NO: 265289 - DNA, 287 bp, Homo sapiens
caggagactgtaggatttgtgcagataaaagtcaggcagcagagtcagagggcagccatagcacgtgtaaggcggcggggatgctgacagcaagacgttttctggagaatctgggttttactgcaaatacaaattcactgttctcaggatggcggagggaccagctccttgggaaggtcacccccttggccacctgttgtccctgaggggctgatggagggaggaggccaccttatgaactgcaccaggtccgtggctttggcggtggaggccccatcactgcaact

SEQ ID NO: 265290 - DNA, 492 bp, Homo sapiens
taagatactatgtgtcttctgacccttcctccttccatcacctctgcccttgtcctctctgcaattggcagacatccgtaaagaaccagccagatgtctccttccctgttgaccttttcctgattcctccagccttccatcctgttgctccttctctgcataaatagcttttttttttaaacgtttctctcttgtagcagcaatcactttgtgtccgttatttatgtgcctgtaagcactgaccttggcacaatgcctggcagatagtagggactcaagaatatgttgacttgaataaatgaatgcatggaatgacaggatctcttgagacacaatctagcaaggtgaaatttattaaaggcaaatgtggatcaagaaaaccaattttacaagctcaaagatggaagggatatggtttaacagcaaaatgtgttaaaaattatttaggggttttggttgacagtttagtatgagtcaccaatgtgacccaaa

SEQ ID NO: 265291 - DNA, 229 bp, Homo sapiens
ttcttttctgcaatgcctctttcagtgacacaaagttaaaaccaggtactatgagtgctcacctgacttttggttcttatgaaggtgtttttttctgtgtggatagttgttaacttggtgtccttgtcggaggaacaatcagtggaagcttctatctcaccatcttgccctgcctcctgtggggttggttttataatcccatttcgtagatggaaaaacaaaaagggag

SEQ ID NO: 265292 - DNA, 260 bp, Homo sapiens
agttctgtttgtgtgggtatggttgctgtagtgcggcttaacaaaaacaatgcttcatatcagtgaaagctcttctttggtttaatttgggttgtggttatattgttttttcacatcacgtgagctgattgcaaggggttaacccaaaatgagccacttcacttaaaattattctatatgttagtttgtgaattctgttgttggtatttaaatgtatatcatagtttaatcatatcacataaagttgtgatttcaggaat

SEQ ID NO: 265293 - DNA, 141 bp, Homo sapiens
ttgttttttttttgcaaaacattcacatacatttaatctctttctcctcctctggttacatcttttctctattcccttctttgtctttacttaattattccaacatcttatcttcttctcccttctgtcgtcttctcgcac

SEQ ID NO: 265294 - DNA, 395 bp, Homo sapiens
aaataatagcacccctaatttttaactcgacacatgggtatccaaaataaaaaccagactcatttgtagctaggtgtggccataaatctaaatcctgagcacaatgggttgtgatttctggtcatacccttaaaagtatctggtcataccttaaaagtcatcccttcaccctttttcttgcctctacccctctgcttggaatggcaaagaaacagggcagaaggagccaaggtctctgcatgatcttgtggatcagagccactatacctgccctgggccatcttcacaagacagaaataagcttccatctggttcagcacactgttactttggggctctgttaccttcacctgagattgtatcctaactaataccttcatccctctctttcttta

SEQ ID NO: 265295 - DNA, 464 bp, Homo sapiens
atcttctactataaaatatactggtaagtataatttgatgatcttttgtaaattatagagttgtaaaattatcaccacagttcaaagaacatttctctcacacccaaaaattcctgggacctgttcatagtcagtttgggtctggagtgcacacaggtggtgggaggttgcaaggtgatgctggcctacatgacttgttctgataatcctgagttattgcaccatctgttgaatgggctggcgccatcttgggcctgacgagttgtaaattagctgcagccttcaagtaataacccggtggtggaacattctatagatacctggattgtctctggaacttctaagcaaacataattagacaagctagcaatgcagtggagtgtctggtggaaaggaggagagtaaaggttgttatttcataactaaaaagttaatacaaagggcctcagaaggaaaagtttaag

SEQ ID NO: 265296 - DNA, 260 bp, Homo sapiens
gcacgagggttaccaagaaatatttctatgatatagccaagtactcttcacttccagcctgttcctagacaatgtgtagattaatggctttcattattataaaacattgctaaaataaatgatagtagtaataaaatctaataactagcttaagttcaaagagatgcttgaaaagtcacatactaataacaccattccaggaccttacagaacatactcattcacaaacacctgcatcaaatcctatactgcttgaatga

SEQ ID NO: 265297 - DNA, 358 bp, Homo sapiens
tgtgaatatgctctataaattacaaagtgctgtgcaaatactgacagttattatactcataaaaagcttatgcactaatgagaaagttaaaagaaaaagacctagttattcttacagggatgtattttgcgtaagtacaaaatgtatttatgggtagaaaaaaatggaaaatataaatcaaaaaattatttttgtattcattagatgtttttctaactatgtaatgtttagtattgacaatgtagcaacattaaaaattcattgtcttcatgctaaaaaaaacacaatagcatcaaagtatgaaataattaggaataacagatcaaaagtgacatgaaatatacttaagctgaaaact

SEQ ID NO: 265298 - DNA, 920 bp, Homo sapiens
gattggcttccttcacttaataatatgcatttaggatttcacatgtctccttgcggcttgttagctcaatttttttagtgctgaataatagtccagttctggaggtgccacactttgtttatcctttcacctcaaaggacatacaggttccttccaagttttagcaattatgatgaaagctgctataaacacttttgtgtggacataagttttcaacgcatttgggtaaatgccaaggaacaggattatttaattatacggtaagagtatggttggtattataagaaacttccaagctatcttccaacgtggccataccactttgcattcctacaggcaatgaataagagttcctgttgcttcccatccttaccagcatttggtggtgttagaatatgtttctagttgttttagtaacaatgtttcttccttcagcaacagctactctcactgctgaagagaaattattttgaggccacaaacctctgaatggcttgataagaaaggaaagtcaaggagaaatgagagtgagacttcctaaaaaatacagtgagtccactttctgtgtcaactgtttatgtgaaaagatatgtgaatatactatcagccattccataagcaggctgtggcatctctgagcaaattagtcatgttagaatgatatctgaaatgctataagggaacattagtaagttgttcttttttcctacttaagtgacttataaattagttgcttacattcactgtaactagtaatttatctgtactaatctgcctaatttaccttattcttctgtataagatgaaaatcttttccaaaaagcatgagtgcatgttcaaagcttcggcattcttcttccgtccatgcagtcattccttctaagaaaaattttaaaataaaatttatgggcccccaaatt

SEQ ID NO: 265299 - DNA, 297 bp, Homo sapiens
gggccaccatgcctggctggaaaggagtcttaatggacaagccaaaagctgtttcaggtggtaataatctctccacttggaagatgtatatccaataaccagccttacagcttagctatgcttttgatcatcaatgtatcaatacaatgtcattgtaattctggacaggaaattggattcagccacttttcaaatgccagggtagggcacttcccaggttttaacttacagaaggaccctgggtgtcgagttgataccattcctttttttttttttttttttttttaagatgtagtc

SEQ ID NO: 265300 - DNA, 281 bp, Homo sapiens
ggggcagaaaaagatcaatgaccaagagaacgtaacacaggattaactgtagagttagagaggagtcagacgacacagtgcctttgaggccatgttaaagatttttgccttatcctaagagcaataaaaaggttgtgagcagggatgagaatgtatttgggcttgcaaaaagactggtgtgctatatgaattgaagggcaagagtagaagcacgaatactgcttaaaaagctcctgcaggagacctaagtgagggatggtggcaccgtggattggagttat

SEQ ID NO: 265301 - DNA, 276 bp, Homo sapiens
tctttttgatgtcatttgactgatgtcatttgatcgttttgacagaaggcaagggtagtgataaaaagagggcctatctgggcggcgagcgctctcctgaaacacaaatgttggaaacatccaaacctctctaatgtgctttgtcagagaaagagcagaaccgcattagtgcaaatcttaagaaagcagttgacctggctgggaaatgcactatgtgatactgttaatattagcgaatttttttaaaagaatatgcttaaagggttggaaaaaata

SEQ ID NO: 265302 - DNA, 195 bp, Homo sapiens
ttagatggctggatgtggtggctttatttggaaacattgcttcctgactttatcatgccctgggctttatcagctagttctttatgacctctcctatatcctgaatggtcatgaaaatcaaagatcaagttcacaaagtctataaagtctataaagactataaagaaaatgtggtacatatacaccatggaatac

SEQ ID NO: 265303 - DNA, 425 bp, Homo sapiens
cagtatctgctgaagttgaatagtctccataagaatcaaaagctggaaacaacccaaataatcattaagacgtaaatggataaatgaattgtgatatataaggtactacaaaacaagcaaaaaaaagaataaactgttgcaacatgcagcagcatggatgaatctcacacatgtaatattgagcagaagcagccagatgcacaggagtctaaactatgattccatttaaatgaagccaaaacagtggtgagattaatctattatgatgtcagaatagtggttatctttaggggaactgagggatcctttctgggattctgattcattctgtatcttgatttgggggaggcgactacatggtatattcactttgtgaaaattcttttagctgtacttatcatttgggtacttcatgtatattgagc

SEQ ID NO: 265304 - DNA, 515 bp, Homo sapiens
tggtatggtggtgcatgcctgtggtcccagctatttgggaggctgaggtgggagtattgcttgagccagagaggtcaaggctgcagtgagccaagatcatgccactgcactccagcctgggcagtagagtgagaccctgtctcaaaaaggaaacaacaacaaaagcaaatttttaaaaaattaccctgtttcacaataagtggttttttgaagagtttttatcttggtgtatttgttctcagagaaccaagtacttataatcataagtgttaaagttatttaatgtgtttattgaaatggcctataattatggttttgcacccactaaactaaatggaattattcatattctgctgcacatttaaaatttttctgtttaagaccgggcttggtggtcatagttccagcactttgggagacctgtagttccagcactttgggagactgaggtggacagatcacttaagcccaggaatttgagaccagcctgggcaacatggtgaaaacccatctct

SEQ ID NO: 265305 - DNA, 159 bp, Homo sapiens
agaagaatcagtgaaaatctcatcactggggttatttgcagccagactggtccagatagttgagattttactgtagggagtgattgtttctggaccccttaaggcctgggagaaggaggagtgatgatgatctcattgtctattcccttttgtgatggg

SEQ ID NO: 265306 - DNA, 308 bp, Homo sapiens
atatgttggaaccatatccccctgtacctcagaatatgactgtctttggagatagggcagttgagggcttcaaggggtggttaaattaaaatgaggctgtcagggtgggcctattccaatgtgactagtgtcctttaggaagagcagattaagacatacagagggacacgagggacatgcacacgcagagaaaaggccgcttgaggacacagcgagaagatggctgtcacactgtggagtgtatatttggtttttgtcctcgtttcctggcatataatttctaaaatcctctggatcttcacaattac

SEQ ID NO: 265307 - DNA, 247 bp, Homo sapiens
cctctacggcagccactgagagaggctgctctaaaactcccttcctactctcactaaccaggcaagaagtgtgaattttcccccagattattcagggagaaggcaggagaagcaactgaaggcaaggaagccgttgttctatggcttttaggtgtgctcaagatatactgaaacagtattatgtagctttcactacagctagcatacttaaatgccatcaaatttacacagaaaagatgacgacaaa

SEQ ID NO: 265308 - DNA, 350 bp, Homo sapiens
agcataaacctggcttcatgggcttctgagcagggtggacaaaaggaaatggggagatggagggatctttaagtgggaatttttacggcagtgaaactattctgtatgatactgtcatggtaggtccgtgtcattatccatttggcgaaacccacagaatggatggacaacaccaagagtgaaccttaatgtcaaccatgaactttaggtaataataacgcatcaatactgtgtgtgtatatgtgttatggggtgatatgaaggggcctccttggtactttctgcctgatttttctggaaacctaaaacttctctaaaaaaataaaagtctattcattgaaaaaaaggaa

SEQ ID NO: 265309 - DNA, 470 bp, Homo sapiens
atacctggaattcacaccataattggggtgtctttaggctgaaatggagacaacagaaggtgaggtggcttggactcaggtggcattggtaaaggaaatgaaacgcatgcaaatttcacagacaaaagagtagctttgccacctctcattttggctgggctgctctgaggtgctgcatcttttatagtgtctaggctctcatccttaatgacattttcatattctccatcccccatcccccaccgcctctccagtaaggactttttgacaagctgcacttccctgctttagtaattggtgataagatttgtcctgtagaacatatacatagaggattgttcactctcctccttttatgaaataatttttagaaattgagctgttaaaggttgtgtttgcacatgttttttggaacaagaactttaattaaaggatcaaaaagcccaagctcttgcttttgaataactgaa

SEQ ID NO: 265310 - DNA, 541 bp, Homo sapiens
atccacgagcggtttaccgggggggaaaggtcgcttgctgatagtctataaggccaagctgaagcagaacacttcagagcagttgagacagtggcagtcaagatctttccctatgaggagtatgcctcttggaagacagagaaggacatcttctcagacatcaatctgaagcatgagaacatactccagttcctgacggctgaggagcggaagacggtgttggggatgtgatgttatcgcccatcaccatttattgtatattgatacacattgatcttttatcatatgtattattattaaatatttttgagacctgttcctagattttctaactgggtttatttattgaggtctgattttcgatatgtgtttgtattatgccattttaaccatctggtgtgtagtaatgcatacttcttactttcagtgtattactggatagtttgatccatattttacatatctttgaacttcatagtcatgttcaatacgcctttctccctctaaatggatatatagtgggagtgtcagcctttgggat

SEQ ID NO: 265311 - DNA, 245 bp, Homo sapiens
aaatcgtgttaagtgctcacttcactgcgggtcagaaccccggagtgtttcacccatggaaatagtcagcagtcgccacatgcagggtcctcactcactgctggtacctttgtgtagtagttactttgtattttacaatgtaaattaaaaaaaaaagttgggagaggaagtgaaatctgatttggctaaattttgtaaacaaagatgttaccaataaaaccttttgtcccagtgtataaataata

SEQ ID NO: 265312 - DNA, 441 bp, Homo sapiens
tcagcaggcgtgtccccacgtgggaggatggagattctccttccctaagacagaaattcacgagaggctgaaggggattcaaccccgcatccttcagcagacgtgtccccacgtgggaggatggagactctccttccctttctcttcctaacacagtatccacattcctaggaatcaacgttcccagcttttctctgattaatatctaggttcagtactttccccaaagcatatctgtgtcttctcttcttttctgagttctgtaaatctcctttgcttatttttatctgtaagacttttaatactcaacaagttgcaacttttagtaaaaaattccttaagcctttgaccaatgctgggaatatttttgagaatgtagttaattcaggaaagtcattcaatagtgaaagacttttaaaataaaagttagaatgctacgaa

SEQ ID NO: 265313 - DNA, 324 bp, Homo sapiens
ggagtctatgattcccaaaaggctaagaaatactgcttaggacctttgaatggtagatttgaaagtgacttgggggctcctctgtcccgtggtctgctttcccagagaaaactagtgatctggcccagctcatacagctggtaaatggggaagctcatttggagacaggtcagtctgacacctgcctgatttcattttatgatgaatgggtattaaacttttgtgcagtcttacacgcatttcctttttagtcctttttaattttgaaatgaaaaattttatcctttcataaacggttaaataaatcttaagcacatcctagca

SEQ ID NO: 265314 - DNA, 364 bp, Homo sapiens
agcaccctttatgagtaattggtttcaatgttcgtattcttgatctaaacaataaaaaatcaaaactgcattttctcaatgaatatgtttttctctgttttaagtctcaagaagttatggtagaaatgctttacagaaaatatttttcaagcccggcatggtggctcatgcctgtaatcccagcactttgggagactgaggcaggcagatcacttgaggtcaggagttcaagaccagcctttccaacatggtgagaacttgtctctactaaaaataaaaaaaaaaattagcctggcatggtgatgcacacctgtaatcccagctacttgggaggccgaggcacgagaatcacttgaacccagga

SEQ ID NO: 265315 - DNA, 300 bp, Homo sapiens
ccacaacaacaaacacaacacccagattcaggcatttactctctgtatgcccacctacttgggttttccttcatccttaagaaactcagatgaaaacagagctttgttttaaaaaatacttttatttgtttatttcagattgcttctgaggaggaaaatccttctcccaacggaggccgaggccccttctaggaaggcggtttatttgctattacttgaccattacccgggcttagggcttctttattgcatttggcacttggagcacagtcttcttgcagtattttgatgtgttttgca

SEQ ID NO: 265316 - DNA, 440 bp, Homo sapiens
aaacataaatgacatttacaattgtaacagttagagtttgagaattaccaaagaaaacactctgaaatgccaatttgtcacccgccaaattggcaaaagcccaaacatttcataatactgttgtcgtgtcggtggataaaatcaactgttgtctttgggattgtaactttatagaatctccacgtacataatattgacagtgattatttaaactatgaacccacatattctttgatttacagctcacatttttgaaatgctagatatattgcatactagcatactatgtatggaagaggtaattcatcacaacattgttggtaaaaagcaaagactacaggcatcttaaagttcattgatagggttccaattaaatgcagagcagtatgctattattattcttaaaaagaagaagataccttcatgtgcattaatattga

SEQ ID NO: 265317 - DNA, 402 bp, Homo sapiens
gataaagaacaggatagtcttgtgaaggaagactcagtgctaggaagtgttggaggaaaggagctgaggtctcagtgaccagagaccagggtgctgctctctgagagaagctaaagtgagaggagacctcggcacagggcctcaccaacgaatgtgtttctgttgttgctgtggtggttagggggaactcaagaggacaggccgatttctggggggattgagggaaaaacacatttgatcctttgccttttccagtctctttatatttactggttaaatgtaataagtttattgggaactacttgtatgttcaaagattgtgccttccactttctgggagctcacaggattttttgttcgctgaaacttttgtaaattacttagtcttcttgattctgctta

SEQ ID NO: 265318 - DNA, 1892 bp, Homo sapiens
gcgggcggttctacctccgagggttcgcccgcccttggttttccttacaccttagcctttggctcctttgaccactcgaagccccacagcgtgttccagcggacttcaccagcagacccagaagtggtgggtgaaacactgcctctgttcctccttgagcctgtcgggagctgctgcctgccaccaccatgtctgctgcaaatcctgagactccaaactcaaccatctccagagaggccagcacccagtcttcatcagctgcagctagccaaggctgggtgttaccagaaggcaaaatcgtgccaaacactgtttttgttggtggaattgatgctaggatggatgaaactgagattggaagctgctttggtagatacggttcagtgaaagaagtgaagataatcacgaatcgaactggtgtgtccaaaggctatggatttgtttcgtttgttaatgacgtggatgtccagaagatagtaggatcacagatacatttccatggtaaaaagctgaagctgggccctgcaatcaggaaacaaaagttatgtgctcgtcatgtgcagccacgtcctttggtagttaatcctcctcctccaccacagtttcagaacgtctggcggaatccaaacactgaaacctacctgcagccccaaatcacgccgaatcctgtaactcagcacgttcaggcttactctgcttatccacattcaccaggtcaggtcatcactggatgtcagttgcttgtatataattatcaggaatatcctacttatcccgattcagcatttcaggtcaccactggatatcagttgcctgtatataattatcagccatttcctgcttatccaagatcaccatttcaggtcactgctggatatcagttgcctgtatataattatcaggcatttcctgcttatccaaattcaccatttcaagtcgccactggatatcagttccctgtatacaattatcagccatttcctgcttatccaagttcaccatttcaggtcactgctggatatcagttgcctgtatataattatcaggcatttcctgcttatccaaattcaccatttcaagtcgccactggatatcagttccctgtatacaattatcaggcatttcctgcttatccaaattcaccagttcaggtcaccactggatatcagttgcctgtatacaattatcaggcatttcctgcttatccaaattcaccatttcaagtcgccactggatatcagttccctgtatacaattatcaggcatttcctgcttatccaaattcaccagttcaggtcaccactggatatcagttgcctgtatacaattatcaggcatttcctgcttatccaaattcaccatttcaagtcgccactggatatcagttccctgtatacaattatcaggcatttcctgcttatccaaattcaccagttcaggtcaccactggatatcagttgcctgtatacaattatcaggcatttcctgcttatccaaattcagcagttcaggtcaccactggatatcagttccatgtatacaattaccagatgccaccgcagtgccctgttggggagcaaaggagaaatctgtggaccgaagcatacaaatggtggtatcttgtctgtttaatccagagaagagactgataaattccgttgttactcaagatgactgcttcaagggtaaaagagtgcatcgctttagaagaagtttggcagtatttaaatctgttggatcctctcagctatctagtttcatgggaagttgctggttttgaatattaagctaaaagttttccactattacagaaattctgaattttggtaaatcacactgaaactttctgtataacttgtattattagactctctagttttatcttaacactg

SEQ ID NO: 265319 - DNA, 990 bp, Homo sapiens
atggtgacgaaggcctttgtcttgttggccatctttgcagaagcctctgcaaaatcgtgtgctccaaataaagcagatgtcattcttgtgttttgctatcccaaaaccatcatcaccaaaatccccgagtgtccctatggatgggaagttcatcagctggccctcggagggctgtgttacaatggggtccacgaaggaggttactaccaatttgtgatcccagatttatcacctaaaaacaagtcctattgtggaacccagtctgagtacaagccacctatctatcacttctacagtcacatcgtttccaatgacaccacagtgattgtaaaaaaccagcctgtcaactactccttctcctgcacctaccactccacctacttggtgaaccaggctgcctttgaccagagagtggccactgttcacgtgaagaacgggagcatgggcacatttgagagccaactgtctctcaacttctacactaatgccaagttctccatcaagaaagaagctccctttgtcctggaggcatccgaaatcggttcagatctgtttgcaggagtggaagccaaagggttaagcattaggtttaaagtggtcttgaacagctgttgggccaccccctcggctgacttcatgtatcccttgcagtggcagctgatcaacaagggctgccccacggatgaaaccgtcctcgtgcatgagaatgggagagatcacagggcaaccttccaattcaatgctttccggttccagaacatccccaaactctccaaggtgtggttacactgtgagacgttcatctgcgacagtgagaaactctcctgcccagtgacctgcgataaacggaagcgcctcctgcgagaccagaccgggggagtcctggtcgtggagctctccctgcggagcaggggattttccagtctctatagcttctcagatgttctccaccacctcatcatgatgttggggatttgtgccgtgttatag

SEQ ID NO: 265320 - DNA, 415 bp, Homo sapiens
cagctcacagtggagaagctggagatggccctgagagaagctcactctgaggtctggggatcaaatcaaacctgaggctgggtgtgggtgggtctgagcagggtctggacccctcttcttgtgactgatctcctcccgggagtagggttgatacccggtgattgggccagacaggtagggtggtagcacagaattattctgggagtcaggcagaaccctgcccagggagggtcttccctttcaaatacccccatccctgatccatctgattatgattcagtgggtcaagtatggagtacaggagtctgtggttttacaagtctccctggtagtttgagggggcaaccttgctcactgtggggggagctgaggactcccaaagaagagcagagaccagtattccagtggttccttt

SEQ ID NO: 265321 - DNA, 194 bp, Homo sapiens
aaagctaaatactgtgttagtccttttatgtggcatactggatcagaaaacagagcagcaatttcctgggacctgggagtcagagaagaggttggctacaaaggggcaatatgaagtaatttttgggtattggaagtctaagaatggaaaagagtaaatcttactcttcatcaatttaaaaaattgatttcaaa

SEQ ID NO: 265322 - DNA, 406 bp, Homo sapiens
gttttgacaaatgtataatgtcatgtatccacaattatagtatcatataaaatagtttcattgccctaaaagtcttctgtgcttcttctgttcattattctagctcaacccctgaacccctgcttaccactgatctttttgctgtctcaaaagttttgcttttcctagtgtcatatagttggaattatatagtatgcagcctttcaaattggcttcttttctttagaaacattgatttaagctttctccatatcttattatagcttgatagcttattgttttatctttatatagatagatattccttgaaagggccatatatgcaaaataacctccaaatacagaaggagccaagaaatcaaagaatgaggcaggcatatctagtttattggcagagggtgatttt

SEQ ID NO: 265323 - DNA, 672 bp, Homo sapiens
gcctttgaagtgattctgatatttgttgaaatttaagagccatttgttttacttatcatatactactagcattattatttttgagggtcctgaaataaacagagctacagtgttaggtaaacgtagataatattcaagctttatgccacacttttaggttaattttaaaataaatgtaaaggccttaaaatgacattccccaaatactcaatgttacttgtttccattgaacttcaattaattttcactgtgtaacctcagagcacgtttgaatgtgcgcagtactctctccaggaaaacatcagtgtctgttcataaaggtaatgatcaaatcaattaacaacacagaaatgggtacttttgaatttgtagggcggtagcaggtgtaccaataataacacatcagtattaacttagacacttattggttaatcaactgatagctgtgaaatttatagtgctgacctgattatactcaagtcaaaagaggaatgtgttacataaaggaaaatcaacccatccagctcattcaatgacagcatagtttcattctgtatgtgtgtaaaactcaataatattccattgttgagttccatcaacaaatactcattcaatttcaactttgttccaggcatgtaagtgccagaaatcatgcaggcaataaaacagaca

SEQ ID NO: 265324 - DNA, 501 bp, Homo sapiens
actctggaggctgaggcaagagaattgcttgatcctggggggcagaggttgcagtgagctgagataaaaaagagagagcaagccaccaaatgggagccacacacccttttataatctggtctctgaagtcatccattgtatcctattctgtagaagtaaatcactaagtccagtcccggaagggcaattagactctatctcttgaaggaagaagtatgaatttttgcatggacagtcatgcactgcctaatgacgttttgtcaatgatggaccacatatgtaacggtggtcccattagataataatggaactgaacagttcctgctgcctaatgacactgaggccaccataacatcatggtgcaagacattccttatgtgtttgtggtgatgccggtggaaacaaacctactgtgctgccagttgtacaaatgtctaggccatacaattatgtacagtgcgtaatacttgaacataataacaaatgactatgctactagtt

SEQ ID NO: 265325 - DNA, 1438 bp, Homo sapiens
atggtccgctgcctggggcctgcgctgctgctgctgctgttactggggtcggcgagctcggtcggagggaaccgatgtgtggacgcggccgaagcctgcacggcggacgcgcggtgccagcgtttgcgctccgagtatgtggcgcagtgcctgggccgggctgcgcaggggggctgtccccgcgcccgctgccgccgggccctgcgccgcttcttcgcccgcgggccgcccgcgctcacccacgcactgctcttctgcccgtgcgcgggccccgcgtgcgccgagcgtcggcgccagaccttcgtgccctcctgcgccttttcggggcccggccccgcgccgccctcctgccttgagcccttaaacttctgcgagcgcagccgggtctgcaggcctcgcctcctggcctttcaggtctcgtgcaccccagcgcccagcgcccccgacggctgcctgctggaccagggcgcccgctgcctgcgcgcctacgcgggcctcgtggggtccccgcaggcaccgccgtcacccctaactacgtggacaacgtgagcgcgcgcgtggcgccctggtgcgactgcggagccagcgggaaccggcgtgaggactgcgaagccttccgggggctctttaccaggaaccgctgcttggatggtgccattcaggcctttgccagcgggtggcccccagtcctgctggaccagctgaacccccagggagacccggagcacagcctcctgcaggtgtcctccacaggcagggccctggagagacgctccctgctctccatacttcctgtcctggctctcccggccctgctctgattaggacagcgacctcggatagcacagccagctactccaccctgcctgcgtgggccgcctctgtggcctactggccccttgagaagggactggcttaccccccaagccggccctggtgctttcactccgctgccctttgtaggtttggacaccctgtgtgccgtcccctggggcaagggatgtaggctggggcctgactgtaaagcccccgtctccctgtcaggaggcatcttggttgtaagtccctttattcacagaccttgagaccactggggtctcccacaaggtggggtcaggagagggtcacttttgtagctgagacctctctggagacccagatcccctagagcaggtcagagaccatccagaatcccagaattctaggaaattgtatcagcctcccaagcatataaccccctaaggaatccatcggacaagaccccgtctaacactgcatcctcccaactgggcattacccaccattgtagccacctgtgcaccatgaccatgctggcagagtctttcctgttccccatatgctgcttgaggggccccaccctgtgccctgcctggcattggccctgtggccatcttccccctggtttcctgcagctgta

SEQ ID NO: 265326 - DNA, 1517 bp, Homo sapiens
atggtccgctgcctggggcctgcgctgctgctgctgctgttactggggtcggcgagctcggtcggagggaaccgatgtgtggacgcggccgaagcctgcacggcggacgcgcggtgccagcgtttgcgctccgagtatgtggcgcagtgcctgggccgggctgcgcaggggggctgtccccgcgcccgctgccgccgggccctgcgccgcttcttcgcccgcgggccgcccgcgctcacccacgcactgctcttctgcccgtgcgcgggccccgcgtgcgccgagcgtcggcgccagaccttcgtgccctcctgcgccttttcggggcccggccccgcgccgccctcctgccttgagcccttaaacttctgcgagcgcagccgggtctgcaggtgcgcgcgggcggcggcggggccgtggcgagggtggggacggggcctctctccggctcaccgccctcccgccgcgcaggcctcgcctcctggcctttcaggtctcgtgcaccccagcgcccagcgcccccgacggctgcctgctggaccagggcgcccgctgcctgcgcgcctacgcgggcctcgtggggtccccgcaggcaccgccgtcacccctaactacgtggacaacgtgagcgcgcgcgtggcgccctggtgcgactgcggagccagcgggaaccggcgtgaggactgcgaagccttccgggggctctttaccaggaaccgctgcttggatggtgccattcaggcctttgccagcgggtggcccccagtcctgctggaccagctgaacccccagggagacccggagcacagcctcctgcaggtgtcctccacaggcagggccctggagagacgctccctgctctccatacttcctgtcctggctctcccggccctgctctgattaggacagcgacctcggatagcacagccagctactccaccctgcctgcgtgggccgcctctgtggcctactggccccttgagaagggactggcttaccccccaagccggccctggtgctttcactccgctgccctttgtaggtttggacaccctgtgtgccgtcccctggggcaagggatgtaggctggggcctgactgtaaagcccccgtctccctgtcaggaggcatcttggttgtaagtccctttattcacagaccttgagaccactggggtctcccacaaggtggggtcaggagagggtcacttttgtagctgagacctctctggagacccagatcccctagagcaggtcagagaccatccagaatcccagaattctaggaaattgtatcagcctcccaagcatataaccccctaaggaatccatcggacaagaccccgtctaacactgcatcctcccaactgggcattacccaccattgtagccacctgtgcaccatgaccatgctggcagagtctttcctgttccccatatgctgcttgaggggccccaccctgtgccctgcctggcattggccctgtggccatcttccccctggtttcctgcagctgta

SEQ ID NO: 265327 - DNA, 518 bp, Homo sapiens
ttttggtactgtaattaatatattaaaaaagaaacattctgatttttttctggtctggctttttttctgtataattaaatgtaaacctaacaaggtttaattaaatttagtttacagctgttgcggcaaaaatgcaaaaagcaaattagagggaagaaaatatggtgtatgctttgtagacagatgggactgaatctctgttatccaaaatgttcttttattattggtacattttatcagtaaatcaaggatagataccaaatattaatgtacacatgagccaattacttctaactagatttttctcttagtattttttatctgtttcattattagtttatcagctccaaattagcatatccaaatgagttacccagcaatagataaattgcttttgattttgtgtcataattaatatttttatctagtcatttatctatcattttagaaactagccaagtctatgtgagtcataaaagaaaaatgaaaattatttactattagttaaattacagtgg

SEQ ID NO: 265328 - DNA, 450 bp, Homo sapiens
tgtcttttcccacaggttagagactatccataggataaatttctagcaaattgctgagtccaggatatgcatgtttgcaattttggaagatcttaaaaacttgcctcctataggtgttgtaccagtatatacttctgccagtaatagatgggtgggctgctgatgcctcaaaatggccacagataattttaagcttgagcaaagaaccaggcctcccaacacaatggaaagaaaggaggcaccgtgtgaagggaagatggcatacgtggcacagacctccacctctgctcaccaccacagaaggccactcctgcatgggcaggtgacggcagcgtcaggaagggaaatcagatttacttaggttgttagtcattattaattgcaatagtcttgtgccttcatttaaaaaaagacgaccaaaaaataaaaacaaaaacatgaacactaaat

SEQ ID NO: 265329 - DNA, 537 bp, Homo sapiens
tgtcttttcccacaggttagagactatccataggataaatttctagcaaattgctgagtccaggatatgcatgtttgcaattttggaagatcttaaaaacttgcctcctataggtgttgtaccagtatatacttctgccagtaatagatgggtgggctgctgatgcctcaaaatttccacaggctatacaggaagcatggctgaggaggcctcaggaaacttaacaatcatggcagaaggtgaaggggaagcaggcacatctacacatggccagagcaggaggaagagagagaaggaagaggtgctacacccttttaagcaaccagatcttgtgagatctcactatcgtgagaatagcaaggaggaaatctgcccccatgattcagtcacctcctgccagacccctcctccaacattagggattacaattcgacacgagattgccggtgggacacaaatccaaaccatatcatattctttatacatttgggaaattaacttttttctgtaatatgatttacaaatatttttctcaga

SEQ ID NO: 265330 - DNA, 716 bp, Homo sapiens
cacgaggcttcaggacatgtttctttgatcacctcttttccagaccatcatcaaaagtttcattcaggtgcaaggtgcctgctgctgtgacaagctggaaaatccattgcatttccagggtcacctgtttgtcattagcttcatcaatgagacagccagcatcaaggtcaaggtcttcacatccaggcttctctcaagccccaccaatgagctaaggtattcaacttttccaagtcactcacaggtttgctcttgcactcaaagaaactctgagaatcccctactgcattttaacatttgtccagtattcctagtccttggcacatgctcctcctggaacccaacctgtaaggtaacccaacctgtaaagtggatgcgaaggtttaaagggtgtcccctggaattcatgtgttggaaatgtgagccccggtgacgttgctgggaggtggggcttttatgagctgatgaagtcattaagagggattcatgcctgtctcccaggcctgggttatatctcttgggagggagcgagttctcactctcactcacggcactggatgagttaccaagagtggctgttataaagccaggcgcccctcacgctgtgccccttctgcatgcctctgcttccctccccagaagctgtcaccatcctcttggacttcccggcctccaaaacctcaagctaaataaatatctttcctttctaaattacc

SEQ ID NO: 265331 - DNA, 398 bp, Homo sapiens
cactttttttttttttttttaaagaaggagtctcgctctgtcgcccaggctggagtgcagtggcgcaatctcggctcactgcaagctctgcctcctgggttcacgccattctcctgcctcacactcccgagtggctgggactacaggcgcccgccaccacgcccaactaattttttctatttttagtagagacggggtttcaccgtgatagccaggatggtctcgatgtcctgacctcgtgatccacccgcctcggcctcccaaagtgctaggattacaggcgtgagccaccgctcccagccccaagttacatttctaatggcattcatttacttaacacaaacacctgagtgcctaccaggagacagaaactactctaagcattgagggcatggtaa

SEQ ID NO: 265332 - DNA, 294 bp, Homo sapiens
attcaattctcataattctcctgacaacattctctccaagcctcagttctctccttcaaaatcattatgattattcccatttttcagataaggagcctgagtcccagagagcagaaatgacttcataacttcacatggccactaggaggcagagcccagacttgaacctaagctcagttccaagtgccacctaacacttgaactctgatcctggggaaccaagacacaatagggaggccataaaaactgtggaatgaatcagtgaacaaataaatcctatttctaaagagagag

SEQ ID NO: 265333 - DNA, 419 bp, Homo sapiens
agtctaatttaaccttaattacctgcataaaggccctatctccaaacatagccacattggaagttaggagttcaacacatgaatttgtgggggacacaaacattgaatccatagctgtagttatcctcaaatgtttcttagtccattacttgtataacaggatgttcaagtgggacttctctttattgtctcactgtctgctaaagccctaacactaaccacaataggtgccaactaccttcaaatttagagaaaggggcaagaccaataatttgttctgcttgcgttggtctatcactcatctccagatgatataagaaaagactaagtatccgttaaggaggagcaacaaatggtaagctttcttcaggaagaaagttgtagcctgggcaacaaagcgagaccccatctctccaaaa

SEQ ID NO: 265334 - DNA, 177 bp, Homo sapiens
ctggtatcacaccactgcaccccagactgggcgacagagtgagactgtctcaaaaaaaaagaagtgaccaattgcccaaaagtagaaacactgcatgctacttctcaaggtgtcaataaaggcgccacagaaatcttagaaagctccaaggtatccaactccctcattgttcaaaca

SEQ ID NO: 265335 - DNA, 502 bp, Homo sapiens
gttccggtgactgcaggggttttcccggtgctcggtgtttcctccccgtcggcctttaaacgcgaatgtgaccctaccaccaaagtggagtgcagtccagaatcaccaaacctgggcttccaggtgtctggaaacacaatgttaacatttgttttgctccaaaacaaagtatgaccgtgtcggacgttttagtccagccccaaattttgcctctgagcaagattcccaggacctcattggagcagtttacagccagtcttatctcactattaacttccattttctgctgtagtacttaaagtgacagaagttactcttcctagaagtaacttttccagacgattcaaactgctgttatacagagatttaagtatttgtgtgcatgtgtgaaaacagagatatgtaatgtatatatttcattttatttccactgttctgcttctctttttaaaaataaagcggtctcctccactttgggtaaatctttcagcacatttgatca

SEQ ID NO: 265336 - DNA, 144 bp, Homo sapiens
gagaatggagtcagccccctcacatttatatgtagttcggttgtctttaaaagcaagcaaccatttgtttttctcattagccgtcttcatgatccatatgtagtttgctttgcatcttgacctaaaaaagtatcaaaattctta

SEQ ID NO: 265337 - DNA, 481 bp, Homo sapiens
tgtgtgagcacgtgcatgctgctgtttgaacccaggcatgaaatacttgaaggtgattgcgatgccctgaccaggctcttctcttccaatactctgccatgttccctgtttgttttaacctgtaggaagaaggaggagttgcggatgatagtgccatttctaatctgctttgggtaagcctgactctaacacaggtgtcctctcgatggtggccagaattacacttcgcgtgggtaatcctgatcctgggtggttccttcgtgcaccctccctggtgcttttcttatctccagaccagacacagcctttgtccggagtggagagctgagcccgtgcccttaaactattttttaatcatgtaatgaagatactttaaagaagatgatattttctgttaaatgttaaaactgtcaatgaaagtcatggttcctctctctgtaactgacaatcttctataaattaactcatttaattactgcac

SEQ ID NO: 265338 - DNA, 435 bp, Homo sapiens
tccactcctcctgcccttggacaccagactccaggttcttctgcctttcgactctgggacttgtaccagtggtttccagggggttctggggccttcagccacagactgaaggctgcactcttggcttccctacttttgaggctgttggacttggactgagacactgttggcttctttcttccccatcttgcagatggcctatcgtgggactttgccttgtgatcatgggagccaactatccctaatgaactcccttttatatatacagagatactattggtcctgtccctctggagaaccctagtatactgtgcacactttataacttctctctagagtagtcacgtcagttttctggctgttgtctccactgcagtctttccccactctaatccaccttgaatagaacccaaagagtgaccttcagagagctca

SEQ ID NO: 265339 - DNA, 823 bp, Homo sapiens
tagtctatttattgtttatctcctttttataaaataaattacttttaaacacccctgctaatatttcaggatattattcacttacgtagaggtagttgtgttcccattttgcttctgttccatttcctggtgttattcatgtgtgaagagaatctttttggctgggttggcctgcctcaaagctgctccaaacttataattcaccaaaagtgacatcatcccagccaccaccaaagaattatgattggagtcgaggcattgcccatggaacacataactctgcagtggtttcccctacaaaatgtcagccactcttacgatggaatgtgcccttgcctgctgtgggcaccgctcaaatctaacccatcatttttcttttcattttgattcacttttcctttcagagattcaaacaaaaagaaaaatgggaactgaaaaaatttggggtttttgaggggtgagggagagaccttatggtagaaaataaagtgttttttttgatatctgaaattttatatgctcaatttaaatgttttattgcgtttgttttttccaacctgtggaaaccccttaaattcttactgaatgcatagatcttttatttgcatgaatgtcctgtatgccggaagactaagtgggagcactgaatgctttgaagttctgtgcctgtgagacttgggtattttaatacattgttaccctattgcatcaaatcacgcctagggatgcattcaataaagactgccccctccccgcttagctgcgctgggactcccttctggagggccagagtttctactttgtttctactttgactcctaaa

SEQ ID NO: 265340 - DNA, 744 bp, Homo sapiens
cataattgattttttaaagtaaatggaaaacactgggctagaaatcccctaagtcagctgaaattagcaggagtgcctgacattaagttcctgagacttttttatttattaaaaaaaatgctctctgttaatacatattttacttttgcataattttaatacgtaaaactgtgaacatgaatataaacaaattatgtaacacagggtttcctacaactctattgttggactataaaggacaagaaaataacaatttttatccctctaaaatcagctcttgtatcagggtcctcataggaacctcacatggtttaagaatttgatagactgctttcaaaggggtgagagaatttagaggagccagtaaaggatgttgaggcactgaagagcctagaaaccacaggaagcccttgccactcctaagcctaaagggcaagaggagaaaatttctctaccagagcccagtgagacatggaacaacctaaaaagtgctataatcctgggggaatgcagcatgttccagaaaatatgacccagagcagaaaaggaggggagaagaaaaacctaagtctctttctttcagtcctctgatcactcttgatcttcactggctgaatttaaccagaagctagtaggaggatgctcaggtgtgtaatccacagggatcagcttcctggggcaaagaacagaacagaacaaaggatctttcttgtaacagtggtggtggtgggagtagaggctgga

SEQ ID NO: 265341 - DNA, 1234 bp, Homo sapiens
ttatacaattttatttatgccacaccagcatttttatatttgttcatctaatatctctgcttatttttttcatattgagaaagaacacaaacttgatgcttcttttatattaaaagaccacaaataagtttatagagaacagtaacaccagctctcagcatttccttttcaagagtcataatttcatcaaaatcatttcttattctttgagtcctagagttcttattcatcaagttttaattgacagtgtttattttcccacatgttgtctttggaataaggccattcatgaaagcagtttaattagtgagtctgccactctattcaaaccctgaatcaaggctctatctgattttaatttatgtaaaaaaaaataaaaatgtatagtcatttgcaagtataatgtgataactgctgtgtttatttcctttgtctggcataaaaggtgagaaaaaggtcatacatgttgttaagggtagcagtttaggaagtgttttctaataatttgttttgttatattgcaaataattgatatgccacttatttctgcaagaaaaataggcttgaagtggttgggatattaatcattttgatagtatctacttaaagcattgatctgttttgacttgtggctctgaaccctgggctaggctgagggataatagtagtggagtagggcaaagatataatatcctatccagtgttttgtgaccacttatttgaagattagtgtgggacatgaggaccttgctacttttttgccaagatgctgcaagtctcccaaatcacttcaactgtgtttttaaaacatgtttaagcaacagaattatttttttgaaattagtctatacgttagacagtctatacatgacaaacatgaagatctaatatcaagatttgggagacgggatcttggaactccacctgtttgaccactaggaccactgaggcacctccaataagctctgtagagtgcctccagcataattcaaaatccactgacctaatccattatggctttacttaacattggagtgatccgtaaagaatatagtattggagtctgaactggaacggtaactcgtaagactcaagaaagaccgtttaaggaaaattggcataatacaaactgttcctgttgacttaagaataacagtaggttcacctatctgaggaaattaagtagttgatagtttaatgctaggcatcttttatgataataaagtaagatgtc

SEQ ID NO: 265342 - DNA, 396 bp, Homo sapiens
gcttatcccctactccactcaaataggcctgttccacattgtgaacacctgttactatttgattgcctctgcacctttgtgctatctatctaatcaccttctttctcttacttatctggataagatgaatttaatctgcaagtacagctgaaaaaatttttgtgacatgaccttgactcaaggagaaagcagtctttccttttttgttaatgattcatttcattaacaccattaatgttgtttttgtaaaggatttttattatttctgacatgtctgtgaaccctacaagactgtgatcatctctgtgaagggattcctgtcttttctttgtacctgtattaattttccatgtcttctttaacaaattatcacacacttggtggcttaaaaaaaaa

SEQ ID NO: 265343 - DNA, 460 bp, Homo sapiens
agctcactgcaacctccgcctcccgggtttaagcgattctcctgcctcatccaatgctgggattacaggcctgagccaccgcacccggctagcctgtgtctgttctttaaaattgttttgttttccttactctcagattcttcttgctgcttattgtgccttgttgctgcctgttgtgcaatttcttccctcttgtattttactgaacttcatctgaagaagccttagtagccagataaacaagcttgtttgggctaaaaaatcaattgctgtgtgagagtttgttggattctcttctgagtaaagggtatgtgttttattgtacggactttgtatcacctattttggcttttcatccaggccttttttttttttctttctttttagcttcctggttctagatacaactgatactctgatacaacctgggtaaatgtggtcttgagtagtaaattatctg

SEQ ID NO: 265344 - DNA, 433 bp, Homo sapiens
acgttgtcaggctcctgtatgaatcctccagagtgttgttcccaccaaggcactgctttagggctacaaagtggacttattccagatagttgtaatttaacttttctatgtgaaaaaagaaatggattcacattaccgtgaggtagcaatgaatacctctaagaggtcagcgatcgtggcctacggtggggatcaggcattactgctgttatcattattgttaccaattcaaagtatgtagtaaaaaaataaaacagacctcaacagtgtcattggatcaggatcagaaaagccaaccatttttgtcagtgccaggaacatttaagaaataagtatttctactctatgccttccattttccagtcatcttactttataaatgagcgttcatttattgcagttgctaggggagtaaagcattcacccacaaatt

SEQ ID NO: 265345 - DNA, 351 bp, Homo sapiens
atatatagggttattttcttcagatagattcccagaaattgaattactgggttaaaggttagagcatttttaaggcttttgctaaatgttgccagattgttttccaaaaagactataccggttcaccctcatcagcaatggtgaaaggctgaaatggtgactgtccccttttccaaactgcgtattattttattaagtactgtactaatttagataagctgattattgttatagcattaataactcttaatggcattagtaaagaatttttgaaaatccatatgagatcatatttttgcattgtttaggtgatatatagtatattaaataaaagtataccaaaaatatcaa

SEQ ID NO: 265346 - DNA, 172 bp, Homo sapiens
aaagagaaagctccatgccagcagtgtcagtcagctccaggggacgtagctcagagtaaaggaggaaatgtggttttcactgacacccatgttcaagtgttggttaatgacagcaaaacagccacacagtttacattccttttacaaagggtttcacacatgagaccctggc

SEQ ID NO: 265347 - DNA, 453 bp, Homo sapiens
agcactttgggaggccgaggcgggtggatcatgagttcaggagttcaagaccagcccagccaacgtggtgaaaccccgtgtctaataaaaataaaaattagccgggtgtggtggtgggcacctggaatcccagctacttgagaggttgaggcagtagagttgcttgaacccgggaggcggaggttgcagtgagctgagatcggaccactgcactccaggctgggcaacaaaaatgtgaaaattcatctcaaaaaaaagaatgcaattgagatattcttgttaacttgggcaaaggttttatatccctttaaaaactaaaataaaaaggttttagctagtttttctgctagctaaagactagaataaccctgtagaaaattatataccatattaaaatgatgtatcttgtgttctgcagaaatcttactaagctataaacatttgacaacagag

SEQ ID NO: 265348 - DNA, 544 bp, Homo sapiens
tgtaaaaccactagttgagctagagtaagcaaatgatctttgtggattctaggaattaattgactaaatatcccatgtcctcctgcttacactcctaccaacatagtattggaggttgtctgatgctcaccccactatttttatggatttttatcttgaggcacaatgggttggggttagttctcctagactcttgttgttctgatttcctatttcttctgaattatttttttaaaattcttttttaatttttgtgggtacatagtaggtggcatgtaatgtataaataattacatcagagtaaattgggcatccatcacctccccagtatttttcttttgtgttacaaacaacccaattatagatttagttatttttaaatgtacaattaaattatttttgactgtggtcaccctgttgtcctagcaaatactaggtcttattcattctttctattttttggtatccattaatcatccctactcctctgcctccctgctacctttcccagcctctgataaccacccttctaccctctatcttc

SEQ ID NO: 265349 - DNA, 422 bp, Homo sapiens
ctctggtccctagcatggcacccagagcctcccctcttcttgtccttcagccaaagagaaactttctctgactttgaactgaatttaggtctctggccaatgatgggcctgaaaattccataatggccagagaggagagttcgagcccggctaagatcccctgagtcattctgtgagggaccaagacccacagtccaccagccccagggccctacctcctggaatgctttcctggatccagcttcccgaagatccgaccagacccagggaggacggcaccgctccgcgggagggaaagccaaagcatggtgcttcaccagctggactcaggggcgaggggacatgggcgcttgtcaacgtgatgtcattcttttcccaccgtttcttcctgttgatattcaatgaatccgtcaatctctctg

SEQ ID NO: 265350 - DNA, 385 bp, Homo sapiens
gaccgtcacctgatggtcatccaactctcctgggtgtgtgtgtgtgtgtgtgtgtgtgtgtgtaagtcctcttctgtgtgtgtgtgtgtaagtcctcttctgtgtgtgtgtatgtgtgtgtaagccctcttctgtgtgtatgtgtgtgtaagccctcttctgtgtgtttaagctctcttctgtgtgtgtgtatgtgtgtaagccctcttctgtgtatgtgtgtgtaagccctcgtgtttgtgtgtgtgtgtgtaagccctcttctgtcctgctcatacctgactagctacctactgtaacactaggactgcaaccattttgttctgcggtgaagtttccagaattaagccagggatgtaaaaaacaatgttagttaagaaaaaga

SEQ ID NO: 265351 - DNA, 214 bp, Homo sapiens
ctgggcgacagagtgagactctgtctaaaaaaaaaaaaaaaaaattgtggcacggtaacttgttagcttgcaagtagcagaaaatctcagacttttcagtttctgacttcacaagaaggaattaagaaaagtcaggaaaaatgtgaataaactgaggtatctgtcccatccgaaagtgaccgggtgactctcttagtttaagaggatttatgga

SEQ ID NO: 265352 - DNA, 377 bp, Homo sapiens
atatagtgattgtatgtgtatgtgtttcaaacaacagacctgcgaaatatgtgacacaaaaagtgttagaactgaaatgagaaatagactctacaattatagctggacactttaacacccttctatcaatacctgctagaacaagtagacaaaaaaatctgcagcaggagcctgggtaacatagcaagaccccatctctacaacaacaacaaaattagctggggaagatggtgtgcacctgcagtcctggctacttggaaggctgaagcaggaggatcacttgagcccaagaggatgaggttgcagtgagctatgattatgccactgctctccagcctgtgtgacagagtgagaacctgtctctacaaaaaaaaaaa

SEQ ID NO: 265353 - DNA, 481 bp, Homo sapiens
aaatgtgataccctaccttgttttaacctgattgactctcacttagctgagagagccagactccattttggtttcttcatttgcagccccttatccccttcccttaaggacataactggtgcaagctgactccaagcacattcaggaacgcacttactgttaagatactggggcaagctgtaccagcagcccctgggaacgcactcggttgatggtacccaaagcccctgcatttatctctttgtgatactttaagcccttgcacctggaactgtttatttttctgtaactgtttctgtaaccatttatcttttaactttttgcttgttctgcttctgtaaaattgcttcagctaggctccgcctccactttttagaccaaggtataaaaaaaaacatctagccccttcttcggggctgagagaattttttagttctagctgtctctcggtcgccggcaataaaggactcctgaattagtc

SEQ ID NO: 265354 - DNA, 622 bp, Homo sapiens
agtaattggagaaccttgaaccccagctaatttgacattttcaccttttctaactttttttcagagtgtgttgacattcaggtcaattttgagctgcttttaagagtacccagtgcctagtatagtataggcatttaatgcctttcaaataaatgactgaattgttcactatatgggcaaatgacaatttgtaaataatatccctaaatgcagagtacctaaatgcaatacaaatagtagtcacattatgtttattgttttaaactagaaggttttggcgtagtctgaaatgatattatagaaggagcaagaactttggaatctgaaaagatctagaattgaatctttaccttaacatttactgctggttactacaccttccttaggcattccacacaacttctctgatcttcagtgtcttcacctgtaaatttgggattatattatctaccttacaacatctctgggaggaccatctaaattaatatatgcaaggtaccctgcacaatgcttaattcataaaatgtgctcaaagttcatgcatttttagaatttgtgtatacaactttgtagccaattaacagagcccccaagtaacagattgtgtgttttctgattaacc

SEQ ID NO: 265355 - DNA, 529 bp, Homo sapiens
  misc_feature (320)..(320): n is a, c, g, or t
  misc_feature (485)..(485): n is a, c, g, or t
cttctgtaccactttggtcctgcgatgtcagtgacacaaagtccatcccttgctttatgactaatctcacaatcacatcaactagatgagtaacattttttggtggattctgaaactccctaggcttcaatttccctgtctataaaattagtaggttgactagatggattctgagctcagaatagccctgtgaatgagctttgtttttctcccagcccacataatgttgtcaaagaagtgataaatgagagatacctctgagcctggaggatgcgagtaggagaacaaaggggatactttagatgtgaacttggcatggngccgcataatgggaaatctgttttcatttctttcatttcagatgccaaggggaaagtgactttacccacgagagagatttttaaatattcccccaactgctccggtaagtactgcgtttattgtaggagaaagtgcagcctcaaaaggaaaaagaagtcctgggngcttaggttgtagagacatttcccaaatattcaaggtgttctgt

SEQ ID NO: 265356 - DNA, 746 bp, Homo sapiens
gttgaactcttctcatgttcctccagcagccacaactaaagtactgtatcaggactgccttggaacatgaaaccaacttaccgctgtactttccatcttggatgctgaagttctagggtagggttgtcagtaaaatgcaggacacccagttaaatttaaatttcaaataaataagaaataatttttagccattattatggagttgtagacctggtgtggggagtatggggatcaacctcagaagcctccagagagagattggtggactctaggagtgtcgatctcagactgaccatcgctggggccacatccaagcagcagccctttgtccagagccatttcctccactggcctcagtttctgtagggcccagatggtgctgaagtcagatgccaaggggaaagtgactttacccacgagagagatttttaaatattcccccaactgctccgatgggaccgtctagttacaggaaaacaagctcaaggctcccactgattctacattacggtgagttgtataatcatttcattatatcttacaatgtaataataatagaaataaggtgcacaataaatgtaatgcacttgaatcatcccgaaactatccctccccagtccatggaaaaactgtcttccctggtgccaaaaaggttgacggctgttctgcagcaaggtctttaaacaatgctgggatttaacatcctcggatgtattaacgtccagggctgacttggcaggtggttg

SEQ ID NO: 265357 - DNA, 815 bp, Homo sapiens
gttgaactcttctcatgttcctccagcagccacaactaaagtactgtatcaggactgccttggaacatgaaaccaacttaccgctgtactttccatcttggatgctgaagttctagggtagggttgtcagtaaaatgcaggacacccagttaaatttaaatttcaaataaataagaaataatttttagccattattatggagttgtagacctggtgtggggagtatggggatcaacctcagaagcctccagagagagattggtggactctaggagtgtcgatctcagactgaccatcgctggggccacatccaagcagcagccctttgtccagagccatttcctccactggcctcagtttctgtagggcccagatggtgctgaagtcagatgccaaggggaaagtgactttacccacgagagagatttttaaatattcccccaactgctccgatgggaccgtctagttacaggaaaacaagctcaaggctcccactgattctacattacgtccatggaaaaactgtcttccctggtgccaaaaaggttgacggctgttctgcagcaaggtctttaaacaatgcctgtgacatagacaatccctcagaaagatgcttatctaacgttcccagtggtcatgacttttggcaagaaagttggagatgtgaccagctgcacatgactttacctaaaagcttgctatgtaaaggacactttctggagagtgggtgtaggaattcactgtctcactgctgcccaagacagcactactgtttgtaagcccctattaaatatttctttctgagaaagtggatt

SEQ ID NO: 265358 - DNA, 922 bp, Homo sapiens
gttgaactcttctcatgttcctccagcagccacaactaaagtactgtatcaggactgccttggaacatgaaaccaacttaccgctgtactttccatcttggatgctgaagttctagggtagggttgtcagtaaaatgcaggacacccagttaaatttaaatttcaaataaataagaaataatttttagccattattatggagttgtagacctggtgtggggagtatggggatcaacctcagaagcctccagagagagattggtggactctaggagtgtcgatctcagactgaccatcgctggggccacatccaagcagcagccctttgtccagagccatttcctccactggcctcagtttctgtagggcccagatggtgctgaagtcagatgccaaggggaaagtgactttacccacgagagagatttttaaatattcccccaactgctccgatgggaccgtctagttacaggaaaacaagctcaaggctcccactgattctacattacggtgagttgtataatcatttcattatatcttacaatgtaataataatagaaataaggtgcacaataaatgtaatgcacttgaatcatcccgaaactatccctccccagtccatggaaaaactgtcttccctggtgccaaaaaggttgacggctgttctgcagcaaggtctttaaacaatgcctgtgacatagacaatccctcagaaagatgcttatctaacgttcccagtggtcatgacttttggcaagaaagttggagatgtgaccagctgcacatgactttacctaaaagcttgctatgtaaaggacactttctggagagtgggtgtaggaattcactgtctcactgctgcccaagacagcactactgtttgtaagcccctattaaatatttctttctgagaaagtggatt

SEQ ID NO: 265359 - DNA, 528 bp, Homo sapiens
agttttctctaagtgcttatctatagaagagagtattgagactcttaattttatggtttaaagacagggctgattgattgattgatttcactctgttgtccaggctggagtgcagtggtgcaatcatagctccaagtaacctcaaactcattacaaagcattaggattataggcatgagccactgtgccctggtctgggatctttatcacaatttttcttctactttgaatgcactcaccctccttatctatctgatgagttactttttatccttcattatccaaattgaaagtcacattttctagaaagccctctctgggattccttgtcatagaattaaacattttgttttctgcagttctatactactttgtctaaacctctatgaagtaactttagttaatttattcagccacaaacatttatttgttaatgttattatattgctttcatgtttgtctttgctactagggtataaacttttggacagcagggactatattctcttcatctttgaatctctatta

SEQ ID NO: 265360 - DNA, 120 bp, Homo sapiens
agtaccattttatcctgtaggctcagataatctaaacagattaaataagaggtcacttttatattctagtaatatcaatcttttggttgtaggaacctgaagggaccccccccccccacc

SEQ ID NO: 265361 - DNA, 604 bp, Homo sapiens
taaacatttgctagggaaggaacagataaaatcagccacatgtttatggtttttcaacaagtgtcacaaaaataatagagcaaagaagctgaaaagaaactgaagagatacttttttctaactctttgcattgttgtactgtttaacaacattattaaatctttttttttttttttttgaaacagggtctcactttttcgcccaggctggaatgcagtggcgtgatctcagctcactgtaacctccgcctcctgggttcaagctattttcttgcctcagcctcccaagtagctgggactataggcacatggcaccatgcccagctaatttttgtatttttagtagaaacggggtttcaccatgttggccgaggcgggcagatcacctgaggtcgggagttcgagaccagcctgaccaacatggaaaaaccctgtctctactacaaatacaaaattagccgggcatggttgcgcatgcctgtaatcccagccactcgggaagcctaagctggacttctttaacttcgaaagttgaagattctgatagatttcatctcactgtcttccatcttaatgaacttatttctttccatttacgctctccc

SEQ ID NO: 265362 - DNA, 456 bp, Homo sapiens
cagaagagttgagaggggcatcaataccactcttcttataaggctgttgacatctcagctaaatattcagagtgtctcaactgcttctctgaattctggcaggacccacctgcaaatgagaagatttccacagacaggctggtggatgagcccaggcaagtcagttatacgttcaaactgaaagagactataaaaacttgatttttaaatgactaaattcaacaatgataatcacccgtattcttatttcctaggtcaaggacagaggggaaaatggggaaaggacaaaagagggggccactgcttccattcatggtcaataaatgtatcacaagatacagacctgaactaagaattcttcttcttcttcttcttcgtttttttttttttctttcgagatggagtctcgctgcaatgcccaggctggagtgcaagaccccgtctcaaaacaaaaaa

SEQ ID NO: 265363 - DNA, 358 bp, Homo sapiens
tgatgaattcccatggacagctagcaaattatctgatgtgggaagcaggttcaggatttctgaacgatggatgatcctgattgacatttcatgtgacagttctcaatctcttcgtgattgggaaagtggcacttataaccaccatctactggttggagtgcagtgatgcaatcatggctcacttcagcctctacctcctgggatcaagcaatcctcccacctcagcctctggagtcaccgggactacagatacaaacttttgagacccacccttcgtaagaaaaaaaatgcagaagaaagacaaattggatttcatttcaagaaaattgaaaataaaattcttcatactggtaaatta

SEQ ID NO: 265364 - DNA, 294 bp, Homo sapiens
caagatatgtcttcttgttgttgtctcataaataaagaaacgggagagtctaacaagataactgacttgtacagagtcacacagctagttggagtgcagtgatgcaatcatggctcacttcagcctctacctcctgggatcaagcaatcctcccacctcagcctctggagtcaccgggactacagatacaaacttttgagacccacccttcgtaagaaaaaaaatgcagaagaaagacaaattggatttcatttcaagaaaattgaaaataaaattcttcatactggtaaatta

SEQ ID NO: 265365 - DNA, 399 bp, Homo sapiens
accctcatgtgtttatacttgcatcctgagtgcctaaacaaggatggcaacagattttatcttaggagctaattccagtcttatacttgggtgccatgttttaaaaaattgtggggttccatctagatttggcaaggaagtatacaagttgattaatgactgattctctgtcatgggcacagaaggtggtagtgtgacaatgctatcatgtatttatcaaccctggtggtaataggagataataatgttaagtgattcaccagatgggtaagtgaatttaaaaacaacacaaagtctcttcatctgaagaagcaggtataatattcattaatctgaggcaaggtgagaccatctcattacttattcctattgcattactatgttactgcaaaaaaaaaa

SEQ ID NO: 265366 - DNA, 461 bp, Homo sapiens
ttcccaagagcaaggctggagggcggaaggctggctgggctgatgggaccaacgcttgtcagaaatgaacaggctcatgcgacagtgaagacagagcagagggaaacagcttttggcttcatgctttgacaaagtgccctgagaccgtttgtccatgtgtgtgcgtatttctgttcggtaaatcctggaaggccagtgcagtgggagaatccatatgttttcagcctctaaaacatgccaggtagttatagttgacagtggggtatgtgagaaactatatggtactggcctcattcttcatgctgccactctggcctttgaccttggagtggggaattccttaaattcacacatccctgagcccctttgtgggtgacccaggccctggcatacactgtacaattaacaaatgtcagctgaatgagtagaatgaataaacaaaaaagagtcattgtgtaaca

SEQ ID NO: 265367 - DNA, 354 bp, Homo sapiens
tatggggtccatccattcagctatgtgttgctgatcccggcttgtttcagcgtccccttcaaccaccaaaaaggagatctggaacagcagggccatgaacaaggaggagaagaaggactgcacctccatctgccgactgggttccagcaggagctcatggatggccctggtggccttggagggaggaggagagtgaagcattatcgtatcttcgactcataggtcctgtcaccaggaaatctctttccacaacccatcaccatgacagacttgcccagtaaaacccgtgctgctagagcaagtgaagactaagttagtgtgagccagacaaataaagggcaatttctagaatgt

SEQ ID NO: 265368 - DNA, 382 bp, Homo sapiens
gtaatcaagtataaattcctccctctcccattaccttactttgctataaaataagtcaaataggaaacaagcacaatttaaaattcagaagtgggccaggcatggtggctcacgcctataatctcagcactttgggattgtactccccagatgaggcaggcagatcatgaggtcaagagatcaagactatcctggccaaaatggtgaaaccgtctctactaaaaatacaaaaattagccaggtgtggtggcacacgcctgtagtcccaactactcgggaggctgagacaggagaatcgcctgaacttgggaagcggaggttgcagtgagccgagatcgtgccactgcactacagcctggtgacagagcaagattctgtttca

SEQ ID NO: 265369 - DNA, 218 bp, Homo sapiens
atgtttgttgattttaaaataaataattctgaaaatataattgaggtggaaatgcgtttgccttaaatttttattacatacttatgcacggctttaggtaagtataaaaatgtcattaaataatatgtgcagatagaattatataaaaaaccgaaggaaaaaattaggttatgggcatcctaaaagtaacacaatttactaaaatatataataataaa

SEQ ID NO: 265370 - DNA, 497 bp, Homo sapiens
taaaagtagaagaaaataaaagtgaatatttattaacttttatatgacagcaaaataatgaagaaagttgcataaaactttcttcatcttcgtgaaaaaatcaattgatttgacttcctaaaattaacttgggaaaacagcttggcagtttcttataaagttgagcatgctacatgacgcagcattcacactcctgggtttatatattttagagaaatgaaaacatgggttcacatagtaatctgtacatgaatgttcatagcagttttatttgtaataggaaaatactggaaacaacccacatatcctatatggagtgaatgggtagacaacctgtggtacatctatacaatggaatgctagttagcaatgaaaaagagtcagacccaggagtggtgatgtgcacctgtagtctcagctacccaggaggctgaggcaggaggattgctcagcccaagaaaccagcctgggcaacatagtgagaccctgtctctgaa

SEQ ID NO: 265371 - DNA, 521 bp, Homo sapiens
aagaatcccctgaaaacatgctggtatttgaaaatcctgcattcccaggaagggtgtgcacatggaggatcctgacggtacctgactgtgtgcagatgcagcagcccaaactctgactctgaccctacttctgtatcttaagcccggtagatcccttgcaactatatgattcctctgttatcagttggtgataatggtgccagagagggcagaattgtttcagaattcagagagaggatggcatgttaaaactggaagaaatattctagatcaagacccttattcagtagatgaggacaacgaaagtagagaaacagtgtgcccgacccaggtctggcttactgaaattcctggttgatgtctctgtgctccctattcctgcccacctctcccacttcccgagaatgtttagtcatgacaaccaaaagagattcgttaatcaggggacccactttggtgaaaggagatgattctgtatcattaactgattaaataaaacaaattccaatacaacatttact

SEQ ID NO: 265372 - DNA, 287 bp, Homo sapiens
gagctgtaaagagaaataggtggtccaaaagacagagtccaataggtgaaggaaattcataaatggtttacattgtcatcaactagagaggtagattacaggcaatatttgaaacctactgggaagcactgtcatattccaagagaccatccctttgtggccacagacatctgggttcaaagcctgtctgacttcaatagctagagaaacttttatgggtctcagtttcctaatacataaaatggtgatataatagcctaccctggagagctgttttgaagatggaa

SEQ ID NO: 265373 - DNA, 797 bp, Homo sapiens
gtacttccgctctaaggacgcaaatttcggcaggacatgccccacccccgcgttccgaccgctgaagctccagtgagggacgcaggcattctactcttcgattggtcgctgggggaagaatgacgggcgcctttttaaatgctttatttcaataaaactttattagtggaagagcgccagctattaactacagacgtctctggtgggtccctggtcccggcccattctgtgtctgttctaagccgctggagagctggagatcaggactgcactgggtacctgaggcaagagaaaagctgtaacggaaggagtgaagaagagggaaaaaaacgggatgaggaaacaaggggcagagaggaagcaaacaaaaatcaataatagaagtttagcagcagagatcacctaggtggttcaaccactcacttttttgaagagcaggagaaaagaagcgagaaaaataaaagagagaataaagctaacatgtattgagtgcttactattggtcagacatcttttaaaattttattccgttgaatcctcacaaatattcccctgtgacttcaggacaccctctaccatgattactacatatgtattaatacttgtagaatgatgctttcagtacatggactcttaatttcttggggaggaaaaaaccctatgtggttctcattttacagaaaaggaaattgaggctcataaaaatccaaggatttatctggagcttttcaaactcaaaaccatctttctacttcaatatgatactttaataaaaacaaaaacaactaacatttcta

SEQ ID NO: 265374 - DNA, 337 bp, Homo sapiens
gtgggaaagacactgggtatgtgtgtggggggaggacactgggtatgtgtgtggggggaggacactgggtatgtgtgtggggggaggacactgggtatgggtgtgtggggaggacactgggtatgcgtgtgtggggaggacactgggtatgtgtgtgtggggaggacactggatatgtgtgtgtggggaggacactgggtatgtgtgtatgcggaggacactgggtatgggtgtgtggggaggcgctgggtatgtgtgtgtggggaggcgctgtgtatgtgtgtgtggggaggacactgggtgtgtgtggggaggcgctgggtatgtgtgtgtggag

SEQ ID NO: 265375 - DNA, 367 bp, Homo sapiens
ttttttgagatggagtctcactctgtcacccaggctcgagtgcagtggcgccatctcggctcactgcaagctccgcctcccgggttcacgccattctcctgcctcagcctcccgagtagctgggaccacaggcacctgccaccacacggggctaattttttgtatttttagtggagacgaggcttcactgtgttagccaggatggtctcaatctcctgaccttgtgatctgcctgcctcagcctcccaaagtgctgggattacaggcgtgagccaccacgcctggccgggctactcttttacttcttcatacttgtgtgtcagctccacaatgaaccatttgcatatatttctgcttgaggcaagta

SEQ ID NO: 265376 - DNA, 147 bp, Homo sapiens
ggcagcacagcctgatccccacctaaagcatttgttcttaccaagcattggtggggtgccagtttggtttttattgtgttatgtgatttaacttccactgagaacattaattcattcatcaaacatttatcgagcccttcctaaatg

SEQ ID NO: 265377 - DNA, 508 bp, Homo sapiens
gaaagttcagagaggtcacacacagtggtctttattacagcattacacacacttcaggtaattatctagttttatttatccaattcctgaaccttccagaaatggatggataagttactattcaggataaaaacagccgtggaaatgaaaggaagagccatcttctaaagttacaatgtaactctaatgcctataatgcatataacatctaatgcatataaccatatttatcaaaataacattcatatacattattttcccctccaattgaaaccaaatgcagaaattcccccaaatgtagtcttttaaaaagtaaatacatatttgttttctttttaaagttaaaagaacaaaggaaataataatagtatttaggagagcttaaaaaagatatctatttccctttgtcttaactcagatccaccaggtggcagtaagtttttacccacaaacagttctggagactttgacatttgtaaaaataataaaattatatcatgttaaaaaa

SEQ ID NO: 265378 - DNA, 326 bp, Homo sapiens
aaaacaggggcagcctgaggggatccagggccaggagatgggtcccctctaccccgaggaggagccaggcgggaatcccagccccctccccattgaggccatcctgcccagaggggcccggacccaccccacacacccaggcagaatgtgtgcaggcctcaggctctgtgggtgccgctagctggggctgccagtcctcaccccacacctaaggtgagccacagccgccagagcctccacaggagaccccacgcagcagcccagcccctacccaggaggccccagagctcagggcgcctgggtggattctgaacagccccgagtca

SEQ ID NO: 265379 - DNA, 223 bp, Homo sapiens
ttcattgtatctccatgggtagagaaaagtagttaatatgttgtgcggtgtttctgaaagcgaggtccacggatgacctaacatttgtattgccacgggactgtgaaaatcgactctagacgtactaaataggagtctttaaggggggagcagggcccaggagtctctattttaatggttttttttcttcttcttcttttagtcctagctactagactaccag

SEQ ID NO: 265380 - DNA, 426 bp, Homo sapiens
cacttgaggtcagggcacatagaggattaatttactgaaggtggtagacaatccctctgccacaaatgcaaacattttttcataagcgcctgaagcaattagttctcttcaataataaatttaatcttttcctccttcctttctttcctcttcgtttctcctctttcttctcttttcctctataaatgctggcctttgtctaagatcttcaactcaaaggtgtagatgccaggaaagaaaaacaaaatcaatgtattgtggtactaacaaataatgctataattattagaaaaaaacagattgaagcaagatacaaaaattctcaaaagcagctatctgtatgaaaatcttttctacttctagagagtatgtgaatgactgtatctttcatatcgtgaaagcagatgcttacatgcaatcaccttt

SEQ ID NO: 265381 - DNA, 416 bp, Homo sapiens
tctggcagtagcaaggagtccattctgagttatcagttctactcctagatatgtgccctagggaaacttttgcacatgtaccaggctatccatggcaagattgttaaaaacagcaaaaagttagaaatcacctaaatgtccctttacaggaaaatggataaatcattataatccatataatgcaataccatgcagcaattaaaatgaataaaatatagctacacttaccaacctagataattctgaaagcacattgcagaagtaagtgtgcagtgtgatatcatttatataaagtttaaaaggaggacaaagaagagtatacattgttctgtacattccagatgtatacaaagaagagtgagtatacatctggatatgtttagaggtaaacattaaacaaatgcatgagaaagatg

SEQ ID NO: 265382 - DNA, 447 bp, Homo sapiens
cagggatttttacaatgcttttccatacaatgtctggaatctatagataacataaccagttaggccagggtcgatcttttaactaccaggcccagggcacagcgctgggctgtctgcctgtggatttcatttctgccttttagtttttacttcttctttctttgggggcagaaattgggcataagacaatatgaggggtggtctcttcccttaaaatggtgacatataactttgcccttttctattttttctatttactattaactctttttttttctattaactcttttctatttacttcctttggtctcattttcatttaagcctttttggtccttgaattgttctagaagtcatttactttttttttccataggagagtgagtttaattcagtttctaatagtagtaggttatcttgctggtaagttatgggcatttgtttatt

SEQ ID NO: 265383 - DNA, 434 bp, Homo sapiens
gaaatttataaaaacaaaaaatttatacccaaattttaaaacctggagcaagttagccttagtattttggagaattttcttctcgattgaattatacatagaatacatggcttgcttccccccgcccacaaccccatttaatgttgttttatgagaatttccacatgccagcaaaaatagtttatttctaaataataggtcatgctagaactatggtctacgttagaaaaactttgtgctaattgttgaaaattacatatttcagatgacataactgattgcatttcaatactatgggcattgagaaatatactggaggttttatattaggaatggatgggtgatgtcaaatcatatgaaaaagacctatgctttctacgtaagatcttaaatgtgtgtactgaagcaaattaaatattacttgcaatgtacgt

SEQ ID NO: 265384 - DNA, 489 bp, Homo sapiens
cggtgcagtgaggagcgagggtgattgtccacttacaacaaagtttgcaactccctggatagtcctttctacaccttaagagaaccccttcccctcttcaaaattggtgttccaaggcaagaagttattttcaccagggaagcctgtgaacagaaagagctcctgagactacacctgcttttaatttggtgtcagtaggaaagatggagatgaaaacctcatcaagaccagcacggatttgggaatcaccaatagagtcaacccctcactctaagatgaggaaactaaggccccctaaggtgaactgtgaactgaattgatgaaagctgggatcaaagcccagatctctgggctccttgtctggtatttatcttccctgctttcttcataattaaattcagtgtaatgacgcagacgtagagcaagatcctggagtgtcttcttaatcatcaaatattgtcctctataaagttataatgtttagtgaaa

SEQ ID NO: 265385 - DNA, 465 bp, Homo sapiens
accgcaccgcacactcagcggaggcgcgcgccccgcggcgaccggaggatgtcccctaaactgctccaattcacaaacaaaggtgttccaaggcaagaagttattttcaccagggaagcctgtgaacagaaagagctcctgagactacacctgcttttaatttggtgtcagtaggaaagatggagatgaaaacctcatcaagaccagcacggatttgggaatcaccaatagagtcaacccctcactctaagatgaggaaactaaggccccctaaggtgaactgtgaactgaattgatgaaagctgggatcaaagcccagatctctgggctccttgtctggtatttatcttccctgctttcttcataattaaattcagtgtaatgacgcagacgtagagcaagatcctggagtgtcttcttaatcatcaaatattgtcctctataaagttataatgtttagtgaaa

SEQ ID NO: 265386 - DNA, 322 bp, Homo sapiens
gtatacacattttacaaaagtcattttttaatgttaagaaaaaattatcaattgtttccaagatctttataataagctactaaattggtatactaatatagctttgtcctaaaacttggaagccataccaaaaatccttgattcagattcctttctaaaatagacaggaaacaggtacaaaaaaaaatctttctttttctgatgatatgtgcattatcttgtttataaaagccacggacatcgcaactgcttaacacaggcaaggatccacttactgataccttcctgaagctgaacacatggaaatgtcgtcgttgccact

SEQ ID NO: 265387 - DNA, 483 bp, Homo sapiens
actcatctcgccatcattttgcgcctcctgcatcccccgtctcactgttcttcactctgcttgttatcctgccctggactgcccttccctttgcctagaatgctcttcctccagatacctgctttgctcaccctctcgcttccttcagggttttactcaccacatctctgaagcttctctgactactctgtccatccttgacactttctattgcccttccctgcttttatttcctcctgggcacttttcacaaatttgcgacttactttactcatttggttatcatctccttctctcttcaaaacattagtaagcttcatgagagcagggattttgttttgtccactgctatctccccagtgcctagactattgcctggatgatagtagaagctcagggcatatttgttgaatgaatgaatgaatgtgcttcatgtagactgcagtttagctaatacagctagcaaaggaagcagcagtgaga

SEQ ID NO: 265388 - DNA, 164 bp, Homo sapiens
gtagagatggggtttcaccatgttagccaggatggttttgatctcctgacctagtgatccgcccgcctcggcctcccaaagtgctgggattacaggcatgagccaccgcgcccagccacaccctcttttctttatctgtccatctgtccagccacactctccca

SEQ ID NO: 265389 - DNA, 559 bp, Homo sapiens
tgaagagtactgttacagaagtaacagctgatgtcactagtgctgtaatgagaaatcctgtcactagagaatttgatgttggtcagcacattgccagtggtggcagtgggctagcttggaagatttttaatggcacaaaaaagtcaacaaagcagtggctgtttttgtctttgataaaaaatgattgacaaatatcaaaaatttgaaaaggatcaaataattgattctctaaaatgaggagtccaacacttaactcgacttcaacaccctcgacttcttactgtccagcattctttagaagaatccagggattgcttggtgttgtgtacagaaccagttttttgccagtttagccagtgttcttggtaactgggaaaatctccctttccctatatctccagacattaaggattataaactttatgatgtagaaaccaaatgtggtttgcttcaggtttctaaaggattgtcattcttgcatagcagtgtgaaaatggtacatggaaatattactcctgaaaatacaattttgaataaaagtggagcctggaaaataatg

SEQ ID NO: 265390 - DNA, 757 bp, Homo sapiens
agagacagggtcttgctgtcattcaggctggagtgcagtagctggggctacaggtgcaggccaccacacccagctaatttttccattttttgtagagatgggatcttgccatgtcgcccaggttacatttttttaaatcatgagtttctgaaggaaatggggtagggcaggctctggtaggggctggattgttcgagctcctgcttgaattcctgcatacactggggaaaagggggatccccagggccagggatggggaaggtccctggctcattagacaggaaggcaatcttgattctaacccctaatgctgtgtggtgtatggaaagtcactcaacctctctgtttcctaatttgagactctgggcctgctgggtctaatctcacatagcaaaaagcactacaggctgggcatagtggctcatgtctgtcatgccagcactttggaaggctgaagtgggactattgcttgaggccaggagtttgagaccagcctgggcaacagggaaaacctgtttctaccaaaaaaaaaacctgggcatggtggtgcacacctgtagtcccatcccagctcttctgggaactgtgagtgcaccagaggcagctccttgggcactgtctgggagggaacctgaaccacaggtgaagaccgactcccctgtcccctgccgtgtctggggacctgacactgggtttgtgtctgtgctctagccgtgccctgtaggggaaagggcaacatctcgatctgaacagatat

SEQ ID NO: 265391 - DNA, 383 bp, Homo sapiens
tgcaattttttttaagagtcagtctcactacattagcccaggctaaagtgcagtggctattcacaggcatgatcccattactgatcagcacgagagttttgacctgctctgtttttgattttgggccagttccccacgccacaggcaacctggggttcacccaggaggtcaccatatccttgccgaacttagtgcagacatccacactacacccagagctcttgaagtcaagtgatcctcctgcctcagcctcctgagtagctgggactacaggtacacactactgtgcccagccttttagctcattttaaattataaaagtacagttttcatcatttttctgcacgtatgctttctgataagccgttttttttttttttttt

SEQ ID NO: 265392 - DNA, 428 bp, Homo sapiens
ctgaactggctgggaggctgctggaatggcccttggtccacagctctccacaggcaagaggtcaactgctgcttgaaagaggtagacaaaagttaggttgatggcgaaatgtctctgggttacccagtcttctggagcagcaagctgagctttaatgggctaagcattagggtgttacagaaaatttcaaatgcagccatctcccttggggcagatctacctagttcatgacagtatgtgcggctggccagggctttacacctctgcatcttaagttgttaatacataccaataatgtaatatggctttttaaaggagaggagagtgctgggttgggaagggaggtggttggtagagtcacaacttctcaatgagtgaatttacagctgatgggaaaaggagtgtaactgtgaaaaacgatggctgtg

SEQ ID NO: 265393 - DNA, 390 bp, Homo sapiens
ttcggcacgagtaggatcagattcaaataagtatgtattgagtgcctactctgtgcaaggcactatgctagatctggtgcctagaagccctgagaaagaacttaaagagctaggaggacagaggcccccaagctgatctggtggtgcatccacgcacccccaccctgggactttggatgctcccatctccacctccagtgacttttaaagccgcttcgtgcctttcctgtaacgttggatcctccttttctgtcccctgctgtctcaaggccccaagttaaagggttaaagccgctggagcttggggagagaacattgtggaatggaagggatcatgccctttgtggagtcttttttttttaatttaataaataaaagttggatttgaaa

SEQ ID NO: 265394 - DNA, 777 bp, Homo sapiens
aggtttcagaagggctgtctgtggctgagatctttgaggcagaactgttgagacggaagggattggcatgaagctttggaagactggacgtgtggttgtttcccaaatatggtacgtatgccactggtagtacagtgactgattttaggaggtcccaggtatagtattaaatcatcttcagtcatatcacaaaaaaattagttccttttcagtgtccttggagtccttgacatcattcacagagaatgcctgcgttttgggctatgtgatctctgccagctcacagaagcttacctctttttgtgccatgtaggtagatggggattcatagcctttggcaggcaacaatatctggctagaaactaatagtattggtgttttttttcctcattgaattatttcttatggttttaaacattttttaatgatttttaatgatatatttaggggagtatcagtttccattcacatagtatatagggtttccttttatgtgaattaatttttttaatacaaatacattaagtaaccataagttaaagtaaaatacaggtagcgtatcgcttatcccaaatgcttgggactgaagtgttttagattttggattttttttttcagatttttggaatatttgcattatacttactggttgagcatcctatatccaaaaatttgaaatctgaaatgctccaatgagcattttgttttagtgagtgccatatcagctctcaaaaactttccaattttggcatattttggagtttggatttttaaatt

SEQ ID NO: 265395 - DNA, 558 bp, Homo sapiens
caacatgcctcttgggaggtagattcaatgtgaggctaatctccgaggtataggaaatacaggaaggaggagcaacaggtcgggtagtggtggaagcaggtttggaaaatgtgattagttttgtaagcgtttttgagtttgaagtgccactggggaaggcttttggaaatttatttccagagttcaagactgagctatcattgcagtttgctcagctatttactgagctatctactgtcaatttggatagtatctacagtttgcattgtagatactggatacttggattggctggtgcaccctgtttgtgagactcactggagtttgaagagatgaccactggaaaatatccctaagcagtagctgcaattccacccccaccttggagagccaaaaccctcttcattttcactctcctgtccttggtcttaggctacttaaagcagcctttagacatagggaaaaattgaaagcctctcttttaagaaaaacattaggtacttctggaatagagagttcaagaaattaggagaaaaatgaacttttgaagctttttct

SEQ ID NO: 265396 - DNA, 486 bp, Homo sapiens
tacagtatttttatgccttctctaaagtaaaagatttcttttaaaattataaaagtagattgggcagggtggcttacaccttgtaatcgcagcattttaggaggctgaaacaggaggatagcttgagaccaagaattcagggccaacctgggcaacatagtgagaccctgacattacaaaaagtttttatttatttattttttgagacggaatcttgctgttgcccaggctggagtgcagtggcacaatctcggcttgttgcaacctctgcctcccgggttcaaatgattctcctgctttagcctcccaagtagctgggattacaggtgcatgccaccacacgtgcctactttttgtatttttagtagagacggggtttcaccatgttggccaggctgttctcaagctcctgacctcaagtgatccacctgcctcggcctcccaaagtgctgggattacaccgcgcttgtcctacaaaaattttta

SEQ ID NO: 265397 - DNA, 538 bp, Homo sapiens
cacgaggccgattgccacgtaggctccttcgccatcaagtcgctgcggaaactgacggacgatgagctgttccagtacctgctgcagctggtgcaggtgctcaagtacgagtcctacctggactgcgagctgaccaaattcctgctggaccgggccctggccaaccgcaagatcggccacttccttttctggcacctccgctccgagatgcacgtgccgtcggtggccctgcgcttcggcctcatcctggaggcctactgcaggggcagcacccaccacatgaaggtgctgatgaagcagggggaagcactgagcaaactgaaggccctgaatgacttcgtcaagctgagctctcagaagacccccaagccccagaccaaggagctgatgcacttgtgcatgcggcaggaggcctacctagaggccctctcccacctgcagtccccactcgaccccagcaccctgctggctgaagtctgcgtggagcagtgcaccttcatggactccaagatgaagcccctgtggatcatgtacagca

SEQ ID NO: 265398 - DNA, 390 bp, Homo sapiens
ctatttatccaagtcttcttttacttctcttggtagcatgttaaaagtttctttatatagatctttcacatttcttgtacatttaacctgttactgtatctttttcaatttaaaagtaaatgcattatttttcctacatgctttctaaatggctattgtttgtatacaggataacaatcctgtatttgtataacaatcctgtatacaaacaattttgcttccagttaccttactaaattttcttattagtagtaatgattttcttccccagttgattttcttgggatttactcatatacaaacatttcctttgcaaataatgaacattctctttcttcctttcaaatttctcatatctttctgttgtctaactgtatcagttagtacctc

SEQ ID NO: 265399 - DNA, 622 bp, Homo sapiens
tatcaagccaaaccgctcattgaatatgaacatagaatagatactttcagatacacaagatcagataaacaaaacatttgtctcctagtcaccctatgcaaaccattggaggatgaactccagaaaagtaagagtaaccaagaaagggaaagagatggaatatagggaatgggagatcccacaaaggagagattgaaaggcatcctcaaaacagtagcgaagggaagcctggggtggcagctgggcctgaagcactgaggatgactagaacagactggatccaggccagagggctctaggacagattgtgttaagatgaaatggcttgaatacctaatgtgtctgaacatatatttaggaggtttagacagttggcagagagtttgcgattaaattattgataagtacatagagacaaagtagaacaacagaaaagacagttgttaattccagggaaaacaatgttgtacaagaaagaataagtaatcctagtatattacatggcttacctagatacagcaattaaacagtcaaaataatgtcaacactggatgtagatctaaccgccatgacaggggtaagggggctcacagcagtgaaagagccaaatcctcatttaccg

SEQ ID NO: 265400 - DNA, 696 bp, Homo sapiens
gtctaaactgctggcagctactgctggttgtcgaagcgcactccttactccaaagtccaactttaaaggattgtatgttttagcagctaccattcttaaaagctttctaagcaccccatggtgctaagtgccctatgtgatagcctcctttaatcctcccaataatactatgtggaaggttctattattaagccaggacttgaaccgtgtccactgagtctggagtccaagatcttaactacaaactctcagttacctttacagaatgaaagtctttgctaggcaagaaaaaagtcggccaatcattactggcaacaggcccctgttgaagcaataaattttccgaggccaacacttggcaaatgtcattcagactgtacttggttatcctgaagttctgagggactctctggaaagatgatcttaaaattaggataattctttaattgtggcatactgagcacaacatcaaaatgaagcctccaaagtccaagcacacactatacctaacaggaaaaatacttctagcaaatcagaggaaactgctgttggctatctttaggccagaaatgagaggggctgcacagcagggcaaatggatgtctgggtgcaggttctggtctatcacatgctagtgtggaaccctgggcaaatggcttatcttccctagccctcagtttcctcttctgtaaaagg

SEQ ID NO: 265401 - DNA, 414 bp, Homo sapiens
aggataatttgacttctttccaatttggatgccctttattcatttctcttgtctgattgctctaggtaggaattccgagcccttttttcaactaggtccttgctttatttcaactaggtcccctgatatctcagtctgatcaaaaagtcctcatcacccatccttgatatctgatcaccctggcctgtcttcagcaacaatgctgtcaggtcagtttagcaagaatccccctacccttgagatcttctctgagttatttattttccatccaataaccgttcatccttctcattggctgtaagtccccaggtgtctttactgtattcagagttgagcttgacaaagctcccctattgtgattgtgttggcacccattacaatactcctgaataaagcctgtcttactgttttaaa

SEQ ID NO: 265402 - DNA, 483 bp, Homo sapiens
cctggtgccggatgatgaggtgatattagtgggcggggacacccaagagaggggctcatgcagcgctactacaaactcgtgtgggaggatttccatatttcagtatttttaccatctcagtcacctccagccagggaagccacgctccgctggggcgggagagttgtggaacaggctcaggcagcccctgctgtgcccctcccacaggatcctgagcacagtgaaatggtccttgttttagggaattgagttttggagtgtgtgttccctacctagctatatatatcccaaaaatatcctggtgttcaggccaccgtgcccaatggaagagggcaagcccttcatatgtgtatggctggaaaaggactctcatcgatttcccttttgaatttggagccctcaaaatcatctttggagaaaggcatagtcctgtctcccacgcacacatccttaactttggcaaataaacctcctgaaatgtta

SEQ ID NO: 265403 - DNA, 431 bp, Homo sapiens
tcacatcttccagcccaggagacagggatggcctggagaggtcatgggaccctgtggggccatctcagtcacctccagccagggaagccacgctccgctggggcgggagagttgtggaacaggctcaggcagcccctgctgtgcccctcccacaggatcctgagcacagtgaaatggtccttgttttagggaattgagttttggagtgtgtgttccctacctagctatatatatcccaaaaatatcctggtgttcaggccaccgtgcccaatggaagagggcaagcccttcatatgtgtatggctggaaaaggactctcatcgatttcccttttgaatttggagccctcaaaatcatctttggagaaaggcatagtcctgtctcccacgcacacatccttaactttggcaaataaacctcctgaaatgtta

SEQ ID NO: 265404 - DNA, 513 bp, Homo sapiens
  misc_feature (20)..(20): n is a, c, g, or t
agagaggaatttttcactgnagaaagctcaagcatgaaggctgaatggtggaagaagtaggctctgatggacattacagtttatccctccagatccactttccttccccaggccacgctccatcctgctctgtgcttcaccaagttggcctgtatgggctatgctggtggcttctttgcactctgtcctttggttgggcctagccaatgagaggcactggtaagggatgagagggtggagaagaatgaggttgcattatatattctctaagctcattctctggtggcctgccacgaattggccacctcactccaccaaaagtagttctttctgtcaggtagccctttctatgaaactactctctttgagttcaagcaacttcttcctcctcttacactttagatcaaggggtggtaacagctcctagcccttgctagcctgagattgctgtacaaatttactggttttcttgatgtctgcctacacattattaaactcttctcattatccaaa

SEQ ID NO: 265405 - DNA, 457 bp, Homo sapiens
gaaactaaaagtttgggatctgaaggagagaaaaaaaggctcttaatttgtgactgaaaaacttctgtttaacttttatctttgtgaaactgtaccttgctgtctagctatctgataaggttctgtactgtatagaaatatattattcaggaaggagaactgaaagtgcgacaacataaatgtaactcaagaaagcattgtgggccaggcgcggtggcccatgcctctaatcctagcactttgggaggctgaggcaggcagatcacctgaggtcaggagttcaagaccagtctggccaacatggcaaaaccccatctctactaaaaatacaaaaattatccaggtggagtggtgtgcacctataatcctagctactcaggaggctgaagcacgagaatctcttgaacctgggagatggaggttgcagtgagccaaggctgtaccactgcactctagc

SEQ ID NO: 265406 - DNA, 504 bp, Homo sapiens
tttttctttttttcaaagcccgtgtaaagaaatcatagtaagaatgtgtaatagcctcaaagaagataaagatggtttttattaacccaaacatctgctaatctttaaagtatttctgacatactgctaaactgagaaaggagcccccactggggaaaaggaatcaccatgaaaataatttgctgtaaaatagctatctgaggactgagatccagcattctcagcaagccgtggtttactacactgttgcaggcctcaaaaggcttcttagatgaccatttgataaacttcatcttggtgaatgtacccatctctgtattcgactggggtggaggtgtgctgttaggaaactaaaatctgcatctatgctttcgttaaagaagaaattacgctctgaaagacttgaagaatattgccacaaacgaagtcttcttagtttaattactgcttatgtaaaagtggcctttttttttttttttgagatggagtcttgctctgtcgccc

SEQ ID NO: 265407 - DNA, 495 bp, Homo sapiens
gatgatgctatttaaacagaagtttacgaaaggaatagaaaaagaaactctattatttgcactgtaacctgagtttatactgtaaatagaataaattcacattggctttctagatttggaaaaatctatatttatacctatgcaatacaatatctcttccaatggtaacatttctaagggaagagatattgcctctttcactgtatgctttaataaatgtaacagcccatattgaggaactctttacatgtgtaaggaagaactattcaacagtgagctatttgcatttaagatagggagttacgggtgagtaatgaactcattcgaaagattctaagatcttacttagatgacatttgaaggcaggtataaggccatttggtagggatatcctagttccagtttatcggtctttgtgcattcgcgttgagttgagatgactatttgcagataaacacacttcatctgcaaatagatttttaaatcactattaaa

SEQ ID NO: 265408 - DNA, 483 bp, Homo sapiens
gtttttttgagacagtctcactctgttgcccaggctggagtgtggtggcacaatctcagctcactgcaacctccgcctcctgggttcaagcaattctcctgcctcagcctcctgagtagctgggattacagacatgcgccatcatgcccagctaagttttgtatttttaatagagatggggtttcaccaggttggctaggctggtctcaaactcccaacttcaagtgatccacctgcctcggctacccaaagtgctgggatccaactgttttttatctctttcatgaatcttattatgtatgttagaatttctcactgcatcagatctgtctttccgtacttctatatcttgttgtattctgactatttcttttgatctaaccctcagtttattaattttctcttcacctcatctaatctgttattaaactcaaccattgcattcttaagttcaattgttgtattttcaattgagtttttaga

SEQ ID NO: 265409 - DNA, 598 bp, Homo sapiens
caagtcaattccttaagcagcagtgactcctgtatatcctttgcagtggctttattcagctcatagcttgcctcagcatgtaaagaagcagatcagttttaccatttctattctcggcacatagagccaaatgcccagaaataatgtgatttataccaagtgactctcctcaattgctctgtctccaggacactcacttccctcccatgatgcagttattggggttgcctgcccctgacccaggagaacctgccttcgtgataaagcaacactgcccccatctaagctactctctggacacctctatccagcctgctcacctgctcgtaaaccatgcaaattcttcttaacatcaaccattgccctggaagagtctagaagtagggatatacactgcaacacaatattcctagatgttgttcaatatgagatttttactccaatttctagctgtcccctgctccattcatgcattaaatatttattgaggagctgctttgagccataattttttgtagttgctggggatgctgcactgacagtaaccatcattgttcctgccctcgtggatcttacatttgaagagagaaaaccaatt

SEQ ID NO: 265410 - DNA, 468 bp, Homo sapiens
ggctgtataacatgcattatgttttcaaacttccggcaagctgaacagtacatcttcagtacatcatttcccctccttattatatccctcgtacttgaaacattcttaaagacctgtttttatggatctcagacatagtatatcattctttataccactcaagggtatatataagtacctcagagagagaagaatgaaatagtatctcccatgcttttgtatctccttatttgatgtgttttcagatcccaaaatgtacggagctagtggattagataagttctcagataaaaggttctctgccagaaacaactgatgatcctgatgtgattctaaacatacacacttttggtttgatccatactgaatggtttgattaaactgatggtaggctgggcatggtggctcatacctgtaatcccagcactttgggaggccgaggcgggcggatcatgaggtcaggagatc

SEQ ID NO: 265411 - DNA, 701 bp, Homo sapiens
gtaggttctcgattcgagaactagctaggttctcgatcgttatatgggagttgcatctatcatttcaaattccaaaggtagcttttacatttcacaatcggcaagagctggtatttccatttaatggaatatataccatattttattataatagctccttatccctcactatccagaattctagttccagcactgccaccaacaggctaggtaaccttgggtcaagtcacttaacttctgggtcttccagcttaacaattcagcgttaggctgggcgccgtggctcacgcctgcaatcccagcactttgggaggccgaggcgggcggaccacccgaggtcaggagttcgagaccagcccaaccaacatggagaaaccccgcctctaccaaaaatacgaaattagccaggcgtggtggcgggtgcctatagtcccagctactcgggaggctgaggcaggagaattccttgaatacaggagggggaggttgcagggagccgagattgtgccactgcactccagcctgggtgacaaagagcaaaactgcatctcaaaaaaaaaaaagaacaaacaattcagcactcatatggggaaaagcataaaaactgtggcctaaaaagatggctccagggacatccagaattgctctttgggccccaaatgcaaaatggttttggggttagaccagggctgatgtggtgg

SEQ ID NO: 265412 - DNA, 1608 bp, Homo sapiens
tgctttatattagttaatttctatatttatttaaaataaaaaactttaagagggactttgctcctgttgcccaggatggagtgcaacagcaccatctctgctcactgcaacctctgcctcctgggttcaagtgattctcctgcctcagcctcctgagtagctgggattacagccacagaagcaaggtgacaaaggcaacatcatcgtttggaaagcgtcgcaataagacgcacacgtgccactgctgtggctctaaggcctaccaccttcagaagttgacctgtggcaaatgtggctaccccgccaagcgcaagagaaagtataacggcagtgccaaggctaaaagacaaaataccaccgggactggtcgaatgaggcacctaaaaattgtagaccgcagattcaggcacagattccgtgaaggaacaccacctaaacccaagagggcagctgctgcagcatccagttcatcttaagaatttcaacgatgagtaatgcaatagatgttccggtttaaaaaaaaaaattttatgaatactaaagtttgaactttacataatttatacatgtcaccatataatactcttttggcttttttcagtccttaaaaagaatgtaaaaaccattttagcctgcaggctgtacaaggacagatgacacgctggtgttggttcaaaggccaggctatagtagtttgctaatccctgctgtagaggaagcatcggaactgataacattacggtgttaaatgataattcttagaatttttaagaacaatttaacagaaaagtacatatatcaacaatcaattattaatatagtgatgattttgcttatttgcaactgcttatgacatacgtccccacactatgttgtcaaagatataaaagcataccagttttactaaacttcattagagtgcctaatattaatttgcttgtcttcgttatatgggagttgcatctatcatttcaaattccaaaggtagcttttacatttcacaatcggcaagagctggtatttccatttaatggaatatataccatattttattataatagctccttatccctcactatccagaattctagttccagcactgccaccaacaggctaggtaaccttgggtcaagtcacttaacttctgggtcttccagcttaacaattcagcgttaggctgggcgccgtggctcacgcctgcaatcccagcactttgggaggccgaggcgggcggaccacccgaggtcaggagttcgagaccagcccaaccaacatggagaaaccccgcctctaccaaaaatacgaaattagccaggcgtggtggcgggtgcctatagtcccagctactcgggaggctgaggcaggagaattccttgaatacaggagggggaggttgcagggagccgagattgtgccactgcactccagcctgggtgacaaagagcaaaactgcatctcaaaaaaaaaaaagaacaaacaattcagcactcatatggggaaaagcataaaaactgtggcctaaaaagatggctccagggacatccagaattgctctttgggccccaaatgcaaaatggttttggggttagaccagggctgatgtggtgg

SEQ ID NO: 265413 - DNA, 428 bp, Homo sapiens
gtggggaggggagatctgattaattattggagacttccttcaccattaggaaaagaaatgaagaattcttagccagacaggggctaaggacaaagtatgtgtttgtgtggtagttaggggtggggggagaggtacattagcaaagccactattacaatttagatccttaaggattctgtgacaaatcatgatctataatacggcatatttccaattttgaggcgatactaatctccctatttcatctgaagtagcatcttccattagaaaggcagagaggtctttaggcagaactatatagctactcgactagaggtcccaatttatctaagaagagactagtaaatttttaaccaggctattatttcttctaatcagtgccttattttcaacacctttagaaaatggtcacaaagaaagtcttctta

SEQ ID NO: 265414 - DNA, 621 bp, Homo sapiens
agatgaaggaagacactgaagatttctccccaggaactaggaagctgagcaatcaatttccattgggagataagcacctactcttaaaggcctcacccagtctccccacacctgagggcagagatgagcacagggcgggtgggtggaggaaagtccgccagtgccagcctagacaggcaggtactccccatgccagggctggtgtaggaagcacagagatcttccaaccaagtgccctggggtatttcacaaagggaagttaatttgtgtgcaagaaacagcaatttttcacttgctgacagtgaccaggtcctcactcttcctgacaggcctgtgcgagcacttcccagcctacgtgccactgccccgtgcaacagatgagaaacccaagcttggagaagcgacatgagctgctcaggccatggagccattacatggtggggccagacttacacccaagcttgtctggtgattgtgtgaaggcaggggtttcttccatagttttcctgtttgtgcttctcattcttgccaacatacgttttcccacatgaaatcaagaacagagtataggctgggtgcagtggctcatgcctgtaatcccagcactttaggaggccaaag

SEQ ID NO: 265415 - DNA, 418 bp, Homo sapiens
gcattgattcctaggaaaccccactgaaacatctcccttgaaagaagtatccatttacccctgtgccttcagcctgaatttgctctcccctaatttgagtaaaataactcttagagtttgtgatttccctaaaaagttaagcataaaatttgacctagcaattctactcctaactatattccaaaaagaatttaaaatagatgctcatatctttgtaaacaaatgttcgtaatggaactattcacaatagccaaaatgtagaaataacccaaatgtccactaatggataaatggataaacaatttatggtatgtgcatgcggtgaaatattattcagccataaaaaggaatgaaggggtcaggcacggtggctcatgcctgtaatcccagcgttttgggaggccaaagctggtggatc

SEQ ID NO: 265416 - DNA, 534 bp, Homo sapiens
catcataagccctgtgaaccctgtttcctctaaataatttcaggcaaattggtgagtctgttttatttgcagagatttgtagatcccataatgcatttatataattcttgattcatctttgattataagtttttttttgtgattataaattcgatagaggaaaaatcattatggtccatttaaacttgaagaaatgtatctctccatgagcattaaattgccatatccattttaggaaagttttaatttaacccagatctgtacagaatataaatttataatgtaacaatttaatggttttcagctattggtagactgacttattctttctgctatatttagagtaacatacaggattaattttaaagagattggaatatggtgcttcatagtgatttctggattctcctgaaacatgccttaagtaaataatgttccagagttttagggtactttactatctccctggtttgcaagaagtaggcattggagaaaatctagcacaggccatgtgctttcctctcattaaaaaaa

SEQ ID NO: 265417 - DNA, 580 bp, Homo sapiens
gggttcattaaaccttcttttctttataaattacccagtctcaggtatgtctttatcagcagaagcatgaaaatggactgaaactttgccatttcttttcctcacctcaaacctttctccttctactattaagtgtatgaattgaatgattgtattattactgagagaggatttgatgaagtaaatatggagaaagaataaggtttgccaaaggtttcccaggtaggcaagacaaaacacatgaacacattggaatgaggagtagagtgcctaaagatgaggcttataaattccatagatagattttatattttctacataggtactagcatttgggttgggtgatattatctcatagcaaccaaaggtggtgtgatatcccaaaggtgaaggttctgcaacccaaacccctttgtcagagccactgtgaaagaatccatttatcaaagtacaggatcattgggtgggcatggtggttcctgcctgtaatcccagaactttgggaggctgaggtgggtggatcacttgaggtcaggagtttgagaccagcctggccaacatggtgaaacttgtctctact

SEQ ID NO: 265418 - DNA, 360 bp, Homo sapiens
cacacatattgatcacattatttatggtagaaacattgggaataaaccaaatgttcaactggaaataattccaagttgaattatgttcttcacagttgtgtcaccctggagcagttattacaggccccttcttccccactgtggtgagatcccacatcgagcttccttggctgatctttaagggggatgctgttgccattgggagctccatagacttggatcacttaacagctttgagagatgatataacttctagagacaatcttatttgcagctggagtgcagtgaataataatcatcacacaatgtagtttcctttttacttttctctaagcaaaataatgttcatacagaaatcag

SEQ ID NO: 265419 - DNA, 249 bp, Homo sapiens
cttttttttttttttctttctttctttctttctttctttttctttctttctttctttctttctcgctctcgctctctccctccctcgctcgttttctctctctctcgctcttgccctctcgctctctccctcgctcgttttctctctctctctctctctctctgtctctcgctctcgccctctctctctctctgtctctctctctctctctctctctctctctctctctctcccttctgtcgtcttctc

SEQ ID NO: 265420 - DNA, 206 bp, Homo sapiens
cttttttttttttttctttctttctttctttctttctttttctttctttctttctttctttctcgctctcgctctctccctccctcgctcgttttctcctctctctctctctctctctctgtctctcgctctcgccctctctctctctctgtctctctctctctctctctctctctctctctctctctcccttctgtcgtcttctc

SEQ ID NO: 265421 - DNA, 936 bp, Homo sapiens
gaaaatcaaggcccagagaagtgagaaggcttacctaagatcacaaatgaattcatggaaaccaggtctcctatctctaggaccactgctctttgttctacaccagtgattctcaaccaggggcaatttcatcttccagggaacatttggcaatttctggagagattttggttatcacaagtgggtggggttgggggatgctactggcaactgttgtgtagaggtcagggatgttgctaaatacactgcagtacccagaacagcccacacaatgaatcatctagcccaaaatgtcgaatgttggggttgaggaactcttttctacactgtacaattgtaaactatagaataacaataatattcaatagtaattatcatttattgtatgcttacaatgagctgaaaactctgctgacacttttaggcattatctcatgtttaaatagttctatccccctaggagtaggttttattatacccaagaaagaaaactgagacttggagaggttaagtaacatgtgtccgaggtcacatggttaataagaagtggacccaggactcacatctgtactcagccttttaaactgtggtttatgcatgtatgttgtgtatgtgtttttgtgtgtgtaaacagataaaacttgagaataacttcattttacagtgagttgtaagctagtggggcagatttgaaatgagccctttttctcctccatcctgaatgagacagagtctcataggaaaattcctgcattctttagctaactcaaagttaaggagatttcagaatctccatggggtttctcattttcctactgataacttttgttttagtttcaactaagtagagctaaaagaagcataggcctaattaaatagaaaatgtgaacgtttgttgtactttctctaataaaggcgcttgagaacaaaaaaaag

SEQ ID NO: 265422 - DNA, 814 bp, Homo sapiens
ggttggacagaggaagagacagaagattccactgtgcgtctagccttattcaaaaacaatgaaaataaagtgtctcttccaaaatcaccaaagatggtacagcccagaagagatggttactttgaaggtatgggttccatatttctttcacaggtatagaagaagaccctatccacaaagataccactgcaaatgaaaaattagaaaggaatagagaatatacataccaatggcttcacacacaggttggggttcatgaaacgactagttccagaaatatgaaatgcaatcactttttgcctgagttagatccagatgtacttaatggtggaagagttcagcttgtggtaagacttgtaagcagagaagacacggatttagaccttttttccatgaccaatggaagtgcttggtctgtgaaccagagacaacacaaacatcaggcacacagacactcagcaggatcttcaagtggttcagttaacgggaataccaatatcgcaataataacaatacaagaccttcttaaaaagaacgtaatatcattccgagacaatcctgtacaactcagcggtggatgcggggaagtgcgcaaaacgaaggcgaacatttcccactaatccttagggttcagcttcaaacatgtggcaactggtcctggacgctggttctacgccaggtcccctggtcacggttgaaccccaatcaactgggatatcaccgattccaagctggtccccaggggcaacctactcctcttaaaggagggcatcccgggtctgggaggcccaaaatacatagaggcaccactgaa

SEQ ID NO: 265423 - DNA, 622 bp, Homo sapiens
ggttggacagaggaagagacagaagattccactgtgcgtctagccttattcaaaaacaatgaaaataaagtgtctcttccaaaatcaccaaagatggtacagcccagaagagatggttactttgaaggtatgggttccatatttctttcacaggtatagaagaagaccctatccacaaagataccactgcaaatgaaaaattagaaaggaatagagaatatacataccaatggcttcacacacaggttggggttcatgaaacgactagttccagaaatatgaaatgcaatcactttttgcctgagttagatccagatgtacttaatggtggaagagttcagcttgtggtaagaaatgtgcttaaagttacagaaaaatgttgtagacactagtgctcaaataaatggcactttaagatatgtttataattaaactatgaaaatatcacaactgtatctatttgggataatatcaaaatatcatgtgttaaaataataacatgttttcttgacttgtaatacaatttaaaatgtgacattgcttaaaaatgttaattttatgtgacagatgtaaaaatattagcatcctacaactttaaaataaaattactgtggatggaaaa

SEQ ID NO: 265424 - DNA, 421 bp, Homo sapiens
gggaggaagtgtcagtagctgggcaggccttcttggcaagcattcctccctgggttgtggcgggggctcccggcctgctgtgtggcagctgcaggctcctggggacctgaaggaaaagcttaaccgttctcccttcccttgcttggcacttagagcactagttccattccagacattccgattatcttgcctacgtggcacagaggcctaggagcctccctgggaggaagaggcaggccaaggtcttgcctggctgcttctagggggaaagatgtagggaggaagctgccttatgcttggatctgcagcctttgcctggacctgtggagcctacgtggccagggtgagggagacagaaattagaacccaatgtattcagctaatcctcttcttgcctctgaacattgccgttaatacttga

SEQ ID NO: 265425 - DNA, 411 bp, Homo sapiens
aaaataatatcaagtaccctctcagaccacagtgaaataaaattggaaattaactccaaaaggaaccctcaaaactatacaaatacttggaaattcaataatctgcccctgaatgatctttaggtcaacaatgaaatcaagatggaaattaaaaaattctttgaactgaacaatagtagtgacacagcttgtcaaaacctctgggacacagcaaaagcagtgctatgaggaaagttcatagcattaaatgcttacatcaaaaagtctgaaagagcataaataggcaatctaaagtcacacctgaaggaactagagaaacaaagaaaaaccaacccaaacctaacagaaaaaataagtaacaaagatcagagcagaaccaaatgaaatcaaaacaaaaaaatacaaaaaaaa

SEQ ID NO: 265426 - DNA, 504 bp, Homo sapiens
ccaagctctcctttctaccatttagccaccctggcggtctttcggataacaagaaaaatccaggaaaaggcagcaaaggaaaagcagcgtccaaaaggctgagggagactgtcaccctgtcctctaagtgccaccaagacacagagcctgagcgcagggacgtcatgtgtatgtcccttgcacctgggcctggtctggcccgcagcgggggctcaagaaacagctgctcaccgagagtggtggctcacacctggaatcccagcactttgggaggccaagatgggaggatcacttgagcccaggatttcaagaccagcctgggcaacacagggaggtccctcaaccctacaaagagtcaaaaattagctgggcgtggtggcccacgtctctggtcccagctactcgggaggctggggagggaggattgcttgagcctaggatgtagaggctaaagcgagttgtgattgtgtcaccacacttcagcctgggtgacagagccagtca

SEQ ID NO: 265427 - DNA, 549 bp, Homo sapiens
tgtgttaggtacctttataaagttaggaaagttttcttctctcaatagttggctaaaacttttaattaaaagttgagtccagtaatatttaaaggtttttctctatgtattgagattaccatatgatttttttccctttattctgctaatgggaaagattatgttactggagttattaaatgttaaaccaactttgcatttctggaagaaattgattcaggttaagatgtataatctagtttttgcattgctagatttggattgctaacatttggtttaagatttttttccctctacttttggagggttcaaactcaattctttcttttgttgttatcccagaaatagtaagatgtatatgtaacttaaaatctgaagttgagcattatcttcacctttctcctggataatgcaaggattttagagcgctttgcctctagctgacactttttctagtttatatgctgttattcattattttcaattctatcttcttttggttcagattcaaaagcagacaagtaataaatatttttatcctttatgcac

SEQ ID NO: 265428 - DNA, 591 bp, Homo sapiens
atggaaaaacctctggaaaacctttatttatgttgaataagtattccttgaatccttcctcagcatcctgggttatatttgatttgctctgctcatgataacttcatgccaaggagactgctatcagttctcttaaaacagatcccaactccctgctcatagtggccaaaggaatggagatttcaggctgagtttacttacgtgcatcatcttcatctatccagaagcatccctgcacaaaacctctgtttctacccttccattcactcggctcacttttctgctcttagtaccctttgtttcttgtgaactctccagcaggagtgacttgcaatttgtatccactgacacttaagttctcggaagtgctggagaagtgtatggaagtaaattatcctgatgtataattttgtgcatgtgaaactcaccgtggaagtgcctatctaatttcagtatggaacacagctaaacatttggatcaataatccagttttgaaaccacacttcatttaaagtacaatgtgctgaaaaaaatgaaaaaagggtgctttcaaatttgtacttagtaaactttcactagatcacatcata

SEQ ID NO: 265429 - DNA, 204 bp, Homo sapiens
tccaattactcaggaggctgaggcaagaggatagcttgagcccagaaatttgaggctgcagtgagctgtgatcccttcactgaacgccagcttgggcaacagagcaagactgtgtctattaaaaaataaaaaaatttaaaaaattacatgttctgtcgtcaggtgatgaaggaatggtggcaagcgtgcaaactgaaaaaaaaa

SEQ ID NO: 265430 - DNA, 455 bp, Homo sapiens
ctcgaggccaaaaataaataacagaaatgacaacttccatttaagctgacttttggaaaacaaaaactgtctacatttaataatctatttagttagcattattaatcgtaagggcctacaataaccatttcagaacaaaacagatcaacgtgataatcaaaatgcacacttcctactttcaaaggcaaaatgttaaagagttttaagattagagaagttactgatatggaaagaatgccgaaaaccccaaattgacaatttattaggtatttcaatatacctaaaatgcaacatctaaaatagtcccgaaaagtaaaacagctagttggtttcacaaaaaatttccagggtgcatttaaagaccagataattccactgttccaaagcacagaaaaagactagaaatattctgagtatatttatgaagtaagcataacatcataacattgatacca

SEQ ID NO: 265431 - DNA, 394 bp, Homo sapiens
aatctctgcactacattttctgtatactttacccctgggtaaaaattggtgagtatttaaatgcttcctcacataatcttgctaaagcacactcttgcctataaatattcatgccactgccaaaacatttgcaagctttccccaaaggtgaaatgtgtgtaatgtactttgtcttctgggtataaatattatccaatacattttggttaatatgaatacactaattattcctgcaacccttttaaaaagggtcatcttcatgatgtgaattttttaaaaatgtaattacaataattggatacttaatctaattaaaatttgctttatctttaatgggaatttgtctaaagaggcagaatgacaattggctttttgataatgactgttttctttc

SEQ ID NO: 265432 - DNA, 405 bp, Homo sapiens
gcaaggacatgagagaaaaataactaagagctaaaaaagaattctagaaggttgggcaagataatggcttagaaaataggaggtcatttattttattactcttcaaaaacaacaagagatgacatttgaaaaccatgaagctctttccttgacaattctggatattagacctttgtcagatgtataaattgcaaaaacgttctcccaatttataggttgcctgttcactctgatgatagtttcttttgctgttcagaagctctttagtttaattagatcctatttgtccatttttgcttttgctgcaattgcttttggcaatttcatcatgaaatctttgcctgtacctatgtcctggatagtattgcctagattttcttctacagtttttatagttttggattt

SEQ ID NO: 265433 - DNA, 514 bp, Homo sapiens
acgaagccccagctgatctgggccagggttcccccgactcgtcctctgggggccgtcctgggtactgcagggccctgagcagcgtccctggcctccacccactccttgccaggagctccccgagtcgtgacaaccacagatgtcccagacaccgcccggcgtctgctgggggcaggagtgggaagcagaagtctaaggtgtagggtggctcctgtctctttctggagacgttccataaatagaatctttcctgtattaacaaatgctcacacgccttacaaaccgctctgtgtaggagccgacacagacggagccctggctgggctcccgctttccattttgcaatcagggaaaccaaggcccagaggccaccgtcacaggcagagctgacgttccagccccggcctcctcctccgagcccagagcttgctgccttcctcttcctcctcctccctcacccgatgattctgctgggagccgcccgggagcccaggaggggcgggtatgcggccgc

SEQ ID NO: 265434 - DNA, 446 bp, Homo sapiens
tcccagcactttgggaggccaaggcggatggatcacctgaggtcaggagtcgagaccagcctgccaacatggcgaaaccctgtctctactaaaaatatagaaattagttaggcatactggcacatgcctgtaatcccagctactggggaggctgaggcaggagactcacttgaacctgggaggcagaggttgcagtgagccaagatcataccactgcactctagcctgagcgacagagtgagactcagtctcaaaaaaaatcaatacaccaaatagtggagtttccctattttttcaaatagaaatatttccatcaaaaccttttgctctcgaatacaaactaatactgagataaggaataattctggcgtgggggtggaggagtctgtttctggcctgttgtgctacctgggtcacatatgatggagaataaaacattaattttg

SEQ ID NO: 265435 - DNA, 434 bp, Homo sapiens
gcatgagccaccatgattggcccagtgactcacttaaatgaacagatgcaacataaatggtgctgtgtgacttccgcggctaggttagaaaagacagcacaccttcttcttggtactctcttttgggatgcttgctctaggaacccagtcatcatcctgtgagaaggcccaggccacatggagaagccatgtatagatatcttagctgacagcctaggcagaagtctcagctgtcagccaacatcaaattccagacgtgtaagtcaggaagccttagacatgatctgtcctatggctacttgtatctgcaatcaggtgagtgagtcccagcacaaactgcctagctgagcccagtcagccactagatctgtgagagaacataatagcaaaataattgttgtttaaaaccactttgttttggggtgatttattac

SEQ ID NO: 265436 - DNA, 351 bp, Homo sapiens
ggctgctgactcgctgccggggttcatttctgtctgctttctttgatcatcagcgcagttttgaccatcgctgttttctcagttttcccatcttagagccaaggaagaaaaagttgaagtcacaacttttaatcccaaggaacaagaaccaggagacgagggctttccgaggagggaattagcaaagtatcattttcctttgggtctagaatcgagaaaagtaaacaggacttgctgctgaaacctgaaatcccatcaaagagaattcccggcggccgagagcgttcatgaaaaacgcggaaactcggacaatgagtagggcgcagagtcagaaatttatagactttggcc

SEQ ID NO: 265437 - DNA, 541 bp, Homo sapiens
cctgtgaggaattggcctcctaggcacaaaaggtgaactggaacccaataggtcgtggcccccaacctggaacttctcctgggtctgggggtaggttgtggctccacctagtgtcctttggtggcaactgcaccctgggctgttcacacccaacagcccagcagccaggacagccctgctgttccctaggtaggccccctctgggctggcagagcaaggataagggacagtgacagccgaaaactaggccctaggaggagcccctgagacacattccatctcttcactccctgcatgcccatattgccagccaggccctgcatgcacagacagatgggtgttcaagtgccacttaccaactgtgtgaccgaggagagagctgagtctgtgcctctgttgtgggactatgggtgatggcacagagtcccagccccacctgtgagcctccccagctgtagctgcaccattgactgaattctgattctggcaggtcccctgctaggtgccttaccggtgtaatctcagttgatggtcacagtaa

SEQ ID NO: 265438 - DNA, 446 bp, Homo sapiens
aggcatttataaacatatgttgaatgctgaattgttgaacatttgaacatctccagatttgttatttttattatcctgtctttgttaccttgaattggttaatagcaaaacctttagaatcagagactctgtgtgcttgttatggggggcaacaatgaaagtcagggtgcagctaatgagattgtattttacttatagccaggattgtggaagaagacactcaaaggataagaggcttaccatttttcccattctgtaaaaccatgttgatgacaataccaattctgagagttgttttgaaatactgagttaatatatgaaaagggtctggtacatgatagatagtaattgagatgtttttgttaccagtattattatcttcacaagtggggggcaaacacagagatcccagaacctattataagaaaaaaaggaaaacatctgga

SEQ ID NO: 265439 - DNA, 1525 bp, Homo sapiens
  misc_feature (790)..(790): n is a, c, g, or t
  misc_feature (797)..(797): n is a, c, g, or t
  misc_feature (809)..(809): n is a, c, g, or t
  misc_feature (822)..(822): n is a, c, g, or t
  misc_feature (884)..(884): n is a, c, g, or t
  misc_feature (902)..(902): n is a, c, g, or t
  misc_feature (936)..(936): n is a, c, g, or t
  misc_feature (938)..(938): n is a, c, g, or t
  misc_feature (968)..(968): n is a, c, g, or t
  misc_feature (986)..(986): n is a, c, g, or t
  misc_feature (1408)..(1408): n is a, c, g, or t
ggatggctctgaagtggacttcagttcttctgctgatacatctcggttgttactttagctctgggagttgtggaaaggtgctggtgtggaccggtgaatacagccattggatgaatatgaagacaatcctgaaagagcttgttcagagaggtcatgaggtgactgtactggcatcttcagcttccattctttttgatcccaatgacgcattcactcttaaactcgaagtttatcctacatctttaactaaaactgaatttgagaatatcatcatgcaacaggttaagagatggtcagacattcaaaaagatagcttttggttatatttttcacaagaacaagaaatcctgtgggaatttcatgacatatttagaaacttctgtaaagatgtagtttcaaataagaaagttatgaaaaaactacaagagtcaagatttgacatcatttttgcagatgctttttttccttgtggtgagctgctggctgcgctacttaacataccgtttgtgtacagtctctgcttcactcctggctacacaattgaaaggcacagtggaggactgattttccctccttcctacatacctgttgttatgtcaaaattaagtgatcaaatgactttcatggagagggtaaaaaacatgatctatgtgctttattttgacttttggttccaaatgtgtgatatgaagaagtgggatcagttttacagtgaagttttaggaagacccactaccttatttgagacaatggggaaagctgacatatggcttatgcgaaactcctgganttttcantttcctcatccnttcttaccaaacnttgattttgttggaggactccactgcaaacctgccaaacccctacctaaggaaatggaggantttgtacagagctctggngaaaatggtgttgtggtgttttctctggggtcantnataagtaacatgacagcagaaagggccaangtaattgcaacagccctngccaagatcccacaaaagatataaagagaatgttatgaaattatcaagaattcaacatgatcaaccagtaaagcccctggatcgagcagtcttctggattgaatttgtcatgcgccacaaaggagccaaacaccttcgagttgcagcccgtgacctcacctggttccagtaccactctttggatgtgattgggtttctgctggcctgtgtggcaactgtgatatttatcatcacaaagttttgtctgttttgtttctggaagtttgctagaaaagggaagaagggaaaaagagattagttatgtctgacatttgaagctggaaaaccagatagatgggatgacttcagtttattccagcaagaaagaaaagattgttatgcaagatttctttcttcctgtgacaaaaaaaaaaaacttttcnaaatctaccttgtcaagtaaaaatttgtttttcagagatttaccacccaggtaatggttagaaatattttgtggcaatgaagaaaacactagggaaaataaaaaataatataaagcc

SEQ ID NO: 265440 - DNA, 1772 bp, Homo sapiens
  misc_feature (790)..(790): n is a, c, g, or t
  misc_feature (797)..(797): n is a, c, g, or t
  misc_feature (809)..(809): n is a, c, g, or t
  misc_feature (822)..(822): n is a, c, g, or t
  misc_feature (884)..(884): n is a, c, g, or t
  misc_feature (902)..(902): n is a, c, g, or t
  misc_feature (936)..(936): n is a, c, g, or t
  misc_feature (938)..(938): n is a, c, g, or t
  misc_feature (968)..(968): n is a, c, g, or t
  misc_feature (986)..(986): n is a, c, g, or t
  misc_feature (1408)..(1408): n is a, c, g, or t
ggatggctctgaagtggacttcagttcttctgctgatacatctcggttgttactttagctctgggagttgtggaaaggtgctggtgtggaccggtgaatacagccattggatgaatatgaagacaatcctgaaagagcttgttcagagaggtcatgaggtgactgtactggcatcttcagcttccattctttttgatcccaatgacgcattcactcttaaactcgaagtttatcctacatctttaactaaaactgaatttgagaatatcatcatgcaacaggttaagagatggtcagacattcaaaaagatagcttttggttatatttttcacaagaacaagaaatcctgtgggaatttcatgacatatttagaaacttctgtaaagatgtagtttcaaataagaaagttatgaaaaaactacaagagtcaagatttgacatcatttttgcagatgctttttttccttgtggtgagctgctggctgcgctacttaacataccgtttgtgtacagtctctgcttcactcctggctacacaattgaaaggcacagtggaggactgattttccctccttcctacatacctgttgttatgtcaaaattaagtgatcaaatgactttcatggagagggtaaaaaacatgatctatgtgctttattttgacttttggttccaaatgtgtgatatgaagaagtgggatcagttttacagtgaagttttaggaagacccactaccttatttgagacaatggggaaagctgacatatggcttatgcgaaactcctgganttttcantttcctcatccnttcttaccaaacnttgattttgttggaggactccactgcaaacctgccaaacccctacctaaggaaatggaggantttgtacagagctctggngaaaatggtgttgtggtgttttctctggggtcantnataagtaacatgacagcagaaagggccaangtaattgcaacagccctngccaagatcccacaaaagatataaagagaatgttatgaaattatcaagaattcaacatgatcaaccagtaaagcccctggatcgagcagtcttctggattgaatttgtcatgcgccacaaaggagccaaacaccttcgagttgcagcccgtgacctcacctggttccagtaccactctttggatgtgattgggtttctgctggcctgtgtggcaactgtgatatttatcatcacaaagttttgtctgttttgtttctggaagtttgctagaaaagggaagaagggaaaaagagattagttatgtctgacatttgaagctggaaaaccagatagatgggatgacttcagtttattccagcaagaaagaaaagattgttatgcaagatttctttcttcctgtgacaaaaaaaaaaaacttttcnaaatctaccttgtcaagtaaaaatttgtttttcagagatttaccacccaggtaatggttagaaatattttgtggcaatgaagaaaacactagggaaaataaaaaataatataaagccatatgagctcatattgaaatttgttgcacttatattgagatttgttgtttgaattcacaagttacatgaaaaaaattttactcagcttaactatatttcacacattttacataaacacaagaacattaagaagtctactgacagtatcagtactgttttgcacatactcagaataatttgcttcattttgaacagaattctgttgttttaactgttgctaaagaaagtattacatagttaaattgta

SEQ ID NO: 265441 - DNA, 388 bp, Homo sapiens
gtctgagtgacagagcaaaattccgtctcaaaaaaaaaaagaatctcaaaaaataataatgagcaaaattagcaaatcacaaaacatatgctgtgtgactccctttatgtaaagttcaaaaacaggaaaaactaagcaataatttgcttaggaatgtatacatgtgtatgtgtgcacatgtaaaactatctagaaaagcaaagaaataattttgaaaatctcaagataatggccacagtaagagagagaaggatcagccaccaggagggtaatgtaggatttctaagggtatagttaaattcaacctcttaaaccaagtgctgggtacatggaggtctgtttttttattattacttaatatttattaatattattatttaatagtaaa

SEQ ID NO: 265442 - DNA, 610 bp, Homo sapiens
aagtataccggagatgtgaactgatttataaaccaacctacagactatcttctatcttgctgcatttacagccaacatgagattatgtatgtactgactgatgatgggcaatgtaattagctttagagttgttaagagttaaataattaatatgttaataaattgttaagagttaaatcattaatatgttcctagacatctttttatcggttcatgttatttagttcaggcttgcttggtaactgaggaaggaaactgttttcccaacctcgcatatcctcacctgttccctacccacatattcatctcaatgtaaagcatgtttgggacttgctcaattcagccaaccccaccctagtctggctatcacccccttcattgccaaagttctccctcctttactgccaagtttcttgaaagagtgaagtttattatctctgcttcctcacctcttcaacatttctcaatctggagcaatctggctgtttccctccacctctcactaaacctctcctcaccgagtctttgctcacagtggctaaatccaagtagtgtttcttgatccttctgctgtatgctccacagctgccctgtccaacacggcggccgc

SEQ ID NO: 265443 - DNA, 552 bp, Homo sapiens
ggcctggtcctatttcaaaacaggccgcaaagaccaagatagccccaatacagcaaaagctcatccctattatagtgattctttaataacaaagaaacagtcatgagcgtggaacaaaaagccatccctcccctcgtgccgaattcggcacgacatgggttcccgctgtgccaagctcaacacaggccagagcccaggccacagcccaggccacagcacgggccatggccggggccacgaatcctccatgaaaaagctcatggcctgtgtgagtcaggataacttctccttgtcatcagcgggcgaggaagaggaggaagaggaggaggagggggaagaggaggagaaagaagagctgccggtgcagggcaagctgctgctgctggagcctgagcggcaggaggagggccacaaggacaacgccgaggcccagcagagccccgagcccaagcagacaccctcctgacccgcaacgaaggcccaggaagggacgcccactgctgctccggcgacagtgttcagagaagagtcaataaaaagtctctgaggaat

SEQ ID NO: 265444 - DNA, 522 bp, Homo sapiens
tctggtggtgacatggagccttgaggatgggactatacgcatgagactgggatcagagtggaggcagctggcaaggaggcagtcaggagaccctactaatatagggaatccaaatgaaggagaaaaatcatgatggcacagctagaaactaatagagaagaaaaaataccccaggcattttggccttgttttacaacatatttcttagctttttgatggcaatggaagcttttttgaagttgtcttttgtttcctgcctttactgtatgctctgaattcccttctctttcatgctttttggtttgcatctattctttcatattggaggctttgctcaaacattctgtggaccttatctgtttgcatatatttaaatgcaaggcactgaaagacaaaagacctattcaaggcagagtacaaagtggaccagggcaggctgatttctcaacctctctgtcgtgagttgactcgtgtactcccaaaagctatgttgaagttctaaccccggtacctgtgaatgtg

SEQ ID NO: 265445 - DNA, 352 bp, Homo sapiens
ccccacaggtggccgagcacacacagtccagtgggctgaggtggccccaagggcaggaacgtggcatctcttcccaccagtcagtggctctgggggcacaaggacttgtcgggggaaggaggcagcaaccgcaggtcagaagctggaagcagcggccactcagcaaatgacacagctgagccggaaaacccagtcccagggctgtgaagagctggggccggcctcacgggggctccccagtttcccctgcccggccctgggccggcctcacgggggctccccagtttcccctgcccggccctgccctgccctgccctgccctgccctgccctgccctgccctgccctcccct

SEQ ID NO: 265446 - DNA, 300 bp, Homo sapiens
cactggccttgtcctcaagatctctctctggctccctttgaatttgctaattcagactttcacatttcccccaggaaaaatcataaggaccaaatcatatccgttttctcaaatggcttcaaagacccatgtcatcgtttggcatcatgtaattctttactgatgtactttaagagtcacgttttattctctttatgcagctgtcaaggacagacacaaagagtgggggtgtcttcctcactaaatactttcccacaacactccagagtagattcatcatttaaataaacactaacagct

SEQ ID NO: 265447 - DNA, 430 bp, Homo sapiens
tttttttctcagcagtaactacattcctctgagatagcaaaccatcccattagaagaaatgaataacttgtttgtatattaaatctgtttttattagaataggggttagtgtggacattcatttaggtgactctgtggaataacttaagaaaatgtattatctaacagaagaggccagactttcgataaagaagatcaggtctttggttctggatgtttggtcttgttttcttgtttggcggttttggggagttttgctctcttttattttattttgtcctccagatgaaagtggggatagatgctgttggtgctctgcccacatcccctttactgagcaggacacaatcccaagctgccatgactgttgtctaccaatgattcacagctgccactctctccagagaattgtctttagcagacaagggtc

SEQ ID NO: 265448 - DNA, 294 bp, Homo sapiens
agggaggggtggttcgcaggcagggagcttgtgtgcccccccaccccactcacagccaacttcccatgagtgggtttaagatcatcaacttgttgctgagatgacttaaacatgatagatttcagcggtaaataatttttacattctggatgaaatgaaaccagacctcctatttaattttaggtaactaaaagcacttagctgtaataaatgaagctctgttttccaagtcaaaagtcactgctccccaagctcccacaaactcagaattctatgcaaccataatgcactttc

SEQ ID NO: 265449 - DNA, 521 bp, Homo sapiens
ctcgaggccaagcaaattggggaagacttcagaacaatcttagaaaggtgaaagcagcttagattataggattctgttaaagagcactccactccccctgaaatctctctgttccctctacaattccacaggcctctgatagagattactccaaaaattctggcaccacataagtctttggcttttaaatcagtttcaccctggggtatcttgacagcaggattgacagagcttatccctgactgtataccacaaaacaaacagataccagcagggtaaaggcaatttgtcttagtttgccatgaaaatgactaatattgattactctctgattcacagctgcagtcctccaccctgatagtaacggtttagtgctgcaaactcttctgttctgttgttatatgggacataatatatagataagtctgaaagccctaaaggacagcaataaaagtgggtggacttctcttcaataagtgtctaaagcaggtggccacaagcaccctctaacatctcaattt

SEQ ID NO: 265450 - DNA, 293 bp, Homo sapiens
tttactgagccagagaactttgaaaaggcatagatttaggggatgaaggtgatgagctcagtttgaggtttgaggacagatgagaagcaggagacagaagcaggatatctgagaacaagatggcgcgagaagcaggagacagaagcaggatatctgagaacaagatggcgcagctgtggtttaatgcatgcccagcatgtgagaacttgtctggaggttccagcagggggcgctatgactcatgaccgtgcctctagctgggctcctcatgcttttcatccaagcatgtggcc

SEQ ID NO: 265451 - DNA, 300 bp, Homo sapiens
ggtttggccaaacagtcctggtttacctagcacagttctggtttgctgattgcctggtgtaatgattaatagcactgtcactccccaaattgtcattgtttggataatgaattatatgcatcctttttagagtaaaagtaacttttttctccttaaactggatggagggcatgtgggtctttatcattcttccttatacatgtatttttaaaatataatttaaaactagtcagtattttaaaatataatttaaaactttagtcagtgttagtcactgtgttagtgacaacacagtaaaaa

SEQ ID NO: 265452 - DNA, 186 bp, Homo sapiens
cacacagacaatgtttaagaaatgtttgttattgttattactatgtctctgtatatatgcctaggaaaaatctggaaggataaaataaaaaatgaatatttttgggtggtgagactaaatttttgtctaattttatggataagttttatgatttatatttataataaaaataaagctataaaaatt

SEQ ID NO: 265453 - DNA, 495 bp, Homo sapiens
atatcagaaatgaactcagaagagaagaagactaggctgcctgaagagatctcaagaataatcgtagaacgtgctgagaattcaacattctgaggtataatatctcagttagcctatgaagagaatgttgtggatctccctccaactcacttcacaagtatttagattcaaggctgggcacaggaagcagatggcaggtacaattgctgagagttgcaatctggtctcagcaaaactggtatcacagggacataattcacttatgctgacgtgcaggtgcttttgcgaaaacattgtcgtgtagcagaaagagcatgggctttggagtcacactgacctaggttgaagtcttagatgagttctcactttagttttctttctttaagatgtagataactcctaccttgcaccatgatttgaggactaaataaggaaaataatattaagttctatagcaaccctgaaacacacacattaaaagtatgtcttttcttc

SEQ ID NO: 265454 - DNA, 392 bp, Homo sapiens
ttcgtggggaacattctgagaattaaatatagtaatcaatatagaaattcctggaataatccctggcagagtgtagaccctcaaaacatgttagatcttaacatgattcctccttaagcgtcttctacctgaaagaatcttttattctattcatattttcataattcagttggatttttggaggtatgaactgtgcctttttgtatagaaatatctagcaaaggtaatttggtctttaaattccttttactttcttggtattcattgaagaccaaagacgctttgttcatgtggatccttgaatggattgttgctgcttaccttatcttcctctcccacctactcctattgaataagggttcataattatccatctaaaatctacagtaatt

SEQ ID NO: 265455 - DNA, 267 bp, Homo sapiens
tttttttactgtttttctctgccattcactggcacaagaaatgatttctctaaaatataagttttaattgtggaataatcttggtaaaatggttttgtggttcctcatcttgtataggtaaaacctaaactccttttctttcaaggtctccagacttacctatctggtcttatctcctgccttcctgttctaagctcttttgcagtttagctgctattttcccattcttattcctactccctgatatctcttctgcctgtctaacac

SEQ ID NO: 265456 - DNA, 237 bp, Homo sapiens
tggctctccttcatgattgacatggtgtagagtttgcaaccaaaaggtaaaaaggggcaaaggttgggcaggtctggacctttctccactatcatgaattggggagcagcctttagaaggcagcagctaccaggttgagcctcccctcctcagggtaggtaagaagcagagaaagttgagacatggacaagagagggactaggaagaagtgttaccatgggaaccagatggggtcct

SEQ ID NO: 265457 - DNA, 596 bp, Homo sapiens
agagaattggagttctgttaagggagaagtagagaatcaatactgggtaatcacctagtggtctctgccatagcaattgtctgatattctgcaattgagcatatttcaggccgtgaacatcggacatggttttgtcttcacaatggcagcaaatttagataaaattttgtttggggtcatcttgtgtgcatttcttctgtatcttcagcatggtctgtgcctttgtctttttgcagtatgtttttcttcctattgatactttctcttgtctcactaagagctttgttctttgataaaataatacagattgataaattccacaaaggaaaacaacgcactgaattaaaacagactatttaaatacagaagcagcattctgttcagataattctcagtagggccaaatctttgttcatttttaaataaaatgatctattcattcacattaatatgtgttaatgaaattaatgtggcatggtacttaatattattaattgtgttaaatgttcatgcttccatgagggccatttaagaagaggtactcagttggatatacaggtagcatacagtaacatttaaaacttctatcgtgtata

SEQ ID NO: 265458 - DNA, 287 bp, Homo sapiens
cccacagttccatcccctctagacagcagcctgcctcacagtggtgtcccaagagcactgggcgtcaagaggtaaaatgcctgggcattttctctgaagcacctgttaccactgtcccttcaggctgtgattcctggccaaaatgcacccattctttttgacacacttgggagggtctgggattgtgagacttgcagaagggtcagatgtcttgagtcactgagagggctgaagaaggaatatgtagtctgcttcttgacatttgttactggcccgggcctgcccca

SEQ ID NO: 265459 - DNA, 852 bp, Homo sapiens
tggctaatttttgtgtattttttataaagactgggctttgccatattgcccaagctggtctccaactcctgggcccaagcaatcctctggccttggcctcccagaatgctgggttacaggcatgagccaccgggcctggcctgcatctttatttaacatgttccttcaaacagctcactgccaaggtcatttctttttctcagaaccatacttcatttatttaagagccctttccgattgcctcccccagaccagaatgcagtcactagcgtgataagagtctttatagcttgaagtacctgctgttctcttttcttttccctactggtcttatgtacaccaatctgggtatccaaagccctttccttcatatgtacccacttcctggcctgagataaacacatttctgggatccgccatcacatacctaaatatatccaaatatatccttatctttctgagatttttgagtgatttaaaatttttcatcctttttgtatgttccagaatttctaattttttttttttttttaaacagggtctaactctgttgcccaggctggaatacagtggtaccattctccacccactgcagccttgaactactggaccaaagctgtcccaccccagtctcccgattagctgagactacaggtgcacaccacgtgcccggctaattaaaaaaaacatttttttggagagatgaagtcttactatgttgtccaggctgatcttgaactcctgggctcaagcagtcctcccagctcggcctctcaaagtgctgggattacaaacgtcagccactgcacctggccctgattttttttaagaaaggagcatgttttttaatca

SEQ ID NO: 265460 - DNA, 441 bp, Homo sapiens
cttaatgatattacaggtctaacaatgatctcaaacttaagaaaaattagaaattctttttagtcacatactgtataaaaattaaaaactgattcaaagagcaggcatatcataactaacaggaaagtccaaaaatttgatcacaggcataacttccaagttttacatgtccagctaagtcatttctctaattggaacactggacaaagaaatattcaaaagtatcttcttgagcctggcacagtggcttacacctggaatcccagcactttgggaggccaaggcacgtggatcattagaggtcaggaattcaagaccagcctggccaatatggtgaggcctgtctctactaaaaatacaaaaattagccaggtgcgcacctgtaatcccagctactcgggaggctgaggcaggagaatcgcttgaactcgggagatggag

SEQ ID NO: 265461 - DNA, 425 bp, Homo sapiens
gtgacagagcaagactctgtctcaaaaaacaaaacaaaaataacattagaaagtaatagatgaatatgtttttgcttgattttatgagtagacacatgggaacaattcctaagtttgtcttgagcactctataaatagtttaaaagaaaaccaacagtgcttaaaattcaaccaatacagttagaattacgacttgaaaagagggtatggctattacatattgctgtaatatgttctactttccttacaggagaaaaaaaattagctgggcatggtggcacgtgcctgtaatcccagctacttgggaggctgcagcaggggaattgcttgaacccggaaggtggaggttgcagtgagctgagattgcgccactgcactccagcctggcgacagagcaagactctgtcccccctaccaaaaaaaaa

SEQ ID NO: 265462 - DNA, 518 bp, Homo sapiens
ctgtaatcctaacactttgggagaccaaggcaggcagatagcttgagcctaggagtctgagatcatgccactgtgctccagcctgggggacagagtgagactccatcttaaaacaaacaaacaaaaactaaggtggtattaatcagaactagaatgttataaatatatgttaattgtaccctcaggggaaatcactaaaaaaaaattcaaaaatatatattaaaagagatgacaatgctgggcatggctagctcacgcctgtaatcccagcacttcgggaggccaaggcaggcagattacctgaggtcaggagttcgagaccagcctggccaacatggcaaaaccccatctccactaaaattacaaaaattagtcaggtgtggtggtgcacacctgtagccctagctactcgtgaggttgaagcacgagaatcgcctgaacctgggaggtggaggttgcagtgagctgagattgcaccactgcgctccagcctgggtgacagagcgagactccgtctc

SEQ ID NO: 265463 - DNA, 384 bp, Homo sapiens
ctcttgctcttttccttaccaaaatttggtatgcatgatatatatttttaattttagcattctgtggttgtaaagaggtatctccttatggttttcatgtttatttccctaatgaataatgagattgagtatattttcatcatccttactttgttatgtatatttccatctgcctactttttaactgatttgtcttcattataaataagtgatataaatttttatactggttacaaatctttttcagatatacgtattttaaatattttctactagtctgtaacttgaaattaattttttaagggcaagttttgatgagcagaagcattaatattaatgaaatttaatcaatcattttcttcacattttaagaaatctttatcc

SEQ ID NO: 265464 - DNA, 354 bp, Homo sapiens
gcctgtagggaagggggccacattaactttactgataaacatataccgaaaggtttcaacatgtggatattttctagctatgtggcagcgttcttgctctttttaactcaacagcatatattttcaaaataaccttacataaaaagaattataggaatatccaagctagtgtgcataaatgagacaatttcaaacaaaaaaatatatttgtacattttcatattatacctaatcatttaagctgtttagattctgtatgagagcaaatgaagattttcactgcgcaatacttgttatgttttgctttgcttttataaaagcagaagttacttcataaaatatgtatgcatgttc

SEQ ID NO: 265465 - DNA, 485 bp, Homo sapiens
gagaaagagtacgctttggaagacttgctgcactccaggaccgtcactagcgtgatggctgcaactatacccaccctaatatctgtcaacacgagcaggggcaacttaaactctcaaaagtctcagggttctcacccataccattagggtgacgctcgtgtgcatcttctgtggctgatgggtaaattaaacaggacgtaatgtgtagcgtactgcatgtggtggtcattggtagctgtcagcagctgtaacaggagaagttggctgtctttatttcccctcgatggaccaagcagctgctggatcatggccacccagcccctctgaaggagtgctcggaggaacacaagggggctggtcttccaagaggagccctctagcatggcagtggacggggttcaagcccctctgatttattatcctcattctgcacttccctgtagcaagtcacatttttttctcttagcaataaaatggggccttca

SEQ ID NO: 265466 - DNA, 625 bp, Homo sapiens
agttcatagatcaacagcatcccaagccagaagaatttttcttagtacagaaccaaatggagtcttctatgtctacttctttctacacagacacagcaacaatctgatttctgtatctttttcccacatttcccccttttctattcaacaaaaccgccattgtcatcatggcccgttctcaatgagctgttgggtacacctcccagatggggtggcggccgggcagaggcgctcctcacatcccagacgggcatgcccagttagttttaaattttttgtagagatagggtctcactatgttgcccaggctggtctcaaactcctggcctcaagcaatcctccttccttggcctcccaaagtacagggattataggtatgcaccactgcatctggccacaaacattttgttttcttactgttcatttttcaagacaggttttcactccagcctgggtaacagagcaagaccctgtctaaaaacaaagcaaccacacacacactggaggacaaaggcaatgagatggtatattcaaagtgctgaagaaactgtcaaccaataattctatacctggcaaactacctttgaaattgaagagaaccgtcgattcgagggaatcctctggt

SEQ ID NO: 265467 - DNA, 527 bp, Homo sapiens
atgtaatgtgtgacaataacagtataaaggagggggtgagagtggagctttagagaagcaaagtttttgtataccattgaaacaaagttggaattaatctgaactacaacgttataaaattaagatgtagctgagactacaggtgcgcaccaccacactcggctaactaaaaaaaatttttagagatagggtctcactatgttgcccaggctggtctcaaactcctggcctcaagcaatcctccttccttggcctcccaaagtacagggattataggtatgcaccactgcatctggccacaaacattttgttttcttactgttcatttttcaagacaggttttcactccagcctgggtaacagagcaagaccctgtctaaaaacaaagcaaccacacacacactggaggacaaaggcaatgagatggtatattcaaagtgctgaagaaactgtcaaccaataattctatacctggcaaactacctttgaaattgaagagaaccgtcgattcgagggaatcctctggt

SEQ ID NO: 265468 - DNA, 317 bp, Homo sapiens
gcagtttcactcctgagccagcgagaccacgaacccaccagaaggaaggaactccaaacacatccaaacatcagaaggaacaaactccagacatgccactttagagagctgtaacaatcactgcagggtgttctcagcttcattcttgaaggcagtgagaccaatgaacccaccaattccagacacactaacactttgcaagactgagctggaaaggatcacttgagcctaggaggtcaaggctacagtgagctatgatcacagcactgcactccagctccagctggggtgacagaacaagaccatatctcttcaaa

SEQ ID NO: 265469 - DNA, 591 bp, Homo sapiens
cacgaggatgaggaatggaatcagaaaacctaagacatgcatctgtgtgatagcaatctcactttcctcacttagctttttctgtttccctactctgcacagattggagacatctgagttttctctgcccccatcacctgcacctgccctggtggcatgcacttgcacctcctctgtctggtattaggttggtgcaaaagtaatttctgtttttgccattacaactgcataaactgcgattacttttgcaccaacctaataatagggcttgcccctccagaggatagaatctttgcttgtcaccttagaacttctcacacagagcactgcattcatcaaaccctggtctcagccatcctcggggcacatggaaggtcatgcccataaatcaatgcctcagccaacatctggtctccccttctgccattccctgtgtccctgccctggcaccaggcatttgcaggtgcagggggcaacatcatttagttagcttcatctgggcagggaggagcattattaaacatgagagatagctgttggctcatggaaaagattagttttaagctatttaaggcaaagcaataaaggatg

SEQ ID NO: 265470 - DNA, 364 bp, Homo sapiens
tcggctgcctgatatctgtgtctttcagggcagtgggaaatattccagctgcttcttcttttttttttagaaataaagttgtcatcttaatttcatttttatagggtttattactagtgaatagaaatagattttgtggccaggtgcagtggctcatgtctgtaatttcagcaatttaggaagccaaagtggacataccatctgaggtcaggagttcaagaccagcctgactgacacggagaaatccagtgtccactagtgaggcaggagaatcacttgaacacaggaggctgaggcaggagaatcgctcgaacccaggagacggaggttgcggtgacccgagatcgtgccattgcattccagc

SEQ ID NO: 265471 - DNA, 1288 bp, Homo sapiens
agctacagcaccgacctccaggagttggtgcagtggcctggggtggcagccggtgtgcctgattgccctggtcgggcgttcagggcagggagcagaatggccactgcagaagggatgtgcctgtgagtggtttgtccccagcaccaatctgctgtttgcggacatactatgggcagtgggtgctggccaagagctgcacgtaggttttctgttgactgtccatgcagggctacatggcccatactgtcagccccagctgtggaagtgggggctcatgaatggagtttctcatccaaggtcagtcgcgctggtggacggccctggctggaggcctacatcaccatccagggactccccacagtggccctcctgttgccctggaggctcaggtctctgaccttccatctcccatctgcaaagcactggacactggggttccgggcagatgcacggagtggcctggacatgcccatcacagccctaggataacccagacgggccatcgagacctatccacactctgtggagaccaatggaggaaacagctcagtttcaggctgtgggcgtctgaatcaaagcggggactgggaacaaggtgctcagcggacactcagcaaacggcctgaacgccgacgcctctcccgtctctgtctcctgtcttcacaaaaggaaaacggaatgcctttctggcatccacccagctttcccggatcccctgccagttgtcattttcagataacttgaattttatattttatgccaggatttttaagcccccaggatcttttcacatctgcacagcttggcttggaatcctcagctaggaccatccttcctccccaagaaccagggcctcatctagaaggtagggcagggaaatgagggtccacatgtggtccggcccctcggcatacagggagatgaccaggcctgggaaatgtgcccttcgacgggctggtgacaaggccaaaaagctgggcaaacacattgcagagatcctcccaaactaaaaccactgagagtacaagtgcaaaacattcccttttaagccagtaggggcttgacagctggagaacttgaaaacaacagggcacagttcacaaaatcaaaactcatggaaaactctgcgcgggtgagtcagagtgccagcgccaagtttcctggcatgcaagaggaggctcccccgctcaggcagatttttttaaacatctttttaataaattgaattgagacctaatttacataaaataaaactgacccatttaatatccagtttaattatcttgga

SEQ ID NO: 265472 - DNA, 453 bp, Homo sapiens
  misc_feature (28)..(28): n is a, c, g, or t
caactgcaattttattttcttttgtganaataaacaactgggagtttaaattgctccaaaaaccataaaaacaaaaagaaatacacacagaagaagcatgtgaggtgatggggaagggaacagaaacagctcattgctcaatgcccaaagatagcacgttgggcctcaggagcacctactcaatttagccactaaaaaattagaaacaaccgaaatgcccccaaataacagaatagctatacaaatgatgatgcctccgaatgatggaatatttggcaaccatcagaaagtttgctttttaggagctgggtgtggtggcccacacctgtggtcccagctactcagaaggctaaggcaggaggatcccttgagcccaggagttcaaggctcacaaatgtgaacagccactgcactccagcctggacagcatcataaaactctatcactttaaaa

SEQ ID NO: 265473 - DNA, 673 bp, Homo sapiens
tgtttttcagatgggctgtgggagggagctgctttctaattcatcaggtcctaaagggactttcacgtgagagaactaatccaaactcagtgatggtgcaagggtacttcttacctctagggacagtctcgggtatgtcttcatcagcagcatgaaaaaggactaatacacccagctacaaactatcccttaagctaaatatgactggcttgaatggagcaactgtagaagtaatcagaatccccaagtgagtggaacaagtcagttctaaaagggagaaaaaccttgggaatgctggaaacagacagctcaatgggcatattcagaagaaaacaatagataccagtcttttccaaagtgtggtgtgaagagtactgctcctgtaaatttaacgaaattttccatgggcaagaaaaaagttctaggaactcctgagaactgagaaatgactgtttaatgaacaaagagagaagtgacaatgagactgccctgtccagagactcccaaataaagaaggagtgggaaagtggaattagcaaagctcttgtaatcatagcaactcatttgagaagagctttggcaattatcaaagcaatccttcctgcattaagaagaaactgtttcctggatgtcactcgagtgactttctggcaagccccaagtcaacctattg

SEQ ID NO: 265474 - DNA, 723 bp, Homo sapiens
tgtttttcagatgggctgtgggagggagctgctttctaattcatcaggtcctaaagggactttcacgtgagagaactaatccaaactcagtgatggtgcaagggtacttcttacctctagggacagtctcgggtatgtcttcatcagcagcatgaaaaaggactaatacacccagctacaaactatcccttaagctaaatatgactggcttgaatggagcaactgtagaagtaatcagaatccccaagtgagtggaacaagtcagttctaaaagggagaaaaaccttgggaatgctggaaacagacagctcaatgggcatattcagaagaaaacaatagataccagtcttttccaaagtgtggtgtgaagagtactgctcctgtaaatttaacgaaattttccatgggcaagaaaaaagttctaggaactcctgagaactgagaaatgactgtttaatgaacaaagagagaagtgacaatgagactgccctgtccagagactcccaaataaagaaggagaatatccatcaatagctgttcccctcatcaatggagtctgaataagtgcatttttgtggatcaaacaaaagctctcagaaggagaaactctggtagaaggaggtagtcatacctttatatttaccttgtaagcttttgcaactccgtggtgctacttcgacagcctcatcttctgttttccaacatgaaattattcctgtgagg

SEQ ID NO: 265475 - DNA, 454 bp, Homo sapiens
agttgttatggcctctctatacagtagacatccaattctttgttaactggaaaaaagtttcagaagtttaaatttgaagtaacaggaattggtccaaaatatttgttgttgctcatgttttaaataagcgacattggattatatcagcactgggataattcccattaggtattatgactgcaatttacatgcaattggaaattagtgattgagagggaaacagattgccaaattatcttccaaaaaggtactccccactccatatccttgctaataacaagtattataattatttaaagtcattgccaacttgataggcaaaatattgtcttgttctaatgttcatttcttctattgtgaaggcgaactttttttttccatgtttcttgatcctatctgttgatgagggctggaagttcaagaaagtataaatttaaattattttaacctgaaa

SEQ ID NO: 265476 - DNA, 333 bp, Homo sapiens
gaaatttcttcccagatccagctgtcatttcacaaaaatccccaaggcctgctacatcagagaagaagtagaaaggtgaataagatagtcctcgtctgtgcattgctggcttttgttttttaacttttagttcaaaataattccagactaacagaacatttcaaaattttaagtagaatacaaagaatttccaaatagcctacaatcagattcaccaatttttttttttttttttttttttatgagacggagtctcgctctgtcacccaggctggagtgcagtggcgcgatctcggctcactgcaacctctgcctctcgggttcacgccattc

SEQ ID NO: 265477 - DNA, 425 bp, Homo sapiens
gaatgctcctgtctagtttttatgtgaagacatacccgtttccagcgaaggcctcaaagctgtccgaatatccacttgcaaattctacaaaaagagtgtttccaatctgctctatcaaaagaaaatttcaactctgtgagctgaatgcacacatcacaaataagtttctgagaatgcttctgtctagttttatgtgaagatattcccgtttccaacgaaatcctcaatgctgccctaatatccacttgtaaattcaacaagaagagtgtttcaaaactgctgtatcaaaggaaagttttaactgtgagttgagtacacccatcacaaagtagtttgtgagaatgcttctgtctactttttattattattattattctttaagttttagggttcatgtgcacattgtgcaggttagttacatatgt

SEQ ID NO: 265478 - DNA, 420 bp, Homo sapiens
ttggccaggtatggtggtgggcgcctgtaatcccagctactcaggaggctgaggcaggagaatcgcttgaacccgggtggtagaggttgcagtgagctgagatcaggccattgcactccagcctgggcaacagagcgagactctgtctcaaaaataaataaattaattaattaaaaaaaaatagccaggtgtggtggtggcacatgcctgtaatcccagctactcaggaggctgaagctgaaggatcgcttgaggccaggaattcaaggttacagtgagctatgatcatgccactgtactacaggctgggtgacagagcaagaccctgtctccaaaaaaataaaataaaaatttttttaattgctatttctgaaaactacattggatgctttagaaagactcaataaaggtgacttgatt

SEQ ID NO: 265479 - DNA, 404 bp, Homo sapiens
tataaatacatcattctgatttctgcctctgtcttcacctagctatcctctctgtgtgtctgtcaaaatttccctcttcttataaaacacataagtcatattggattaaggcccaccttgatgacctcaccttaactaattgtaactgcaaagactatttgcaaataaggttccattcataaggtttggggtagacaaaacttgagaacagagactcattttcttctaaaatgctttctctgaaagatttttaaaaagaaaagggtggaaatttgaaagaaaaataagtctcaggaccccaaaatcagtaagccaaagggaaaagtcaagctgggaactgtgttaggcaaacttgcctcccattttattcccaaataagatagccacaaagatttaaaaaaaaa

SEQ ID NO: 265480 - DNA, 424 bp, Homo sapiens
caattttcattcaaataatattttaacacttcaaatatggtgtaagaatattacaaaaccccattactttcatatctccctggtttttaggcaattattatcataaccttcactcctgcattagctataaacctcatactacattctaataattttaacagtcattttacttgtggattaaattataaatttaaaaatgtacttttacatttaaccatatatttataatttcagtgctcttcaattaattatttatgtatgtattttcatctagtatctttttttcatattgaagacttttcttcaatgtttttcttagtgcaggtctcctagcaataaaaaaattcttatctactttttcttgtatttttgtctaaattgttttcatcttgacttatattttaataaattttttgctgtatat

SEQ ID NO: 265481 - DNA, 174 bp, Homo sapiens
attactgccaggcgggaatgtggactcagtgttgctccatcttctgattttttaagagaaactggaaaactagatttccatgtaaaacatcttaattttcaaatgttggctcagttttcttctttaaattctatacgtgccaaataaaacatattttcaggctagctttggcca

SEQ ID NO: 265482 - DNA, 224 bp, Homo sapiens
actaaacatttttatcttttttatttgtctatcattagacacatgaggtcacaattttctgtatgccataaatatagtaggcaatatctttcgcagaaaatggttttcatttcaatttttcaaatattaatgatatctgacaaaattttggcacagtttagaaacactttctgaacaaaaggagatgatacacatcatagctattgagtatgagtttccatgta

SEQ ID NO: 265483 - DNA, 152 bp, Homo sapiens
tccatattttttgtagagactcggttttgccgtgctgctcaggctggtctctaactcaagtgatccgcctgcctcagcctccaaaattgttggattacaggcatgagccacttgaaccagccagcaccaaactcttctgtagcagctgcccc

SEQ ID NO: 265484 - DNA, 295 bp, Homo sapiens
gcagtggaaagtggcccagagcgtggtcgtgaggggaaggttaggagggacgtgttcgggatgccagtggccagcgtgaactgactgcctgccggtgggcccactgcctgccgaccacaggagaaatgccctgtgtgcctgacccgcttctgactcctggttcctgggccctagcagtagtggcaggaggcctctctggggcatgaagcctgcgcctgtctcctgtgccatcgcgccaggtcactgcagctgtggagcccgcctgcccgccctggccttctcgtccgtgactgct

SEQ ID NO: 265485 - DNA, 409 bp, Homo sapiens
gtatctgttttgctctcctggtattgctcctattttagtggtaattcctgctcagctgctttgtctggttcttactcatttacctaacatgaaaaagctagagtacctcaaggctgagtgcagtttcactatgggaaacctgtaagccccataaattgcaaaatgataaaaaatatagtaagtaaagaagaatgaatcttgtaaagaatacctcacttgtgtccatctttcatcaatcatcacacactatgaagtgttcctctgttggcaaatacaaaaaaaaaatttttttatgtgtaaactatatatttatttaaaatgtttttattatcaagcatatataatttttatatgtgaaaattgttttgttatttggtttgtcatgaaataaatattttctcaccaatat

SEQ ID NO: 265486 - DNA, 167 bp, Homo sapiens
actttgctactccaaggtagaaaacataccttaaaaatacttatgttagaacttaggtggaagtgatttttagtccttttatatttatacacggaaaaaaaaacctgtgataatttattaggatggtttaaagtctcctgcaggtatagttttagaagaaaaaaaat

SEQ ID NO: 265487 - DNA, 165 bp, Homo sapiens
aatatgttaaaaaaaatctccacaaaatgaaaacccattacagtatattttgctattacagctaaaaaaaaaccccaggtaacaaaggaactaattctgtgagaaataaagcattcatttaggctgcagttgtcactggttttggaaaaagacaagttggatgtt

SEQ ID NO: 265488 - DNA, 845 bp, Homo sapiens
agataaggatacagggctcgaagaacgaaggtgacctgcccaaagtgtccaaagccacacatacaaagcaacaaattagggttttaagctagcactgttagacttcaaagcctcttaaccattctactgccctgctgtagggcatggggagatggggggataagccatggttgccatcaaagagttaatataacaataacatgcagatggatggcagctcctgtttattggcaccagctgtggtccaggtacagcgctaagcactataattacactgttaagtcatcagaacagaagctccccacaccagctctaataggggtgagtgttggacataagcagggagctgagaagaagccaagacaaggccggttgcagtgactcatgcttgtaatcccagcactttgggaggctgaggtaggtggaccacctgaggcaggagttcaagaccaccccggccaatatggcaaaaccctgtctctactaaaaattacaaaaattagctgggggtggtgatgcacgcctgtaatcccagttactcaggaagctgagggagggagaattgcttgaacctgggaggcggagcttgcagtgagcttataatgggccactgcacactagcctgggcaacagagcgagattccatctcaaaaaaaaaaaagccaacactagagatccttccactgctgggctctcaaagtctggattccaagcacctccaggtttctatttgggcatatttacataatttcgcattcgatgcttataatttttttatataacaagaaaattttatgcatctcaaatgtgtacattttttttttcagacagggtcttgatctgtc

SEQ ID NO: 265489 - DNA, 1949 bp, Homo sapiens
  misc_feature (836)..(836): n is a, c, g, or t
agttgggagagcgtctgtagcttccttgtgtccggccgtcagctgcagcccggggagccaggtgcagaaacggaagatgaccactctgtgactgaagggcctgcggatgagggcattcgaccacggccgcaggggtcttcacctgtctacgaatacacgactgaggctgccgactttggactccaggaagacgcccccggcaggcaaggttctgctgggagacggagatcctggtggaagcgagattcaggggactcacggacatttttcaggatgagtcgtccagaggctgtccaggaggcaacagaggtgacgctgaagacagaggtggaggcaggagccagtggctacagtgtcacaggtggtggggaccaggggatcttcgtcaagcaagtgctgaaggactcctcagccgccaagctttttaacttgagagaaggggatcagctgctcagtacaaccgtgttctttgaaaacataaaatatgaagatgctctcaaaatccttcaatattcagagccgtacaaggttcagttcaaaatcagacggcagctccctgccccacaggatgaaagagtgggcttccagcgatgcccagcacggcccacagggcaaggagaaggaggacacggatgttgctgatggggtgcagagagacccccacgaaaactctggaaggagatggggaccaagagagactcatctccaaacccagggtggggagaggcaggcagagccagagggagaggctctcttggccaaaatttcaatccataaagagcaagcgggggccgggaccccagaggtcacacagctcgtcagaggcctacgaaccnagggacgcacatgacgtgtcccctacaagcacagacacagaggcccagctcacggtggagcgccaagagcagaaggcagggccgggcagccagaggaggcggaagttcctcaacctcagattcaggacaggctcgggacagggcccttcatcgacaggacagccaggcagggggttccagagtggggtgggccgtgctggggtcctggaagagttggggccctggggtgatagcctcgaggagactggggctgccacaggcagcaggagagaggagagggcagaacaggatcgagaagtgatgcctgctcagagcatgccattgcccacagagctcggtgaccctagactttgcgagggaacccctcaggaagggggactcagggcagccaggctccatggaaagaccctggaggggcaggcacaggagacagcagtggcccagaggaagcccagggcccagccaactcctggaatgagccgggagggtgaaggcgagggactgcagagcctggaaatcgggatcgccagactgtccttgagagacacaaccgaaggaggcacacagattggcccaccagaaattagggtgcgagtacacgatttaaagacaccaaaatttgcattttccacagaaaaagagccagaaagagaaaggcgccttagtaccccacagcgagggaagagacaggatgcgtcctcaaaagcgggtactggcctgaagggtgaggaggtggaaggagccgggtggatgccgggcagggaaccaaccacacatgcagaagcacagggggatgaaggagatggagaggaaggactacagaggacaaggatcactgaggaacaggacaagggcagggaagacacagaaggacagataagaatgcccaagttcaagataccctccttaggatggtcgccaagcaagcacacaaagacaggcagagaaaaagccacagaagacacagagcagggaagggaaggagaggccacagcaacagctgatagaagagaacagagacgcacagaggaaggattaaaagacaaagaagacagtgactcaatgacaaacacaacaaaaatacaactaatacacgatgaaaaacgcttaaaa

SEQ ID NO: 265490 - DNA, 432 bp, Homo sapiens
agtttcaagatgcccaaagtggacctcaagggcccccagatagatgttaagggccccaagctggacctgaaaggccccaaggcggaagtgacagcccccgatggcgaggtgtctctgcccagcatggaggtggatgtccaggcccagaaggccaagctggatggtgcgtggctggaggaagacacagaaggacagataagaatgcccaagttcaagataccctccttaggatggtcgccaagcaagcacacaaagacaggcagagaaaaagccacagaagacacagagcagggaagggaaggagaggccacagcaacagctgatagaagagaacagagacgcacagaggaaggattaaaagacaaagaagacagtgactcaatgacaaacacaacaaaaatacaactaatacacgatgaaaaacgcttaaaa

SEQ ID NO: 265491 - DNA, 315 bp, Homo sapiens
ctcccgcccgcccgccccgtgcgccggagccgggaccagcgactggacgcgacgggccgccaggcccgcaccgcctggccgccgcgatgtgcgactgcttccacatggtgctgcccacctggcccggaacccccggcagcgtgtccggccgtcagctgcagcccggggagccaggtgcagaaacggaagatgaccactctgtgactgaagggcctgcggatgagggcattcgaccacggccgcaggggtcttcacctgtctacgaatacacgactgaggctgccgactttggactccaggtgagcctgctgggca

SEQ ID NO: 265492 - DNA, 963 bp, Homo sapiens
ctcttcgtgggcacattgcgtggcccttcgtgtggcacgtggagaacacctcctactggctgcagccatccctgcagcccagcagtgtcatcagcatcatgaagcctgttcgaaagcgcaaaacagctacaatcacaacccgcacgtctagccaggtgactttccccaatgagccggctcgttgcgtggctccttggcacattgtgggatcgctttgaggtacaagggctgcagcctaatggtgaggagatgaccctcaaacagttcctcgactattttaagacagagcacaaagagccggctctttgcgtggcccttcgtgtggctcgtcgtgtggctcatggggtggctcatagcgtggcgcatcgtggggctcttggtgtgtccttgagagacacaaccgaaggaggcacacagattggcccaccagaaattagggtgcgagtacacgatttaaagacaccaaaatttgcattttccacagaaaaagagccagaaagagaaaggcgccttagtaccccacagcgagggaagagacaggatgcgtcctcaaaagcgggtactggcctgaagggtgaggaggtggaaggagccgggtggatgccgggcagggaaccaaccacacatgcagaagcacagggggatgaaggagatggagaggaaggactacagaggacaaggatcactgaggaacaggacaagggcagggaagacacagaaggacagataagaatgcccaagttcaagataccctccttaggatggtcgccaagcaagcacacaaagacaggcagagaaaaagccacagaagacacagagcagggaagggaaggagaggccacagcaacagctgatagaagagaacagagacgcacagaggaaggattaaaagacaaagaagacagtgactcaatgacaaacacaacaaaaatacaactaatacacgatgaaaaacgcttaaaa

SEQ ID NO: 265493 - DNA, 641 bp, Homo sapiens
cctttattcctagaagctggcaggctttcttttcctcctacaagtggtaacccgaattctgagttgaaagtgaatctttgcccttggctcctctccagcattcctcactgagcgaatagggatttggaatgtcagaaaatagaagaggggaggggaaaagatgtgtgtatgactgtgagtgtttatatgtaaaagcagcttcgtctgggaggacttagggaaacttgacttcctcagactgcttccttcttataaactcttggttccttatttatcatttttcgtttttgttttttaagttgtttgacctgattttatcatagtagttccaaatgccttacagcccagtggagtcaagctaaggaaagacagcatgatttccacaggatttgtatttcttccctctggataaagtgatagtagttcccagactcgctgccggcaggatccaaggtcgtctttcctccgggatttaatctggtgtcatcaggaacctagactcaggttttattggagagcaaggctcaataagaagtgtcctttgaggagaatcaaggactcaatctaggcataaaaggtgttgctcagcacaataccctctacggtaagctaccagtcctgagaacctgtggtcaaagctg

SEQ ID NO: 265494 - DNA, 1127 bp, Homo sapiens
ccttcttgaaacacttatgtgtctgtccattgtaaggcattagtactttcacattatatatcagatgagctatcagagaagacaattcttaggaaacagggcacaaaatataaagttttaattggtttggagaataagagtcttttaagatatgtagaaacaggatgattgacaaggggattttgtgttcgtcatcacattatgatgttaggtttgcaatgcgggtagttagaaaacagttttcattgaggtccttagctggcaatgtactgtgcttcccttttggatagttagtacttatcaccacgtggcctaaaccaccaactggcctcttacataaggaatacttacagagatagggtggtgtactccctgactcagttttgctttttacataaaaacataaaaatagaacatgttgttaaatcccaggtgtaactaaattaattcgtgctgatttatcttgtaacctggaattttctctcttcatggctttttttttccttatctttggacaagtttctgacaaaagttatgctgtttgctttcttttagcctttttttcccaaatgggatggggtggtatattagagtcccctggaagtttttcctaaagtacacaatgctctgatgccttccgggacctactgtgctagttctttgtggagagggacttgggaatatgtactctgaagaaactccgagttggtttggcagtgcactgccttctcactgctccaggatgggagggtctgtattagacaaatatgcctaaattctaaacatcagagtcagaagaaccttaacttttattccaatatatgaattatctctattcgtgctggatgggtggctgtataaactatagccttttcttaaacattttcaacaccaggaaaatcacaaagtagcttaccccacttttggacggctcactagagagctttttgggccttgaataaaattctgccttgctgggatggcccccattagatttagttctcctctctgcagatggacatatataatctctatatcttgtgaggaattctaggaagaacaagtcagccatcaggtattccctaagtactcttttaattaaccctttaatgattattagtatatta

SEQ ID NO: 265495 - DNA, 792 bp, Homo sapiens
ataaagaaaaagaggtttaatggactcgcaatcatggcaggagacaaaggaaaagcgaagggacgtcttacacggcggcaggcaagagagcgtgtgcagggagctcccctttataaaaccgtcagatctcaggaaatgtattcactatccggagaacagaacaggaaagcctgccccatgattcagttacctcctgccgggtccctcccacgacatgggaattataggagctacaattcaagatgagatttggtgtgatattttgacatgtatatacaaagtataatgatccatcaaggtagttagcatatccatcacctcaaacatcatttcttttgtgttgggaacattcaaaatcctctcctctacctattagaaaatatgcagtaagttactgttaactgtagtcataaaatattaacaggcttgctaggacataggaccagaaaaaacatagaagtctatggttacaccaagattggagtcatatttttcagtaactaatgtattcaggaaaattgatgacaaggagaactagaatccgttaaaaaaaagactcaaattgaagaaagagcatcagtcttacacagagtcttccaaatgataaaggggaactcttcttaccaatttgttctacagggctaacaaatttgatactaaaactcgaaagggacatgatgggagaaaacacacatggtattctctctcatgaacattgtttaaaattccaaaccacatattagcaaatcagatccaatgataatgtaaaaaaggtaactcatcacaaccaag

SEQ ID NO: 265496 - DNA, 526 bp, Homo sapiens
acagtatcctatgaactatttcagtaaacagtgcaaggcaaaggaaaagaagattcaaagagcagaataaatctttaaaatgtgaacataagctctggccaactctgccttggtctgccaaggaggagcttagggcactgactgagacacagcacacggaccaggcacggatgtggccatcagggctctgccagcatctccagcagcgtcgctgagtggagagggaaggaagcttccagaactagaactagagaagaaggctggctggagtgacagagagaaagagagaaaaggctcagccaatcacagagttgcgaggcacctcggagaccctctggtcctccccgactgtgatgtggcacttgggggctctgtcaaggactgtccaggttcaaatcctggctccaccactcactagctgtgcactctctggtctcggtttcttaatctgtaacttgtggataaaaatagcatctgtcacataggacctatgtcagcataaaatgagataattcacatcaagtca

SEQ ID NO: 265497 - DNA, 572 bp, Homo sapiens
cgatgatctttggtgagcatgctatacagggccttgctttcagtaccaaaggcacaattttattgccattccctgtttacattgagaaaagtatcagagatggttttctctccaagctctcctgcctgaaacaccttctctgtcaatatcaccaaatattttagaaggcagagaggttttcatcaagggaagtgtgaagatcatgatgttcttttcttaatgaagtacaacttgataacctgctgatgttttatatttcctttttttctactgcttaaaaaaaaatctgtgggccaggtgtgggggcatacacctgtaatcccagcactttgggaggccaaggtgggaggatcacttgagcccaggagttcaagaccaccctggtcaacatggtgagaccctgtctctacaaaaaataaaagcattagccgggtgtggtggtgcatgcctgtggtcccaactattcaggaggctgagacaggagtgtcacttgaccccaggagtttgaggctgcagaactgtgatcacaccataggactccagcctaagcaacacagcaagaagcctgttta

SEQ ID NO: 265498 - DNA, 299 bp, Homo sapiens
  misc_feature (24)..(24): n is a, c, g, or t
  misc_feature (29)..(29): n is a, c, g, or t
  misc_feature (32)..(32): n is a, c, g, or t
gcggtcgctactactactaaattngcggncgngtcgaccttatacaaaagggtaatccaattggcattttgtcttttattaataaaagtcaatgttgaatcctataagaggttatctagagtttcacgaaatagaaaaaattaagataaaatcaagctgggcatggtggaacacacctgcagtcccagccacgcaggagcctgagcagggaggattactttagaccaggagttcaaagtcagcctgggcaatgttgaaacaggatctgtcgacgcggaccggaatttagtagtagttgt

SEQ ID NO: 265499 - DNA, 403 bp, Homo sapiens
cttaagggaagttaaataacttgatcatggtcacaccttaagtggttgaaaaggagttcctctcagatttctgtgagtctgaagcccttgtgatactatactgccaaagcattggggcccattttgtcttgttggtgagaagtgttaaagactgccattcaacatttagtgagctcttaatgcacctgtagcaccagtacccaaatgtaaaactagcggtggacgtcaaggaatctactgtgtaattaaggagacatatgtacatttgaaagagataaaaacactttttaaaaaaggaaacaggccaggcgtgagccatcatgcccggccaacttttttattattcactaattagaagtagactttctacttctaattggagaaacaggattgctgcttctca

SEQ ID NO: 265500 - DNA, 367 bp, Homo sapiens
tcacttattccaggaaagcaacctttgttgggacagaataaaaactgcaatgaaactaatttcagagatccagtgtgtcaaagagttctctggcagagacaggtaattagaattcctggaaaccattcacagcttcctaggactattttttaaaaatacctacctttacctaaaaatggggatcatttgcttaacattctccataagcaacttgcaaggactgaaaatattagcaaagacttaactatatcagttaaaactacatttctcctagcaatgtagatgttattcttaatgttatttctttctgggtctggcctttttttttgctttaaaaagagagtatatagtactacaggtgcttatg

SEQ ID NO: 265501 - DNA, 293 bp, Homo sapiens
cacagtgggacactgagagctagagcatctcgatgtaggacatcatgacttaatagagtgggacagtgagagctacagcagcatctcgatgtagtacaccatgacttaacacagtgggacactgagagctagagcatctcgatgtagtacaccatgacaacacagcgggacactgaaagctacagcatctcgatgtagttcaccatgacttaacacagcgggacactgaaagctacagcatctcgatgtagtacaccatgacagcacagcgggacactgaaagcttcagcatc

SEQ ID NO: 265502 - DNA, 631 bp, Homo sapiens
ttagagttcagaaaggatgtgcacagttggctcagagccagtgctggcaaaccattgcatttactccacccaagagtggattttcacataatttctaaaataattttttcttatttatatactgacttttcaaaatacaaaattaaaatatcatgtctgacttcagtgatctttttctttttctttttttagaaatgagatctttcagtaatcctttaatttaattttttagagatggagtcttggtgtgttacccagggtggactcaaactcccgggctcaagtgatcctcctgcctcagcctcctgcatagctgggctacaggcatgcaccaccacacctggcttagtaatccttctttattaatggtttgtcacagtacgtttgtgatgttatattgctcatggcatactttatgtgttcgaacaaaggtggaaatttccattgatttttttttttttaaatgtatgcacaaacaatctggattttgaggagtacggtcaggaaaaaaaaaaaagaattagaggcccttgaaaggtcaaccgtaagcttcttagagttaaaatatgagtttaattttttcccacattttgacagttgaaattttgatagggacagtaaacctatgagc

SEQ ID NO: 265503 - DNA, 630 bp, Homo sapiens
ttagagttcagaaaggatgtgcacagttggctcagagccagtgctggcaaaccattgcatttactccacccaagagtggattttcacataatttctaaaataattttttcatagctttaccatatgttgtaacaggaaaaaaatggtgtctatgaatttcttcttaatttaacaaatttgtctttttttagaaatcacatctttcagtaatcctttaatttaattatgtacaggattgagattaatactgtagtataaattgggacattataacagattccatattttatttcctaacatcctcctgcatagctgggctacaggcatgcaccaccacacctggcttagtaatccttctttattaatggtttgtcacagtacgtttgtgatgttatattgctcatggcatactttatgtgttcgaacaaaggtggaaatttccattgatttttttttttttaaatgtatgcacaaacaatctggattttgaggagtacggtcaggaaaaaaaaaaaagaattagaggcccttgaaaggtcaaccgtaagcttcttagagttaaaatatgagtttaattttttcccacattttgacagttgaaattttgatagggacagtaaacctatgagc

SEQ ID NO: 265504 - DNA, 506 bp, Homo sapiens
gataaaatgaaaattaaaaacagcaagtgtcaaccctgaccagaatcctaatctggaaagaatgagggtgtgcgtggtgcgctccacagctactatgtgcaagacattcaaaaataatggaatatggatccctcaaagttgttgtatttcagagattatttactgtatgttgtgggttatgaataatgaattcagctttcaatatttcataatcctctcctactctgtattatgtacaaatattgaacagcaagagattctaattataaatttatggatttcttgctgtagaaaaatttatgtctaaattgaagcttttcataagatgtattagttgacaggtatcagtgttcaaacagccttagaatgatgcctaattacatctacaagggagtgattgtattccacaaagaaatgatgtgctagcatcagatccttcagaagtagagctcgaatggtaaaagattttctgtgaattgaaactaacattacataacaataaccat

SEQ ID NO: 265505 - DNA, 299 bp, Homo sapiens
ctcacaccgagggaaacgtccctcctgttttctgcttcccatcgagcttgtcctgattgtgccctctgtggtgcttttccccttgcgtccgtactatctgggcggagcacgtgtgtccagggctttgtgtcctgtggtgataagagcactggctggggcatctgtgccactgtgactctccatgcctgacccagctagaaccctgcaggagaactgcctctgcttccttcgtgcctggtgccaccacctgcctagaaacgggcaagggtggcttgggctgtgagctgctgctactctca

SEQ ID NO: 265506 - DNA, 362 bp, Homo sapiens
gaaagctgtggccacaaaggtcactccatggactctgagcaggggccacaggggcttctggatggagacctgggatttggccacacattgcatccccagactttgctggatattcccaaccgctctgagtgaattccagggaggcatcccctgaagcaggagtcccaccccgctgacatgcttgacaattcaccacaaacccaagtacaggtgacccaggagaagaaggctgccgagcgaatgtcctgcatgcatttaaagagttaataagggagggccaaggagcctgatttaaaacagaataggaaagtcttttaaaatatctttttttaaaaaaagtaaaatacctttaaaaatcttta

SEQ ID NO: 265507 - DNA, 414 bp, Homo sapiens
gtggtaggtcaagtgtggccaccattggggagacgagaaagaagtggggccccaccagattgcacaatgggaacctcagctggcccctgaacagaggactcagttgtctccaccctacaccgctattccctggagctcagccaggcgcagccttggaaggagaaagggctggggttacctggcttgtcctcctccaggaaagcccccttcctcctctgccccagctcccagcctggcctcctccaggcaggccctactcctctgccccagctccggctttccccatgaggtttgtcccaggcatgaagaaagcatccagggtgccaatgagtgggcctaggcagaggcccctcagtccccaagggtactgttttggtggcctttcagagggtcaaggaagccctgcttggggta

SEQ ID NO: 265508 - DNA, 890 bp, Homo sapiens
ctcagcctccagagtagctgggactacgggcgccccaccaccacgcccggctaattttttgtatttttagtacagacggggtttcattgtgttagccgggatggtcttgatctcctgacttgtgatccgcctgcctcggcctcccaaagtgcttggattacaggtgtaagccaccgcaccccgcccagcctggcagattttatttaatcatttgtagcttcattttcctcgtctgtcaaacagggatactgtaatacaacctcagtgtgtcattgggcagtttaaatgaatgtacattcctgaggcatcagaactttgttcactgttatatacccaatgcctagaagaggacctgcacatagcaggtgctcagtaaatgtttgttgaatgaatgattaagtgcatgtaaagcattaagcatagcgcctggcagtaagtgctcaatattatgacttcttatattaacacgttttacatataaagaaatggaggcaagaaagcatttcctttggggtttagagcgcttaagttgttcctctgttatcatgcctgaattcccccgcccctcagttacctggggaagagtaaaggcaagaattcttaccagcattagtcatacatcctcctgataggaatctgcgaaaacacacacttctgcttttagttctattcttagaattctctcctgggctgttgctcctttgttccttcattgtaataaaaatggattctgaaagcaaaaaaaagaacaacaccagtattataagaaagagatagcagccattcaccacccacaaatggcatgggggcgaacacaaatgaggcaccaaacaacagaggaaagactcataaccacattaggggagcgccaaaacgggggacacactgcg

SEQ ID NO: 265509 - DNA, 337 bp, Homo sapiens
atagtcagattaaatgtcaaagaaggcatgcaggcaaaggggtaaagaatccctttggaggcctggcacagtggctcatgcctgtaatcccagcactttgggaagccgaggcggacagatcacttgacgccagttcaagaccagcctggccaacatggcgaaaccccatctctactaaaagtacaaaaattacccaggcatggtggcacatgcctgtaatcccagctcttcgggaggctaaggcacaagaatcgcttgagcctgggagctggaggttgcaatgagctgagatcaagccattgcactccagcctgagagagagtgagactctgtctca

SEQ ID NO: 265510 - DNA, 513 bp, Homo sapiens
tggaatatgcataactttccaatgttggaaagtgatctttgctatgctgatcattgattgattacctgacagtcaacacctatttgaatcactgtctcttgcctctaagcattggcttccaagtagatttcactgggctttgtattttaaagtttcctattttccaagctctgttatttgccatgcttcttttcagttttcttaggaaaaaaatgattggatcctgggggcatttgctagatatctggcaaggagcatcacacaggtataaaagcaagtcaacctaactgaggaaaattgagtaaaatggaaaaggatgccagtagaaaggagagaatctgggaggaaaaaaaaaagggaaactatatacagtcaggtagtagtcatatcaaaaaacaaaggaatgcccccaaagagttatgaattgctgcaggagaattaatgagatggaaaatttctcaaggaaaaagagccaagtatatataaaggggagaaaagcataaaatgaagaaa

SEQ ID NO: 265511 - DNA, 537 bp, Homo sapiens
agaaggcatcatttggcccactgcacgtcctggcctattcaccaaagcccttcctggctctgactgccacaccaggcagtgggtgaaatgctggctttttccttaagaaattgtgttctagtgccaccaagagatgctgtagagctggctttaccaatctcatgatgcttgcttggcaactctgaaaggtgactttggccaagaagaccttgtggcaattctgcaaattttatacactcatatcttttagggtacaaaatgaaagaacaaatcacaaagaacaatagatccttcaggagctgaaggtaagaatcttttatagctattttaacatatacagtgactactttctactagccaaatatcaaattttacaactaccaccaagccacagattataggtggtaacaactccagaaatgtcctaactaggaaaggtgctcatctagtatgcatcggtatccaggataatatgagttagaattttaaaaatgtcagtcattcaaaaatatttgaactgtgacatcacagaagtaa

SEQ ID NO: 265512 - DNA, 342 bp, Homo sapiens
aattgcactagtaaagtatatctaaagaagttgtaatctgaacattctgaaacaaatttacctgtagctcagtaaaataccttagtttccagatttctatttttatttaatttttgttattattattattattattattattattattattttgagaaagaggctcaccctgtcatccgggctggagtgcagtggcacgatctcagctcactgcaacctctgcctcctggttcaagcaattctcatgcctcactacttggaaggctctgaggtgggaggatctcttgggcataggagtttgaggccagcctgggcaacatagtgagacccccaactcttaaa

SEQ ID NO: 265513 - DNA, 212 bp, Homo sapiens
agggcctgggggtggcctgggcacatgctgagggttctctcctgcaggacagccacagtgtggaagaccctgtgccccttctggggtgaggagtaccaagtgcacctgccgcccaccttccacgctgtggctttctacgtcatggatgaggatgccctcagccgggacgacgttatcggaaaggtctgccttacaagggacaccatagcttc

SEQ ID NO: 265514 - DNA, 402 bp, Homo sapiens
tccccccttacccacattgttgttttctgaggtcaattacctgcaaccttggccagagatattaaatggaaaataaagagaaataaacagaaacaagcaattcataagttttaaattgtcactgggcatagtggctcatgcctgtaatcctagcactttgggaggctgaggcaggcagatcacgaggtcaagagattgagaccattctggccaacagagtgaaacaccatctctactgaaaatacaaaaattagctgggcatggtggcatgtgcctgtagtcccagctactcaggaggctgaggcaggagaatcccttgaacctgagattcggcggttccagtgagctgagatcccaccactgcactccagtctggcgacagaaggagattctgtctcaaaa

SEQ ID NO: 265515 - DNA, 946 bp, Homo sapiens
agcgggtgcttcgtagagctgccgccgtcgccgctgccgctgccgccacagccgccgctgcagccggagcatccgggagccgccactgccgccgccgctgccgctgctaccgccactagcgctgcttccactgcttctacctcccctcccaggaccccgagacaccccgggcgcgagcggcagtgctgcttgcttgctcctcctctcccccagcccttcccctccgtgacctacccactccttgcagccctcgcccgcaccttctccaacaccccggcatccctgcaccacctgctcgggcagccccggcgggctctgggacttgctgtgcgcgccgagaggaaggcaagctccaaacccctgcctggaagacgggctgtcgcggctgcaccaccagcaggaggaggaggagaagaaactatttcgcgataccccattctgcgggtgctttgccgctgccgcttctgctgccgccgatccgagtccgcgggttcgaacaccgcagcggtggggacggtgggtccggcgggcgccgggaggaggacaccagcggagccctgcactctcgtgccccgatcaccagcatctacttgccccctcgttccttccccagccctttagagaagggaccatgatttggaaacgcagcgccgttctccgcttctacagtgtctgcgggctcctgctacaaggtcgccttttcttttccccctcttcccaccatcatcatatccgtgtgtctttaaaaagtgtgtgagagcctgggagcgagctaccaagacgggcgagaacagcagcagcgacagcaccgtgtgcattgcaataacatccccgggggggaaatgtgttctgagacgtgtcatttacctaggaagagagaggggactctgtctgggatttaaaaaaaaagaaaagaaaagaaaaagaaaggaaaaagaataagaaa

SEQ ID NO: 265516 - DNA, 753 bp, Homo sapiens
agcgggtgcttcgtagagctgccgccgtcgccgctgccgctgccgccacagccgccgctgcagccggagcatccgggagccgccactgccgccgccgctgccgctgctaccgccactagcgctgcttccactgcttctacctcccctcccaggaccccgagacaccccgggcgcgagcggcagtgctgcttgcttgctcctcctctcccccagcccttcccctccgtgacctacccactccttgcagccctcgcccgcaccttctccaacaccccggcatccctgcaccacctgctcgggcagccccggcgggctctgggacttgctgtgcgcgccgagaggaaggcaagctccaaacccctgcctggaagacgggctgtcgcggctgcaccaccagcaggaggaggaggagaagaaactatttcgcgataccccattctgcgggtgctttgccgctgccgcttctgctgccgccgatccgagtccgcgggttcgaacaccgcagcggtggggacggtgggtccggcgggcgccgggaggaggacaccagcggagccctgcactctcgtgccccgatcaccagcatctacttgccccctcgttccttccccagccctttagagaagggaccatgatttggaaacgcagcgccgttctccgcttctacagtgtctgcgggctcctgctacaagcggttgcttcaaagaattaaagttcaaggcagccaagggcagtttcactaaacacagaatg

SEQ ID NO: 265517 - DNA, 237 bp, Homo sapiens
gaataactagaaagacctttaaaaaagaaaagaattaggaaaaacattaaaatgtacttgtatcctctataattaaaaccatgtggtagtgatgcacagatggacagacacagcaatgaaacagaccagaaagtccagaaataaactgaagcacatatgataaaggcagcatgttaatcacagaggggaaagatggactttttaatagtgttggaacagctagacagccatttgtta

SEQ ID NO: 265518 - DNA, 431 bp, Homo sapiens
ccatgttagatgaattcctactcctccaactacagtaggatggggctaattaattactgccttcattcaataaatatttatcgagcagctgctgttgggctgacactgtgcaagctatgtaggctctgaggatgcagagagagggatcctgcttctacttttaaggagctgtcagtctggtcaggggaatattacaagtaaagggagagcttcagattattttggtaagtgcttccataggggtaagcacagggcgtaggaggaatgaaaatgagggaaaggaacccaagctgagatttgttttctgtgggaggtggagaatagatctcaaagcaggtgaagcttagagcattttgaagaatgagttaaagttggaaatgagagtatgggagcagagacatcctgggcatagaaacgtgaggatctgaaaa

SEQ ID NO: 265519 - DNA, 279 bp, Homo sapiens
aggtaccacccacccctccccgccaggaaatattttctacatttggtgaaacttcataatacaattaatttaaatattttcatatattctaccaaatcatttcatgagtacagacttgctgttaaagtaggtatctgtttaatcgtgcactgtctttcttctcctgggaggaacagacccttccacacttcaggaagcctcaaggaaggtcagtgatgctgacctcgggcagaagtttgaaggagtaaacaaagcagaatgaaatgaacttacaaaaaa

SEQ ID NO: 265520 - DNA, 832 bp, Homo sapiens
gatggtatggtggaattaccaaggggcacatggaaaccattgagggtgatggataaattcataacattgattaaggtggtgatttcattgttggattcaattgtttaaacttattaaatttagatttcaaatatgtgcagtttattttacgttaaacacatcttaatgaagccgttaagaccttttgaagaggatgatggttgggtgcagtggctcacacctgtaatcccagcactttgggaggctgaggcaggtggaacacttcaggtcaggagttcgagaccagcctggccaacatggtgaaaccccatctctactgaaaaatacaaaaattagccaggtgtggcggtgtgtacctgtagtcccagctacactggaggctgaggcgggagaatcacttgaacccgggaggcggaggctgcagtgagttgagatcaccccactgcactccagcctgggtgacaaaatgagactgtctcaaaaaaacaaaacaaaaccaaaaaaatgagcaaatcaaacccaaagtaagtacagaagcataataatatgtataagagcagaaaacagtaagtggaaaatggataagtagtagagaaaatgaacaaaacctaaagctgttttttaaaaagattaataaaactgataattattttgctagtgtgaaaaacaagaacagaagagaaaacacaagttattcatattgggaatgaaagaagcgcctacgtacattacatggactataaggtgatattaagaacaaacttatgctggtaaatttacatgaaactctaaaaggttagaaaaattattttaaaggtacaagttaccacat

SEQ ID NO: 265521 - DNA, 474 bp, Homo sapiens
ggggtacataattttttaaaaactcccttagaccagcagccattagtgtagaaatgatggactttaaaggtgataccatgtaagcagatgttgcatataaaaatattcctgcctgaatctgatcgagattcttgaatgggggaggagtggcagccggcagcacattgcaaatgtcattcgaggtcacggtgaggctctcggtcccggaacagtgggggcctcgccaggcgttgccagtatccctttcctcctgtaaaatcatagctttgtgttacacgactgcttatccagtcttagggtttagcagctgaaaggtttacaaaactgaatctggttgaatctctgtgaaagggtcaacacatctgtcggcattttgcacacttatgtattattatgatacaacatattactttatggtaatttttatttttacatataactacctccataaatttgatgaaatggcagccgtgt

SEQ ID NO: 265522 - DNA, 388 bp, Homo sapiens
taagaacaattcctagaaaagttatccatgtagtcagtctgttttaaacaaatccagtgtatgaaaatcatgttataaggtaaattggaaacgtttatttcctttaactctttaaatgtgtcacactttttgctttctatttttaaactttgtgtctcctacaaaataataatcaaaaacaaaaaaagtaagcataacccgtagtttctttccaaatgcctttaaagtttcaaagcagtaattacaccttgcggcactacccggttcggccggtgcctggctggagggcgccggagagcctggagcagggcgccggagagcctggagcagggcccaggaggccggagcaggaggagaaggagtaggaggaagtggtcactagcgcggc

SEQ ID NO: 265523 - DNA, 395 bp, Homo sapiens
ttctgcacagagaagccccggggtcggtcaggaggcagaaggaacaaggggaaaatgtaggcaagagtttttattgtgattttcattggaaagaacagccaaggtagggtaagtaggcctagaactggcttgttcgaataacttcaacaggctcctaagaagctgtccttaggtgtctggtaccggggcctggggtcattagggcaggcggatagtgacctcagcttaggagaggcttggttagcatagatagttgtggttatgggctctggatgggttactttgcataagaaaggcgtgctctaggttaagttgtttactatctttaggaattagctagcgagggagagacagtccctgcaggatcagtaaggccccaagttgtcaaaacatcg

SEQ ID NO: 265524 - DNA, 527 bp, Homo sapiens
acatcatcctacctcagaaactggataaacaaatgcccaaatgagagaaacagaaaccacagctcctagaaaaaactcttgaaccataagaagactgtaaaagaaaggggctgaattctgaccataggaggagtcacgcaaaaatctccctttatgtggttcccagtgagcttgtctgaaagggaaatgagtggtgaaaggcttttagttttaaatttttgtcaaaaggatgatctattctgttgcattatggcccatgcagaaaagaaggaaaatcaaagtaatgctgaggaggccacttcaaggggggaaaaagaataactttcagttagtattttcgtttgtttcaaaaatagacaacatttggcataaggtcacttgtatatcactgaggatgatagatgatgtggagatataaagtatgaaaatgaaaatagttatttaaaaaagcttaataatgtgggggacatgtttagaaaactctaagttggtatcttcctacccttttcatatcatggttcatatta

SEQ ID NO: 265525 - DNA, 397 bp, Homo sapiens
agaggtgagggcagtaacaaagcagactaggaagctccaggcccttttttgcctcatagaaacagcaagattctacctacagaaacaacagatggactgaaatagcttcatgggaggtctagaaaccagccaaggatctgcagaaaaccaaacaaatgcccccagtcatgaaaaagccatactcaattcccacttacacaggcaggggaacaacacacactggggccagtctgacgggtcaggggccatgggagggagagcattaggacaaatagctaatgcatgcggggtttaaaacctagatgaccagttgataggtgcagaaaaccaccatgacacgcatatacctacataacaaacctacatgttctgcacttgtatcccggaacttaaagta

SEQ ID NO: 265526 - DNA, 289 bp, Homo sapiens
ctcctgaaaacaaatgatgctaatggctctccttttacaagacagggcagcattaaagaaacaaaaataatcagttccagaagctacagggaaccagaaagctgaaaaaggagcagaacagggaagtgcaacaaccccctcctgactccaagactcgagctgcagtgctcccaacaccagaccaaggcctcagtctccctcccactctctgccttacctggtatctatgactcgactgaaattttacaaacagacattatttgtcaatcatacctcagtaaagctggaa

SEQ ID NO: 265527 - DNA, 438 bp, Homo sapiens
ggctgaaattttccataataactgtagataactcaacatgtttaagtagattttagtttggtatttgattaaaagttcataaaatggaacaagaggaaattagttattagcaagaatgttgaagaaaagttggaattaaaaaaaaatctcaggcgggtgcagtggctcacgcctgtaatcccagcactttgggagtctgaggtgggtggatcacctgaggtcaggagttcaagaccagcctgaccaatatggtggaacccccatctctactaaaattataaaaattaccttggtgtggtggtatgcacatgtagtcccagctacttgggaggctgaggcaggagaatcgcttgaacccgggaggcggaggttgcaatgagctgagatcgcgccactgcactccagcctgggcgacagagcaagactcctctcagaaaa

SEQ ID NO: 265528 - DNA, 302 bp, Homo sapiens
atgcgcagtgaatggtcaggccctccgtgagtgaattacagattcattgaagagccgtcagatgactggagcagtctggtttcttccctttttatcgagttctgtcattgtgttcctcaaactgtggtttgttccagaaaggaagaggttgtcttcttcacccgcctgccctaagttgcgtcaagttccagttccctgtattaagtaaattactaaatgagtggaatgaacatcataatgtcaagggtagggcgttgacattatgggacaatagaccacgagcccactctgtcagctttttg

SEQ ID NO: 265529 - DNA, 350 bp, Homo sapiens
atccaacaggcctgacatcatcatttctcaccagtgtaaccttggctcatgaattctgctttctgagcctcagtttcctcatctgcagaatgggggcagcacagagcctccctcattgccttgttgtgagcgttccccaggatcatgagtgctttaaaaggtgcttaggtcagctgagcacaatggttcacacctgcaatcccaacactttgaaggctgagacggaaggaagatcgcttgagcccaggcgttcaagaccagcctgagcaacatagtgagatcccatctctatttatatatttgaagtgcttaggtggtagttcctcaataaattaaacagaattaccata

SEQ ID NO: 265530 - DNA, 495 bp, Homo sapiens
ccctgttacgtgtcacagagacctgggaaaaatgcccagcgatagggaactgggcacacctactatagtatgtgcaaataagccaacgttgaggctggaaggacattagagagcatgtactctaacgtcttactttcttaatgtaggtaccatggtgcaggcagaagtgactttcgaactgatgatgggaaggtaattagcaccaactctgggagccttttttcttcaatagtaagatgaaagccaggtgtggtagctcacacctgtaatcccagcactttgggaagccaagatgggaggatcccttcagcctaagagttggagaccagcctaggcaaagaagtgagaagctgtatctatcaaaaataaaaaaaaaatagctgggtctgatgttgggcgcctgtagtctcagctacttgtgaggctgagaaaggaggattgcttgagcccaaaaggccaaggctgcagtgagctgaggtggcgccactgtgtgcc

SEQ ID NO: 265531 - DNA, 263 bp, Homo sapiens
catctgttctctctcagggctgctacctgtgaggtttcatctgtagaacaaggccacctttgctagccaggcctcctctgctctccctcctgtaaccggtcttgccactgtcacctgattttccaccataaactgtggccatactttgagcccatgttctttctgtaacctcaagatggtgtataagcttccgaaccccattgggaggttggggtcatcactctggttctccctgtgtgcatgaataaatctgtatgcctttt

SEQ ID NO: 265532 - DNA, 422 bp, Homo sapiens
cttgcttcctccaggacttgggaccctggaggactgacgctgctggcctgggcgtccccttccgctgagccatggcgactcccgacgtgagtgtgcacatggaggaggtggtggttgtgacaactccgtccaccgtcctgggcaagggttcccttcaggcgccccccgccagctccccagcctccccgctgctcgggggcatacacagtcttggcctcttccggctccacctaccccagcacagtggagatccacccggacgcgtccagcctcacggtcctgagcacggccgccgtcgaggacggtagcacggtgttcaaggtggtcagcccgctgcagctgctcacgttgcctggcctgggcccaccctgcagaacgtggcccaggctcgcctgctccagcacaattgtgacagtgcccgc

SEQ ID NO: 265533 - DNA, 409 bp, Homo sapiens
tacaaactcattgatccccttcccagtgccagcacttcgtatcttattcatgtgaccacaaattaaggatgtgattttatagcagatgtgaaaaggagagaaaaatctattcttactttactatcttcatttaagagctacatttaatgaggattaaactgaaggggaagctaattttgcaaaatgtcttttgcgctcctatttcctgcgcctcattctactcattgccaccctccattccctcctctgcccacacacgggttagatcaccccatcatggaactgatatagattaaggctagcctgtgtggccagcttagagaaaagttagtggtatttccaaactccgggacccattaaggtttggtttgtttgtttgtttgtttatgaaggaatagccttgagcacc

SEQ ID NO: 265534 - DNA, 383 bp, Homo sapiens
accacagtgccctttcctggaggtctgaatggtacttccgaggctgtcactcttcctttctttcctgcactttcctctttgttggccaatccactcttccagtttttatctttgtaacattccgagtggttttattactaggaatctaagaagcaagatgactacacgtggtgttgtctgtacaggaaccgagctgtgcatgcggagggaagggccctgcagattctgaagggagtggtgtggttggtcaccgatcgccacgtgctcctggtgttcatgtagaggctggtgggcagaggtgctaggagcgacgtgtgcactttgaaggcacagtgataactggagtttgaactgttatgtaaataaactgtgagcattcagtg

SEQ ID NO: 265535 - DNA, 3034 bp, Homo sapiens
cacgtgctgtcagaacgccgcctcctccgcttgcggccggtctgcaccatgctgcgaacgtccgtcctccgcctgctaggacgcacgggggctagtaggctgtctctcctggaggacttcggcccacgctactacagttcgggctccctcagtgccggcgatgatgcttgtgatgtgcgcgcctacttcactacacccattttctacgtgaacgcggcgccgcacatcgggcacctgtactcggcactactggcggacgccctatgccgccaccgtcgcctccgaggtcccagcacggccgccacgcgattctccactggtaccgacgagcacgggctgaagattcagcaggcagcagctaccgcgggcctggccccgaccgagctgtgcgaccgagtctctgagcagttccagcagcttttccaggaggccggtatctcctgcacagatttcatccgcaccacggaggcccggcaccgggtggctgtgcagcacttctggggggtgcttaagtcccgcggtctgctctacaagggcgtctatgaaggttggtattgcgcttccgacgagtgcttcctgcctgaggccaaggtcacccagcagccgggcccatcgggggattcgtttcctgtatctctcgagagcgggcatccagtctcctggaccaaggaagaaaactacattttcaggctttcccagttccggaagccactccagcggtggctgcggggcaaccctcaggcgatcacccccgaaccatttcatcacgtagttcttcagtggctggacgaggagctgcccgacctgtccgtgtctcgcagaagtagccacttgcactggggcattccggtgcccggggatgattcgcagaccatctatgtatggctggatgccctggtcaactacctcactgtaattggctacccaaatgctgagttcaaatcttggtggccggccacctctcatatcataggtaaggacattctcaaattccatgccatctattggcctgccttcctgttaggggccggcatgagcccgccacagcgcatctgtgtccattcccactggacagtctgtggccaaaagatgtccaagagcttgggcaacgtggtggatcctaggacttgccttaaccgctataccgtggatggcttccgctactttctccttcggcagggcgtccccaactgggactgtgactactatgatgaaaaggtggttaagttgctgaactccgagctggcagatgccttgggaggtctcttgaaccgatgcactgccaaaagaataaatccttctgagacctacccagccttctgcactacctgcttccctagtgagccagggttggtggggccgtcagttcgtgctcaggcagaggattatgctctggtgagcgcagtggccactttgccaaagcaggtagcagaccactatgataactttcggatatataaggctctggaggccgtgtccagctgtgtccggcaaactaatggttttgtccaaaggcatgcaccatggaagctgaactgggagagcccagtggatgctccctggctgggtactgtgcttcatgtggccttggaatgtttgcgagtctttgggactttgctgcagcctgtcaccccaagcctagctgacaagctgctgtctaggctgggggtctctgcctcagagaggagtcttggagagctctatttcttgcctcgattctatggacatccatgcccttttgaagggaggaggctgggacctgaaactgggcttttgtttccaagactagaccagtccaggacttggctggtgaaagcccaccggacctagaaactcagttcttaccggcttgtggtaaaaaagcaaatgtgttatctttttattttttattttcaggaaagttatactagtattttcttaagtgtggaatcaaatgagcacataagctgtgtccctgtgaaaagaggtttgtagcctttcaggtgcctgctcctattcttcatttctctgtgaccattgatcactgtcctttgtgcattgtgtgtctaagatgtcttcaggggaaagatgggtaagagacagtgttgctaatgctgttccttctttgtgcctccttccaaaccacagttatttgcccaaactacctctcgtggctggtttttcattggcctggcctctgcttctcaggctaattagtgactcctttctttgagggtcagggttggaggccccttactggtggttttacagggggatcctactttgttacacatgttgggtttcctgataaaaagagagtattttattaaacccttgaaccagtgtcctagaccagatgatttttgcccatgtgtatccccatttaaattcctacaactaagtctccctgctttgttaatagtccaacagttgggttgtgtaacatcacacttcaaccggtagatggctctaatctcacacatttacttactaaagattgaggattcggaatatttagaataaattagttttctgctttctaattttgcagatctttacatttttattgcttttcttaaaataagggatagctttgcaaccactattgttttaatggaaagcaaaaaacccccccaaacttatcagaatcctcgttctttttcagactactgaaaaatgacatttactctgttaaatgtttaataagtgaataagtaaatgtatcaagttgtttatataataaattataaaactcttgaggcacttggtatgttaaaaattttaaactttagtaacattaggttacaggtatgatttaaaaatttgtaaatagttcaaaagggcaatgttttctttatatttcttatagtcttaattttgttatccatgtgcataatttacctcatgatttcttttggtcaatcaggatctttaatacaatatagaaattgtgtaatagttattataaatgttaatacacaactttcaggtaattttaactgattatttcttttgctcttttaacttaagttattaaagtttaaaagttcgtaag

SEQ ID NO: 265536 - DNA, 3008 bp, Homo sapiens
atatcgtcgacccacgcctcgccacgcgtcggccacgcgtcgccgcctgctaggacgcacgggggctagtaggctgtctctcctggaggacttcggcccacgctactacagttcgggctccctcagtgccggcgatgatgcttgtgatgtgcgcgcctacttcactacacccattttctacgtgaacgcggcgccgcacatcgggcacctgtactcggcactactggcggacgccctatgccgccaccgtcgcctccgaggtcccagcacggccgccacgcgattctccactggtaccgacgagcacgggctgaagattcagcaggcagcagctaccgcgggcctggccccgaccgagctgtgcgaccgagtctctgagcagttccagcagcttttccaggaggccggtatctcctgcacagatttcatccgcaccacggaggcccggcaccgggtggctgtgcagcacttctggggggtgcttaagtcccgcggtctgctctacaagggcgtctatgaaggttggtattgcgcttccgacgagtgcttcctgcctgaggccaaggtcacccagcagccgggcccatcgggggattcgtttcctgtatctctcgagagcgggcatccagtctcctggaccaaggaagaaaactacattttcaggctttcccagttccggaagccactccagcggtggctgcggggcaaccctcaggcgatcacccccgaaccatttcatcacgtagttcttcagtggctggacgaggagctgcccgacctgtccgtgtctcgcagaagtagccacttgcactggggcattccggtgcccggggatgattcgcagaccatctatgtatggctggatgccctggtcaactacctcactgtaattggctacccaaatgctgagttcaaatcttggtggccggccacctctcatatcataggtaaggacattctcaaattccatgccatctattggcctgccttcctgttaggggccggcatgagcccgccacagcgcatctgtgtccattcccactggacagtctgtggccaaaagatgtccaagagcttgggcaacgtggtggatcctaggacttgccttaaccgctataccgtggatggcttccgctactttctccttcggcagggcgtccccaactgggactgtgactactatgatgaaaaggtggttaagttgctgaactccgagctggcagatgccttgggaggtctcttgaaccgatgcactgccaaaagaataaatccttctgagacctacccagccttctgcactacctgcttccctagtgagccagggttggtggggccgtcagttcgtgctcaggcagaggattatgctctggtgagcgcagtggccactttgccaaagcaggtagcagaccactatgataactttcggatatataaggctctggaggccgtgtccagctgtgtccggcaaactaatggttttgtccaaaggcatgcaccatggaagctgaactgggagagcccagtggatgctccctggctgggtactgtgcttcatgtggccttggaatgtttgcgagtctttgggactttgctgcagcctgtcaccccaagcctagctgacaagctgctgtctaggctgggggtctctgcctcagagaggagtcttggagagctctatttcttgcctcgattctatggacatccatgcccttttgaagggaggaggctgggacctgaaactgggcttttgtttccaagactagaccagtccaggacttggctggtgaaagcccaccggacctagaaactcagttcttaccggcttgtggtaaaaaagcaaatgtgttatctttttattttttattttcaggaaagttatactagtattttcttaagtgtggaatcaaatgagcacataagctgtgtccctgtgaaaagaggtttgtagcctttcaggtgcctgctcctattcttcatttctctgtgaccattgatcactgtcctttgtgcattgtgtgtctaagatgtcttcaggggaaagatgggtaagagacagtgttgctaatgctgttccttctttgtgcctccttccaaaccacagttatttgcccaaactacctctcgtggctggtttttcattggcctggcctctgcttctcaggctaattagtgactcctttctttgagggtcagggttggaggccccttactggtggttttacagggggatcctactttgttacacatgttgggtttcctgataaaaagagagtattttattaaacccttgaaccagtgtcctagaccagatgatttttgcccatgtgtatccccatttaaattcctacaactaagtctccctgctttgttaatagtccaacagttgggttgtgtaacatcacacttcaaccggtagatggctctaatctcacacatttacttactaaagattgaggattcggaatatttagaataaattagttttctgctttctaattttgcagatctttacatttttattgcttttcttaaaataagggatagctttgcaaccactattgttttaatggaaagcaaaaaacccccccaaacttatcagaatcctcgttctttttcagactactgaaaaatgacatttactctgttaaatgtttaataagtgaataagtaaatgtatcaagttgtttatataataaattataaaactcttgaggcacttggtatgttaaaaattttaaactttagtaacattaggttacaggtatgatttaaaaatttgtaaatagttcaaaagggcaatgttttctttatatttcttatagtcttaattttgttatccatgtgcataatttacctcatgatttcttttggtcaatcaggatctttaatacaatatagaaattgtgtaatagttattataaatgttaatacacaactttcaggtaattttaactgattatttcttttgctcttttaacttaagttattaaagtttaaaagttcgtaag

SEQ ID NO: 265537 - DNA, 2980 bp, Homo sapiens
cacgtgctgtcagaacgccgcctcctccgcttgcggccggtctgcaccatgctgcgaacgtccgtcctccgcctgctaggacgcacgggggctagtaggctgtctctcctggaggacttcggcccacgctactacagttcgggctccctcagtgccggcgatgatgcttgtgatgtgcgcgcctacttcactacacccattttctacgtgaacgcggcgccgcacatcgggcacctgtactcggcactactggcggacgccctatgccgccaccgtcgcctccgaggtcccagcacggccgccacgcgattctccactggtaccgacgagcacgggctgaagattcagcaggcagcagctaccgcgggcctggccccgaccgagctgtgcgaccgagtctctgagcagttccagcagcttttccaggaggccggtatctcctgcacagatttcatccgcaccacggaggcccggcaccgggtggctgtgcagcacttctggggggtgcttaagtcccgcggtctgctctacaagggcgtctatgaaggttggtattgcgcttccgacgagtgcttcctgcctgaggccaaggtcacccagcagccgggcccatcgggggattcgtttcctgtatctctcgagagcgggcatccagtctcctggaccaaggaagaaaactacattttcaggctttcccagttccggaagccactccagcggtggctgcggggcaaccctcaggcgatcacccccgaaccatttcatcacgtagttcttcagtggctggacgaggagctgcccgacctgtccgtgtctcgcagaagtagccacttgcactggggcattccggtgcccggggatgattcgcagaccatctatgtatggctggatgccctggtcaactacctcactgtaattggctacccaaatgctgagttcaaatcttggtggccggccacctctcatatcataggtaaggacattctcaaattccatgccatctattggcctgccttcctgttaggggccggcatgagcccgccacagcgcatctgtgtccattcccactggacagtctgtggccaaaagatgtccaagagcttgggcaacgtggtggatcctaggacttgccttaaccgctataccgtggatggcttccgctactttctccttcggcagggcgtccccaactgggactgtgactactatgatgaaaaggtggttaagttgctgaactccgagctggcagatgccttgggaggtctcttgaaccgatgcactgccaatgagccagggttggtggggccgtcagttcgtgctcaggcagaggattatgctctggtgagcgcagtggccactttgccaaagcaggtagcagaccactatgataactttcggatatataaggctctggaggccgtgtccagctgtgtccggcaaactaatggttttgtccaaaggcatgcaccatggaagctgaactgggagagcccagtggatgctccctggctgggtactgtgcttcatgtggccttggaatgtttgcgagtctttgggactttgctgcagcctgtcaccccaagcctagctgacaagctgctgtctaggctgggggtctctgcctcagagaggagtcttggagagctctatttcttgcctcgattctatggacatccatgcccttttgaagggaggaggctgggacctgaaactgggcttttgtttccaagactagaccagtccaggacttggctggtgaaagcccaccggacctagaaactcagttcttaccggcttgtggtaaaaaagcaaatgtgttatctttttattttttattttcaggaaagttatactagtattttcttaagtgtggaatcaaatgagcacataagctgtgtccctgtgaaaagaggtttgtagcctttcaggtgcctgctcctattcttcatttctctgtgaccattgatcactgtcctttgtgcattgtgtgtctaagatgtcttcaggggaaagatgggtaagagacagtgttgctaatgctgttccttctttgtgcctccttccaaaccacagttatttgcccaaactacctctcgtggctggtttttcattggcctggcctctgcttctcaggctaattagtgactcctttctttgagggtcagggttggaggccccttactggtggttttacagggggatcctactttgttacacatgttgggtttcctgataaaaagagagtattttattaaacccttgaaccagtgtcctagaccagatgatttttgcccatgtgtatccccatttaaattcctacaactaagtctccctgctttgttaatagtccaacagttgggttgtgtaacatcacacttcaaccggtagatggctctaatctcacacatttacttactaaagattgaggattcggaatatttagaataaattagttttctgctttctaattttgcagatctttacatttttattgcttttcttaaaataagggatagctttgcaaccactattgttttaatggaaagcaaaaaacccccccaaacttatcagaatcctcgttctttttcagactactgaaaaatgacatttactctgttaaatgtttaataagtgaataagtaaatgtatcaagttgtttatataataaattataaaactcttgaggcacttggtatgttaaaaattttaaactttagtaacattaggttacaggtatgatttaaaaatttgtaaatagttcaaaagggcaatgttttctttatatttcttatagtcttaattttgttatccatgtgcataatttacctcatgatttcttttggtcaatcaggatctttaatacaatatagaaattgtgtaatagttattataaatgttaatacacaactttcaggtaattttaactgattatttcttttgctcttttaacttaagttattaaagtttaaaagttcgtaag

SEQ ID NO: 265538 - DNA, 406 bp, Homo sapiens
agagggtttctagtggggcctggcgttcattttcaccaatactctttctgtctccacaataaggatatagagaatagcctgagaacctaaccattaggtgttgaaatgtttttatagaagaatgttggccaggcgtagtggctcacgcctgtaatcccagcactttgggaggccaaggtgggcagatcacgaggtcaggagatagagaccatcctggctaacatggtgaaaccccatctctactaaaaatacaaaaaattagccaggcatggtggcgggagcctgtagtcccagctacttgggaggctgaggcaggagaatggcatgaaccttggaagcagagcttgcagtgagccgagatcactccactgcactccagcttgggcagcgagcaagactccgtctc

SEQ ID NO: 265539 - DNA, 682 bp, Homo sapiens
gtgatatttgccacctgtggtgagcttttgctgtggattacagttttatgatttctaatactgtggacagagatcagcagtgagagcccacgccccctttattgaattcaaaaatactgggacaaaaataatgtacagtagggggctaattttgatttccctgtccctaaggttcctaagccacctagaaagggagtaaccttaggggatacaagttaagtaaaagaatgccatgggcatacagaagaaatgataagaaaaggtgatatttttctttttaaagacttaaactgattattttttacaggagtaaccattcagaaaatactgcccttttaagctttccagaggatgacacacgctcttatggtttatagtcagaatccatgtcgagctgcacatgtgaaaaatgaatgtcatgttgttttcaagtagtaagctcaatgtttctaatttagttttttttttttttttttttttacaagttaatctaattttggtataagtggaaaagttgataattaaagaaagcaggtcctttctaacacaaagaccactaaggatgttttctccagcaattcttaataactttatagtttttattcccttgcaaaacatgggtttggggctgtgcagttagagaatatgtattgtttaagtgtaaattttaagcacataagga

SEQ ID NO: 265540 - DNA, 460 bp, Homo sapiens
ccaggctggagggcagtggcgcgatcttggctcactgcaagctctgcctcctgggttcatgccattctcctgcttcagcctcccgagtagctgggactacaggtgcccaccaccacacctggctaatgttctttgtattttttagtagagacagggtttcaccgtgttagccaggatggtttcgatctcctgacgtcatgatccacctgcgctggcctcccaaagtgctgggattacaggcgtgagccaccgtgcctggcccacagctgcctaatttttaaactttctgtagaaatggggttttgctactttgctcaggctgttctcgaactctcagcctcaagcaatcctcctgcttcggcctcccaaaccgctaggattacaggcatgagtcattgtgcctgatctccacattttcttgattatagtaagtctttaattcagtttgtgtaagttctcc

SEQ ID NO: 265541 - DNA, 1084 bp, Homo sapiens
aaagatacgtgtagatgcatatgcataacggcattattcacaaagctaaaaggtggaagcaaaccaagtgtccattgatatataaatggataatcaaaatgtggtatccatatgctgtattattaagtcttaaaaaggaaggagattctgacacatgcaacaacaaacatgaatcttgaggacattgtgctaagtgaaataagccagtcacgaaaagacaaataccactttgtctgactccacttatgtgaggtacctagagtagtcaaattcataaacacataaagtggaatggtggttgtcaggggctcaagggggaggggaatggggagttattgtttaatgggtatagagctatggatttgtagtgggtgcagcgatgtgtgcctgtagtctcagacactcaggaggctgaggaggaggactgcttaagcccaggtgtttgagcctaacctgggaaatatagcaagaccttcatctttaaaaaaataaaaaacaaagcttcagatgtgcaagaccaagaaattattgaaatggatatggtgatggctgtacaacaatatgaatatacttaataccactgaaatgtacacttacaacttttttttttttttttgagacggagtttcactcttgtcacccaggctgaagtgcaatggcatgatctcagctcactgcaacctctgcctcctgggttccagcgattctcctgcctcagcctccagagtagctgggattgcaggcacctgccaccacgcctggttaatttttgtatttttagtagagacggggtttcaccacgttggccaggctggtcttgaactcctgacctcaggtgatctgcccaccccagcctcccaaagtgctgggattacaggcgtgagccactgcacccagccaaaacgtttttataaagaggttttaaaaagatggttatgtgtatattatgtgtattttataattaaaaagttgggggaaacattttaaaatagtgaccatacccaattgttggtaaggctgggggcaaccggaattcatacaactgctaatagaaatgaaaaacggtacaactacttgggaacag

SEQ ID NO: 265542 - DNA, 336 bp, Homo sapiens
acttagtcctctgtcttaaatcattaaagcctctgagttagtttgtaggtagaacagccctcaagctgcccacaggtcatttcttctagcctgagtggttaagacaagaagttggccgggtgcggtggctcacgcctgtaatcccagcgctttgggaggccgaggtgggcagatcacctgaggtcagcagttcgagaccagcctggccaacatggtgaaaccccatctctactaaaaatacaaaaattagccaggcgtggtggcacgtgcctgtaatcccagctagtctacttgggaggctgaggcaggagaatcgctggaaccagggcggcagag

SEQ ID NO: 265543 - DNA, 363 bp, Homo sapiens
ttttttttgagacaaagtctcactctgtcacccaggctggagtacagtggcacaatcttggctcactgcaacctccgcctcccgctttcaagagattctcctgcctcagcctccctagtagctgggattataggcacctgccaccacgcccagctaacttttgtatttttagtagagatgggttttcaccatgttgaccatgctgatcttgaactcccgacctcaagtgatccacccaccttggcctcccaaagtgctgggattataggagtgagccaccgcgcccggccctagatgctcatttctaatgaaaacattgtgatccaaaagaattattgattaccaactcagcattaacttaag

SEQ ID NO: 265544 - DNA, 295 bp, Homo sapiens
tcgtgggagaatctctccttcccatttctagtgcacccaccaactctggaacagaatcctccccaccttctgcctgggcatgctttacactcccagccccacccgactccaggccatcttcggctctgtcaccagaagccttcccaggacctgggctatgtccacatctggcagtggggcactgtcagatctcatttgaaggctgcaaacctcacttcagcccagtttcactcagctttcccagtccaggttagtcaagtcccccaggctggcctctccagtacatcccagtgtc

SEQ ID NO: 265545 - DNA, 291 bp, Homo sapiens
tgagaaacattaattcacatttcaggaatgataacacactgtgaataggcttttggcatatactcagtgaattcacttacgttgactcatttgtcacccagaactaccctgggtgccactgcaagtgtatggctgtagaattaggagtgactgctatacctaaggtgctgtaactcactgataacccgcatctgcctgcctgagtttggtctgcccacaccaggctgcttttgcactgctaggagaccataagaaactaggccgagcggcagcaaccaactcttcagcaca

SEQ ID NO: 265546 - DNA, 295 bp, Homo sapiens
cccactgtgttgtcatggtgtactacatcgagatgctgtagctctcagtgtcccgctgtgttaagtcatggtgtactacatcgacatgctctagctctccgtgtcccactgtgttaagtcacagtgtactacatcgagatgctgtagctctccatgtcccgctgtgttaagtcacggtgtactacatcgagatgctgtagctctccgtgtcccgctgtgttaagtcacggtgtactacatcaagatgctgtagctctcagtgtccccctgtgttaagtcacggtgtactacatcg

SEQ ID NO: 265547 - DNA, 313 bp, Homo sapiens
ccagccaaccatagccagttggggatataaacctctaaaaaccaaaactggggaaaaatggctccccattttctgaggtactcttggagcacaagctgaatgaaaaccaatcatcattgccctgcctagcatgaagcagaatgaaaagaaggcagataatatttcctcccctgaaccactcatccatatctgctctattcagatatttgtgcctaggcaactgcacccacccctctcagcatttacccacagatcctcaaaaccaagccctagcacaatcgactccagtgaaaattaaaaaagctatcccaaa

SEQ ID NO: 265548 - DNA, 286 bp, Homo sapiens
agttgagagacaggatagccaagtggacaagagtccatgccgagggagcaactcgtgtggagaccctggacgggaagtctccccgcacgtcgattcagagaaaggtaacggaataaacatgggagatcttggtgggagaggtcagagagagcgcggagggccagaccctggcaccttacagcatcctacatacttgggctttacctccagagagatgacgtgactggaaggtttgagtcgaggagtgaggtggcctgaccaaggtttgatgggactgccctgtctg

SEQ ID NO: 265549 - DNA, 200 bp, Homo sapiens
ggcttcctgactggaaggatgaggtaaatggctagagatctgtagacaccttggaccctgagaatgtaagccatgtgctaagaaatgctgagcaggagaatgaaggggcctggatccctgctgataccaggtgccactgtattggttctgaactgcccacctctgggcttcctatgagaaagaagcaaactttaatcttg

SEQ ID NO: 265550 - DNA, 292 bp, Homo sapiens
ccccactgtccaaaatgactatttcaaaagacccctttttttatacactttatcctgaccctctctctcccagattttctctacttcacgaagcaaacagaagccatgggatctacattcatcttccacatgggaggaaccatcactgcatccttctgcctgattctgcaatggttttcctgaacacttaagacccaaacacccaaccctggccacaaacaatccttgcctcttggcctccttccacaccactgctttagctcctgccctcctgccatgcttgtctttgttc

SEQ ID NO: 265551 - DNA, 248 bp, Homo sapiens
gatgcgtggtggaggcaaatcactgagggtcgtgagcttgaaactaaagtttaaaggtcttggatttgagggtctcacattcagatgtctgcagggaccaggctgggagatgctgggagaacccccacgttctggggtggcgagtgcctctcaactgccgctggaagcgatctcagatttttcatgagaagttgaatatcgggatttttatgtgaaatctcttgatttgtaaatgttggcaatcaatt

SEQ ID NO: 265552 - DNA, 267 bp, Homo sapiens
gttgcccaggctggtcttgttcgaacgtctgagttcaagtgatcctcttgcctcagcctcccaaagtgctaggattaggattacaggcatgagccactgcactgggccaacattttcctctttaagtgcaccagttcatgagtcttgacagatgtatgtgattctgtaatcagtatcataatcgaaatctagaacatttcatcactccgaaacagtcctgtcctacctctttgcaatcatcctcctccatcgggtaatcagcctctg

SEQ ID NO: 265553 - DNA, 439 bp, Homo sapiens
ttgataaccaagaaaagaagagagaagatccaaataatctcaattagaaatgaaatggagatattactactcatatcacagaaatacaaaagattattcaaggccactatgaacacctttacacgtacaaactagaaaagctagaggagatggatacattcctggaaatatacaacccttcgattaaaccagaaagatataggaactataaacagatcaataacaagcagcaagattgaatggtaacttttaaaattgtcaacaaaaaaaaatccaggaccagacagattcatagctgaattctatcagacattcaaagaagaattggtaccaattctattgacactattccatgggatagagaaagagggaatcctccctaaatcattctatgaagccagtagcaccctaatacaaaaaccagggaaggacataacaa

SEQ ID NO: 265554 - DNA, 168 bp, Homo sapiens
gtcaccattttgctggtgccacttgatgacgctgaggagtaattaccagtgattaattacttacacggcctgcgtgtttttattccagtccaattaaaatgcagtgcacaactctcagtgctagggcctgccgcctcctgggtccctctcctgcaaatcccagtctgc

SEQ ID NO: 265555 - DNA, 279 bp, Homo sapiens
gctcttctagtgatagtgagttctcacgagatctgatggtttccccctttgctcgacactcactctgtcttctgctgccctgtgaagaggtgccttctgccgtgattgtaagtctcctgaggcctccccagcaatgcagaactgtgagtcaattaaacctctttcttgtataaatgactcagtctcaaatatttcttcatagcagcatgagaacaaactaatacaggtaccctgagtccacacagtgagactgtttcatcttcgtattctaacacaccc

SEQ ID NO: 265556 - DNA, 272 bp, Homo sapiens
cttgggctgagtctcaccatacataggcttctggtggggctgaggggtcagagatatgggcccctgcacgtgagggcccttggctctctggggaagcaaaaacgtggacagctgggaggtggtcagtagcacccagcgacgtggacccaggacaggcagcgagctcagtgcctgcggctgcatgtggggcagggaggcactgcccatccactgaacagagcctgatgcttcccccttgggggcacagtggctccccgctgggtgcagggaaa

SEQ ID NO: 265557 - DNA, 415 bp, Homo sapiens
gtaccagagaatattttaaaaatcacactcggccgggtgctgtggctcatgcctgtcatcccagcactttgggaggcaggcagatcatctgaggtcaggagttcaagaccagcctggccaacatggtgaaagcctgtctctactaaaaatacaaaaattagccaggtgtgatggtgcgtgcctgtaatcccagcaaatcgggaggctgaggcaggagaatcgcttgaacctgggaggtggaagttgcactgaaccaagatagtgccactgtactccagcctgggcgacagagtgagactcaaaaaaaaaaatcacactcctgactaaaaatttccaggaggtccttttagttttttgtgtttgtttttcacacacagaccaaccaactaaaaagtgactggggaaaaaaaggaaa

SEQ ID NO: 265558 - DNA, 509 bp, Homo sapiens
cgagagagagaacagttaaactttcttgtttaatgtgatactgcaatgctttgtctttgataaaaattattttttaataccatataaatgacgaaggaactatttatatatgaaatcattatcagaaatattctgaggtcttaaaagcttgttttataatggaatataacaacgtagaaatacattaaacataagtatatactctaatgaacaattataagtgaatgtctatttaaccatcactcaagacatagaaatagtgccccaggaacccctcctgtgttgtgttgtgttgtgttgtcttgtctagcctttccctttccctttctctttccctttcttccttcctttctttcctttctttctctgtcaccccggcagtgcacagtgcacagtgcacaatcacggctcaccgcagctgtgatcacctaggctcaaggaatcctcccacttcagcctcccaagtagctgggactagaggtgttcgccaccaacgcccagctaattaa

SEQ ID NO: 265559 - DNA, 403 bp, Homo sapiens
cctcatactgcttccactggcagaaatgaagttttgggaagtatagagggaaataatagaattttgtccagtagcaagaatgaggaacacactgtttattgcctgggctagaggagtcagagtgtgaggagtgtcaggccttggagagtgtttggctgagagctgaagttggcgtgggatttccatgttccatggctggtgtttggcatatatttctgcttttctgggcaaatagcctaaatctcctctttacttctcttggatagggtcttaggccaaaaatgccatactgcccccattccgttcttgcctcaaatctgtcacttagctcatttcagtggcttaaacctgcaattttttgatgtctactgaatgcaaataaagctgattcttgacaccgagg

SEQ ID NO: 265560 - DNA, 396 bp, Homo sapiens
gtatattcagcaattggtgctgggaaaactggccatctacatgcagaggactgaatttggatccttatctcaccctttgtacaaaagtaaattcaaaatgtattaaagacttaaatgtggccaggcgcggtggctcacgcccataatctcagcactttgggaggcctaggcggccggatcacaaggtcaaaaggtggagaccatcctggacaatatggtgaaaccccatctctactaaaactacaaaaattatctgggcttggtggcacacacctctagtcccagctactcaggaggctgaggcaggagaatcgcttgaacccctggtggaggttgcagtgagccgagattgtgccactgcactccagcctggccacaaagcaagactttgtctca

SEQ ID NO: 265561 - DNA, 286 bp, Homo sapiens
gaaggagctgaggagcagagaaaggccctgggctagaactgtgatccaggtgccaatcctgcctcttatgggctgggcacactgcacctctctttgggcttagtttctccatctgggaaatgagagttgaacaaagtttccaaggttctctctgctctgcattctctgaggtcagagaatgggggcagcaaagctgacagactgtgcctgcaagccaacaggagagatgaaaagcaacagttccacaggagagaagggcaagcagggaagccccatttgctaacga

SEQ ID NO: 265562 - DNA, 324 bp, Homo sapiens
ttttttttttaaacgtttctctcttgtagcagcaatcactttgtgtccgttatttatgtgcctgtaagcactgaccttggcacaatgcctggcagatagtagggactcaagaatatgttgacttgaataaatgaatgcatggaatgacaggatctcttgagacacaatctagcaaggtgaaatttattaaaggcaaatgtggatcaagaaaaccaattttacaagctcaaagatggaagggatatggtttaacagcaaaatgtgttaaaaattatttaggggttttggttgacagtttagtatgagtcaccaatgtgacccaaa

SEQ ID NO: 265563 - DNA, 481 bp, Homo sapiens
gatctcaccaaaatttctaatcacatatctttggtttttacttatatatcaatacatacaagacctttcctgggaaggtataggccccatcttcccttccttttatctatattataatgatcttcaagtaatgacttgagaagaaatggcctgaaaagttggtacaaccgcaggttgtctccctaaggcttggaccaggatttacttgacccagttacccatgacctggggatggacagatattcttgttgcaaatcccctgagccttgattctaggagtccagaacgttttacaaataaaaagatttagagatcgaaaataattattttgtaacacatagtagaggaagcagtagaccacatctggatacaaaccagagtgacgcatgaagaaccagagttagttacagacattagattgagaattattgacttttaatgaaacagacagtaataaattgatttcaacttaacttcctta

SEQ ID NO: 265564 - DNA, 351 bp, Homo sapiens
tagggccaggcaccagcctcagggtctcctctggatgtcaagtggggcacactactgctactgaggaggcagaggacagaccgttcatgcttagacccccctccccactacatcaggacactgtcaccttccagaccacacaactgagaaacagccacattataactagactccactgtcttcagcaggcctatcctggagatactgagaatcacatgaattttttggtttcccagtgaatataatccatgctgacactctactgcagcttattaaacattcaatagcattatatctaaaagaacaatgtacctaacttaatttaaaaatactttattattaaaaatcacc

SEQ ID NO: 265565 - DNA, 521 bp, Homo sapiens
agtttgaagagttgcccatctttggccaaaacttgctgattgttgcaagagtaggttacagtctgtttacacaccacattaggttacatttcactatgtacagagaaacctttaggctgaacctaaaacatgtaagaagtcagctttaggttaaacttaatttaatgcattgtatatttgaaaatttctaaaagaatagattttaagtgttctcattgcacaggcaaaaaataagtatgtgagttaatacgtatgttaagtggcttgatttgactattccacaatgtatacacatattaaggcatcatgttgtgcatcataagtatatacaatttttacttgtcaatctaaacattttttaaaaattaaatgtgggttgttaaatgaactgtaaaaaataagtaaaaggcgaattgagctccaaactaaagtgacacatagatcaaatatttttaacataagtttagaatttgaggcattttatcttcaaagcaaaataattgggaagtggaaaaaaaaaa

SEQ ID NO: 265566 - DNA, 452 bp, Homo sapiens
gaattccaatcacctgacccgggtctgaccgcagttaccagtctcaagtctgagcagcgtctccagtgctgggctgccttcttgactccaggaggcatgcctgctcttacaatgaaactcaagtctttttttttccttcccacaagtttggcttctacttttctaagtgctgttcatcatatactctgtgttgtaagtactcagctctctagcatctctttatactaccttttattcttctggaatatccttccttcccacccacaagcatattaggcaaaacttgcccaccgtggtaactggaaacaggactgaggggaaggaaaactctctcccaggtgcatggagtgggaactcatttagggcatctttagtgccatacatagaacctggaatacaataggagctcaattaatacatgttaaatggataaatattggttaaatgcatca

SEQ ID NO: 265567 - DNA, 449 bp, Homo sapiens
acatgtgttccagtggtgtaatgagtctttaggagaatatgatcaaggatcacttcgttttccaatttttcgtgatgtaatatgatgacttatttgacgttgaacaaattaccaatgatagttttattaaccataaatcatggatagttgaaacatcagtgtctcaaatctgcctgtttttatttcaatgtgttttaatatttcttgaatattatttagcagatttctggatttcaaaaaaaaaaacgaaatctaatagaataagcgtagtggattctgcattaaagtagctattataaattaaaaacctttaagttacagaattgaaacagtgttaatccacatgagataaacactaaaatcggaggtacatctataactagacctttcacattaaaaaacaatgtgttctatgattctttattaaatacattatgtaaatctacctt

SEQ ID NO: 265568 - DNA, 279 bp, Homo sapiens
tttgtgctctctccaaatgcatatgatgaaacctcatctccaatgtgatggtatttggtggtggggcctttgggaggtgattaggtcatgggagcagagtcctcaggaatgggattagtgccttccaactccctctgccctttcaccacatagacacagcaaagaggtggccagctatgcagtgggttcttgccacataccaaatctgccaatgtcttgatcttggacttcccaggcccagaactatgagaaataaatttctgttgcttataagccact

SEQ ID NO: 265569 - DNA, 747 bp, Homo sapiens
acgggtcgaagggctcctggaacgcggccagagcggacgcagaggccaaggaggcgccgagagcccagagcgagcaagggctgctagcacgttttcacctctcaataggaggaagtaaaggaaattttacctacaaaatagcaatactaagctttacagctgacattacaacagcaacaagaaaaggctagtgatatgcagtatgatgctctctccagatgctaggcagtcagccagcaaatcagtaggataaacaaccgacgttcttcagcgtaccgtgttgtcagatgattctgcccagctgcaggctaatgtaagtgtcctgaggatgttcaagtgctgaaatcaagacgtcaaccagctggtcttttttcgggaggatctgagaaaaatctgctttcaagtccatttagattctttgtctttttctatggaccaattgtcatctttcctaacagaagactacgcatccctgtgatacctctcagatgacaacaaagttctgtaaggtttcttgtgtggaaatgacaggacacatcctcaaatcctgccagcatttgtttagtaagagtgctggatcatttgagggttacttttaaatttcctgagccaatggtcctcctaagccaactattcattctgtgtaatggctgatgaaattaacaagggacaaaccaaatcccaattgcctatagagcggtacatcaaagatatgcatatccaaaacatagataaaatcatatatac

SEQ ID NO: 265570 - DNA, 999 bp, Homo sapiens
acgggtcgaagggctcctggaacgcggccagagcggacgcagaggccaaggaggcgccgagagcccagagcgagcaagggctgctagcacgttttcacctctcaataggaggaagtaaaggaaattttacctacaaaatagcaatactaagctttacagctgacattacaacagcaacaagaaaaggctagtgatatgcagtatgatgctctctccagatgctaggcagtcagccagcaaatcagtaggataaacaaccgacgttcttcagcgtaccgtgttgtcagatgattctgcccagctgcaggctaatgtaagtgtcctgaggatgttcaagtgctgaaatcaagacgtcaaccagctggtcttttttcgggaggatctgagaaaaatctgctttcaagtccatttagattctttgtctttttctatggaccaattgtcatctttcctaacagaagactacgcatccctgtgatacctctcagatgacaacaaagttctgtaaggtttcttgtgtggaaatgacaggacacatcctcaaatcctgccagcatttgtttagcattcataaagctttatctagacaaattcacaaagacagcaacaataatgatgctgccgtggaaaaggccaaaggtaaagaagagacaattttccctccaaaggcagccgctttctgacttctgtaaccgtctgtcagttcatccctttgattgcctggcatcatttgctccgtgtagtgtctgcaagattcctccattctgctgtgtatttcagtgatggattcccttattgctgggagattaggatacacaaaaagagacacgagcaatatgcgtgtgctcaaaggggtgaccacgtgaagaggaagcaagaaagggccatggacaacccaaagaaagaggcctcagaggagtacagtcctgccaccttgatctcagacttccagcctccagaactatgagaaatacatttctgttgttaaagccatcctgc

SEQ ID NO: 265571 - DNA, 477 bp, Homo sapiens
tcccttcatatatctgtttagtatagggccaaacaaatcagctaatacgggctccaaatagccactgtgaaaatgttagagtatatttgtgcttacttttataaaaggttaattatttggtataaattagggaagtcccaagcatttacataaaattttataattattaggattttgttaattttggatatttggattttatatatatatatatatatatctacctgagactgtgttttaatatctttatgtttgaaattagcaaaataacttttagttaccaattcatatgaatatgatactgcttagtaaactagatctaaaagaaataacttaaaattcaaaagaaaagtattccctaaatgtattcatgaagaaagatgattagctttttatttgtggaggttgtggtgagccgagatcataccactgcactccagcctgggtgataaagcaacagtctgtctcaaaaaaaaa

SEQ ID NO: 265572 - DNA, 337 bp, Homo sapiens
ttgaggatcactaaagcatcactccccaaataacttaaaattcaaaagaaaagtattccctaaatgtattcatgaagaaagatgattagctttttatttgttggagggaattttctaatttgatttgatttatttaatggaagggataatattttaagatcaaatttagagtaattaaatatactattactatgtatgttactattataatgtaagcatatgagtaaaaaacctcactatagctagaaactataaagaaaaagtattcaaacatatttttcaacagctgtactaagtataagggactctgtttggtgctgtgaaaaatacagaggta

SEQ ID NO: 265573 - DNA, 525 bp, Homo sapiens
ggtctcccaaagtgctgggattacaggcgtgagccaccgtgcccggccgtggtgtcttgagctgagtgcagaagcgcaaatagggggtaggagaaaatgcaccgcgaggagaaatgtgctgcgggcctgctgtctagctgtgtcatttggtcgttgcggggccctgtgaggccgggagggctgccagcacccaccatgtgccaggcctcgttgctagtgctggggccagttcctgccccggtggagctgccactgaagggggaggcgtaataaacaagataggtgagtgcatatgcagcgtggtctgttgtgctgagggctgaagagaaaccagaagcagggctcagaggccaggaggactctgcaaagggatttggcattatcacagggtggccagggaagatcttcaaggtgacagtgagcagagggaggtgagggagcctgtgtggacttcaggactagagctccaggcagggcctgtttgaggaacatggaggaggcgagagcaaggagtagaggtcaaaa

SEQ ID NO: 265574 - DNA, 443 bp, Homo sapiens
ccacccccaatccttccactctgcagaaactttaaagcctcacttccaatgccttctcgaagctagatgtgctaagaccttcttgatcttataccgccgtcatggactcctgagatgagggtgtgacatagctaactatcatattatttatttataatatgaaatatatttgggctttgtccctggttcctgacacagcccctaaaacccttgaatttcctgggttatacgtaatgggtctctttgataacacctgagtttataataaggaggtgatttaggatgggggccctagataaccttaggatggggccagtcaccagagagaccaagtgattggaggattggaactttcatccccacccttcaacctccaggaaagggggaggggaggagctggacatcaaactctataaacgctcgaacaacaagagttgatgagc

SEQ ID NO: 265575 - DNA, 1508 bp, Homo sapiens
ggcacgaggatccgatgtaagtcttctttcttcaaaggtgggtgtgtggacttacatcggatttcaaaagactccttggaatctgattcagaaagcctcacgcaagagattatgtgccattctgagtttgatgatcgaatccggggcaacggtatggagcccgacagcttagacgaggaggaaagccctcgatggggaagcctgcacgagatggaagaggaagcaagtggaaaagcagctcagatggctcgcgagcaaaaccaccatacctgggaccagggcgccaataacaggcaacaaccaatagaagacaaatattcagacctccgctatgacccgaactggaagagtaagaaggaggaagggcagctgctgtctgtggaagcgttgccggagtccacggacagctctttagaaaatctgcctttggctcccctctacccttcccaggagacgtcaatggaactctccgggggaaaaggcgagcagaaagagagtccacagagtgcagcttctttacttggtagtgaatttttaagcccaaactatgagcatggtgcccgtcgcagcaagccgttttcagagctgagcgacagtgacctggaggagaagtcgagcagcctttctccgtacgtgaagagctcaagttcacataacgaggttttcctgccgggatcacgtggccctcggcgaaggaaatccaaacaacattttgtggaaaaaaacaagctcactttgggattacccaccccgaaaacggactcttatcttcaacttcacaataaaaaaagaggggaatctcatccagaacaggtcattttgagagtaaattctctcccacgtgatggattcaaaaccttttggagccagtaaacttagttccatttcacaggtgcacataaagaccttcctgcccacctcctatggacatgtccagggatacaggacaagagtggggttagaatggtagagtccaccactcttactggaaagagcttgagatttatcacctgctaatgtgaggtcattttcaaatacaaaggagaggttattatgttaaatgtggttgcccttagacctattccaaatcccaactggtatttttttttaacatattctaacctgttctaacctctaagcattttctaatggaacaaaatagatgaggtggatgaacatttgtggcttttcttcagagactcccttttttgtcttaaagaattacgtctggtggcacgttggctcatgcctgtaatcccagcactttgggaggtcgaggtgggaggatcacttgaggccacgagttcaagaccagcctggccaacatggtgaaacccatctataccaaaaatacaaaaattagccgggtgtggtgatgcacacctgtaatcccagctactcgggaggctgaggcacaagaatcgcttgaacacgggaggcagaggttgcagtgagccgagatggcgccactacactccagcctgggttatagagtgagactctgtctc

SEQ ID NO: 265576 - DNA, 2007 bp, Homo sapiens
atggttggttgcatcggttctcacgtccgcccgcagaaggtgacggttctttgcactacgtcctccctagcacctgacgctgccagacgtttcaactttggacttttcgactcaacttatggtgagtgtggtattatccgctgtggttttaattggccatcttctgattattaatgaattaaagcatcatttcaataaacagatatttattggccatttagatttctcgtgtgtttgtgaaatacctttccatttacccattatttaattgggttccttttcttcttgatttgtagcagttcctcgcgtattttagtagttttatttgtggcaaagatctcctcccccgggtggcctctgccctccggcgctgggaagtcggggcggcgaggcagcctctcccggggcgttcgggctcctccggctctgccccgatgtcgttattacggccgtttgcagcctccgtgccagggccgggggtgcggttcgggacgcgggatcctaggtcgggtcctgccccgcccatgtggcgccggcgtctgtgttgtctgcggtctccagggcagcgccggggcgggcgggggcccgggcggcggcggcggcggcgcgggaggatgcggggcccgtccgggtcgcggccgcggaggagcgccgggcaggtaacgcttttgtgaaccacaactttaaatatcagccagctgctcctatcaacacgagtatcccctgttaattttttgcatttttcaagatgagtaaacgtaaactaattcccaagctctctattcaatctcctgtccttcataccaacttaaatgtccagtccacacacccacctttgaagaaagaagacttacatcggatttcaaaagactccttggaatctgattcagaaagcctcacgcaagagattatgtgccattctgagtttgatgatcgaatccggggcaacggtatggagcccgacagcttagacgaggaggaaagccctcgatggggaagcctgcacgagatggaagaggaagcaagtggaaaagcagctcagatggctcgcgagcaaaaccaccatacctgggaccagggcgccaataacaggcaacaaccaatagaagacaaatattcagacctccgctatgacccgaactggaagagtaagaaggaggaagggcagctgctgtctgtggaagcgttgccggagtccacggacagctctttagaaaatctgcctttggctcccctctacccttcccaggagacgtcaatggaactctccgggggaaaaggcgagcagaaagagagtccacagagtgcagcttctttacttggtagtgaatttttaagcccaaactatgagcatggtgcccgtcgcagcaagccgttttcagagctgagcgacagtgacctggaggagaagtcgagcagcctttctccgtacgtgaagagctcaagttcacataacgaggttttcctgccgggatcacgtggccctcggcgaaggaaatccaaacaacattttgtggaaaaaaacaagctcactttgggattacccaccccgaaaacggactcttatcttcaacttcacaataaaaaaagaggggaatctcatccagaacaggtacgtagtggctactttaaaatgtcttctgaaacattaaaccagaatttgcgtttgtttgcagtgtctagataccgcttcctttaagatgacgatgtcatagcagccacctagctgggtaaaacaaacgcttccataggctatcctgtatgtttatgtttattccataaattcttatgaccaaaataaaagccaccaatggtttacagtgtaattgctacaagtcgattattgctataagtcaattattatatccaaaattgctataattgctataagtaattataagtccattgttatgtcagttattatatccgaaattctccattcaaagaaatctggaactttttaaaactgtgttttccaaatgataaaatatagaacttaagcatttg

SEQ ID NO: 265577 - DNA, 807 bp, Homo sapiens
agaaagaaagaaaaaaggaatgctcaaccgcatttgttattatttttttttttttggaaacggagtttcactcttgttgcccaagctggagtgcaatgacgtgatctcagctcattgcaatcatttagtgtgattaagctcattgcactcattaatcatttagtgtcattaagctttcctggtgtctgaaatcacatcaactaggcatttatcttaaatccatgatctgttaacatatctttggttactagtgatctccataatgacataatttatctcaaaagactccttggtttgaaaatctgattaaccactccagtatattttccagacttgaaaactggtatttaggccaggcatggtgattcatgcctgtaatcccagcactttgggagactgagccaggtggatcacctgaggtcaggagttcaagaccagcctggccaacatggtgaaaccctgtctctactaaaatacaaaaattagctgggtagggtggtgcaagcctgtaatcccagctacttgggaggctgaggcaggagaagcacttgaacccaggaggtggaggttgcagtgagccaagatcatgcctctgcactccagcctgggtgacagagtgagattctgcctcaaaaaaagaaaaaagaaaattggtatttattgcttctctctacagatgcttctcaatttatgatggggttacaccctgacaaactcataagtcgaaaatacacaaagtcgaaaatgtgttcaatatacctaacttactgaacaacatagcttagcctagcctacatgctcagaaca

SEQ ID NO: 265578 - DNA, 800 bp, Homo sapiens
agcgggggaataccaggggtgggcactgtcaagagacccagctttgacttcaaatgccacccagagggacaactgctcactttcagagcaggagcaggaggccagaggagagtgggtccctatgatccagacctcaagagagggttcctggacctcccacagaaagggattcaagaccagctgaaactgattagagccaagatagccaaccaaatgacttcaggaagacctcaggcttcattatcatctcatttccatgctaaaaaaacccagctccctagaacaatgggaaatattgggcacttcatcaggcgagttcaggtgcatttctagagattgtccaggtgctggtaacaataatagagaaccatccatatccacaagaggcagaacctcttccagcaaaatggtgctgcctcacccaaaggtggccgaggaggccgtcggaggaccacaaagctgcaagtggctttcctgcggcctgcagggaacaggtggaggacacttggaagggcacccaccccgggtctcacaggagtctgcacccgcaggtcacactggcattagcccctcatcctctggagttcatctcatccaggcgaagacagctggctggcctcagagggtgagacgcaactcgagggtaaaaacatttttacagggcatggacacaaaagtggcctttacctctggataagcttttaaaacttcccatttacatgtaaaggtgtactttctatgtgccaccaagaaacctaaagtgagtaaaaggtgtttcactttaatcaagttccccaatg

SEQ ID NO: 265579 - DNA, 751 bp, Homo sapiens
agcgggggaataccaggggtgggcactgtcaagagacccagctttgacttcaaatgccacccagagggacaactgctcactttcagagcaggagcaggaggccagaggagagtgtgagtctaacatctgcacagtgagaagtccaggagaagcaaaaatgagatccaggctggagcggctgtgccagagggtccctatgatccagacctcaagagagggttcctggacctcccacagaaagggattcaagaccagctgaaactgattagagccaagatagccaaccaaatgacttcaggaagacctcaggcttcattatcatctcatttccatgctaaaaaaacccagctccctagaacaatgggaaatattgggcacttcatcaggcgagttcaggtgcatttctagagattgtccaggtgctggtaacaataatagagaaccatccatatccacaagaggcagaacctcttccagcaaaatggtgctgcctcacccaaaggtcacactggcattagcccctcatcctctggagttcatctcatccaggcgaagacagctggctggcctcagagggtgagacgcaactcgagggtaaaaacatttttacagggcatggacacaaaagtggcctttacctctggataagcttttaaaacttcccatttacatgtaaaggtgtactttctatgtgccaccaagaaacctaaagtgagtaaaaggtgtttcactttaatcaagttccccaatg

SEQ ID NO: 265580 - DNA, 412 bp, Homo sapiens
agcgggggaataccaggggtgggcactgtcaagagacccagctttgacttcaaatgccacccagagggacaactgctcactttcagagcaggagcaggaggccagaggagagtgtgagtctaacatctgcacagtgagaagtccaggagaagcaaaaatgagatccaggctggagcggctgtgccagagtaactgttccagcgggtgtgggggagggtcccccaaaaagacttacctggactgaatgggaaataatagaaaataggagcaagagactgtcactttataataggttctgttatgacctcctacaacaatatgttagaaattatgatttctaatatgtctatgatacagatagacatatagttagaaaactaaataaagagacagattttgagctaggtatact

SEQ ID NO: 265581 - DNA, 174 bp, Homo sapiens
gctgctatgaacattcatatacagtgtgtgtggacatggattttcaatactcttgggtacatacctaggagtagaaatgctagtcatatgagcaattgacctagctttcttggagtgcactggcatgatctcagctcactgcaacctccgcctcctgggttcaagcgattctcc

SEQ ID NO: 265582 - DNA, 365 bp, Homo sapiens
gagacagagtcttgctccgtcgccaggctggagtgcagtggtgcgaccttggcttgctgcaacctccgcctcctgggttcaagcgattctcctgcatcagcctcccaagcagctgggactacagataaacaacaataaaaaaatgaagagacaagaagtcaagagacttgcccaaagagacccagctaatgcagatggcagaggcaggattcaagaacagatcttttcattctaagtccaggacactctccagtcaccacaggctactgcctgtgtgttgattttattttgtgagtgggttgcattcattttcaagggtgtgtaggaatttagaaagcagaataaaccaaagagagcaaacagga

SEQ ID NO: 265583 - DNA, 358 bp, Homo sapiens
gggaggaaatgaatgctaagagagtgaggtgattcatacagctgtgaaactgcaggttcctgaggacaggagccgcatctttttcatcttttcattccttatggcaccaagtgcctaataaacaacaataaaaaaatgaagagacaagaagtcaagagacttgcccaaagagacccagctaatgcagatggcagaggcaggattcaagaacagatcttttcattctaagtccaggacactctccagtcaccacaggctactgcctgtgtgttgattttattttgtgagtgggttgcattcattttcaagggtgtgtaggaatttagaaagcagaataaaccaaagagagcaaacagga

SEQ ID NO: 265584 - DNA, 516 bp, Homo sapiens
tggaggagtgaggtgcaaaaataagaggtgatacctctcatgctcacatgtatcaggaccagtcacctaatttgtggggcttagtgcaaaagaaaaatttagggccactcattcaaacattattaggaatttcaagagctgggcatgttggagtatgcctgtgatctcagttacttaggaggctgaggcagaaggattacttgaggccaggagtttgagtctgtagtgtgttgtgattatgcttatgaatagccattgcattctaggtggagcaacatagtgagaccccatctctaaaaagaaaaagaaatgaaataaaataatttcaagacagtaacaactgagcattaaatgaagcatagagactgtgtaaacatgggactgtgattgctgcagaggccatagacccatgtagctggccccacatatgagcatatccatatataaaagtctgtttttgaagacccatttttattttttaggccccaataataaatgatcaattattagtagtta

SEQ ID NO: 265585 - DNA, 748 bp, Homo sapiens
gtaagtggaggaatactttttttttttttagtgtgtgtgaacattccacccatgggtaagtggaggaatacttttttttttagtgatgtaatctcgttctattgcccaagctggagtgcagtcccatgatcatagctcattgcagcctcaacctcctgagcccaagcaatccccccacctcagcctcccaagtagctgggactacaggtatacaccaccacacctggctaatttcattttttaaatttttttgtagagatggaatctcattttgttgcccaagctggtatcgaactcccagcttcaagtgatcctcctgccgttgacgcctcccaaagtgctgaggcaggaggattgcttgcgttcaggagtttcagaccagcctgggcaatgcagggagacctcatctttactaaaaataaaaaaattagccaggcatggtggcacatgcctatagtcccagctactcaggaggctaaggtggaaggattgcttgggcccaggaggtcgaggctgcaggaagctacgatcatgccactgcactgcaagaccttttttcaaaaaaaataaaaaaaaataaaaataataataataatatatggtgacatcaaagaagatttggataaatgaagttctgctaaaaagacaataataattccaaatgtagatacaaaaactataaaaatgtacaaaataaactagcataaatgatactttctgcacacaaaacattaccgtttgtctacag

SEQ ID NO: 265586 - DNA, 189 bp, Homo sapiens
aaaatgatgtgttaatgtcagttcatcagctgttacaaatggaccacgccggtacaggatgttgatggaagcaaccgtttaggggtgggggcaggcatatgggaactctgtactttctgttcagttatgctgtgagcctaaaactgctctaaaaacaaagcctaataagaaaaatcacacgctaggtct

SEQ ID NO: 265587 - DNA, 649 bp, Homo sapiens
ggcagccaaaataagaattgtccttgctcatagtacaaccctttaattgacttgtgcctgagttttggtgtgagctgagtattggtggttatgaatactgggatccccagctatttgttcatgtacttattgaggtcactattggtcttccttcttcaatgaagggagaagctctgtcaaatgtagactgcaaagtcaagctcattaaaagtatccctctttcttcgtgagaaaaggtatccaaggagaattctgtccctggttcctcccatgtgggggttctaggcctaggaccagatcttattgtctctgcaatcttgattctttagtatttcaggataggcagagttttgttaaagtatacaaaaatcatagctagataagagagataacagaaataagttccagtgttctatactcctgtaggatgactacacttaatgctaatatacagttacaaatagctagaaggaggctattgaatgttcccaacacaaagaaatgataaatgtttgagatgatgatgtgctaattaccctcatctgaccagtatacattatatgtatcgaaacatcgctctgtgccctgcgaatatgtacaattgtgattattaaaataaatacataaataaaatttaaaagtcattatg

SEQ ID NO: 265588 - DNA, 491 bp, Homo sapiens
tctctctcatggatattagaaacactgcttttcctttgtgtgagaataaataactattaatataaaaattttctatgatatagaaaatgggaacactatttggtgttaatcattaaacggtcttgatagaatcaacctgctatttagtttcagaaaaattgagactttggaggggaaatgactgttaaaatattgtctttgtcttctgagaatattttgtcttgttttctgctgtgtccacctgggcaacacagcaagactctgtttaaaaaaaaaaagaaaagaaaaggtatttagattgtaaaggaagaagtaaaactctatttgcaaatgacataatcttggatatagaaaattctaagaaattcacacatacacacataaagaaaaagactgttggagctaataagtgagtctggtaaggctgcaagatactaagtcactatacaaaatttaattgtattcctatatattagcaattaaaatccaaa

SEQ ID NO: 265589 - DNA, 524 bp, Homo sapiens
caacattagatgtcacaaagagatcaagaagagttcgatcagaaagtgtcaaatgattgagaaaataagaaaaaatagtctgagaatgtgaaagtttggagcttgaaagagggaaaggagacttaaaattcaggtggcattgaaataaattagagctctttatttccagcaatgtggtagattaggtgtgcagagcaagcaaacaccttgttatctaaaacctgaaaatacatggacaacatttcttacagtatgactgaactttgaagtaactaaataggaaaccagaaacttcagaaagttcaattcaacagagataaagagcattagagctgcttgacatctgcttgatccctggtggctgggagtctggtaattggaacacatccagctggaagagacaaaagacagagcctaggactctagtagaacaaaaaaccacatatgcataaagttggaacccccaaaaggtgacacttaacaatgtacgggaaaatagaaataaacctatcatagaaaaggaa

SEQ ID NO: 265590 - DNA, 387 bp, Homo sapiens
acaaaactggaatacagatagtagattagataagaatatcacatcaatgttaaatttgctgaattcgataactgtattgtggttatgtaagagaattttttttgaaatatttaggaataaaagtttaggtcttggttgtatgcaagttactttcaaatggtccaggaaaaaaaagtgtatatgtatgtgtgtgtgtatcttgatacatatatatcatatatattacatctttatggggaggtgagaatgataaaagcaaatgaggtaataagctaacaattgtttgaatctatttaaaggatatattggtattctatgttcttattcttgcaacttctctgtaaatctgaaattattttcaaatacaagttaaaaacaaaaacccca

SEQ ID NO: 265591 - DNA, 484 bp, Homo sapiens
aatattctcgtttcttcattctccatttttctgtaataacttcagagccgtggcagaggatcaccccaggattggggtgctttccctggagcctgccttgtgaacctgcaaatcgccaagtgaatacctcagcctcagggcaggttgtgggctgatttttattttttcttttgggagggaagtcttttgggaaggtcagggggctacaggatatgaagtctggatttgagaacgtgccggaaataaaactgtgctctaaaaatctttcaggtttgctgctgattaactatctttagcaacccagcccagagtaagatggaaaagatgagctacacttgggccaaagtgcctttgagatgagccctgaagccagtctcagtgtttagccatcaccagagacacttcccaaagccttaacttttccttcactttgtactggaggtgggggccttctggcactgaatgcaaatctaccaaaaaaaaa

SEQ ID NO: 265592 - DNA, 439 bp, Homo sapiens
tgcccatcactttgcaggcttatttcctgaaattcagttttatctttgaatatgtaaaatatttacagagttcaaaagttaaaactacaggtcattccttggtatccatggggcgactggttccaggacctccccccaataccaaaatccatgtgtgctcaagtccctgatataaaatggcatacatagtatttgcatataacctatgcacatctttttgttttctaggttgcttatataatatgtaatattatctctaggttgcttatctctaggttgcttatctctaggttgcttgtaatatgtaatacactgtaaatgccatgcaaatagctgttatactgtattgtttaagaaataatggcaagaataaaatctgtacatgtttagtacagatgcaattttttattctggagaattttgatctgtgattggttca

SEQ ID NO: 265593 - DNA, 539 bp, Homo sapiens
cgagacggatattctggctctcaaaaaagggctgccttactgaaatcggggatcctagtgaactctatctttgctttgtctgaaaaataataaaaggggggttgggggagcggtggattcaagaaaagataaggtctacggatctatgggtctttgaccacacttggggggctgggctgacttctgcctttgtagttggttgaaacttattttccacctttcttctgctggtggcttcgtgaaacaacaccccctctttctctagagctcctgaatgtccacatgcaatgtctacaaaggctctgggcccgggaaatgtggatccatgcggcttgccgccatggaatgtttttcttgaaagcatccttgtctgcctggacccctgtgctcttcgcaactactcaagatgtggaggggacgagcaccagggggcaccagaccgagtaggaagccggactcgggagcagactgcagtttaaaagcctcagtccaaccggtggagagcgggaagcgctgaaaacgtacgcaaccgcatcaga

SEQ ID NO: 265594 - DNA, 190 bp, Homo sapiens
ctgcttctaaagaaaacaatagtttatgtcagagtggtgaatatttactgggcacttactctgttctaggcacggggaggtaaaggtggttaggatatagacactgtctagaaagagagacgcacaaataggtcattataatatatcatggaagatgctaagatggaacaacacacagcacaaaaagagg

SEQ ID NO: 265595 - DNA, 484 bp, Homo sapiens
tgttttgcgaatgtattatagtttatttttccagcagcagcaggtgttcctaattatggttttctttaggctaatactggaattagctgacacactctgagtgtgtgtgtatatatatatatagaatatgatatataaaaaacatgttgggtaactgagcagggagaaccgacccaagactcaagctgtttgatgtacaatttgcctgcaaagtcttaatttttttttttttggtaacttacctgtcagatttcacacattaaatgagaactgttcctcaccttgatgggctgcataccaactctaaagacgccataatttttctgacattctcaaaatttctatttgtgatttacctccttttcctcagtcatgggagaatctgggcttctgtatcagcctgttcattgcaacgtctgtccctgaaggactttgggggctgggaggaatgcactgggatcagaatgagactgcagggcttcag

SEQ ID NO: 265596 - DNA, 363 bp, Homo sapiens
aggaaagtaaaagaacatgaagcagtaatttgtgttggattatgatggataataatcatataaaaagtttcattctcactagtaatagaaaaaaaggcaaacaaaatcaagagcgtgtaaaagatcttccatcttgatagacacatccctggggtgtgacgcagcctcacacgcgagggtgacgactaaatctctccggagagtcatctcactccaagagggatccgcgcccgtaatatgtcccaaccctctgctgccgtgaaatcactcaccgcttcttggaatctcttctaaggaaataagcagagatgcagacaaagatttttataaacagaaggtcactttcattttattttaaatggt

SEQ ID NO: 265597 - DNA, 190 bp, Homo sapiens
tggcctcccaaagtgctgggattacaggcatgagccaccgtgcctggccgagactaaggatttttaatacaaaccttacacaaatcatagctagcctttagaaagctgattctggaggcaaagaatggctaagcaccacagagaggaaatctgttaggaaatgaaggatacagttcataccagaggcaac

SEQ ID NO: 265598 - DNA, 226 bp, Homo sapiens
gggtattttcattttattatgacttctgaatactccacagtaattttacttcttaaaacaatgaaaataaaatttccctgtaccttgaaaattagctggaaaaaaaaactataattctttacattagggtcaaataaatgttaaattcttggagcacccccaacatccagtatctcatcagacaccatttgtccctctatgaataaaataaatttgtgtgtgtgta

SEQ ID NO: 265599 - DNA, 403 bp, Homo sapiens
agcctgagcagctggagtaatgttagaacaaataacaaaatatacaatcacaaagatgtgattttagaatattacatctttgttttgagcaatatctcaaaattacattttcttctaagaaaaataataattgcggcagggcatggtggcccacgcctgtaatcccagcactttgggaggccaaggcgggcagatcacctaggtcaggagttcgagaccagcctggccaacatgatgaaacctcgtctctactaaaaatacagaaattacctggcatggtggcacatgcctttcatcccagctactcaggaggctgaggctcctcccaggaggcggaggttgcagtgagccgagatcacaccacttcactccagcctagatgacaagagcaaaactctatcgc

SEQ ID NO: 265600 - DNA, 413 bp, Homo sapiens
ttttttgagacggagtctaattatgtcgcccaggctgaagtgcagtggtgcaatctgggctcacagcaacctctgcctcctgggttcaagcaattatcctgcctcagccttctgagtaactgggactacaggcgtgcaccaccacacccagctaatttttgtatttttagtagagatggggtttcgccatgttggccaggctggtctcaaactctgaacctcaagtgatcctcctgcctcggcctcccaaagtgctgggattacaggcgttaagccaccgtgcctggcctcagtgaataatcttgtacagtagtcctcccttagtcaagaccctcacagtggatacctgaaatggcagatagcaccaaaccctatatatactatgttttttcttatatacacacataactatg

SEQ ID NO: 265601 - DNA, 669 bp, Homo sapiens
acaacccagctagttaaacgtgagcattaaattttttttaaaaaaaatccccctagtttcccaagacagcatttccatgaatttagtcttctgtaaatcactgggcatttccgtgagccctttctgcctccactctcttctctgtctttgcagtttccttatccccgaccgcgcccccccttccaacccaatcaccccacaaacaagatttctagacccagtataaaatgatccttttagtgacagtttcttgttatctggccgatccactggggaccgggctgcagcctttaaaatttttgatcctggaggccgccgagctgaactttccggcaggacccgggcgaggggggcttagcccttcgtttcgatcttcccaccaacatccgagagcctaatcagcgcgcccacggaggcgccttaagggcagttggggaagatgagcagagccgggaaacagcaagaggtatagaccctctgcagcacctctccaattccgcggcccttccgggtggcgtatacagctccaggattgggaaaggggctccggtggcccggcccgcaggtctccccgcgccccggccgcgcccacaggcccgccccctagccgccggggttgctatgcgttgccgtgaaacgcctgtcaataaaccctgtttggacagtgag

SEQ ID NO: 265602 - DNA, 819 bp, Homo sapiens
acaacccagctagttaaacgtgagcattaaattttttttaaaaaaaatccccctagtttcccaagacagcatttccatgaatttagtcttctgtaaatcactgggcatttccgtgagccctttctgcctccactctcttctctgtctttgcagtttccttatccccgaccgcgcccccccttccaacccaatcaccccacaaacaagatttctagacccagtataaaatgatccttttagtgacagtttcttgttatctggccgatccactggggaccgggctgcagcctttaaaatttttgatcctggaggccgccgagctgaactttccggcaggacccgggcgaggggggcttagcccttcgtttcgatcttcccaccaacatccgagagcctaatcagcgcgcccacggaggcgccttaagggcagttggggaagatgagcagagccgggaaacagcaagaggtatagaccctctgcagcacctctccaattccgcggcccttccgggtggcgtatacagctccaggattgggaaaggggctccggtggcccggcccgcaggcgcctggcctcgaagccagagggaggagtgcggggcgtggggtcggggggtgccgggcagaggaggaagccgtgtccgggtccgctgggcgaggggtcctgggtcaggggtcctgggtcagggccggtctgagccccggtgccccgcaggtctccccgcgccccggccgcgcccacaggcccgccccctagccgccggggttgctatgcgttgccgtgaaacgcctgtcaataaaccctgtttggacagtgag

SEQ ID NO: 265603 - DNA, 484 bp, Homo sapiens
tcgagctcggtaccccctaggtatatgtcgtgctgagtcaacttaatatggtaatctctccttccaaccttcattctagagcgattgaacgctttacagcaactgaatgattttacgtagatcttttcatctctaacctaactcagaaaataactctagccactgaaaagccaatcagcaaggggcttctaaccatgaagttccttttgcacatatgagactgcatgccaccctctgtacccggactgcctcctgctgaaagcacatatcttacttcacagatgactaaagttctgagccaatcaaaggatttaaaactaaactaactaaaatagttacaaggattaactaattttgttttctgtaaaaaatcagaagattgaagagatcaattgcttttatgttatgctctaaaccgaggaacaaagggcctgctctgattccctggcacgacatatacctagggggcatgttacagacctgc

SEQ ID NO: 265604 - DNA, 383 bp, Homo sapiens
tcgagctcggtaccccctaggtatatgtcgtgctgagtcaacttaatatggtaatctctccttccaaccttcattctagagcgattgaacgctttacagcaactgaatgattttacgtagatcttttcatctctaacctaactcagaaaataactctagccactgaaaagccaatcagcaaggggcttctaaccatgaagttccttttgcacatatgagactgcatgccaccctctgtacccgatcctggtgagtgtgccgctggtggagccgcaggtgatgcgcaatgtgggcttgataaaacgccgcgggcggacattgccgccggcggcgttggagttggagcgactggtgcgagagatgccgttcgcacgacatatact

SEQ ID NO: 265605 - DNA, 281 bp, Homo sapiens
ccaacatggcaaaaccccgtctgtactaaaaatacagaaaaaaaattagctgagtgtggtggcacatgcctgtaatcccagctactcaggaggctgaggcatgagaatcctttgaacccaggagcctgaggtggtagtgaaccaagattgcacgactgcactccagcctgggtgacaaagcgagactctgtcttgggaaaaaaaaaatacagagaagattggaaaatattaaatgtccatgaaacaaccatccagaatgaataaattttttatgaaaagtt

SEQ ID NO: 265606 - DNA, 784 bp, Homo sapiens
caggcaaaaggatgtgggggaaacctcactgtggctcatcaccacgtccatctgcctcaccaagttcccagcaaggagtcggccctgatgggtgtattcctcagccacagctcctcagtgggccagcaaggtgactcgaagggcctctgccacctctaagattggggaacaggaaagatggacctggccccaccccagcctgcgggtcaccacccatggcgggacaagtgagaaaagttggccttgctcaccgctggagcccaaaccacaggtttcatttccccttgataaagacaatgtttgctattgttgcatctgatggtaaaagcaagtcatattcactatcaaaaagtttgaaaggcggccgggcacggtggctcacacttgtattcccagcattttgggaggccgaggcaggcggatcacaaggtcaagagatcgagaccatcctgtccaacatggtgaaaccccatctctactaaaaatacaaaaattagatgggcatggtggcgtgcacctgtagttccaactacttgggaggctgaggcaagagaatcgcttgaacccgggaggcagaggttgctgtgagccccaagattgcaccactacactctagcctggcaacagagcgagactccgtctcaaaaaacaaaaaaaaaaaggaaaataagaatccagcctcaagcctgtcacccaggaacaatcactctagttggctggtgtatttccctccagtctttttttcagtgtatgtatataaactttatttatatatattatttta

SEQ ID NO: 265607 - DNA, 592 bp, Homo sapiens
gatggacatctgttcccagcacagagagcttctagggtcattaggtttttgttctcagagatattctgattggtaaaggatggggtgtttgactgagtgtggagttggcaacaaaaatattggcctcttttactggagcgtgtccctgaaaaatggacaggagagctaatagacaaacaaaatccacatggaagtgtggtggctgcaaaacgaagttcacagaatttcaggcaaaaacatcatatatgtaatttaccaaacagtggaattagaagaataaaaaccacaagagttggtgaagttgaagaggaaactccatgtggagacacggcgccgtacttcagacctcccggtctactaatactgatggtgtggctggaacctggggtgtgtacagccctatccagaggatgctcctgtttcggctgattcctctacaccttgtgtggggaaggtgggcaccagcggctccctagccgcagcagcctcaagtgcctccgcagccttttcagcttcctcattaaagtaaaaaaaagtgtgttcttctttgaaacctatttaaagtaacaataaagtttactgtctaatccaa

SEQ ID NO: 265608 - DNA, 414 bp, Homo sapiens
tctctaaaatggccgctctgggagtgtctgtcttatgcggttgaagataagggatgaaatatgcccgggtctcctgcagtgccctcaggcttgctaggattaggaaattctagcctggcaaattctagtcagactggttgtctggtctcgaactctgcttcctgttaagatgtttatcaagacaatgcatgcccagtgggacatggaacctcatcagtaattctaatttcaccctggccttgtgatctcactctgcccttctgcccttgtaatcttttattgccccttgaagaatgtgatctttgtgatttactccctgttcatacccccctccccttttgaaatccctaataaaaacttgctggttttgtggttcagggggcatcacggaacctgctgacatgtgatatcacc

SEQ ID NO: 265609 - DNA, 370 bp, Homo sapiens
ggcccttctaccttctgtcctgtgaggacacagggttcctccccttcagagaatacaatattcaaggaatactattgaaagcagagactggaacctcatcagacatcaaacctgccggcactttgattttggactttccattcaccagaactgtgaggaataagttttaatttttaataaattacccagtctctggcattttgtcacagcatcacaaagtgacctaagacaaaaagaaaataccttctaatgataagaataaagagtgttggacaacaatggggtggaaatcacttctaaggagtacaaatggggcctgatcaaataacatttattttctccagtttaggggaatcagatgacagtttcc

SEQ ID NO: 265610 - DNA, 433 bp, Homo sapiens
tactcaacgtagtactggaagtactaaccagatccatcaggcaagagaaaggaatgaaaggcatccgaattggaaaagagaaagtcagactatctctgtttgctattgatatgattgtatacctagaaaactccaaaagactcctagtttgataaatgaattcagtgaagtctcaggctacaaaataaatgcacacaaatcagtagcagtcctatacagcaacaatgatcaagctgagaacaaatcaagaactcaagaaaaagaattttcttctgttacctttaggtttggtttattcttgtatctctagttccttgagagctagagatgtgttttagaaaagaactcaatgcctaaactaaactatttaatagggtgtcttttccctattgggttcttttctagaagaactcaatcccttttacaatatctg

SEQ ID NO: 265611 - DNA, 281 bp, Homo sapiens
aggaaaaacaaagcctctgttaaagctctgcttacaatgaaatgtaactgaagttctatccaattctttcctcttctctgtaaacttgttcacatgcaacagcctctctgatgttaacaggctgttcctcccaagtgcctgcagatcatggctataggagtcactggaaggaacttgactcggtggcagtttggaggcttcccgggctttaatgatgaaaaatgatttggtcatttaagacagagccccccgctctgttgcctaggctggcgtacagtggc

SEQ ID NO: 265612 - DNA, 323 bp, Homo sapiens
gaaatggaagtggaggggaggctttgtactcagtaggaagtttgccagtgagtaacagggagcagcagtggaagagggagacagagagaaaggaaaccgacattattgaatgtattgaggcctctgcttgttccttacttgtattatctcatttaatcctcacaacagcctgtagtacagaaaactgtccccttccccaaaaaaatgtccttgtgcttctccccagaatatgttacattatgttgcaaaaggtattttgcagatttggttatgttgaggatgttgagatggggagagtatcctggatactctgtctcaaaaaa

SEQ ID NO: 265613 - DNA, 269 bp, Homo sapiens
ctggagtgcaggggtgtgatcccagctcactgcagcctccaactcctgggctcacacgatcctcctgcctcagcctcctaagtagctgggactacaggcatgtgccaccatcctcagctcagcttttaattttatatagagatgttatatataaacagatgttgcccatgctggtctcaaacttctggcctaaagggatcctcccacctcagctcctaaagtgctgggactacaggcatgaggctccatgcctggcccaccatgcctcc

SEQ ID NO: 265614 - DNA, 525 bp, Homo sapiens
tgtcttaattttgcatactttttttttctgtcaaatttgtcaatttttttaaaggattctggatttgggttgtgattagaaagaccttttacacttaaacgtattaaggaaagatctcgtgttccttctgaaaactttatagttattttctacctttaaatactttatctatttgcaatttatcctggtataagatgtaaggtatgaaaccaacttaattttcccctgtgagggcatcacagtctttttttaatcgcccatcttttccagactgcttgaagacattaactttaacttttattaaattccatgtttagtctatgtttttttcactttttaaatacttttctgttataccatattgacttaatgtctatttatgcaccccaataaaatggcattttggttactagggctttgtattattttctggtaaatttaattcactcattttttctttttacttctagaatttttcttttttttctattaaatataggaactgtagaatcagcttacttagtt

SEQ ID NO: 265615 - DNA, 472 bp, Homo sapiens
actttttcttaactactgcaaggaattaataaaagtgttaatctcaacatattgattataaatggagcaatatatatttttccaattaaattgggtcaatattaaatatgtttaaaatatatcagtattttgatcaagagcaatttattttgattgaattttaaatgtgggtttagttaatttgatggcaataagtttttcttaataatgttaagattgtaaaacaatttattatttccagagccaatattttgctaaagctacagtgaaatctcaaatgaatttcagaaatatcaataactcttaattgccaccaaaatacgatagctcttaacattttatagctacagttattaaggctgttaaactgcagatatccacattgaaatatttgttattacatctcctttggtgctgtttggtttgggggatgaaagaaaataaaatgctcaggattgagaagcatattaaa

SEQ ID NO: 265616 - DNA, 562 bp, Homo sapiens
caggaaaaaattaaaatatactgaaaactgtcctcttcccctcccctcccttcaattcattttctgttccattatggaaaaaaaaccccaaatttggaattttaatgttgtttttcctccattggttgtttagttagtgattttgccgacttcctggatgttcatttctggttctgcacaaaagagtcacatttccttttggaatcaggaccaggagacagaagcggactcgggaactgtgagtgccccccggtcttccccggcgcctctgaccccttcctccatctcgcagccttccctgccttcagcgcggagttccctttctccagggcttcttgtctgaactcaccccctcggctctcagcaccattctccacttttaggaaaagaaactctacaatttctatgcaaacatcggataagaaggggagggggagtgactttgattttcattttaagactctgaaagacggagaaagtaagcagaagcgggctggtgtatttcagaggctcccagtgagtccctactaaatttacctaataaaatgaatttttaaaattt

SEQ ID NO: 265617 - DNA, 354 bp, Homo sapiens
attccttagactccttaatcattctttggttaattacctcatttggccaagtaaataatcccggttttaaaatggaaccccaagttcacttttactaacaagttttatttctgtactatcagcttgttatctaagttctagttcatgtcagaggttcttcttgatatccagctattatttatgaggctgctgctgttatgaattaaggcaattctaacctagtctagatggcctcagctttccaaatacttcacttagaaggaaatatatgttttctctgctagaattctctgcatctgttttatttgctaccacagagaaaagaatgaaaaaagaaacaatacagagcattag

SEQ ID NO: 265618 - DNA, 358 bp, Homo sapiens
tcttaaggcaggaaaatgacgggtgtggtgggcttcctcaccactctcaagtgtatcactaactgtaacagcttttcaaaacaaaacagtacttacacctgaccacttagttcctggcaccaactattagatttacaatacagatggctcctcaacttacaatggattgtaagttgcaaatgggttgggcatggtggctcacacctgtagtcctaaacctctgggagtccaaggtgggagaatggcatgaacccgggaggtggagctggcagtgagccgagatcgcaccactgcactccagcctgggtgacacgactctgtctcaaaaacagacagagcaggactctgtctcaaaaaa

SEQ ID NO: 265619 - DNA, 393 bp, Homo sapiens
gagctgcttatataatttggtgaagataaagttaaaggtctttgtttcttccgcaatggaaagtgtgagtcattttaattacatgttcttagactggtgggacatacctggtttctttattcttgtctgtgtagtgctctagccaccaacacagtatgtctgcagaagatttaagaaagtatctaagcatttcctctcaaatgtatttgtgtcctagcaagcctacacatctctactaatgtgtgagaaatgaaactcatgcgcatagataaatctaatcttgatttttaggaagaagggagtagaaagcagtaccttaaagaatgcaggaacatgaaaaagatgcacagaagtgatatggaaagatcactaaaatataatgttaaatgaaaa

SEQ ID NO: 265620 - DNA, 368 bp, Homo sapiens
catttttctgggcaatggttttttaaatatttccccaaagcacaggcaacaaatgcaaaaataaataagattggatcaaactaaaaaacttctacacacaagggaaacaacctaatgaagtgataacctatggaatgggagaatatatttgcaaatgacacatctgacaaagggttaatacataaaatatgtaagaaatgcaaacaattcaatagcaagaaaacaaccccattgaaaaatgggcatagcaaggtgtggtggctcatggttgtaattccaacactttgggaggccaaggcaggtggatcattttaggtcaggagtttgagaccagcctgtctaacatggtgaaaccttgtctctactta

SEQ ID NO: 265621 - DNA, 818 bp, Homo sapiens
cagattcttatttgccatctcaccgagaaaatgagcatggtatagttttgaccagggatgtagccataaaactcgtgagcttatatttcaccaaggatgaagcacttccctgggcaatgagaagaaaccaacacatgcctctggagtcaagacatctgtttaagtttgttaactggagtattcttcttcctgagaagtatagaaaagactatgtatatactgaaccaattcttggaggacttagttattcattgccaggacttacagacagcagagcattacccttgttggccaatgattctcagttacagaatttgccactaacctatattcttacttgtcaacatgatctcataagagatgatggacttatgtatgttacaagacttcgaaatgttggagtccaagttgttcatgaacatattgaggatggaattcatggagctttatcattcatgacttcaccattttatttacgtctaggtcttaggataagagatatgtatgtaagttggctggataagaatttataaatatgtgatgtgtatgtatagcccttacatagtggattgtaatttgtgatattttgtggttttggagcaaagaacaatgtcatttgagttatctaaatctacatttgcaacatttgtagcagttaatgtgtgtccttgaagagttattaaattttctgacttgcagaccctgaatatgtaaaatgtatgtaatcctgcctattttctccttacttataatttattataattatgttggttctaataagaaccaatgcttattaaagttgagaaataagagtggtt

SEQ ID NO: 265622 - DNA, 596 bp, Homo sapiens
tttttttgtatttttagtagagacagggtttcaccttgttgctcaggctggtctaaaactcctggactcaagcgatctgcccgtctcggccttccaaagtgctgggattataagcatgagccaccacacccagcaaaataactacaatggagagatctggaagatcaccttaaacaagtgatcaaacttagcattatgagccacctgcaatcacgaggcaggaaggatatatcacctatgcagtatttttcccaaaaatgcttaccttgaatctcatcatgtggaaacagacaaatccagattatgggacaatttacaaaacaactatctttgactcttaaaaaatgccatgtcatgaaagatcaaaaaaagtagaggaatgttttagattaaaggaaatgaagacatgacatgcagtgcctaatctttgattggattctgtgctattctttcatctttctggtatgtttgaattttttttgaaatataaacttgggcaaaagagataaccaagataattgattaatttattgttatggctcattgggggcagtttcagagaaataaaaacaatctttgtaactggagtaaattct

SEQ ID NO: 265623 - DNA, 400 bp, Homo sapiens
aaattgctgcctcattctactgagaaaaagtttggtttaccatggttcagcctggagatccaggagtgaacaagatgatgaatgattgacaggagagacaacaagttcctggcctgcgtttcaccccagtggccgatgcatctgaaatgcctgcagttctcagctcttgaacagaactgaggagtcttgaaagaggccatggcatgccctgtggggtctccaggcagctttgataggcccagttggcatttgctataaaaacttattaaatccaggcctttcttctgcaactgagactccagaacagctgcccctgacaaacaataaagaagagctatcgaagtcacatcatgggctggaaccagaaaagaaaataataataaaaaaaataaaaaataaa

SEQ ID NO: 265624 - DNA, 217 bp, Homo sapiens
cccattgaaagtgtgcaggtgggggtctccgtacagccacagtgtcccgtagtgcatggggtagcaaccccagacacccctgtgctggcagcacagctcacagggcctgcaggcatgagggtggcactcgagcgggcgtccaggtccatggtacacgcacctctgatcacagggggctgcaggcagcacctcagtacccaggcggatatagcggccc

SEQ ID NO: 265625 - DNA, 352 bp, Homo sapiens
ccagtatattagtagcaaatattctgggctccagttccatctttgctattttctagtcatgtggtcttgggcacaacatttatctgtgttctgatttccttatcttttaaatgggaatgatatgacaacatacctgtcaacaattctgtgaggatcacatgaaattatacatgtgcaaatctaaaacattatatgaaaatagcttaatttcaatatatgctataatatggtatgaaagtttgtattccctattgggaagccaatcgatagtatttgtggttaaaagttatttttataatatacattaacatatataatataaaattattaaaaattatgattaaaaaatcaa

SEQ ID NO: 265626 - DNA, 371 bp, Homo sapiens
ttttccctagcaagggatcatctgtcaagtaggcactaagtttatctcatctaataataataaattggagcctgagtggttgacaataagaagataatttgtgactaatgtgtattgggctgctttatacttttgttttgttctggcaccattcttttctctactactcatccccattctaaacatcttgagcataaaacttattttttggtgtttagtctggagccatgctccaatatcagccttatctgatagaatgtgaagtaattacagcaattggaacgagctaattcagcagcattagaaagtttagaaattgaaacatccatcaagagaaggataaatagtgataaacttctacaatagaattc

SEQ ID NO: 265627 - DNA, 438 bp, Homo sapiens
aagatggggtaaactgagcaccagagagaggaagcaacctgcctcgggtgaccaggccatcagcaacagggcagagtggcacctgaagtgcctgacttccaggctgtgcttctctttctgtctcttgcctaccagcccctcgagcttgaaaaaagtgttcccatcacagtgggatgttgacagtcacatcactggctgacttggggttccttgaaagcccatcttcttccaccacagcaggcttcaaactttgtttaaaaatcccatggaggggcactgtggcctctgcctcctcagagcagtctctcaggggctgaggctttgctgattcaaagctatgtcatcactcgcagggaatctctgggggaggccatgccatgcccctactgtgggcatatttgggcaaagtcaataaactaggcccagatcaagtccagc

SEQ ID NO: 265628 - DNA, 300 bp, Homo sapiens
cccccaagcccaaaagcttcaattacccattgctctcgtccccaggtgatcagtttgaaattcagctaacccagcagctatggtccctcatccccaatgaggatgtgagaaggttcatgtctcatgttatctggaccttgaaaatggaatgttcagaaacacatgtgcaagggacctgtgccaagctcatgtcacgaacaggcctcctgatgaagcttctcagcgagcagcaggaagcaaaggcatccaaggcagaatggtctgtagaccaatggaaaactgatgagactccatcttaaa

SEQ ID NO: 265629 - DNA, 329 bp, Homo sapiens
tgtattttttggctgcataaatgtcttcttttgagaagtgtctgttcatgtccttcgcccactttttgatggggttgtttgtttttttcttgtaaatttgtttgagttcattgtagattctggatattagccctttgtcagatgagtaggtggcgaaaattttctcccatgttgtaggttgcctgttcactctgagggtagtttcttttgctgtgcttaaaatggcagaattttctcttgaacaatgagccttttgactctgtatccagtggtttttaaactcttccttctaaaattttagagttttctaccttgttctaaagtaagtg

SEQ ID NO: 265630 - DNA, 566 bp, Homo sapiens
agagaggcagaggaatcctagggagggggaagtgaggcatggacaggcagagggactgcactattcaagggcatgatggagagaagtacgtgcctggatttccaatttccctaaggataattttacaccagatcttctttattttaaaaatccaatccttttccttaataaccccatctgtccctgataccaccatttttttctaccagtctctcaggctagaaattttgtggttatctttgcctcttctctccttcatcctgtaaatcctacctgttgggaatacattactgtcctttcttcaaaatgttttatctgtcttttctttttcattctctgctattaactataacttcattctcagttccactgctgcctagctttctgtgccctgctagattcatcattattcatccaacaaacataaaaggaaaaaattggcctggcgcggtggctcacgcctgtaatcccagcactttgggaggccgaggcgggcggatcatgaggtcaggagatcaagaccatcctggctaacatggtgaaaccccgtctccactaaaaataca

SEQ ID NO: 265631 - DNA, 535 bp, Homo sapiens
agccagaaagagtgaaagaaatagaaccaaagtcatctcttaggagaagagaaataaatgcaccatctgaaaagtatccagtattcaagtaagttagacaaatgaaaaacattgcagcaagccattctctcaaatgaaaccaaatactaaaagataaacaccagagaaatagcaggtcagtatgtggaaaatatggggtagtacttttaacatattatccttggattaatgacatcagatattcaactgatcagagacagaatacttaatctcatcaaaaaagataagtagcaataagagaccttaaaatgatcactgaggccctccaacagcagctatttctgcagtcatgatcacacaatactgcatcctcattttctccctcccctggccctccaaaactttgtcatcacactctgaggaagagaatcactaagcgcagcctgcactcaagatgtacagagttaaactctgtatctctgggcagagggaagatctacataaattatttgagactctttctccaaaaaaaaaa

SEQ ID NO: 265632 - DNA, 373 bp, Homo sapiens
taatgccactgtcccttcacttgtaccccggatgtaactgtattcagctcaggtgccttcatcagcaggagcactgtaagcgtaatttattaaaagtgaaacaattgtacaagcagttaatcaaccaccacagggcataattaatgaagcagccttcccctccccacccccattgattttgtgaaactccctttttctttcagcttgatcaagtattccaaatttagaaagctctaaggtggcctacagaaaaagaaaaaggccacataaggtccctctgactttcagtaaatagcagcatataaatacaagaaaaaatagatattgtcttgtgcagcattaaaaaatcaaaataaaataaatatgagcaaaa

SEQ ID NO: 265633 - DNA, 382 bp, Homo sapiens
taaccacatttgcaaacatttgcaataaagtgaaattagttacaaaagaagtgtgaaaagggaattaggctgagccacagaaaattgccaaaattcaatccttttagaactccataacagcaatttcctatggctcaacctaaattctaaaggaagttaaggatgaaaccattaatctaagttgtgggagggctgcagggggagtcctggaacgtcagaaagaagttgcagcatttgagcaatgcgccaaggaacttagcagtctcagccaactggccggtgctgctgaagccagagacagtgggtgcagtgagtagtgagttgtaggtggagaagtgaaatcaagtgagtgtaggcttttatgatgtttgaaagtgaaggg

SEQ ID NO: 265634 - DNA, 461 bp, Homo sapiens
tgacaaaagtatttcaggagtttggcaatgaaaccttgtatttattatgaaacatgtatcctctggtgtctagaacagagcactttctgaggctcaagaaagatacatagcaatgagtagatggaaccatcttcctgtctcagaactgagccaagtcatttaccagttgtacctggtcagctctttggggaagctttcaaaagaggcagattccagcttagaaaaagcatcagtgcactctgaatccctaagatcattaccagggccttcatggtatgttataaaaactggagaacatctagatgagctgatgagttgctaccgtgtctaggtttatgttttatggtggccaaaacaaatgaaaaacaactataagtactgtgtttggcatcagtactacatgatagcgaatcataacaatgagactgaaaaggtgacaaagtaacctaaaagcagataaa

SEQ ID NO: 265635 - DNA, 390 bp, Homo sapiens
cccattttacagatgacttgtccaagatcacatgagtagtaagtagcaaagccagaattcaagttcaggtaaacctgacttcttagtggggccagtttcacgggtgtgtggcctgtgcagtcacacagagttctgcactgaagagggcctccacttggtttaatgttctgctgtgactctcttgaacttctgatatttttttaaacaatgaacttatattttagaccctctgaattctttcgctggtcctgcttgagactgtgtttctagtggtgccatgtctactggaatagaagtacaatagttagtgcagtgcctggcccaggagctcctcaaaaacaggaattccatttccttccctctaacctctgcttctttaacaaagcagcc

SEQ ID NO: 265636 - DNA, 518 bp, Homo sapiens
catcaaacaggccgggcacagtggctcacacctgtaatcccagccctttgggaggccaaggagtgcggatcacctgaggtcaggagttcgagaccagcccgaccaacatggtaaaacctcgtctctattaaaaatacaaaaattagccgggcatggtggtaggcgcctgtaatcccagctattcaggaggctgaggcatgagaattgcttgaacccagaaggcggagattgcaccactgcactccagcctgggggatacagcaagactctgtctccaaaaacaaacaaataaaaaaaaaaatcaaacaatgctcgggggaaccctcagcttttgaatgtacatattgtgtacatatctgagttcataagataataaagggccaaaaatgaagacaaaactgaaaaccagagcatttaagaataagcattaatgctatggcagcatgagaataagagagtgaagtacattgccagtattagtattgtatcccagagacttgaaattttatgcccacgta

SEQ ID NO: 265637 - DNA, 222 bp, Homo sapiens
gagaaattctggcagacagaccttgcctccccaactgataaagtccagccaaagctgtggtggcttggagagaggtggggtctctggagtcttgtcctttgatgatgatagtgatgcagttccccaatttgggaaaaataacatttatgaagagaaaatgcatggtcataggaaaaaactggaaaacctcttcacgaataaacatggcatttttagtcatca

SEQ ID NO: 265638 - DNA, 400 bp, Homo sapiens
gccctcttattttgactcaggaataaattatctcaatggctacttacatggtccagcatagcagaaaaaaaagccacactgagcaagcagtggtcctttccatgctacacaagcaagaaatgcctataaagacagacttgagtgcagtctaaagaatcttttgctttgccttaacactctacttctggatatccttgctcaaaaagaagtctactcaagacagggaggttcctgtggacagaaacatctgcttcctgcttatcctgtatctcagcatctgaatggtcatgactggaacacaggcagacttcagaaataaatacataaatatctcatactcctcgaatcttttagaaaaagagtgtgggtaacaataaacatatctgctgagaaatgacca

SEQ ID NO: 265639 - DNA, 587 bp, Homo sapiens
ctttcaggaaatccagcctattcaaggaacatttccaatcctctgggtaggaggtttaaaacatctgcctagtctaatattgaaaggccaatgactgctaatgacaggccaatgactgccatatgtttcccattcttctgctttttaatgtgagtatttgttgaaggtatcttgactctgttctactactggataatgtgtgagtgggaggtgggagggccaggtctctggatcaaaaggagatatacacagacctattttacaggctccttcacattatcccctgacataaagactaccatgcgtcatccagggatcctgggttttgaaattgatgccatcactgagacttttgagttttcttccctcagaggaaagtgaatgaatgcattttgtacatgggaagaaagatgaaggaaatacttcatgccctgaagtgaagactgcaattatcattagtactattcaccaaatatttctgctttactgcctcatgacaggattgcacttcccctccccatcttttaaaggtaggcataactatgtaacttgctttggctaattaaatgtgaacagaagtgatgtgt

SEQ ID NO: 265640 - DNA, 581 bp, Homo sapiens
tacagccagtgcatttagtgcatgatattttaagtttcctctttggaaacagcattcagagattaatcatggtcagtttagagcccagtagggtagtcatctcatggcctcatggtgcagttacaagttcaggttaccctaagcatctttgtttttttataatatggattctaaataaataagtgtggctgtttttgaaaatttggaaatcacagactgtcccagacttaaactataatttgacttaaaaattttcaactttgcgatgttgcaagtgctgtatgtatactttgagtacccatacaaccgttctgttttttcactgtattcagtaaattacatgagatactcaacattctattataaaataggttttgtgttgggtgattttgtccaaccgtaggtcttacctctgtaagtgtttggagcacatctaaggtaggctaggctaagctgtgatgtttggtagattagatgtatgaaatgcgtttttggcttaattatattttcagcttactatgggtttatcaggctgtaaccccataataagttgaggcactcctgcatctgtgaagtttaaa

SEQ ID NO: 265641 - DNA, 204 bp, Homo sapiens
tccagggccccttgctggctggcttacatggaatgttccagcctctgtttgaaagtttccactgagaggaaccactgcatcaggcttatcaaataatacaacgtctgaccaagggttgggatttgttggctgtaataatgactccattctgattttggtaataataaaagtgactgtgagaatgtcattcctaacctaaggaag

SEQ ID NO: 265642 - DNA, 293 bp, Homo sapiens
ttcaaactcagcattttggccctactgtcctgttccagaacagactgaccactgctgggggtagggggttggggggacccttggaattggaactcaccccagaagcagtggagagtctctgcctccaaagacgacactgagttctttctcccaagaagtccacccacggatgaccagagaaggtggaggaccagctcctacagaggtcagaagcacagccagacatcgtccccaacccaagattcagaacataatggtttgaaaaacggacctcagcagtccgggcagagttt

SEQ ID NO: 265643 - DNA, 223 bp, Homo sapiens
gtgagacccggcaggtcaggcttcttccccagaagcagtggagagtctctgcctccaaagacgacactgagttctttctcccaagaagtccacccacggatgaccagagaaggtggaggaccagctcctacagaggtcagaagcacagccagacatcgtccccaacccaagattcagaacataatggtttgaaaaacggacctcagcagtccgggcagagttt

SEQ ID NO: 265644 - DNA, 315 bp, Homo sapiens
ttgaccactctatgccacttaattggagaattcagtctatttactttcagtgttattgttgagagctaaggaggtactactgtcatattgttacttgttttttggttgatttgtaacttctcttttccttttttccaccttacttactgtcttcctttgtggttacgtaattttctttgataatatttttaaatgtgttgcattttatttttggtgtatctatgatagggttttgctttgtggttatcatgaggcttacaaaaatatcttaaagatataaacagttattgtaaacagacaattttgaccattaag

SEQ ID NO: 265645 - DNA, 234 bp, Homo sapiens
agtgggggaagtcctcaacacctcttattctccctactatggacccggtgccaggatgaatgagtcacagtccctgccctcacagtcagctgggacaggcaccacttgacggaggaactgccacaccaggggcttcctcctgccacccagagtgctggggggcgagcccaggagccaggaactctgcccaagtgcaccagggaatgccctggagaggagaagtttgagaggagt

SEQ ID NO: 265646 - DNA, 451 bp, Homo sapiens
tacctggcaaaaacaaacacacagatactgccttcatgggaatatcatcaatataggcccatctatagattcctatagctaaaatgctgctgattatgatcacacaattcaaaattacattatatgagcagtagtcagcagcaatgacacggttcttaagtaataaaagagagaatctaggtctgggcatggtggctcatgcctgtaatcccagcactttgggaggccgacgtgggtggatcacctgaggtcaggagttcaagaccagcctggccaacatggcgaagccctgtctctactaaaaaatacaaaaattagctgggtgtggtggcgggtgcctgtaatcccagctagttggaaggctgcgacatgagaatcactggaacctgggaggtggaggttgcagtgagctgagactgtgccactgcactccagcctgggcaacagagca

SEQ ID NO: 265647 - DNA, 310 bp, Homo sapiens
tattccctggcagttctacagggcctggagctgatacgaaaaacctcccttctttcccaaatggtccccagcttccccgttcactgaaggccctgcagtcgggaacagtcaggactttgcacccagttgttgtgggtgtttggccaacccttcctcttgtgtgattcatggacctgcagcattgcgtcacctgtgagcttttggaattgaagactctcagggctcacccgggaggacctgctgggccagaatctgcattttaacaagatgcctgggtgatctgcatacacgttcagatctgagaagtgct

SEQ ID NO: 265648 - DNA, 1714 bp, Homo sapiens
tgtctatagtaggtgcggagaagaaatgtttggcagatgaagaaaatgaggtgcagagaggatttaagagattctctcttactgcctgttcagggtcagtccagaattgagggtctccgggggagggcagaggctttgccctgcaggggatctgtgggagggggttaggagggagcagatgagcccaggatgaatggtcagagtcaggtgctgcccggcggaggtcacgagtccagggaggggatcaacatggccgctgcaccccggactgtgttgatctccggctgctcatcaggaattggtctggaacttgcagtgcaactggcccatgaccccaagaagcgctaccaggtcgtggccaccatgagggacctggggaagaaggagacactggaggcagctgctggggaggctctggggcagaccctcaccgtggcccagctggacgtgtgcagtgatgagtcggtggcccagtgtctcagctgtatccagggagaagtggacgtgctggtgaataatgctggaatgggcctggtggggcccctggaggggctcagccttgctgccatgcagaatgtctttgacaccaactttttcggagctgtccgtctcgtcaaagctgtgcttccaggcatgaagaggaggcggcagggccacatcgtggtgatcagcagtgtcatgggcctgcagggtgtcatcttcaacgatgtctatgcagcttccaagttcgccctggagggattcttcgaaagcctcgctatccagctgctgcagttcaacatcttcatctccctggtggagccaggccccgtggtcaccgagtttgaggggaagcttctggcgcaggtttctatggctgagttcccaggcactgaccctgagaccctgcactacttccgggacctctatctcccagcctccaggaagctgttttgctccgtgggacagaacccacaggacgtggttcaggccattgtcaacgtcatcagctcgactcgaccacccctgcgccgacagaccaacatccgctactcgccgctgaccacgctcaaaaccgtggattcctctggcagcctgtatgtgcgaacgacccaccgcctcctcttccgctgtccacgcctcctcaaccttggccttcaatgtctgtcctgcggctgcctcccaacgcgggtgcggccaagatgagcagaacagagcttcacgatccccatccctgaacaaccagacctcttcattccacatctaattcaaaggatgaacagactcttcatttattcattctgcaaactccccctcccctcctctgtgcctagacatggctagaatcccagaagggcctttattttcaggcatagactcctctgtggtcacagctggagcacagagagggaccctgggaacttggcctgggaagcccagagcaggaagccacagctgtctctgggaaagcaagggaggcttcctggaggaagcggcattgttatgagccttgaaggaagagacagactctgctacattcaacctcgtgacttcatgatcctgggcctgagaacacaggaatgattcatagcccaccccccacctccatgcatacaccagagctctgtggaccaaggggtcattcctggtcacacactccatcagcaaaatgtatttgagcacacaccagcaatgtatgtatattttttccattaaatatatatttataaccaca

SEQ ID NO: 265649 - DNA, 965 bp, Homo sapiens
tgtctatagtaggtgcggagaagaaatgtttggcagatgaagaaaatgaggtgcagagaggatttaagagattctctcttactgcctgttcagggtcagtccagaattgagggtctccgggggagggcagaggctttgccctgcaggggatctgtgggagggggttaggagggagcagatgagcccaggatgaatggtcagagtcaggtgctgcccggcggaggtcacgagtccagggaggggatcaacatggccgctgcaccccggactgtgttgatctccggctgctcatcaggaattggtctggaacttgcagtgcaactggcccatgaccccaagaagcgctaccaggtcgtggccaccatgagggacctggggaagaaggagacactggaggcagctgctggggaggctctggggcagaccctcaccgtggcccagctggacgtgtgcagtgatgagtcggtggcccagtgtctcagctgtatccagggagaagtggacgtgctggtgaataatgctggaatgggcctggtggggcccctggaggggctcagccttgctgccatgcagaatgtctttgacaccaactttttcggagctgtccgtctcgtcaaagctgtgcttccaggcatgaagaggaggcggcagggccacatcgtggtgatcagcagtgtcatgggcctgcagggtgtcatcttcaacgatgtctatgcagcttccaagttcgccctggagggattcttcgaaagcctcgctatccagctgctgcagttcaacatcttgtttctatggctgagttcccaggcactgaccctgagaccctgcactacttccgggacctctatctcccagcctccaggaagctgttttgctccgtgggacagaacccacaggacgtggttcaggcctggtcccggtttcggcgagtgggccccctgggcggggacccatcggaaccgcga

SEQ ID NO: 265650 - DNA, 359 bp, Homo sapiens
tgagtcattcccttttcctttgaaagtatgttaaagaatctaccagtttatagttttctaaaaattgagaaaataaggaaaggaaatgaaagtcataacctaatcaccaatacatttgaacagttttatttccttggagataacaggagaaaaaatgttttagcttacctctaaaattgatggaaacctaattttaaatcctctataattctgtaaaagttaattctaaggaattcaagtcagggttaattaactttaaatgtacgctgcaagtcataccaaatgtatttcacgttggtttctctgattattcatggtctttatacttgaattatagatagatatatcacattttagaa

SEQ ID NO: 265651 - DNA, 881 bp, Homo sapiens
gcggccgctctcacttcagattggtaacgtgggagcggcgctggcccctggggctagggctggtgctgctgctctgcgccccgctgcccccgggggctcgcgccaaggaagttactctgatggacacaagcaaggcacagggagagctgggctggctgctggatcccccaaaagatgggtggagtgaacagcaacagatactgaatgggacacccctgtacatgtaccaggactgcccaatgcaaggacgcagagacactgaccactggcttcgctccaattggatctaccgcggggaggaggcttcccgcgtccacgtggagctgcagttcaccgtgcgggactgcaagagtttccctgggggagccgggcctctgggctgcaaggagaccttcaaccttctgtacatggagagtgaccaggatgtgggcattcagctccgacggcccttgttccagaaggtgctgcttccctccatgccatctgggtcctggtgcagatccctggtggctccttattgggtgccagagaaggttgcagagacaggaagagggtgcagaggtagaatcttgaaaagaatttggcgcttgaaggctgggcatggtggcttgtgcctgtaattccagtgctttgggaaaccgatgtgggaagatcacttgaggccaggagcttgagaccagcctgggcaacatagcaaaacttcatctctgcaaaaaattaaaaatcacctgggcatggtggcccatacctgtagtcccagcgactcaggaggctgaggcaggaggatcacttgagcccaggagtttgaggctgcagtgatctatgattgtgccactgtacaccagcctgggcaacagagcaagatcctgtctctaaagaaa

SEQ ID NO: 265652 - DNA, 766 bp, Homo sapiens
ctggcgctgccatccgggccactgtcccaggtcccggcccggagctatggagcggcgctggcccctggggctagggctggtgctgctgctctgcgccccgctgcccccgggggctcgcgccaaggaagttactctgatggacacaagcaaggcacagggagagctgggctggctgctggatcccccaaaagatgggtggagtgaacagcaacagatactgaatgggacacccctgtacatgtaccaggactgcccaatgcaaggacgcagagacactgaccactggcttcgctccaattggatctaccgcggggaggaggcttcccgcgtccacgtggagctgcagttcaccgtgcgggactgcaagagtttccctgggggagccgggcctctgggctgcaaggagaccttcaaccttctgtacatggagagtgaccaggatgtgggcattcagctccgacggcccttgttccagaaggtaaccacggtggctgcagaccagagcttcaccattcgagaccttgcgtctggctccgtgaagctgaatgtggagcgctgctctctgggccgcctgacccgccgtggcctctacctcgctttccacaacccgggtgcctgtgtggccctggtgtctgtccgggtcttctaccagcgctgtcctgagaccctgaatggcttggcccaattcccagacactctgcctggccccgctgggttggtggaagtggcggggacctgcttgccccacgcgcgggccagccccagg

SEQ ID NO: 265653 - DNA, 334 bp, Homo sapiens
cacattatttaactttccttcagcaaagtattggatatacacaaaaaacgtgatgcctccctgatattaaacgagaaaaagggggaaaaaagcatgtatacgtcgatactttcatttaaaaatcatggtgattcgcttatgtctccatacaattttcctcgtcccctgtgcaaattcccctgaacggatttcagaaccaaaaactagctgatgagctgggggccatttaaattcgctcccctcgaaggcgcccgaagttcgccttcctttccctttcttccctcttcgctccctttttgtgccagctcagcagtctcattgaagcgagcggcgg

SEQ ID NO: 265654 - DNA, 951 bp, Homo sapiens
tgctgggcatgatggtatgtacccgtagtcccagctacttgggagactgaggcgggaagggattatttaagtttaagagtgccactgtactctaccctggggaacaaagtgaaaccctgattcaaaaaaaaaagagagaaaaaaagaaaaaaatccaagggctacttttgattaaaggaattatggatcaaggaattcacattgcttttatttcagaatttacgaaagaaaagacaaacctatctcagagatttgagccaatgtagcaaagtgggatgtgggagaatcagcgtgacctacagctgggcttcagacaaggaatggaggagaatggtgtgcccgtgcctgtgggtgccctgagacagccacatataggagcacctttgatcaagttcagaatggaatcaaattcttctgaatcagagcagaagtgtggggctgtggggctcctgcctccttcctctccacctcctatcccctttccctagaacagtccagattcttttttttttttttttaaaggaagaggaaatactaagagagcttctcccagtcaaatttggtaaagggggtaaaaaaaaaaaaacagaaaaattcattcatctaccatcatatgttattgaggggcctgctgtgtgacaagccccattcagcaggagatgaaatgcacaaaacccttgccttcatcacaccctagtagggagaggaataacatatggagcatggcagacagtgccaagcatggaggtaaacacagaggcaggtgaagagagaagagggctggcacgtggggtctgaactgtcaatgaggaggtatgaaggagagcccacgcccgaggaaggtgcaggccaagtcacgagggtctcgggaagagccgtccaggcagagggctggaggacagcaggcagaacagcagggcgtgcgggagaggcagctggacctccaccgag

SEQ ID NO: 265655 - DNA, 289 bp, Homo sapiens
ttctcccccatattattttaaagcagcatattatttcatttataaatatttcagtagtttgggtacttaaaaaatacataaccacaatagtattatcatgcctaaaaaatttaacatgtaataaaatattcagtcagtgctcaactttctaatcatgtttttagactgcttagcattttgttgtggagatggatcataatatatttaaccagttcctgttgatgaagcttgaggttatttctaactttccaactgataaatagtgcttcaataaacatccttatatata

SEQ ID NO: 265656 - DNA, 587 bp, Homo sapiens
  misc_feature (2)..(3): n is a, c, g, or t
  misc_feature (7)..(8): n is a, c, g, or t
gnnacgnngcaaagaatcccttcaccccctccagggatggctctgagctctcgggcgcgtgccttctccgtggaagccttggtggggagacccagcaaaagaaaactccaagacccaatacaggcggagcagcctgagctgcgggagaaaaagggcggagaggaagaggaggagagaaggagcagcgctgcagggaagagcgagccgcttggtaagtactgccattgccctgagcccgttgcctgagcttactggttccgcatctctccgcctggctcgcgtcccgacgcagccagacagccacattaggagccgcgagacacctcgaccacctggtgaaggggaagtttcagcgcctccgaatccatcccggagtacagcagtttctttgcggtaaaggggagggtccctacataattgtgaagtgagtctctcctacatcctcctcctaccttcgcggaaagctctcaccgccagcgggtggctgctgtatcctgggatgggaagcagggcgagttcccaaatcccgagggcatccagtctcggttatcaacgtctccaggagagtgaggattggcaaatctaaa

SEQ ID NO: 265657 - DNA, 2321 bp, Homo sapiens
  misc_feature (2)..(3): n is a, c, g, or t
  misc_feature (7)..(8): n is a, c, g, or t
gnnacgnngcaaagaatcccttcaccccctccagggatggctctgagctctcgggcgcgtgccttctccgtggaagccttggtggggagacccagcaaaagaaaactccaagacccaatacaggcggagcagcctgagctgcgggagaaaaagggcggagaggaagaggaggagagaaggagcagcgctgcagggaagagcgagccgcttgaaaaacaacctaagacagagccctcaacatctgcttcctctggctgcggcagcgacagcggctacggcaacagctctgaaagtctggaagagaaagatattcaaatggagcttcaaggatctgaactgtggaaaagattccatgacatcgggactgagatgatcattactaaagcgggcaggttcggttctgcccaagctgttcacaagggtcacacacattaggcacttaatttaccgctctggcggatgttcccctctgttcgggtcaaggtgaaagggttggatccagggaagcagtaccatgtggccatcgatgtggtgccggtggattccaaacgctataggtacgtctatcacagctcacagtggatggtagctgggaatacagaccatttgtgcatcattcctagattctatgttcacccggactcaccctgctcgggagagacctggatgcggcagatcatcagctttgatcgcatgaaactcaccaacaatgagatggatgacaaaggccacatcattctgcaatccatgcataagtacaaaccccgagtgcacgtgatagagcaaggcagcagtgttgacctgtcccagattcagtccttgcccactgaaggtgttaaaacattctcctttaaagaaactgagttcaccacagtaacggcttaccaaaaccaacagattacgaaactaaaaatagaaagaaatccttttgctaaaggatttagagatactggaagaaacaggggtgtattggatgggcttttagagacctacccatggaggccttctttcactctcgattttaaaacctttggcgcagacacacaaagtggaagcagtggctcatctccagtgacctctagtggaggggccccctctcctttgaactccttactttctccactttgcttttcacctatgtttcatttacctacaagctcccttggaatgccctgtccagaggcatacctgcccaatgtcaacctgcctctatgctacaagatttgtccaactaatttttggcaacagcaacctcttgttttaccggctcctgaaagactagcaagcagcaacagttctcagtctttagccccactcatgatggaagtgcctatgttatcttccctgggggtcaccaattcaaaaagcggttcatctgaagactccagtgatcagtatctacaagcacctaattctaccaatcaaatgttatatggattacagtcacctggaaatatttttctgccaaactccatcaccccagaagcacttagttgctcctttcatccttcctatgacttttatagatacaatttctctatgccatctagactgataagtggttccaaccatcttaaagtgaatgacgacagtcaagtttcttttggagaaggcaaatgtaatcatgttcattggtatccagcaattaaccattacctttagtaagacaatagcatttctagaacaattacatgtaaacaaatattttctttatttgtagccaaagaaatttcaacagttattgggcttaaaaagcatcattacaatacagtatttctttgttatacatttaaagatttaaagtgccttatcaaataatattcatgaagagttgtttataatgtcaaatgaaacctacaggaatctctgattacagtggccttgagcttcaaaatgagatatgcaataaatattatttgatgatactccaccagtgaaaattgatgctaagtgatgggattttcaattatactgaagctagttcaccacgttaactgcattttacacattgacaatgacaaaaagaagatggatgtaattctcatgaaagcagtgaagcaatttcagttttaaaaatgaagatcggctttcatgtaattatctagtagttgtagaagaaaatttaattatttgtttgcctcatgcctttatactttgctgttgaagaaactactaatctcaatttaagatacaaataaggacacaaactttcaagtattatattttatttatctttgtagcctaaagaccatttaatcttgaaggaacacaaagatcaaatgaaaagtaaaacactctaaataaatttgcttttattttct

SEQ ID NO: 265658 - DNA, 2258 bp, Homo sapiens
  misc_feature (2)..(3): n is a, c, g, or t
  misc_feature (7)..(8): n is a, c, g, or t
gnnacgnngcaaagaatcccttcaccccctccagggatggctctgagctctcgggcgcgtgccttctccgtggaagccttggtggggagacccagcaaaagaaaactccaagacccaatacaggcggagcagcctgagctgcgggagaaaaagggcggagaggaagaggaggagagaaggagcagcgctgcagggaagagcgagccgcttgaaaaacaacctaagacagagccctcaacatctgcttcctctggctgcggcagcgacagcggctacggcaacagctctgaaagtctggaagagaaagatattcaaatggagcttcaaggatctgaactgtggaaaagattccatgacatcgggactgagatgatcattactaaagcgggcaggcggatgttcccctctgttcgggtcaaggtgaaagggttggatccagggaagcagtaccatgtggccatcgatgtggtgccggtggattccaaacgctataggtacgtctatcacagctcacagtggatggtagctgggaatacagaccatttgtgcatcattcctagattctatgttcacccggactcaccctgctcgggagagacctggatgcggcagatcatcagctttgatcgcatgaaactcaccaacaatgagatggatgacaaaggccacatcattctgcaatccatgcataagtacaaaccccgagtgcacgtgatagagcaaggcagcagtgttgacctgtcccagattcagtccttgcccactgaaggtgttaaaacattctcctttaaagaaactgagttcaccacagtaacggcttaccaaaaccaacagattacgaaactaaaaatagaaagaaatccttttgctaaaggatttagagatactggaagaaacaggggtgtattggatgggcttttagagacctacccatggaggccttctttcactctcgattttaaaacctttggcgcagacacacaaagtggaagcagtggctcatctccagtgacctctagtggaggggccccctctcctttgaactccttactttctccactttgcttttcacctatgtttcatttacctacaagctcccttggaatgccctgtccagaggcatacctgcccaatgtcaacctgcctctatgctacaagatttgtccaactaatttttggcaacagcaacctcttgttttaccggctcctgaaagactagcaagcagcaacagttctcagtctttagccccactcatgatggaagtgcctatgttatcttccctgggggtcaccaattcaaaaagcggttcatctgaagactccagtgatcagtatctacaagcacctaattctaccaatcaaatgttatatggattacagtcacctggaaatatttttctgccaaactccatcaccccagaagcacttagttgctcctttcatccttcctatgacttttatagatacaatttctctatgccatctagactgataagtggttccaaccatcttaaagtgaatgacgacagtcaagtttcttttggagaaggcaaatgtaatcatgttcattggtatccagcaattaaccattacctttagtaagacaatagcatttctagaacaattacatgtaaacaaatattttctttatttgtagccaaagaaatttcaacagttattgggcttaaaaagcatcattacaatacagtatttctttgttatacatttaaagatttaaagtgccttatcaaataatattcatgaagagttgtttataatgtcaaatgaaacctacaggaatctctgattacagtggccttgagcttcaaaatgagatatgcaataaatattatttgatgatactccaccagtgaaaattgatgctaagtgatgggattttcaattatactgaagctagttcaccacgttaactgcattttacacattgacaatgacaaaaagaagatggatgtaattctcatgaaagcagtgaagcaatttcagttttaaaaatgaagatcggctttcatgtaattatctagtagttgtagaagaaaatttaattatttgtttgcctcatgcctttatactttgctgttgaagaaactactaatctcaatttaagatacaaataaggacacaaactttcaagtattatattttatttatctttgtagcctaaagaccatttaatcttgaaggaacacaaagatcaaatgaaaagtaaaacactctaaataaatttgcttttattttct

SEQ ID NO: 265659 - DNA, 388 bp, Homo sapiens
ttctttcttttgcaatcagcattaaacctgtcatcattaggtgaaatctacattccctgggcccttgctactcaaactgtggtccccctggacaagcagcatcagcatcatcacggaacttgttagaaatgcagaaagccagacccaccccagacctacagacagaatctgcagttcaccaagaccccaggggctcccaaggcacattcaagtttaagaagccctgttccaacgcaatgccctaaagagtctgcaatgggcctccactctcctaaaaacctcttctcaggaagcagtgtgctctgggactcttagtctttggtgagactctgcatcacagcgccactctctgaggagaatgcacattaaaacacttgtagaactataa

SEQ ID NO: 265660 - DNA, 452 bp, Homo sapiens
tttttttttttatgaagtttttatgaagccttgctctgtcacccaggctggagtgcactggcacatctcagctcactgcaacctcagcctcccgggttcaagggcttctcttgcctcagtctcttaggtagctgggattacaggtgcccaccaccacacccagctaattttttgtacttttagtagagatggggttttgccatgttggtctggctggtctcgaactcctgaccttgggtgatccgcccaccttggcctcccaaaatgctaggattacaggtgtgagccaccgtgcaagccgaaagtcttctttagctatgatcttcctgaatcctagtttgatttgatccttcaggacatgtttgtgtgtatttacatatctgtgttttatacacatagaaatgtgtgtgtgtgtgtgtgtgtgtgtgtgtgtgtgtgtgtatttgaaatag

SEQ ID NO: 265661 - DNA, 401 bp, Homo sapiens
actcctgatctcaggtagtccaccctcctcggcttcctaaagtactgggattacaggtgtgagccaccatgcccagccagaaatattttaaaatcagctgttttgtgaagataggagttccagaaagtaaaggtgacatcggaaaaattaccaaaagctatttaaaacatctataagatggtcttcccatctttctctcttctacagatgagtcatatctttgagattaatttttgaaagcttagagaataaatagatgtttacaaatactgaaaatcattccttttacaagtatcttggacaaattacgtttaaaatttgttcttgtgtttattgattgtaaaggcattgtcatgcacagaacttaattaaaagcaaatcatttgtttaaaaaggcactt

SEQ ID NO: 265662 - DNA, 298 bp, Homo sapiens
gaacaaactctggacacactgactttaagaactgttaacacaccgcgagtgtctgcggcttcgttcttgatgtcagtgagaccaaaaccccaccaattccaggcacagtatctagtaaacctgttagaaacccacgaggcaaaatgcttctgcgttcagagacttcaagtagttgaaatcccatttgatggcttaatagctgggtgtctttggacaagttaattaacctttctctgtattggttttctcgcaggcatgttgacaggaataaatgagataatctgtgttaaactaatca

SEQ ID NO: 265663 - DNA, 726 bp, Homo sapiens
catccccaagtcaaggaccaggtgctaattaagtttgcataccccagggcacctttaaaatagttttatttatttatttatttattttttcagatggagtctcgctctgtcacccaggctggagtgcaatggtgcaatctcgactcactgcaacctctgcctcccggattcaatcgattctcatgcctcagcctcccgagtatctgggactacaggtgcccatcaccatgcccggctaatttatgtatttttagtagagatgttgagaccatgttggccaggctggtcttgaactcctgacctcaagtgatccacctgcctcagcttcccaaagtgctaggattacaggcatgagccactgtgctcggcctaaaaatagttttaaaagtacactgttgaagaaaaactcttaataaagacatgaatttttgtaacagcatatgatatgaacacagtttgcagaatgaatacattttcttcagagtttaaaactcttcagtcattatctctttgttcacgtggtcacaaagcattctattggccacaactaaaccagttccttctttttaaaaataatacagatggacctctttgggggatggttttaatattgcctgtctgccaggaaggagactcctcaaggtctcctttgtccttctgattcaagatgaattatttttttctagaatcttttaattcaattattccagaagtaaattactttat

SEQ ID NO: 265664 - DNA, 476 bp, Homo sapiens
gcggccgctactactactactactactaaattcgcggccgctcgacaaaatggagaaattccaaaatctagtgccatgttctagaaattgcagcaatgtttttttctctttttaatctgtaaaagttgactatgtgtttaaaaatatctttgggtcacagaggaagatctcatgttcagaaagaatgttttcatcaaattgacttatgctcattgatttctaaagcatcaattttgagaatttggccattctccataattttttcctgaggaagctaattcattcagttgctcaagctggcagcatttgactgctccttccaaaataaaaaatgaaaaattcgtttgaatccgtcgataaagtatgagctgtattttggttagaaatcgaagccaatgcatagtttatgttattaattaccctagcgttgaaaatttccttttgttttgtcattcttgactgtgtatattcatgaa

SEQ ID NO: 265665 - DNA, 465 bp, Homo sapiens
ccaggctccctgggggggcccttcgtcggctcttgcttcactgtagataagaaatcagaaaatccttgttgattgcatcaactcctcaggttaatttgacagtaagtcatcaggcatcatctataaagtccagaggaatctgtttgtgttgtttgaaagggcttgaaggccaggtgcagtggctcatgcctgtaatcccaacactttgggaggctggggcaggtggatcgcttgaggtcaagagtttgagaccagtttggccaacatggtgaaacccgatctctaccaaaaatagaaaaattagccgggcatggaggcaggcgcctgtattcccagctacttgggaggctgaggcagcagaatcgcttgaacccaggaggcagaggttgcagtgagctgagatcgcaccactgtactccagcctggacaacagagcaagactccatctcaaaaaaatatataaat

SEQ ID NO: 265666 - DNA, 368 bp, Homo sapiens
atattttctaaacagctccattaagagataattaacataccaaagaattcaattaagtatacaattcaatggtatttattatatatctctatgaatgtattaaaatccattcagctgtgatatactaaaaaacatagagctgtatttatttttaaattattttttcatgtgcttcattttgcatagtttcttttgctattttcaggtttatttattattttcttttttggcaatatgtaatctgcaactaatctcatccaatgtactttattattattattattatttttttagataaggtctcattttgtcattcgtgccactccactccagcctgggtgacagagcaagactctgtctcgaaaaaa

SEQ ID NO: 265667 - DNA, 434 bp, Homo sapiens
aagcaaataaaatgtggtaaagatgaccacaagtcagtgtgaatgggaaaagttattaaacaaatggtgctggagcagttggtttgcttttaagaaaaagatcgattttaattcgcacctcttgtcttataccaaaattaattccaggagcatgaagcatcattacatgtaagtaaagccttaaaaaagaaaaagaaaaactagaagtcagtttactggacatttataaacaatctatcaagaagaatgttgtaagcttaaaagaatggaagtcataaacgaaaatattattttatttaactacataaaatgcagaacttcccagcattaagagaatctacttaaatacagttttttaaaagcaacaaatagttccgtggaatatgacagagaaaggaaaatatcctcagtccatgacaatcgtatgcaaatag

SEQ ID NO: 265668 - DNA, 437 bp, Homo sapiens
cacgaggtaattttgtttgtaactttaccaagagttgttttctgtttcgtaaagtcctatctccagcatcgtcactgtgacgtttcagtcatccatagacctccccttcgtcacatcccatttgcagcagcagcactcccagtgggtctgtgggtaggtgcaagcgtggaccgcctccgtctcctagtgtagctgggtctggccctttatgtgttgtaatgcacattttattatagactgcttctcttttctctctcctttgcagtacatgtaaggcattatatccgaatttatgtaggtaggttatgtaatctatgaatttcacttcaggataatgcaaggatcattacaaaacattataataaaaagaggaccatcgggcctgagagggttgaagttttgtgaaactcgggctggttccttcctgcattgcatct

SEQ ID NO: 265669 - DNA, 237 bp, Homo sapiens
agcactgcatgataggaggacacattaagaaaggaggaagatttcctggggttaatcttcatccacttaaactattgtttagagttgggcttgctgatggcagtagtttttcaggcactcagcaactttctgagaaagtctttatatattaattccacaatgacaggtaatcattgtggcacagtagttgatgtctccttttcttcaataaataaatatcttattaaatattaatat

SEQ ID NO: 265670 - DNA, 891 bp, Homo sapiens
ttcacttacaatggggttggggttgtagaagttgcagttattatcatgaagcttgcttatctcatgactgttaggaaaagcacatgaaaaaacggaggtgaaaggattttgtgaattgtggcagtggtataataattattcttcgatgctggtaaaatatgggtgaaacaataggagtttagaaaatgcttaataataagggtaattcttattatacatcttgtaatgttactctcccaaagtaaaatctggtaatagaaagtaggatttaatactttgagcatttaatactttgagaaggcttatggtatgctcattaaaaatgaatcaatgaaatatttatttaaacacttttatttaaaacatgttatacccttgaatggcgtgccccctgttgacattttcaaacagacattccaaatcatttccaagtacagtcatccctctgtatcagcccggagattggttctagtatccccttggataccaaaattcacacatactatttttcctctgcttttaagaattgaagtttgattgtaaaactgttttaatttgaataaaatgatactgaggtagacaagttctctggtaggaatcttcttttattctctttctccattcaaagccacttctagtgaggttttctctgatctcaggttatattaccttgatagcatatgataaagggtccttaacgtagtctgtgagataactatttttgaagtaggcatatttattccttagttttgttttgcatataaaaaaattagaatcacgtgatataattttataagtttgttttcccctgtaacatatatattatgtattttaaatgttattaacattttaaaataaaatacataataaggtaaactttttatatgttgt

SEQ ID NO: 265671 - DNA, 431 bp, Homo sapiens
ctggtggcttgggtaatgtggcagccccctccccaggagtccctgcactggccactccaggcaccaggattctttttgccttaatgaattcccctcaagtctccggttagaagtttcctgctccaatcttgaatatgcatcttttaaaatactctgcaaatttgagggcctctcatgtatcatttcaatcctccagctattagagaaattggggtatcatatagattacggaaaaattactttgggcagagaaggaggtagaagatcaaacgcttatctgtacaaataaattcagtgcgatccacaattaagcagcatttgacatttaaaaaatatttgatccatgttttggcttccagagctgcttaagggagctgcgatgtgtaaattacattcaaatcagggttaaatatagttcccagagaaagata

SEQ ID NO: 265672 - DNA, 453 bp, Homo sapiens
aggaggatgaggaggaagactttttagatgacagtaaggagactccctttactacaagaacccctgcttgtaagaacctctgctttaggagcacttaatacttctcttttctccttcatattcttaccacctccccatgtctttccactgctccttctccccttttccctgtgcatgggtgtaaagcatgtgcataaagccacacagagacaaggcaagaaccagaaagagaagacagagaggggcaaggagctgcaggcaagatggaacatttattcttttcttgtctttgacaaaacaaatattggtattagacttctctgagaaaatatctctgaggcactatagttgtggaaaatttactgtcctagaagagattttgtcaggttttgtgttttttatattgctccaggaaacaaaatcagaccaaataaaattgaatgtgaaatattt

SEQ ID NO: 265673 - DNA, 440 bp, Homo sapiens
gacccatacacatgacttgagaccacaagtcggaggtggtctttaggtaatagcttaaaataattgtgaaagtcaatagaagaaaggtgtggtagaagtcttcagtactacatgttgccttgacatctaggaaaatccagcaagtcttcacattgttatactacaagctcttcttcccaactgctcccacggataaagtctcctcctttccatgcagagcaggtacgattcctgcttaccccttagtagcagatttcatttccttgccatccagtgaaattactcaaaaaagccaatcacacccttctttggggaccagggtttaccccacgcttttgctactacaaaacctgcctcccacagttcctgcttcttcaatctattcccaagtacaatccctgtgtgaccttgaatagcatgctatgttgtcctcccctggt

SEQ ID NO: 265674 - DNA, 443 bp, Homo sapiens
gggacaccttgggtgcctaacagaggcaaatgcaaatcctctccaaagactcatgtcttcaacctaggctacctaagattctgctatggtttgaatatttttccctccaaaactcctgttgaaatttaatccccattgtggccatattgagaggtggggtctttaagaggtgattgggtcataagggatctgccctcattaatggacgaatccattcatggattaatggattaatgggttatcacaggagagggactggtggctttataaggagaaaagagacctgagctagcatactcagtcctcttaccatgtgatgccctgcaccacctttggacgcttcagagtccccaccagcaagaaggccctcagcagatgtggccccctgacctaaaacttcccagcctccattattgtaataaataaatcctattctttataaa

SEQ ID NO: 265675 - DNA, 161 bp, Homo sapiens
ttagtattaaaaaggggacctaggactgagattctcagtatgaaaaacagttatataagaatgctatacatacacacagccacaacatcatatatacaccaaccctccattctgataagccccacggtgctgctactagaaatggtcagccagggaaaagg

SEQ ID NO: 265676 - DNA, 596 bp, Homo sapiens
ttcttaagacataataataatgaaaatattacatatcagaacttacagaacacttttagagtagatatcagagaaaaattcatagaactaaacacttttattagtaaaatagtgaaaataaagtaaattctcagctgaaaagttaagaacctctccccagcaaagtaaagagaattaaaaaaccagagaaagaaacagtaaagataaaagtagaaattaatgagctatatatagaaagatagtagatctaagatacaattaacttgttaaaattctgtttcttgaaaacaattggtacatagaaaaaacaccagctaacttagtcaagggaagaaaaggagaaagaatacacatacataaacacaaataaagagatggtaagggtgaaataaacattgaaatcagaagaaaataaaaaaacaagagatattatcaaatatgactttttcacacttctaagccaataaatttgaaaacttagatggataattttcaaggaaaattttatttaccaaaattggactcaaagaagacagaaagcttagaaggatgctaggaaaatgcaataggctgataggctgaatgtgcaggggaaa

SEQ ID NO: 265677 - DNA, 837 bp, Homo sapiens
gatggagcaagaatcatcttgtaacaggaatagtcagcatttcacataaattaaccttgaagagagaaatgcaaaagaagaaggaaattttccatcttacaaaactacattactttaaaagggacctctcatggtgcaccacctgagcgagggccttggatgtcttatggtggaagcagctgccatgattataacaatacatgagatagatacggcagaagtcaggaaagttgctcaaggagctatggcgatttttattcttgtggtcatgagaacattggcagaaaagaccaaaggaatccaccttctctggatagggtgcactctgctcctcttgaagcatatggtagttcaagttatgtgccatctacaggagatggtggggaaagtcaatctgaaaaaggcgactaaagcggattttaaaccagagaggtgctgtttcagagaaactaggcaacaacatcattctgcaacaaccagccgtggttgatgggtctgccaggctcaaatcattggccaactgccaaatcccatcctggtttttttctgcaaaacagccaatgctgtgacaaagtggcagcttggtgattatccacagaaggggcatgtgaccccaccccattgcagcagccatacttttgaccatcctagccctgtgtgctccatccatccccaggctgaaaatcggaggcaatttagtggttaaggatgaagtttctggccctacctggacccagcagaatcaaagtggatccagtgtcagctccagcctattcaatttcaatttttgaaatggagtcattactaataaataacctaccagccaaaaaaaaaaaa

SEQ ID NO: 265678 - DNA, 430 bp, Homo sapiens
gtgtaagaaagttcacaaagctgaagttccaagctgcactcctactcatagttatgaaagtatgatatacttagtgaaaagggaaaaaaggaatgtatctgtccttatagttccaagtagcaggcaggtaacccacttgcattttgatccttccattatttattttatcaatcttaaggatggtatgcatgctgcttatttttatcagaattttaaaaatggggcttgggttgtggaaacttctactttctgtagcctgtggagtaactgtaatctactaaggggtacaaatattttgtcaaatccaagcataattttaattactattgctcttgtcttaatcttctgagttagtttaacttaacacctactttaccaaaaaggggctcaataaatatttttaaattaataaatcaatcttatttgatgc

SEQ ID NO: 265679 - DNA, 376 bp, Homo sapiens
gagctaattagccccactcccaactttagtacccataattggtggctgtgagctgtagaaggattgttttcttccgtgactgtttgtgggtcatgggcagcaactgtgggcctggtctctggcttgctatgtagctctaaacaaggcacttagttctctcagctccagtttcccctataactataaactagacaatcttgaaaggtttatcctgttctgtatttttatggtcctttacgaaatatcatctgaccaggtatcatggcatgctcctatagtcctagctactcagaaggctgaggtgggaggatcacttgagcccaggaggttaagtccaaatccagcctaggcaacatagcgaaactccatatctaaa

SEQ ID NO: 265680 - DNA, 493 bp, Homo sapiens
cgatcaagatagtgtggcattggtgtaaaaacagacatgcttatcaatggcgcagaattaaaagaatagaaattaacttctgctttgataggcaatggagtttccaaacagcactaaatcattcactggggggaaagatggttattttttttaacaaatagtgttagaagaattggatctataaaaaatagacttgaaccctactcacactatacacaaacattgactggaaaatggatcagagacttaaatgtaagagctaaagctataaaacttttagaagaaaataaaatagaaatcaagcacacaatatacaaaagaaaaaatgataagttaaacttcaaggaaattatacactcttatgctttattgttttaaatttttttcctcttgcatgtctagaaaaaaaattcttatgctttaaaagacactgataaggcaatgaaaaggtaagtcacagactgggatttaaaaaagttttatacatctaaaa

SEQ ID NO: 265681 - DNA, 317 bp, Homo sapiens
acccagatttggggaaggggtccctttcaagtttgtcttctttgagtattggtccttagccataggttccttatattttctagacacactttaatcagagttgttgttttttcagagatggggtctcactaatgttttccaggctggagtccagtggctattcacaggtgctatgattatagcacactacagtctcatactcctggcctcaagcattcctcctgcctcagcctcctgagtagctgagattacaggtgcatgtcacctgatcagagtttactcattcattatattaaactttccctgtttaacctaca

SEQ ID NO: 265682 - DNA, 125 bp, Homo sapiens
aggtggcaattgaacaatgagaacacttggacacaggaagaggaacatcacacaccaggatttttttttttaaaggagagatgtagctgagcaaatagtggacaaattaaactgcttcagatcta

SEQ ID NO: 265683 - DNA, 377 bp, Homo sapiens
gtgagggataccctcaagttaactatgggaaaagaagacagcaattgtatgaggcagacactgttatcttattcacatgaggaagcagatgcttagagaagttagataactttctcaatataacgtgtctttgactccaaagcctgtgtatgtatataaaacacaaaaaacatgttattatagctaactataggaaatacatataagcaaaaagaaaaagaaatctaatcactgagaaatgactactgttaacattttgctgtgcacccttccagactttccatgtgtctgtgtctgagtccatacaaatacagcatatgtgaatatttataagtgtggtatctatgcacacagacatatactccagtcctttctaa

SEQ ID NO: 265684 - DNA, 1029 bp, Homo sapiens
acagtgatgccatcaggtgtggtatgtgatcacaggcaactcaggaacagctctccagccccaggacttctgctggaaccgctgggagttggaagctttcttcccactgaggggcaaaccttctaggtatctgaagatgttgaagaccatttcctggaacagcagaggtaaatgcccagaggatgagaacacatagccattaggagagcctgaaagttcagtgtgactgaaagatgaagttcaagagaagggacaaactgcaaaacacaagctggagagttttagagagactgtggaatggaatgactctccagagctgcagattgaaggcatattttcatctgactttgatctcaatggcgggaacaccttcatggcccctttatagctggtatgttttcttcttatggacaatgagaaacatgtaataaactgtgtttccttctcgctaggaaaccctgagttaaagctttacttccctctcaggaaccatcaaagagccataatctgtacaccctggtgcaacatttcccctggatttgatcccctttcaattgttttagccttattttacatttcttaaatctatttctctatgttgccatgtgtattatcaaatgctatttcagatgccaaccatgagctaaagcatatgttggaattattaagagaaacagagggatatacttatgtaaaataacacatataaatgcaatgctgattttttttccttaagaagtctttaacaattgcttcggaggaatctgcttttcactgaagcttcaatattttcagatcctttaataccaggtgtcaaacttattcactgggatgaattatagaaagttgcaccactttcttctgcctcatttattctcattgtaaatatgagaattttaaaaagtcttcctaattcttgctttatgatggattctatacaaacaattgaggtgctgttcactaaactactggaaacatggggaagtgagctaaggagataggaactatgaaatgacctgttttaagaaa

SEQ ID NO: 265685 - DNA, 953 bp, Homo sapiens
ctacatttcacaatgctgttaccataggatgcaaaagctggcacccacccttggacgactgcagtgggaggggattcctggaagcttgtgccagcgatctatagactttgctctgtgagcctgttctctttgctgattttgctttacatcttttgttatgataattcacagctgcagagagactgtggaatggaatgactctccagagctgcagattgaaggcatattttcatctgactttggtgattatgtttccaatctctctgggaataagatctcaatggcgggaacaccttcatggcccctttatagctggtatgttttcttcttatggacaatgagaaacatgtaataaactgtgtttccttctcgctaggaaaccctgagttaaagctttacttccctctcaggaaccatcaaagagccataatctgtacaccctggtgcaacatttcccctggatttgatcccctttcaattgttttagccttattttacatttcttaaatctatttctctatgttgccatgtgtattatcaaatgctatttcagatgccaaccatgagctaaagcatatgttggaattattaagagaaacagagggatatacttatgtaaaataacacatataaatgcaatgctgattttttttccttaagaagtctttaacaattgcttcggaggaatctgcttttcactgaagcttcaatattttcagatcctttaataccaggtgtcaaacttattcactgggatgaattatagaaagttgcaccactttcttctgcctcatttattctcattgtaaatatgagaattttaaaaagtcttcctaattcttgctttatgatggattctatacaaacaattgaggtgctgttcactaaactactggaaacatggggaagtgagctaaggagataggaactatgaaatgacctgttttaagaaa

SEQ ID NO: 265686 - DNA, 919 bp, Homo sapiens
tgtgatcaaagagtgagaacacagccatagagagctttacaaagggcatcagtattaatgtcaaatgttactgaggcctcgagggaactaaccagtcagaagcaaccatcgaatttagtaatggacttcactcacttggtgaaagctgttccgtgtcatggtggcagagacacagcacagtggctgagagtgagcaggagctgtggaagttgaataatgcctgaagggaccattctttctatctcaatggcgggaacaccttcatggcccctttatagctggtatgttttcttcttatggacaatgagaaacatgtaataaactgtgtttccttctcgctaggaaaccctgagttaaagctttacttccctctcaggaaccatcaaagagccataatctgtacaccctggtgcaacatttcccctggatttgatcccctttcaattgttttagccttattttacatttcttaaatctatttctctatgttgccatgtgtattatcaaatgctatttcagatgccaaccatgagctaaagcatatgttggaattattaagagaaacagagggatatacttatgtaaaataacacatataaatgcaatgctgattttttttccttaagaagtctttaacaattgcttcggaggaatctgcttttcactgaagcttcaatattttcagatcctttaataccaggtgtcaaacttattcactgggatgaattatagaaagttgcaccactttcttctgcctcatttattctcattgtaaatatgagaattttaaaaagtcttcctaattcttgctttatgatggattctatacaaacaattgaggtgctgttcactaaactactggaaacatggggaagtgagctaaggagataggaactatgaaatgacctgttttaagaaa

SEQ ID NO: 265687 - DNA, 1061 bp, Homo sapiens
acagtgatgccatcaggtgtggtatgtgatcacaggcaactcaggaacagctctccagccccaggacttctgctggaaccgctgggagttggaagctttcttcccactgaggggcaaaccttctaggtatctgaagatgttgaagaccatttcctggaacagcagaggtaaatgcccagaggatgagaacacatagccattaggagagcctgaaagttcagtgtgactgaaagatgaagttcaagagaagggacaaactgcaaaacacaagctggagagttttagagagactgtggaatggaatgactctccagagctgcagattgaaggcatattttcatctgactttggtgattatgtttccaatctctctgggaataagatctcaatggcgggaacaccttcatggcccctttatagctggtatgttttcttcttatggacaatgagaaacatgtaataaactgtgtttccttctcgctaggaaaccctgagttaaagctttacttccctctcaggaaccatcaaagagccataatctgtacaccctggtgcaacatttcccctggatttgatcccctttcaattgttttagccttattttacatttcttaaatctatttctctatgttgccatgtgtattatcaaatgctatttcagatgccaaccatgagctaaagcatatgttggaattattaagagaaacagagggatatacttatgtaaaataacacatataaatgcaatgctgattttttttccttaagaagtctttaacaattgcttcggaggaatctgcttttcactgaagcttcaatattttcagatcctttaataccaggtgtcaaacttattcactgggatgaattatagaaagttgcaccactttcttctgcctcatttattctcattgtaaatatgagaattttaaaaagtcttcctaattcttgctttatgatggattctatacaaacaattgaggtgctgttcactaaactactggaaacatggggaagtgagctaaggagataggaactatgaaatgacctgttttaagaaa

SEQ ID NO: 265688 - DNA, 964 bp, Homo sapiens
acagtgatgccatcaggtgtggtatgtgatcacaggcaactcaggaacagctctccagccccaggacttctgctggaaccgctgggagttggaagctttcttcccactgaggggcaaaccttctaggtatctgaagatgttgaagaccatttcctggaacagcagaggtaaatgcccagaggatgagaacacatagccattaggagagcctgaaagttcagtgtgactgaaagatgaagttcaagagaagggacaaactgcaaaacacaagctggagagttttagatctcaatggcgggaacaccttcatggcccctttatagctggtatgttttcttcttatggacaatgagaaacatgtaataaactgtgtttccttctcgctaggaaaccctgagttaaagctttacttccctctcaggaaccatcaaagagccataatctgtacaccctggtgcaacatttcccctggatttgatcccctttcaattgttttagccttattttacatttcttaaatctatttctctatgttgccatgtgtattatcaaatgctatttcagatgccaaccatgagctaaagcatatgttggaattattaagagaaacagagggatatacttatgtaaaataacacatataaatgcaatgctgattttttttccttaagaagtctttaacaattgcttcggaggaatctgcttttcactgaagcttcaatattttcagatcctttaataccaggtgtcaaacttattcactgggatgaattatagaaagttgcaccactttcttctgcctcatttattctcattgtaaatatgagaattttaaaaagtcttcctaattcttgctttatgatggattctatacaaacaattgaggtgctgttcactaaactactggaaacatggggaagtgagctaaggagataggaactatgaaatgacctgttttaagaaa

SEQ ID NO: 265689 - DNA, 568 bp, Homo sapiens
acagtgatgccatcaggtgtggtatgtgatcacaggcaactcaggaacagctctccagccccaggacttctgctggaaccgctgggagttggaagctttcttcccactgaggggcaaaccttctaggtatctgaagatgttgaagaccatttcctggaacagcagaggtaaatgcccagaggatgagaacacatagccattaggagagcctgaaagttcagtgtgactgaaagatgaagttcaagagaagggacaaactgcaaaacacaagctggagagttttaggtaagagtcatatcacaaaaagccattaagcattttaaaatgcttagcctttatccaaagactaatggaaaggcactgacatgacctaatcatgaatgagaagatttgattaaatatatctctctacaatgatggagaatggaccaaaagcaggcggggacaaggacagtaaactctgctagggactgctagaatgaccctgaaagaatagccctgaagatagaaagaagtagatagttgccaaagatacctgtggaatacaaaagtaccagtgcccaccaga

SEQ ID NO: 265690 - DNA, 591 bp, Homo sapiens
acagtgatgccatcaggtgtggtatgtgatcacaggcaactcaggaacagctctccagccccaggacttctgctggaaccgctgggagttggaagctttcttcccactgaggggcaaaccttctaggtatctgaagatgttgaagaccatttcctggaacagcagaggtaaatgcccagaggatgagaacacatagccattaggagagcctgaaagttcagtgtgactgaaagatgaagttcaagagaagggacaaactgcaaaacacaagctggagagttttagagagactgtggaatggaatgactctccagagctgcagattgaaggcatattttcatctgactttggtgattatgtttccaatctctctgggaataagatctcaatggcgggaacaccttcatggcccctttatagctggatgatcatttcctgttctctccaccatggccacctggtccaagccaccatcttcatgcacctggatacctgccataacctcagctgacctttcctgtgtccattcttgttcctttgggcccagtctcctcgctcatagcagcagaatgagtctattaaaaagtgaaa

SEQ ID NO: 265691 - DNA, 469 bp, Homo sapiens
atggcttcacaactgccacgtatgcaaatcctgcatttgaaacaacaatgggctatcagtcaggtgaattaatagggaaggagttaggagaagtgcctataaatgaaaaaaaggctgacttgctcgatactataaattcatgcatcaggataggcaaggtaagtaagaggtcagtgccttttttaactttcacaacacagagagaaggaggagggggtggggggggggtgctgaccaggtaatcttaatcttactcctcccagcagcccagggaagtatagggaatgttatccctgttatatccattttacacttaaggaaactgagggcccaagttgaggaatgattacccatgttcacaagactttgatattgcacttaaaatggaggagtatatttgagtgcttaatttattttaaaaaagacaagcagcaatgacaataaaaacaatttttatctcattctcata

SEQ ID NO: 265692 - DNA, 248 bp, Homo sapiens
cggtggtactccatgaatttcaccccacatctgagaaacggctggttcagcaagctaacagcatacagatcctactcttttctattttaaccaaaaaaattcctaagtggtattccttaaatcttgagcaagtacgattccttaaatcttgagcaaatcttgagaaaactgtgtcctactaaaattaaaaggtattctcctgggaagtgggccctatgtctattaaacatacttagcaaaatctcttg

SEQ ID NO: 265693 - DNA, 575 bp, Homo sapiens
  misc_feature (519)..(519): n is a, c, g, or t
catcaaaatgtcaatgacaaatttgaattattgttagagctgtaaaactgttgtgagcataggcaaattcccttatcaaaattactctatacctgggaaaagcccaagtaattttccagtggtgtgaaggacagagagtgttcggtcgatgagacttaggaagaggacttcggaggtgactttcaggggacagtgcagtctctcaatttgtatatgagaccctgggcttcacacagctcttgtttcactgaaatccctcagcactccactcctaaaggtaatacctttatgtctggaaggttattatgcaaatgattttttatatttacatttagtggctacattaacacttcagtgagtgtttataatgccatatatctttttctacttggtccagttctttttttattttattttttttttgagatggagtctcgctgtgtcacccaggccagagtgcagtggcatgatctgggctcactgcaagctctgactcccaggagaattgcttgaaccagngaggcggacgttgcagtgagctgagattgcaccaacggactccagcctgggtgacg

SEQ ID NO: 265694 - DNA, 793 bp, Homo sapiens
cacggtgagtatgagtatggcattattgagtcaataaatttctttatataaaagaatttataggtatatgtatttttatttctttgtattctgcttttctcccactgattgtattatttttttagttaggtaagaaagcttaatacgttatgctgcttcctaattttattaatttctgttttaaatgaaaatagttgtattaatttttactgattaagaaaacagaaaagtataaagaagaaattctttatacctgaagaaaatacctgaagtcccacatccttaataaaaagagtcatcctttttacttgacatagctttactctagacatggattattcaggtatcaataagaatgtgcacctggaattcgctcaccgcatccatgtgtgggtaaggcctgttgctaagcatagcactttgccttgagagctttcaacctggctacctggctggcttccttccttcctccccttttcttaagagaatgaatgggacagaattttatttttatttaaaaaatgataacagtaaaagtacatcagcaagcaattgatgaatgaactgaggtatactcatatagtgaaatattattttatggcaattgaatgaattaaagctatatgtagcaaagagataaacatcacaaatagtgttgagggtatataccatgtgatcatttatgtgtatacagagtaattataaaatgtttgctgtgtacaaaactattttattagtggatttttaaatacattaaatgggtatatatagtatatatgatctaggagtatat

SEQ ID NO: 265695 - DNA, 2460 bp, Homo sapiens
caaaacaatttttttaagagcaaagttggaggatttatagaacctgattccaaaactgtcagtaaaactacaataattacaaagtatcagccaggtgccgtggctcacatctgtaataccagctctctgggaggctgaggcgggtggatcacttgaagtcgggagtttaagaccagcctggccaacttggtgaaaccttgtctctactagaaatacaaaaaattagccaggcatgatggcacacacctgtaatctcagttactcaggaggctgaagcagaatagcttgaacccaagagagtccagctcaaaaacaacaacaagaacaaaagtatcacattggcataagaatagacatgtaaatcaaataacaaaatagagaattcaggtataaatcttcatatttatggctgattgactttgaacaaaggtgacgaggcaagtcagtatagcagcatattcttttcaacaaatggtgctggcagaagaaaaaaaaagtacttggatccttacctcacaccatgcacaaaaattagctcaacgtggactatatcagggtttctcaacatcagcagtgttggcgtttgctggggtggataattctttcctgtggagagctgtcctgtgcactgtagaatgtttagctgcatcctggcctctgcctattagatgccagtggcatccctcccctgacacacacctagttttgacaatctctgtctccagatattcccaaatgtgccctggagagcaaaactgtttccagttgagaaccattgacctaatgtaaaaaataaaatgtacagaagaaagcatagcaggaaatcattctgacctcaggttaggcaaagctttcttagatatgacactaaaggcataattcattaaaaaaataagttgggctttgtcaaaattttaagttttgctcttctgaagaaaccattaaaaaaaaatgaaaagacaagccacagactatgaaaaaatacttgcaaatcatatatctgataaaggacttgtacccagaccatgtaaagaactcataactcattaataaaaggataaagaaaaagctgaagacaattcatgcaagaagatatacaaatattaagcacattaaaatgctcaatattattagtcactagggaaatacaaattaaaggcccaatgaaatacctattacacacccattagaatgactgtaaacaacaagactgataattccaacatctgaccaagatatggagaaactagaactctcctacattgctggcatgagtgcaaaatgatacagccactttgaaacaccatttggcagttgcttaaaaaattgaacattcaactaccatatgacccagcaatttcactctcaggtatataaccaaaatacatgaaaacatggatctgcacaaggtcttgtatacaaatgttcatagcaacattattcataataaccaaaaattagcccatcaactgaaaagtagataaacaaaatgtatatccacaccatggaacgctactcagcaaacttctaaaaagcaacaaactactaaacacgtgcaacaacatgaatgagcctcagaaacataagtgaaagaggtcagacacaaaagactacaaattgtaagattccatttagataccatttctacaaaccgcaaaactgtagaggcacgaaacagattcatggtctgctgcagctggggatgggagtgggaacagagagcaaacattttgggatgatggaaacattctaaaactggattgtgattttggttacacaactgtatacatttactaaaatcaatgaacagaacacttttaatgggtaagccttaaggcatgtgaattatacaccaataaagctattttttttaaaaaaaagagagagagagaacgagagctacatggcagccccagggcaatagctctcagatctcccttagagaaagaactttctcttccacagcaatgagtgcaggtagctaacactgaccaacctgcatctggtagttcatttaaggtcggccttggctttcaagttaaggccatggtctttctctgcagtccccagccaatacgtgggcacagaaaggcacagggcatggctgattcagcccaacatgaggctccacaccctagaactccctgtggagttggccgatactgcctgtgacctgcaatgtggtctaagctgtcagacctccacagtggccagaaggttttccatacctgagcctgcttctacccacttttatttttcccaggagtcacgcttagtcatctcttgctctttgaactccatgtctgtatcagctacccagaggacccatcagacagaaagtaatatgcagataacagcccaggggaatctgggaagcactgtgaaaccaacatttcttcagtgaaacctagaacaaaagtggaataaataaaaactaactgtctcatttcaaaactggca

SEQ ID NO: 265696 - DNA, 1048 bp, Homo sapiens
gtatataagtaaaatatagatgaaaaattgtataatttatagctatctgaaaacaacttttttttaatatttgaacactttgaaatgccttacacttccttgttaaaaatcttaaagggatattaaaattaaatggcacttaattactattagtaattcctaatataatatttaattcataaaagaaaaaagcttaatgttgaattctggcactcatcgggaagatgacattatatgttaagagataatttgtggggcatagtaactatagttaatattgcatacttgaaagttgctaggagagtacattttaagtgttcacaccacaaaatataactatgtgaggtaatgcatgtgttaattagctagatttaaccattgcataatttatatgtatttcaaaatgtgttgtacaccataaatatatacaatttgtatttatcagtttaagaagaagaagaagaaaaaggtaatttgtgggcatttataaatagattgtataggtcagcactgcccaatagaaatataagttgagccacaaatgcaattttagattttctatagccacatcaaaaaataaaataaataggtgaaattttattaatggatttttatttaacccagtatctaaatactattatttcatcatataaacatgattgaactattttacattttttctttttttaaccatgttaagtcttcaaaatctgttagtattacatacttaaagcacatctcaattcagactagccagagttcaggtattcagtagccacatgaagttactgtattggacagtgcaattacagatagtaagtcctatggggtatagggaaagaataacatagaaattgaactgaaccgtaaaggatagctgagaacagaaaatgcttgagaagaatattcccataaagaagtgataggaattaaaacagcaaatacagtttgataccaggtaatagagtggcttgaatccagtttagggaatttggtttgggtgtgtatatgtgtgtgtgtgtgtgtatgtgtgtgtgtgtgtgtgtgt

SEQ ID NO: 265697 - DNA, 441 bp, Homo sapiens
aaatttttaagcagaacattttttacatttgggctttaaaaagtggtgtgtatgtatatatgtaaaagtactgaaataaggattagaaagcaaagatcaagtaacatagtgattatctccaggaatcaagtacaaactttgaaaaaagactggaggtggccaagcacggtggctcatgcctgtaattccagcaccttggaaggccaaggcaggtggatcacttgaggacaggagttcgagactagcctggccaacatggtgaaacaccatatctactaaaaatacaaaaaatcagctgggcatggtggccggtgcctgtaatcccaattacttgggaggctgaggcaacagaatcgcttgaacccaggagacggaggttgcagtgagccaagatggcaccactgcactccagcctaggtgacagagcgagattctgtctca

SEQ ID NO: 265698 - DNA, 298 bp, Homo sapiens
taaacagaaaacaaaacataaaaggctagttggagtctgaatgaaacatagtataaaacaaagagatttatgtaacaccatctttgtactgagaagagcatcagacactcttaaccttaataaacttcaggcaatccacttggtttctattctgcactgccaacccaagttcttcaatttgtcgcagataaatgatacaatttcaaagagctcagtcaagacaatatttaactcaaatatctagaggcagggaacagaagagttttcttttgttgttgttgttgttttttttagaatg

SEQ ID NO: 265699 - DNA, 449 bp, Homo sapiens
cacgagggtcatctctgccaggaatgggtgactttgctggggtctaaaaatgggcagctagtagaggaggtgctgggaaaggaggctgagaaggttggaggaagccaagaggggcagtgatgttgggaagagagggtgttgaaagtggtgccagccatggcggacactgcatgctttgtctgatgaaggatacacctgcaggggtgttatgggatctcagcctgtgtgtcatgggtgctggccttgaggcctgggagtctgactgggctgctggggcctggatggtatgcaccctcatgggcatggaacccagccttatgaagggggcccaggggtttgggtgtggcaccagcttgggatcactgtcacagtgaagttcccttctgcggctctcagctcaggcccactttgcccagaagacatgtttctacccaaccagctgtgttttc

SEQ ID NO: 265700 - DNA, 145 bp, Homo sapiens
attgggtagtgacaccagaagaggcctggcaggagggaggaacaatatacaaaatgtatccctttctcctctttgatccccttattctcctcttcctcctgtacatagagctggaaatagaagtttgaaatacaagaatgtcttc

SEQ ID NO: 265701 - DNA, 415 bp, Homo sapiens
  misc_feature (208)..(208): n is a, c, g, or t
ggcaaagtgagtcacactggacaggagagtctggaagaatggcaggcacagcttgcaagcgcatctggaggtggctggagagaaacatgtactcatccgaagaggggacccatgaccgtggtgtgcacagtacaagagctcgcttgggatctctgataaaggaagtccaccatgcagggttgagctgaaccacagaagcccagcctgngagcagggctccaggactccccaaggatcagaaacctcaatgataaatttccgactggatgatacacactacacctgttcttcagcgatgatgtatggtgtgtctaacatctgcctattagcagctgaattcccttctatgacgtgatacataatgtatggtgtgacacagctgggtaataaacaatgtcagctgcgtcctaaaagc

SEQ ID NO: 265702 - DNA, 552 bp, Homo sapiens
cacgaggcttatttgaaatgcttgggaccggaagtgttgtggattttggattttggattttggaatatttgcattataccggttgagcatcccaaatccaaaaatccaaagtgttccaatgagcatttccttttagcatcatgtcagtgtttaaaaagtttcagattttggagcattttgtattttcagatatgggttgctcaacctgtacaagtaaaacaaaaaccactttggtttttcttaactgaacccagcttgttgctattggtagtcatgtaaaaatatgataaagctatgacatgaataaagaggttgactttttattttgttttgttgttttaatgagactttatatctcaaagtcccacaagcctgggtgatttatcttcgttctcaccttcagttcaaggacatttatccccttgaaaatgggttttccaatcagaccctccatgtcttgttttgaactcttgctgcttgccagagtgttataagtgcttgtttagagtgaggggagatgggctacttagcatcagaatcaccactgtgggt

SEQ ID NO: 265703 - DNA, 235 bp, Homo sapiens
gtcttccctaagatttttctctgcgagggaatcaaactgctctatgaagctctatgaagaggcttatatggaaagatacagagactttctgccagcaaccatgtggtcagcccacacagaagtggatgttccaggccaggtcaaaccttcattcactgcagccccagctgaactctcaactacaacctcatgagaattcctcagaagaatcacccagcaaagccgctcctgaatt

SEQ ID NO: 265704 - DNA, 387 bp, Homo sapiens
tcacatgctgagatgaaagcactgagaggttagataagataaaaatgtgctggttaaataaaagaggggcctggtgtgttttaatgatgatggtgaatgagaagaataacacaacttcagaatttaggagtatacacaactcaaccctgtgcacctcgtgtgtgtgtgtgtgtgtgtgtgtgtgtgtgtgtgaacatgagatccttgctactcactcaatgttgtacagatccttcctattcaatgtgtagtcctcagacaagcagcatctgcatgaactaggacttactaggagtgcagaatcccaggtcccaccccaggtcttctgaatcagaatctatagtctatcaagatccccaggtgatttgtatgcacattagatcagca

SEQ ID NO: 265705 - DNA, 403 bp, Homo sapiens
gcatttctttggattttttttttcaaataagtaaaatgaagttcttaatacctggaaaatatttccaaacattctactcacctttcatcaatactcttattgtcttttgctttttaaaattctctggacaatgcagataataaaattccttgtcagccatccaactatgctgatcacctttctcacaaatgagtgtttcctattcatttgctgccttgtgttaattttctgggctagacagtattgttgaaaatgcaggatagactggctttggttcagttctttttttttttttgagacacagtctcactccgtcgcccaggctggagtgcagtggtgccatctcggctcactgcaacctccgcctcctgggttcattccattctcctgtctcagcctcccg

SEQ ID NO: 265706 - DNA, 405 bp, Homo sapiens
aacagaaaagatatcccataaatagaccttcacaaatatggtaatttgatttttgataaaagtgtaaaataattcaatggagaaagggtggtcttttcaacacatggtgttggaacaatctgtcattcacatgcaaaaggagacatgcatcctcaactttatccctcataccaaaaattaattgactcatagctctaagtattcactgtaagactataaaatttttaggagaacacaggaccacagggacctctttgcttagttattcgggtcagagagaagtactttctttcagtttcatgcctcacattgctgtgtgcctagtgctgtatccgcctatgttgctgccttgagaatgcagcttcatgactgggacttgcttcagtctagggcagggagaacaaa

SEQ ID NO: 265707 - DNA, 513 bp, Homo sapiens
aggagtgatttctgtccgaggctggatggagtggtgacagatttcatcacactatgcagaatggtatgaaatttaaaacttatgaattatttatttctagaattttctgtttaatattttcagatctgaaggcacagaaaatgaaactgtgggtaaaagaggacaactgtaatttattctacaggttcccaagtaaatgcttggcttgtacaaaagcatatttttatatcaatgttggttgtttttgtttctaaaaattgtcagtcttaggtgaaataggggatcagctgctagtcatatgtaaaattggcttcgagaatactagccctgcatacctctgccttgtagctaagtcttaaggctttatcccatcctccttaccatgtggtggtgggagggggatatatctttcctttaacagtgttaagacttcatacataaatgtccctgggagaaataaaaaatgttcctcaagtcatattaaatcctttcttaagagcagaattggattga

SEQ ID NO: 265708 - DNA, 339 bp, Homo sapiens
tcaccccagagtgtgaccttggttcaaaagcttgggttaaaaatccattggttggctagcaccgtggctcacgcctgtaatcccagtactttgggaggccacggtgggtggattacttgagcccaaaagaccaacctgggcaatatggtgagaccctgtctctacaaaaaatgtttttaaaaattagctgggagtagtggcatgtgctgtagtcctagctgttagggaggctgaagtgggaggatcgcttgagcccggaaggtcgaagctgcagtgagctgtgattgtgtcattacactccagcctgagcaacagaatgagactctatctctctcaaaa

SEQ ID NO: 265709 - DNA, 142 bp, Homo sapiens
tacctgtaaaagggtagcacaaggaataccttatgaggaaactcttgtgtctaactctagtggtaaatatattaatctacacatacacagagtgcatgtaaaactgatgaagtctgaataaagttgtgaattgtgtcaatgt

SEQ ID NO: 265710 - DNA, 704 bp, Homo sapiens
aagcaaacaaaggaaggaccttatgaaacgcacccccaaagcaaccaaccaattcaagaaaaaaaaacacacacgtctcagggctccgttggttttcctgggtggggggccctgaccccctgttctagcccggcccaagcaccctccaccccaccccggcctgctgaaaggtgccctgtctacctgagcagagcctccctctccaaggctctgtcgctgtcgctctacaactccctcaccctctccctttctctacttccacctccacttcgctctctactgtggggctctctcttcccccctctgtctcgcctcccccttctctgtctctctctctatcgctgtctctctgtccctctggttctatttctccatccctctctcccttgctctccttctgtagcaggaggagctgcagacaaaacccctcagacaccgagttgtagaagggagggctttattcagctgggagcataggcagactcacgtctccaaaaacctagctctctgagtaagcaattcctgtccctcttaagggcttacaactctaagggggtccgtgtgagggggtcgtgatggattgaggaagcagagggtacgggacgggggtctgcatgcaccggtaattagatcagaacaaaacaggacagggattttcacagtgcttttctatataatgtctgtaatctatagataacataatc

SEQ ID NO: 265711 - DNA, 333 bp, Homo sapiens
cccagttgacctaggggtgaaacaactggaatggaagacttatggagtaaaatggagaggggaggacaggaaatttgaagtctgaaagaaagagatgagggtatgtattcccttggtttctcctatctgctttttggtctgttgtcagtggctgcaattctctacataaaaccacggctctggttgagtggtaatccctcttgcaccatgactgtctctgaattttgagagtcattctttccttttcctctttcggcttacacatgaaaatggcttccttttgtgtagctaggttaagatgctttatttttcttattgattttgtcagggtcc

SEQ ID NO: 265712 - DNA, 373 bp, Homo sapiens
gaacacaacctcctgaagaacagcagaaaatgccctgccctctctcctgccaacaaaacattttttcaattctactcactctaccccttcacctggtaagagtaagaagtactatcacaacttcccatcaaagtactacctaaatatagcatcaaaagaataaaatagtcgggtgcggtggctcacgcctgtaatcccagcactttgggaggccgagacgggcggatcatgaggtcaggagatcaagaccatcctagctaacatggtgaaaccccatctctactaaaaatacaaaaaaattagccgggtgcggtggcgggcacctgtagtcccagctactcagaggctgaggcaggagaatggtgtgaacccg

SEQ ID NO: 265713 - DNA, 231 bp, Homo sapiens
ccccctccccgcccctcgcggctcccccaccctcgcgttcggcagcgccaggctgcgctctccccggtgcacacccggccgcgccgagaactaaatccgcgggctgaaattacgttttaaaaattaacatgttgaagcgtgtgccatttagtgagaggtgttttgggcaaagaatcaatttaactgtgactgaccgacgggcttgactgtattaattctgctaccgaaaaa

SEQ ID NO: 265714 - DNA, 529 bp, Homo sapiens
agtagtaattcatacttaaaaaaaaaaacaaattggagtggtttaaatgtcactccgatcactaagaacctatcatggtccctgtgacctgcagaagataatccagagtccttaacctggttttgaaaacctctcctgatgtggccccatcctgcctatgagccttccttcccttcatgatgttcaaatgcagatgtaaagtctgatcagtgccctcagcctcccaaagtgctgtgattacaggtgtaagcctctgtgccctcccctgaatatgtactttctgctagaagcctggctcccaggagaagagaggaagggacaggctcaatcccaagctcaacaaaatgacaagttactcctcctttcctggagaagaattatatggggagtcagagagaggccagaagtacgctgctaggagattctgcatgtgggaggacacatgaggattggagacttcattttactgtatcatgtctgcataaattcaaactaagttctagcgaatttggaagtagtaattcatact

SEQ ID NO: 265715 - DNA, 293 bp, Homo sapiens
aatgttgctggttcataaggcatactttgagtagcaaggacgaggaataatgctgtatctttaagaatttattagaaacttgtttggcttcctctaaaggtatcactggaaggaaataaaaagcatattttgtatatgcaaagtttcacaatactccactgggctcactcatcttcataccgctgtctatggaagatgagtaaaaatttccattaaaggaaaaccttttaaaccagaatgtaaataggcctttgctgctttcagttggtcagggcaaaaaaaaaaaaaaaaaa

SEQ ID NO: 265716 - DNA, 643 bp, Homo sapiens
atattttaattttggaattgaaaatagaaataagtaaaacagcccagtctagttttagtatgttatgtgaacataactctttagccatttgtaaaagtttgagtttggtggtaatattgtatgatggagatgaatgaattttttagttatataaataattatgtaaataatacaataacagaccatacatttttagacatcattgcaaatattcttttattaaatttaccttttctttaatacctattttttaataggtagaagataatgtgatgtttgatggccaattgaaggacatgaaggaattgggagttaattctgtatgcacagaggaatgcctgaactgttttaaagaggataatggcatgatcagatttatgttttagagagaaaacccatgtgggccctgtggagtatggattgtcataggggaaaaaccaaaggcaggaagaagctcttagaacagtctaggtgtgagaaataacgcagggccagtaggaatggagagaaggaaatagatcgtgtaatattttggaggtagagttgacaggctttggtgatcaattataaatatgccatagaacaggaatcagatgataaacagatgttcttggttttatggcatttgcattcttgtgtatgc

SEQ ID NO: 265717 - DNA, 442 bp, Homo sapiens
taaccagagaaagtaatatgatcagaacattgttttaggaaaattaatggtggctgttgtggaagatggattgaacatagataaataagctattggaatagttcaggcaaggatattaaggggcggtattcaggcatggtagtgttaatgaaaggagaagggaggatgcatgggagaggcttcagtgggaaagttaaaagacttgtctgatgggataatggggatgtaggaggcatgaaaaatcccaccaaggttttgcctgcttttatgaaacaatggaggctggtgaaatgtggggcaaaagagatgtttggtttagacatttgagtttgagatgcttatagattatcaagacataatgctaagtaggcttttggacacatagaactgtagattagggtaaagaggaaagcttagaagttttactaccgccaaaaaaaaa

SEQ ID NO: 265718 - DNA, 413 bp, Homo sapiens
gttcctccatcattctccatccttttctctgctgcaacagactattatgtgagtctgctttggaccactggatttgaaataacaaaaaggaattcatgtgtaatagacttagcattaagatgactctatgacacggatcctgaaacaaattgtagcgttattcatccatatacatcaataaaagttctatttccagacataatgacatttgctggtttggaaactgtttccatcataatattaaagaatattacttttattaaaagtatcttggaggtctgatggcatttgctaattgaatttgaaagtcaagtacaatgagatgttcactcttaatcactatatatgtgggttttaaagttaggaagaccgggcttcaaatctcgggcctgcaactaactagctgtatgaac

SEQ ID NO: 265719 - DNA, 1255 bp, Homo sapiens
ggttactggacaacatagtgtgactgaaaatgattgagtgtcggagaagcccgccatccttctgctcgattatttcattttgcatttaggcttccccaggcttcatttgtgcatgtattttccctatcacaaaccaaaatataaagtctccctggcttaggattgtatgcatattttttcttcctttaaaatgtctccaaatgaaagttccccttgagtattgactcagaagctgaggagttcattttcagtgcacacatggtcagtggaggtggttaggcttcagagataggtccctctgaacagtttatctaaataggtctatggcagttgtttaaaagccagcaaaactcaccaccgtttgatagatggaaattgtcacagaatatgccttctctgacaagtagaagatttggaataagtagtgaggccagaaaaatgtttaaaaaacatgggcaagaataggcagaaactgtatttaggcaattaaaatgtcttttggaagagtgcgtttcagtgatagttgaagagttactaaaaatatatttgaatagtcaggaaaattaagctatgtctttttttttggcctgcagttttggtctgaggcgctctgggcaccatcactcacattgttttgttggtattatttcacctagtgtctgagcaaggaagaggctaaggcttcctttcaacattctgttctccaacctcatttattggattcccctctgctactggtgacaaaaagaatggattatacctttgtgtaattgtgcttgttccagtacttcatgtgaccaaatctaggaaagaataggaatttactgagtttgttaaaagtgggaatggcccaattgttttagtctttgcagcatcttaatcctagagagcagtgaccagtgagaagaggtcaggattttctcagaaatgggggcatgcgttacatggctgtgctccactcaaaaaagttacatgaatgctccccacgtttcagctctcagaagatattttgcttgtttcagtactagatggtcaaatggtaaaggcctagatctgaagttcatgaggaagaaacccctgaaatgacagacactgaatggggataaatgcatctatgtgattaagtagttggtagttcttccagggtttattactcaagagaggaggtagggaaatcgtgcaagtagaaaacttgaaaagactcaccttagaggggatagctaaagagtaaaatgagtaacagttaaataagaaa

SEQ ID NO: 265720 - DNA, 1209 bp, Homo sapiens
ggttactggacaacatagtgtgactgaaaatgattgagtgtcggagaagcccgccatccttctgctcgattatttcattttgcatttaggcttccccaggcttcatttgtgcatgtattttccctatcacaaaccaaaatataaagtctccctggcttaggattgtatgcatattttttcttcctttaaaatgtctccaaatgaaagttccccttgagtattgactcagaagctgaggagttcattttcagtgcacacatggtcagtggaggtggttaggcttcagagataggtccctctgaacagtttatctaaataggtctatggcagttgtttaaaagccagcaaaactcaccaccgtttgatagatggaaattgtcacagaatatgccttctctgacaagtagaagatttggaataagtagtgaggccagaaaaatgtttaaaaaacatgggcaagaataggcagaaactgtatttaggcaattaaaatgtcttttggaagagtgcgtttcagtgatagttgaagagttactaaaaatatatttgaatagtcaggaaaattaagctatgtctttttttttggcctgcagttttggtctgaggcgctctgggcaccatcactcacattgttttgttggtattatttcacctagtgtctgagcaaggaagaggctaaggcttcctttcaacattctgttctccaacctcatttattggattcccctctgctactggtgacaaaaagaatggattatacctttgtgtaattgtgcttgttccagtacttcatgtgaccaaatctaggaaagaataggaatttactgagtttgttaaaagtgggaatggcccaattgttttagtctttgcagcatcttaatcctagagagcagtctaccttggccaggtgcagtggctccttccagcaattccagtgcttggggaggccaaagcaggaggttaacctgaaaccaggagttcgagaccagcatggacaacatagcaaaaccccatctctacagaaaataaaaagatcagcccggcatggtggtgcatgtctatagtcccagccacttaggaggctgaggcgggagaatcgcttgaggctgagagacggaggctgtggtgagctgagatcgcaccattgcactccagcctgggcaacaagagcgaaactccatgtcaaaaaaacaaaaaaacaaacaaata

SEQ ID NO: 265721 - DNA, 461 bp, Homo sapiens
cgcttactgcaaaggtctgcagcttcactcctgaaatcagcgagaccacgatcccaccagaaggaagaaactccggacacgtttgaacatcgaaggaacaaactccagacataccatatttaagaactgtaacaccacgagggtctctggtttcattcttgaagtcagtgagaccaagaaccctcccaattctggacacaaaagtacatcactcagagatctgttaatgacaaagttaaatttgtgagggacgggttggtagtaatattttatagtatttcccatgtttctgcattgccaataaagtagcattgtagaagctgacatctcagaatttacaagtaactaaacatttttaggtgattcagaaagatatatgctaggagacagcaaagaattcaatcttttgccttttcatttcaatcttcaggcttgttaaataaactcctttaactaacaaa

SEQ ID NO: 265722 - DNA, 997 bp, Homo sapiens
cccttcagcctggctggctctccagccatctcggaaagcttctctttcctaaaccctccatactcgcaggttcagctacagaggtaactgcaggctcaggttctccagggtggccagcccaccagcccaccgtcccggtgcagcagtgcctctccagcgacagctccaccgcgagcctggcgggctcccgaccttgctccccagcacgtcgtctccaagccacggtctcaccaccctccatcagcctcgggcgacaccaaggggaacagagcgctggagctcctcgaagtcctcccgaccttagcggggctccgttcatcctcccggacgtggccaggccccgctctggccccgcgcccgcccctcccgcggggctgcccctggctctctgccggagacccggactcagtgagtgagcgcagcgcggccatagggcttcctgcagcggggtctcagcacgtcttctggctggactctggggtctcctggcctggctgtgtctcctggttctcagcgctcgcctcccacgcggggcggagtatgggagtgggctgctcccgcggaagaatcctggggaagttgaggcactggctcctgctgttcagaacactgcccgacgtccccagagctagccactcctccttcccacccacccgcagcactctcgaggtcgcaacggcagtcaccaggtcccggggcctgcgttcagctgcttgatccgactaggtttggcttcggacccgaatgggtcagctccacgcccgatggagtttttcaagctggtgcctgcacgtgcccccgccgcggggcatgaagccgtgggctgcgcccaaactgcctcacaaccaccgctgacccgaagcctctctcactccgtccactgttagaaacctgaagctgccctctgtgagaaagcgttgggattgaatccagacttttggggaaccttaacaataaagaatacaaaatattgactaaaaattggatttgaaagtga

SEQ ID NO: 265723 - DNA, 379 bp, Homo sapiens
agtaaattatctattttctctcctcctgctttttttactggacaaaggaacatgacctggccaaaatttcttctcctgggatgtttgtctgcccggctacttatatccattgtacccatttccaacaaccatgcacccatggctttgcccagagtccctggaatcttttcaggttcatgtaaacttaaaatttatgcaaaggaaatccaccaaggattggagaccaaaaaacaaacgtatgacatcatgctataatttcacacacacagaattattttaaaaatagaatgggttcataaaaatgaaataaattgctgatatgtaaaactcatcatagaaaaatcaatgttattaaaatggttattcataaaataattca

SEQ ID NO: 265724 - DNA, 521 bp, Homo sapiens
cagaattaaagagacctgtgtaggaatcgtgttggtgttagaatactattagcatttctaaggagagaggagctggcctgggaatatagtcatcagatggttttaggaggtcgatgggcaagatcattgtgaaattttagaagagatggtccaaagaaaaacttacctgcttgggtcagtaataatcaactagacaggaaggggaaaattgattgttagtttgattttttagtgatcacttaaaaaaaaaaggtcagtcatgggggctcacgcctgtaatcccagcactttgggaggccgaagtgggtggatcacccaaggtcaggagttggagaccagcctggccaacaaggtgaaaccccgtctctactaaaaatacaaaaatgagccgggtgtggtggcacgcacctgtacttgggaggctggggcaggagaattgcttgaacctaggaggcagaggttgcagtgagctgagatcttaccactgtactccagcctgggcgacagagcaagactctgcc

SEQ ID NO: 265725 - DNA, 424 bp, Homo sapiens
ctaaaatatgttccatgaacatggcagaataaacattaagtcatatctaactgtttacaattatgagacaaaatcagccctggatttaggaaatagttggtgtaagactaatgctatagactaaatgtgtcttcccaaaattcctgttaaaattctaactctggaggtgacggtattaggaaataatgcctttgggaagtgattatctcacaaagtcacagtcctcatgaatgggattcctttcattataaaatagaccataggaagtgctttcatcctttccaccatgtgaggacatggcaagaaagtgcattctatgaaccaggaaatgtgccttctccagacactgaatcatcaggcaacttgatcttggacttcccagcctcagaactgtgagaaataaatttctgttgtccacgagaca

SEQ ID NO: 265726 - DNA, 519 bp, Homo sapiens
tgcaaatgtagctccactgcctacttacaatggtgttaatagtacaggagggtaagagagacttaaagaagggttagtcgaaattctttcagcaacggtggagcataaatatgtattctggtaaatattcgttgagtgtttagcaatttctcgagcacttaactgtgtgccaagtacgcgataggcaacccggcattcatctgagaaagagacactgtcactgcccttatggagcctgcagcttgggggaaactcgtccgcaaactagcaaaatcgttccagattttaatagaatggccagactgagaaagttcaagagacagtagcggtggcggggacggggggaggctcttcagagagagtggcaaggcaagttctctgaggatgtgatatctgagctgaaacctgaagaatgagaaatattcagacaggcaaagaactgggaaagaattacatgccacgcctttcacagcgcatgccactctaggctcttaataaatatttgttcttttaaaaaaa

SEQ ID NO: 265727 - DNA, 427 bp, Homo sapiens
ccttgggtttttttgtttgtttgtttcttgaaagacatatttcaagatacaaagacataattttgttatgagggaaaaaaatcaatgtattctttctatctatgtataaacatcctggacgtggaatgtttaaaatattcaaaggggttgcaatgtcagcttaaaaagccaagagttttacttttcaggggaccaaagtcaagaattggaggcaggaggaaaacataatataaacaaattgtttctttcaacactctaataagttttgctagcaaaaatgactgagctacctaacttcaaggcagtgagcaagtcttctaggttccatgaacacatcccacccacaccaccaggacatagatactcagtttttattaacatgaaaggaaagttgaagggagcagaaataagaaatacatcttacatt

SEQ ID NO: 265728 - DNA, 644 bp, Homo sapiens
gaaagattttacagtaataaaacaaatttaatgggccagttcactctttttcaatcatgctgttaaagtttactattgaaatacttgctgtcttgggaattaccatcacttcagtttatttgcagcctctgtcctaaagtgaatctcacataacaaaagcacttgtactttaaaaaatgtcttaagacttcctactacaaataacagatttaaagcagatttaagacgtgactaactttatttaatccaccataagggatcctaaatgtaaagaatgagactttgtaagaaacaaactgcaaattaatctctagcatcacagaaatattccccattcactgccttttatgactttcaattcattgataatcaaaaacatcagttattctctaattgtatggaaaataactggttgtctataaaaagaacagaactttccaataatagctttaaactttcaaattatcattcttttccaaaattcataaacaagaaagagtcactagctgttactgacatcttttaataaacatggaacttgaaaaaaataattcacagagggattctttcctttatgttcctatctcctttgttctctttcccatgaattcccctctttttattaaattcctaacttcataact

SEQ ID NO: 265729 - DNA, 619 bp, Homo sapiens
cacatcaatgtgtcatatgcacttctgtcctaacatatccaaggctgaacactggacctccccctccataaacagttcctgttccagttttccctgagtagtggctgtatctatttgcccaagtgcacaactcagaaaactcaaaactactccacatgctgacttctgttcacactcacatgaacttatcagaaggtcctttctgttctaaaaatcctctaaaaatccatctgctttccatctgctttgctccattttcattgccatgacctggactgcagtgacagcctactaatgagtatcccccattctccaaccagctaaaaagagtgatcttggctgggcatggtggctcacacatgtaatcccagcactttgggaggcagaggtgggcagatcgcctgaggtcaggagttggagaccagcctgaccaacatggagaaactctgtctctactaaaaatacaaaattagccaggcgtggtggtgcatgcctattatcccagctactaaggaggctgaggcaggagaattgcttgaacccgggaggtggaggttgctgtgagttgctatcacaccattgctctccagcctgggcaacaagagtgaaactctgtctc

SEQ ID NO: 265730 - DNA, 549 bp, Homo sapiens
cacgaggaatgacaacataaatagaaaagcccaaaaggaaacttaaacatgcagacttgtcatcagaatcgaggagaagggtgagctgtttaacttcagctgagcagcatatttgggttcaggggctagtttgagccagggtttaaatcaggcacaggccagagtgatgtcccatgggtggcccgagagtgggctcctggcaaccttccctgatctggaagcttcaccccctgcacctcctacctgtcttggatacagatcacatcacattgtgatcatctgtgtttcttgagtgcaggaattatctgtctcttctttgaaaccccagcccagggttcaatgcctggtgctcgctggatggatccttcttgccgatggacacattcacttggcaatgaattctgtcttatgtggtgcatgacttcccaactaggtggggaacttgctcacttgccatgtcttgcactctgaccccctctcccccacaggaagcctacatatagtaggtgctatactagtaactgacgaagcgacacacatcccaacctg

SEQ ID NO: 265731 - DNA, 172 bp, Homo sapiens
ggtgttccatggagagggagaaaggaacaagcttggccaattcattcaactccttataaaaatgatgaggaggctgaaaaccaagaattttgattgggaacagaatacaagcagctgaagcagatgaattactaagcaacaaagatcctgtttttatacaaatatccttagt

SEQ ID NO: 265732 - DNA, 486 bp, Homo sapiens
tgattcgtaagaccttcaggatcctgtagtgcctcagggtcaccattaggtttatcatcatccttgatgaggtggggcagctgaataaaagcaacagatttaaaattacagatcgcactcccaccctgcctacttgggtggtattggacaggtgactttgacctctggagcctcagagtctcttccaaaataagggtggcagcattacctcatagggttgtcatagcagaaaactatgtgcatgaagaatattgtccttatcatcattactattaagctacaaggacatcaaactgccagctgatacaatgtcttttttttttattttaagcatgtttcaaagccatttactttggtctccttttaaggaaaatgacttccccagcagcaggaattgctgagaaagtgatatttagtcaagtgctaagaagagtgctataaaacattgtttaacctgcagaagcagtataagtctgttgttaaaaa

SEQ ID NO: 265733 - DNA, 335 bp, Homo sapiens
aaaataatttgagattaaaggaaacaaaaacacacccaaaaaatccataacaaaacttatgatatgcagctaaagcagtgcttaaagggaaatttataaacaccaaattataaaaagaaaaaatattaaattaatcatctgtttaccttaaactagaaataaaggaacaaactaaacctaaagcaagaagaaggaaggaaataataaagactagagtggaaataaatgaaatagagattataaaagcaatagagaaaaacaaattaaaccaaaaatgtcttctttgaaaagatcaagaaaattgacaaactttttgttatgctaaattgaccaag

SEQ ID NO: 265734 - DNA, 561 bp, Homo sapiens
tctgcttaaacctcacaggctcggagatgagtgattaaaaagccatctcgaacttggatggaatccacattggtagtaatgccgcatccgcactggctttcttcaggccccgtgtcattgggaaccaggcccagggaacatttgactggagatgatacatggattatataggtcaattatacacttaatctgccttctggaggattaagtatttgcagattgactctgcatttggcttctccgtggcagttatcagatcaggaaagggcctcttaccaaaccacctcgtaagaacttaatcaagcagtgtggtcagcttcggaaggggctgctactcagtattctttgcctcgcacggattttaatttgctgttccattttcaaatcgtgtatttgtccagtttgtgtggcagaacaataattgagtgtgactagttcccttgaaaagggtaatttgaaacatgaaacctttgcctgttaaaatatatttgctatatttatatatgaaaccacagatacccttattttaacaaccttattaaattactaaagcaccataca

SEQ ID NO: 265735 - DNA, 495 bp, Homo sapiens
catcacaaacgaatattgcagcaggtcaaggggacactgctattgtgtgcacactgatggagacccagagtaaaacgtggcctgaggtttgccagaatgtgcttaagaagcaaacctcacatacctgaaactctcttcgtgccctcctgtccttccaaaaactatcagttcgaatatcctgagaaatgtcacataggtaagctgtaggaccatccttgagaggttgctgttggtaaaaaccaatggggccagaaaacatgaatttatatcccagcactctgggctataactttgagcaaattaatctctctgatattctattatagcaattgtgaattgacaatgtcatcatagcccatttcttatttctgaaaaagtgctttttctggatctcattcacttaagaactcaaattctaaacatggagaccatcagagccaaggtccttgttaaaagaaatgtatgttttatatattaaagtttaaaagaaatata

SEQ ID NO: 265736 - DNA, 697 bp, Homo sapiens
tagatgttctgacctttaccttctttccttgcttagttactcccattactaaggcttccagtccttttagcctttgtttctatgtcacattaaattaatgaaactagataactttggatctccttaagccatctgaaactagataaaccaatgaaactagataactttggatctccttaagtgaatgccatgagtgcatgatgaccaaacactagaatctggggacagactgtctagatttgaatcttgacaatgcttcttcctagcagcatgaccttgggcaggctacttaactaagactcagtttcttcatctgtaaaatgaatacagtcatattacctacctcataggctagtcgtgaggatcaataacatactgtatataaaagaacatatgtaagtgcctaggataagtgaggagctagatggttgttaagtactaactgcagtaccaggaatttcataggaagctataacagctacatatgtgtgccttcataagccagaaacacttattcagtgaattgtcaactacttattaaacatgtcctctgaacataggactctgctaagctcagctcaggatttgaagctgaaccttgaagtttcattaagtaggatttagttaagtggagaagaagactgatcgacgttgttcagtatggcaggtggcctctagctacgtgtggctactcagc

SEQ ID NO: 265737 - DNA, 389 bp, Homo sapiens
gtttactgctctatctccagcacataataggtgtctgataaatatttgttgaatttctacgtaattccctaggatgcatggcttatgcatggctttaaaaattacctaaatgcaggctagacacagtggcttacacctgtaatcctagcaccgtgagaggccaagacgagcggattgcttgatcccaggagttcaagaccatcctgggcaacatggcaaaaccccgtctctactaaaaatacaataaattagccaggcatggtgatgtgcatctgtagtcccagctacttgggagtctgaggtgggaggattgcctgagcttgggaagtcgaggctgcagtgagctgagatcgtgctactgctctccagcctgggtgatggatgtgaga

SEQ ID NO: 265738 - DNA, 472 bp, Homo sapiens
tccgtctacagctgggaagggtcctggcctaaaacccacttaagaaaacaaatgagcagcaacagtacatccaaagccatgtaaataaatatgtcccgctcctccactgtccagctgcatggccttaattctctgagcctcagtttcctcatttgtgtgaacagcatgatgaacgatagtgtctgctaccagagctgtaaggagcagcactgagcacgcccagcagccggaggacagcacctggctggcagggagtgcacgaatgtgctgttgtgtgtgtcagtgtgcgcacgagagagagagagagagagagagagagaaatctggaaggagaccaaccaatccaaaattacgctcaggaggctgggccagtgactgactttagtttatctatatttgctctttttttccacaactttagaaagtgaacttactcacttttgtgggttctaaaactactttgaaaaagaaa

SEQ ID NO: 265739 - DNA, 444 bp, Homo sapiens
cgtcacttgaaacagcagagctagtttaaaaggctgatagatgtaactggaaagacatccagtcctacatccttcactgttcaaaaaagataagatatatatatatatatatatatatagttgtggaaacatcagttcctattatagatcattatgttcttcctctgagatctcctcccagcattttgcttcttaatttccagcgaaagcctctcttttttagcttcttccaacttctcttgaggaccaagttaacaacacccagaaaaataatcaccagcagcgagcgaccttggggtccttttctgcaatctctagcttgtgatttttcgcaagcagtttgtgttagcatttgctctgcaaaaggttttttttttcttttttaatacctaaaatcacaataggaaagactaccatcgtggtcaggagcaggtggagaaaaaa

SEQ ID NO: 265740 - DNA, 646 bp, Homo sapiens
ggtaccatccataatgtgtgccaggaaaagggctgccatggtggagcatgcacacgcatcgtgtgtgtgtctatagaatctgcagatttcatcagctttttaaagggctgtgaccgcaaaagtgtaaggatcacaggaatagactctataaaacaaccagcagtgatcagaaggaaccagttttcctttctgaaaggccgaagttggtattaaatgctttagcttagcagaaattgaaagagggtcatgaaacaccgatggacattgatagcgatgattccaaagcagcttctccgccactcaagggctctgtgagttctgaggcctcagaactggacaagaaggaaaagggcatctgtgtcatctgtatggacaccattagtaacaaaaaagtgctaccaaagtgcaagcatgaattctgcgccccttgtatcaacaaagccatgtcatataagccaatctgtcccacatgccagacttcctatggtattcagaaaggaaatcagccagagggaagcatggttttcactgtttcaagagactcacttccaggttatgagtcctttggcaccattgtgattacttattctatgaaagcaggcatacaaacagaagaacacccaaacccaggaaagagataccctgg

SEQ ID NO: 265741 - DNA, 803 bp, Homo sapiens
actgaattactacaggagatatcagagatcgaaaaaaggtatgacatttgcagcaaggtttctgagaaaggtcagaaaacctgcattctgtttgaatccaaggacaggcaggtagatctatctgtgcatgcttatgcaagtttcatcgatgcctttcaacatgcctcatgtcagttgatgagagaagttcttttactgaagtctttgggcaaggagagaaagcacttacatcagaccaagtttgctgatgactttagaaaaagacatccaaatgtacactttgtgctaaatcaagagtcaatgactttgactggtttgccaaatcaccttgcaaaggcgaagcagtatgttctaaaaggaggaggaatgtcttcattggctggaaagaaattgaaagagggtcatgaaacaccgatggacattgatagcgatgattccaaagcagcttctccgccactcaagggctctgtgagttctgaggcctcagaactggacaagaaggaaaagggcatctgtgtcatctgtatggacaccattagtaacaaaaaagtgctaccaaagtgcaagcatgaattctgcgccccttgtatcaacaaagccatgtcatataagccaatctgtcccacatgccagacttcctatggtattcagaaaggaaatcagccagagggaagcatggttttcactgtttcaagagactcacttccaggttatgagtcctttggcaccattgtgattacttattctatgaaagcaggcatacaaacagaagaacacccaaacccaggaaagagataccctgg

SEQ ID NO: 265742 - DNA, 374 bp, Homo sapiens
caatgtaaataactccaacttctttagtgggactaagtagtgagatagaagaaaagcacacacgatgaagtaaaacttgaaaaatggtgtggatcttatagcacaagtttgtaagtctgattcatagttttatttctccacagtttgacccttactgttcaggtacttaatgatgcattctttatcagatttaaaattactagaaggcaagttattttctttttctgagaagacgaagagtcaaaagcaaaatggaaatgtctctaagctatttaactctgtatcttggtctaaaagtatactgaaaatgttctttgtacaaatacagctccagttctggacaataattaaatatttataattttaaagcttca

SEQ ID NO: 265743 - DNA, 449 bp, Homo sapiens
taaatactgaatgaatgaatgaagcactaaactgaatgcatataaggcaaagacacaaataacttaattttgtgcagccaaatcagtttgtaacttcaccaaacagttcacatcaacatttaatgagcgtccctttgcccaaggcactgggtgaaggatgagggggtattggtttgtgtttatgtagaattttgcagtttgcaaagtcccttctcttacatctcttcatgagggtttcacaacgactctgtaaggtaggggttgtcattattcctgctttcccgataaggatacagaagctcagagagggcagacatttgacctggagtagaactagggcaagaatacaggccactgtgtgccccctcctcccacgctctgtttctctctgaagatgacctggggacagcataatacaaagtggatggaatgggctgagaaaggagagg

SEQ ID NO: 265744 - DNA, 421 bp, Homo sapiens
catggggtccctgattagctgatctgagctggggtggggcttggcaatcattggatccagtgcttttcctgaaacatgagcattgagtttcctgcccacacaaccctgggcttaattaagtccaagcaacaaacagggtcctcagtatgcttaaaggattgacattggatggaagacaattcaatgtttgagaaatccctgcagaccctctgggagtgtcttgaattctaaggagaccatcttgccctacttccttatttgacagaaatggaaaactgtggctcactgaggtggagtgaaataccccaggtcatccagcaaggtgagggtggagcaaaggcttggtcccatggcatatattcatccatctccttgcccatccgttgtcttccagcagaatgtaagctctgagaagataagg

SEQ ID NO: 265745 - DNA, 570 bp, Homo sapiens
ggagttggaatcaggctgttagcgataaaagggttcaagttgactcattttccttatcaggcttagtagttgaagtgacttgctgagcttcataattcttagagaacctgccatgaacccagctccctttctatgactcaccctgccaccctgtgacacatagagtctgaatggcaggtctggggctagaacccacgtcatctggacttggagtccagtgaccctttgggttaagcatgtgtgtgtgtgtgtgtgtgccatgatgcgggaggaaggtccctgctctctgtagctgttttcttcatcctttgctctacaagccctaacagccgattctgtcatccctagtctgcccctctcctgtttctccatctcctctgaccatgatttttttctgtccctggagggatgatggtctcattctcacctcctccacgaaacgtgttagcttttcatattcctagatccactcacttctcatcatctttttttttaaacaaaattttattgaaaaatgtaatatgacgtgtcaaagttgtaaagttattgagtaaataagcatgtatccta

SEQ ID NO: 265746 - DNA, 385 bp, Homo sapiens
taagtaaggtaatattgatattaatagaacttcattttatttgcatcatttacaaaaatttaacttccagttcaaccgactgtgaaaatttatgttatttaaagtcagtagaccaattgatatgcaaagaaaatggccattttaaaatcaggatttgttctgcattattttcagtttgggatatcacaatgttttcagaaatatatctcattcataataagtgatgactgagttttgtgtatttgttattttattgttttattttgtttttctaaagagactttgcctactacttagaagcaaaatgaatatatttcacagtgactactgagctctccactggatattgaaatgtaaatgattaaagttctatacgttcagccca

SEQ ID NO: 265747 - DNA, 509 bp, Homo sapiens
gtggtcataacaaatttatagacaaatgaagggaagtgacaaatcggaagtgaggtacacagtggctggattggttacagatttgcaattgtcttatttgaacacagttagaacactcagcagtccatgagtggttgaaggatggctgctgggattgcccaagacgcagctactgttacaggcgcatactcctaagttaggctttcaatcttgtctacctattaagctaggttacagttcatccacaaggactcaaatatagacatacggagtccttctcaggcaatatttagtttgctttaagagctataaatgctagccaaaaccataaatgggtatggggcatcggaaggatagtgaagaaacaggagtggacaagtcagcctttggggtacagttcagaccatcctgggtaaatgttgagaagcaaagaagcaaaaggagacttagtaggatatcagaggaaattctgtgacatatgtgttttattcagaattggagcaaaagaa

SEQ ID NO: 265748 - DNA, 316 bp, Homo sapiens
tggccccaaaactggccataagcaatatctctatagcactgtgacatgcttctgattgctatgatgactacaatgaaggttgtttatcagaatgaaggccaaggacacctggcacacccagggcagaaaatcactgaaggtattcctgaaccacaaataataccatgaacgatctgtgcctcaaagacactttcccactgcagataactagccagagcccatcctttgtctcctgttttagttaacctgtaatctatagaaacaatgcttatcactggcttgctgtcaataaatatgtgtgttaaactctgtttat

SEQ ID NO: 265749 - DNA, 211 bp, Homo sapiens
cacgcagtggggaggggcgaggggtcccagggccagcagctcccatcctgctgtgtccatggccctggaccctggaccctgtgtcagtgtggctgcctctcccctgagcttctgggctgagctgttactgatgtcagtgagagagtaggacgctgtagcctctagggctttggtaagtcagccctcaagagtctctgatccccaaacttga

SEQ ID NO: 265750 - DNA, 455 bp, Homo sapiens
aaataatgaaacaaaaatagataccaatcttaaaagccttcttgtggggctaggcacggtggctttggttgtaatcccagcaccttaggaggccaaggtaggagaattgtctgagcccaggagttcaagaccagcctggggaacatggtaaaaccccaacaggatggatttgattcctatacaaattgaagctgccctgccaaggagggcctgcctggaggggatgagaccttcgtcctgaggcctcagagtcaggggatcaggagtcggggagctagaatagaagcacacagcctgggcacggtggctcacgcctgtaatcccagcactttgggaggccgaggcgggtggatcacctgaggttaggagttcgagaccagcctggccaacatggtgaaaccctgactctactgaaaatataaaaattagccaggcatggtggtgtacccctgtag

SEQ ID NO: 265751 - DNA, 481 bp, Homo sapiens
tatttttgtggtcttagaaaaaaattattaaatgaaccaagtaagcagaatatacaacattttcaaatactaaagaaaaaaatcattgaaaattgcaaaattttaggctccaaaagactcactaatttaatagaagcagaaatcctacagctagaaaatttgcagatagaaaatatatttttcagcttggaaatcaaaatggaaactacaaattcaagcgtaaccaacaaataatatatacctacatatcgtgtaactttttgttgaaaaaagacatttcgaatattatagtaattttgaaatcagattatcatccttcttctgtgtttttgttgctacctattgcgacgtgtgctctgtcatgcatgtacattgacatctctgttccattagcttggtagtaagctactgatttgcagagattttcttaaatgtttgttatttccccacttcctccaaataaattttataatgttcaaat

SEQ ID NO: 265752 - DNA, 422 bp, Homo sapiens
gctgagtcagggagaactgcttgaacccaggaggcaggaggcaaaggttgcagtgagccgagatcacgccagcctgggcgacagagcgagaatccatctaaaaaaaaaaaaaaaaaaagtgtctttaaagtgaggtatagtctttctctgatccacttttcaccttctgaggtttttcatcttggcccctgaaaggagctatttttgaaggacttgtgttactcagtttctacaggaattacaagataagaaaaaaaaaatcatatttagtcttatgcgtgcctactggctaatgttcacatatgccaaacactactcaataacataaaataatgtatgaacttattctctggaaatgagtgatgccctctgctctaagtagaccatttatattaaatatcataaatgtataaaggacaaaa

SEQ ID NO: 265753 - DNA, 585 bp, Homo sapiens
tattcatcgagcctgtacctgtgggtagcacaaacagaaatagcggcattgacgtgggccatggagaggcctaaacagatgactgcagtccactgctaaggtcatcaaaggggtgactctgaaataataaatttcagacgccacggcccaaatagctgcatgagctggggaagtcctccacatgcctctgcttccttcggtacctgtttatgaaatcagccaaggtacttccctggggaatttcctttctctttctttctttcgagatggagtcttgctctgtcgcccaggctagagtgcagtggtgcaatctcggctcaatgtaacctctccctcctgggtttcagcaattctcctgcatcagacctctgagtagttgagattacaggtgcatgccaccatgcccagctaatatttgtatttttagtagagacagggtttcaccatctaggccaggctggtcttgaactcctgacctcgtgatccacccgtcttggcctcccaaagtgctgggattacaggtgtgagccatcacgcccggactttttttttttgagacgacgtttcactcttgttgctaccacg

SEQ ID NO: 265754 - DNA, 362 bp, Homo sapiens
tattcatcgagcctgtacctgtgggtagcacaaacagaaatagcggcattgacgtgggccatggagaggcctaaacagatgactgcagtccactgctaaggtcatcaaaggggtgactctgaaataataaatttcagacgccacggcccaaatagctgcatgagctggggaagtcctccacatgcctctgcttccttcggtacctgtttatgaaatcagccaaggtacttccctggggaatttcctttctctttctttctttcgagatggagtcttgctctgtcgcccaggctagagtgcagtggtgcaatctcggctcaatgtaacctctccctccacgagccggtaccgagctcgatcac

SEQ ID NO: 265755 - DNA, 369 bp, Homo sapiens
ttatcctctacagtcctttctgtttacttagttctacaactgcctcatctcactgtgttcttgtagtataactgtggggctcttccccttttagttaagaaagaagcaagacctggagagaataacatgctcaattatggagccaggactttacatagctccctctgctgttttctggaagctctgagaaggcggtgcctacagttcacaactccaaaagcacccaacacattgttatcacaataatttatagccaggatgcctcttccacctgagagtgagctgcctgagccctcaggtttatgtctccagccccgaacacaattccaggcacaaaggaagttctcaataaatacttgtgaaatgaaa

SEQ ID NO: 265756 - DNA, 454 bp, Homo sapiens
ggcttctcagcttttgatattgggtgaaaggaaggatgagaaagtgttacgtctgtcatcagaggagcctgggatgcgtgtgagcttctttgttacccttgtctaatggcttattcttggaacccaggcctgtacactagtataaaactgttaccacctgactagctgtggtctctaaataagaaagtggaaccagaaaatctttccccatccctctatcacaattaatgacagttctttgtggaagcccaggactgccattcccctttcctctttgaatgggtatcagagatttgcagcactatttgcttaaggttttttcttcatgttctgctaacctcctttcacggtctgaataagtgagtgggaattcctctaggataggaaaatatattaaaaagtcaaaatttaaagagatacctgtcaaaatatatggctgaaaatgacacgatga

SEQ ID NO: 265757 - DNA, 495 bp, Homo sapiens
cacctgaccctctgcaggtcataaagggtgaattctccccggaaaagtgatcgattcgttgcctgagtcgtccatcgatctgggcttgtgtaactaccctgtgcatcatttaccaatgacaacgttacagactctgcataacaccactgccttaagcccagggctcccctggggaccctccccaagctggcgacagggaaaggagcatacaatggtgggaaaacccacccggttggaggccagctcaccgtgagccccaggctctggcattctcacccctccctctagtctggaaaacccactttccaagccacttgtccgtggtccctggacttggagcacagttactacttaattcaatgtagcttccccccttctagttcaacatttttttcccattctgctttcaaacatttaaagggtagtgttttcacaactactccagttgttacacaatcacaataaagctttgtgactgtggaccaatgtgaaaca

SEQ ID NO: 265758 - DNA, 364 bp, Homo sapiens
caaagtcagtatttctatattgtttcaatgaataattggaaaataacatttaaaaatatataccctttataatagtgtcaaaaatataaaaatgtataagtttaagaaaaggtataaaggatctccactttgaaaaccacgaaacagaaaaaaagaaattaagaagcttaataaatgtatgtatatgtcatgcacttggttggttgcaagactcaatattgtaaagctgttcttctcccctaagtgatcggtaagattgacgtacttctaactcagaatgggttcttggtggaaattaataatctaacatgaaatgttatgttatatgcaaatgcaaggacctaagatagtcaaaatcttgaaa

SEQ ID NO: 265759 - DNA, 383 bp, Homo sapiens
catgtgaattcccacaggcgttcagaagtttttttctgccctgtaaaagttcccaaatgggtagactagtttatattttgatggccattagtatccggagttctctgtcatggttctgatgccaggggcacatactggcatttaggacccaattgtttgcaaggagttttggaagtctaactgcagcccttttctggaggctggacttgacttggggagggggagaagtacttgctcttttctaagatttgcctccaaattgctactgaagcacattacctgtcttactatgaataattgtaattgtttctcagtgagcatgctagctactttagatatattatgtaatttaatcttcagaatctgtgacagagaaaaaaaat

SEQ ID NO: 265760 - DNA, 435 bp, Homo sapiens
cgtgttctttagatgttgccagggatttttaataaattagctaagaagtgtgtgtgtgtgtgtttttaagagatggggccttattgcccaggctggactcgaacttctgagcttaagtgatcctcccacctcaggttccctagtagctgggattacaggcaggtgtcactgtgcctggctgaaagtatatactgaatgtttcatacatagcactctcctagaaataggggcaggaagtaaatgtcatggttgccttgcctgaaaggaacttaattttgttgtggagcaagtgcaaacacttaagaaaacaaggaaggctgggcgtggtggcttacgcttgtaatcccagcactttgggaggccgaggcaggtggatcacgggaggttgggagttcaagaccagcctggccaacatggtgaaaccccatctctact

SEQ ID NO: 265761 - DNA, 673 bp, Homo sapiens
ccattgtgttgccacccgacgcttcgagcattatgcacgctctatacaacggggagcgcaattctcaaattctcattgtggtgcctgggcgctagaaatgcctttctctctataccaccaacaccctcctttccttgggtacactgtctctcttcccttctcctcctgctcacaaaggcaagctctttcagaagtacgcagaaagggcgattttggccttcagttttaatgatagctgtctttagacataatgaattctaattgtagattatttgtggatggtctgagagtcaagagttggtgttagtagggacttgttaaatatatttcctttataggattcataatctttcaatcacattatcactatataggagttaataaaatccagcgtcaatacttcatgattcacaggtgtttcttgtgcctcatttcattcttatgatcaatatctgctggatcgtaatcctcccttttagcatctggcacataaatgactttctgtatgatgctaattaagtaaaatgaatttcaggacaaaaaaatttcccacttctttactaatgtttatagatagatatttagaaggaaatgcacaacttattttagaatgacatagtatacaccaaatcattataacttttattatgatttttacattcaatatgttact

SEQ ID NO: 265762 - DNA, 619 bp, Homo sapiens
ttattaggttttgtagccaaaaacccaagagcaataacaagctctatagacaataaacacaattctcaaattctcattgtggtgcctgggcgctagaaatgcctttctctctataccaccaacaccctcctttccttgggtacactgtctctcttcccttctcctcctgctcacaaaggcaagctctttcagaagtacgcagaaagggcgattttggccttcagttttaatgatagctgtctttagacataatgaattctaattgtagattatttgtggatggtctgagagtcaagagttggtgttagtagggacttgttaaatatatttcctttataggattcataatctttcaatcacattatcactatataggagttaataaaatccagcgtcaatacttcatgattcacaggtgtttcttgtgcctcatttcattcttatgatcaatatctgctggatcgtaatcctcccttttagcatctggcacataaatgactttctgtatgatgctaattaagtaaaatgaatttcaggacaaacaacttattttagaatgacatagtatacaccaaatcattataacttttattatgatttttacattcaatatgttact

SEQ ID NO: 265763 - DNA, 820 bp, Homo sapiens
agaagaaattcctttggattttcatgggggagcaaccaagaagagttcttcagaaactcagatttaaaaattccttttctagagaattaaaatatattaataacagatttgactttagataaatgtcacactccagtaaagagactttaagaattactcagtaatcaaaccatgtgaattcaatggtctgcacgcttggaatcttaagaaactgctgatgatgacattggctgcctcggttttaggaactgccagaaatagccactaaccaagagaaagagagcaaggactagccctgaataattggtcaacgatgctgatttcgttggtttcctgttccttttgcttcctggaaaatacagacctacaaagcaaacattgtgtgtgggttgatgctacagcatcgtctgaacttggaaggacgatcgtggattctgatgcctcgtggtctcactacaggtctaattttcatgtgttttaggagtcttgggattaggttatgtactctgactctgggcaaatggaaacatcaggcgagaattatttatctcataacatttcttacaaggtattaacttttggaccattttggagaagatgagcaaattcatttctcaagaccagcagggttggttgctatgagcaggcctgggtcagcacataagacctgcccttgctgacctgggaagtttctatatatgatgaaaatctttttcgtaatcggatgatggtaactggcagggtgtcattagatcatgtagatgatggcttatgttaacaacaactattttgttaaaaagtatttgttgaacttctactt

SEQ ID NO: 265764 - DNA, 315 bp, Homo sapiens
gtcacatatgtcaatgaatttccttattagctgtaacttaaaaatacataaaatatagtatttcaaaaattatttttatctaaaattttgtgcaagtcacctaattaatcactatgtcagtataagatttctctaacatggctgggcgccgtggctcacgcctgtaatcccagcactttgggaggctgaggcgggtggatcacaaggtcaggagatagagaccatcctggctaacacagtgaaaccccatctctactgaaaatacaaaaagaaattagccgggcatggtggcgggcgcctgtagtcccagctact

SEQ ID NO: 265765 - DNA, 97 bp, Homo sapiens
aatagaaactagtatttgatgaggagaatggcattcctttggaaacccatctcattcttggcagttaattagttcttactgtgaacatctaaccctt

SEQ ID NO: 265766 - DNA, 99 bp, Homo sapiens
cccccacgccccccaccccaaaaaagagggagatctgaaacacttctggtctcaagcattttggatgaagaacacttaatctgtatgttttctttatag

SEQ ID NO: 265767 - DNA, 395 bp, Homo sapiens
gaactttcagaatctgctggccttctatcacagtcgctctgctgcagagcaccatttttgctattataggcagtaagccagctagcaaacagccatgctggggtacttgccaaactcaacaaatgccatttagaaacaaaagaacctctaatggagacatcagccgtttgttaaacaaaccattagtttggaagcagaagctgcacatgtgatgaatctactaatttacagagcattattggacattagttaattgccagacaacttcatgtcccaggatacattgaggaagcctctattactaaggagagattggatgtcttgcctgttaatgattacaggacgcatatacaagaatgaacgagtgagtagctcctgcatcatcctagtgtttc

SEQ ID NO: 265768 - DNA, 476 bp, Homo sapiens
actgccctgattgaatgagttggtatttgttcctgtttctgttttttggaattgtttgtaaagcattgagcttaattatttaaatgtttgttagaattcagcattgaagccatcttggcctgggctcttcttataggtagttttttttctttttagtattatggtaaatatatatataacataaaatttactattttgacagtaaaaaggcaacctaccatatgggaaaaatatttgcaaatcatacatctgataaggggttaatatcaaaaatacataaaggattcctacaacacaacaacaaaaataatatgatttaaatatgggcaaaagagttgatagacatttctctaaaaatgatatacaaatggccaagaagcacatgaaaagatgtctagcatcactaatccttagggaaatgcaaatgaaaactgtaatgagataccaccacacacccattaggatgggctactatg

SEQ ID NO: 265769 - DNA, 464 bp, Homo sapiens
tcttttttttaccttaagtattataaataattgtaaaggtcctttttactagtttgatgagagttttaaatcatgaataaacatttaattttgtcaaaaatattctaaaattcaattgacataacatgtagtttttcttcttttgactgttaatatggtagattacactggttcattttcaaacactgaatcatccttgcattcctagtcatggtgtattattctttttatagattgttggattcaatttgctagtttaaaaaaacacattaaaaataaaaacatactttttaataattattaaacaattttaaagtgcacaatgcaatggtttgtggtatatttacaaggctgtataacctataccacttatctatcccagaacattttcaccaccccaaaaagaaaccctgtgcccactaattgttactccaaattatcccaattattccccattacctctg
